United States Patent Application Publication US 2011/0183924 A1 - sequence listing, part 48

SEQ ID NO: 128969 - DNA, 624 bp, Homo sapiens
ggccctttaggattaggtcccgccaacctggctacccactttccatccttatattgagccatttgctccactctaccctgcccttgagacacagtgagcctctctttgaacacatcacgcatgttcatgctgggacctctccttggcttttcttcactcccatcgcaactttcactgcctagggaagtgcgatattcattctctgtggcccaaatcaaatgacaaataatcttcccgaattccctaaaagaaatctggtttggtatattctgttattatgatctttataagttgctaccatgtattcatctagtcatctccccaacctcaagtaatgtgtaagacttggaggctaggaacccaactttattgggaagccaactttattgctctatttttcatataaacctagctttcagtaaatttaaatcaccttctgcttatccatccaccagtatgcactgtgattaattaacaaggcagtttctgcattaacaccaaactttccctcttccctgcctatgaccaagttttcaaaaaaaattaaaataacattaaaatgttattaacggcaaaagggaattattttttgaaacatctatgattttttactaagaaaaagga

SEQ ID NO: 128970 - DNA, 591 bp, Homo sapiens
cagtttcagtcacaaataaaaacagagcaccactaactacaaaagaatatgcaaaaacaacgtggatgatatagttgtagcatttccatattatcaaaaaagaaaatacaatgaggaaatgaaatttggtaagatgttttcagattataaagcaaggtacttggatgatataatggctaaaacacatcttaaaagcaggagtggagtgttcattgagagaaataaagaacatatatatttctgtgtttgtggacacattgtatagtatgaaaactgacaaagtacatatatatatatatatatatttaaatgcatgtattccatatatgtgtaggtatatcttaagattttctgaagtgaggtaattgtttattctttctgtttatatgaaatcaccaaaaatatctttttcacaccttgcaacctaaatgcctctgataatgtcatgacatgacttttgcctgccttttttatctttcatttttttacctggttatatagctcccttttccgcatcaatagacacttttttgttttgcttcttcattcttcatgaagatggtgccaacagctgaaggcaggtatatgcgt

SEQ ID NO: 128971 - DNA, 460 bp, Homo sapiens
gatagtgtttcttactgtaaatagcatcttagaatggaagaataaaacactatatgccccattgcttctagagtaacctgagcaatacataatgaaggccaaatctcctttgcttttacccttccatggcttgccacagatctaagaataaggtaccaaatctggactggactatagggccttttgtgactggcttcctgttctatcaagacttctgcgcactttttcacatacagtgctccctttgtctcagtgctctcctcttcactctgctcctcaaaaatgcccacactaagaagcaatgcagtggttaagaatacagactcaggccaggcatggtggctcatgcttgtaatcccagaactggggaggctgaggtgggcggatcacctgaggtcaagagttcgaaaccaggctggccaacatcgtgaaaccctgtctctactaaaaatacaaaaat

SEQ ID NO: 128972 - DNA, 790 bp, Homo sapiens
taatttttgtatttttagtagagacaggatttcgcaatgttggccaggatggtcttgaactcctgaactcaggtgacccgcctggctcagcctcccaaagtgctgggattacaggcgtgagccactgcacccagccctaattaatttttaattgacacatatggtacatatttatggggtacagagtaatattttgatacatacaatgtgtagtgatcagatcagggtaattggcatattcatctcaaacatttatcatttctgtgttttggggacattcagtatcctttcttctttatttgaaactacataatatattattgttaactatggtcatcctacagtgctataaaacagtagaagttgttcctcctacctagctgtaattttgtgttattgaacaaatctctccctatcctccccttccctctccagcctctagtaacctctgttctgcttttcacttctatgagattaactttttctttttttttaacatctaactatgagtgagaacatgtggtgtttaactttctgtgcctgacttatttcatataacgtaatgttttctagttccatccatgtcactttgaatgatgggattttattctttttaatggctataaatattttagatgtctggcttaatagaagacagctgtattctcaagccagctatatctttcaatctgctgcagtatgttttgtggttgaagtgtatgcaattggaaaaggagcatttcagtagctttttcagataatcgtggatattctttgataagacaccaaa

SEQ ID NO: 128973 - DNA, 605 bp, Homo sapiens
taagaggtcgacagagtcaagtgcagtaaacagtacaagaaaatagagaatggaaagctgcctcactaagcttagtgaacaggaagtaacaagaagaaagccctcagaatccattctgtggaaggtgacctcaggagaaaatcagctggacaggaggaatggagccccagtgctccctcacccccaggaagctgtgtccaggcagaagctgcacctgctgggctctgtggagagcagcggggagaggactgtgccgagctgcatgactacttcaatgtcctgagttacagaagcctgggtaactgcagcttcttcacagagactggttagcaaccagaggcatcttctggaagatacacttttgtctttgctattatagatgaatatataagcagctgtactctccatcagtgctgcgtgtgtgtgtgtgtgtgtatgtgtgtgtgtgttcagttgagtgaataaatgtcatcctcttctccatcttcatttccttggccttttcgttctattccattttgcattatggcaggcctagggtgagtaacgtggatcttgatcataaatgcaaaattaaaaaatatcttgacctggttttaaatctg

SEQ ID NO: 128974 - DNA, 586 bp, Homo sapiens
ccagggtttcacagcctagctggaaataagtgttataggcttaagggaaaaggttacatactttttttcatttttgtaatttaatgttaactttattttaattttgaattaaatatttttattgatatgatttcatatttgaagttcaataaaagaaaatattcactttctgagtttttttctggaactactatttgtttcatttcatgattaccaaaaatgattttgtcaaatagaagaaacgaatgttaaaatgacctgctctggtatcaaatatacaaggtacaccactgctgaaaatatcagtcattgatttcatgatgggccagatggatactctgctgttcaaagtgttgggcttaaaggctccagtcccatggttacacaaagggcttggccaatcctcccctctctgccgtgaagctcaggctgccctggggaaatcagcttcacttctggcttctgccactcatctctgttttgtcctccctctagtggctgagcacggtgccaggttccagattccattgcttggagccatggccgcgacgctggtggtaggggtatgtctctgatacaggatcct

SEQ ID NO: 128975 - DNA, 526 bp, Homo sapiens
cagaagaggccacatctgcttcctgtaggccctctgggcagaagcatgcgctggtgtctcctcctgatctgggcccaggggctgaggcaggctcccctcgcctcaggaatgatgacaggcacaatagaaacaacggggaacatttctgcagagaaaggtggctctatcatcttacaatgtcacacctaccctgatgggacgtacactgggagaatcttcctggaggtcctagaaagctcagtggctgagcacggtgccaggttccagattccattgcttggagccatggccgcgacgctggtggtcatctgcacagcagtcatcgtggtggtcgcgttgactagaaaggtaatggctccggctgcacaccgcagtcatgggcacccccacgtctggcacccgggtcctttcaggttctctttccacccagagagagacccagatgtgatcttcccgagtgctctttgtgcctttttcctggcatttgttctgcctattagtgcagttatttatgctcttccgttgt

SEQ ID NO: 128976 - DNA, 860 bp, Homo sapiens
cagaagaggccacatctgcttcctgtaggccctctgggcagaagcatgcgctggtgtctcctcctgatctgggcccaggggctgaggcaggctcccctcgcctcaggaatgatgacaggcacaatagaaacaacggggaacatttctgcagagaaaggtggctctatcatcttacaatgtcacacctaccctgatgggacgtacactgggagaatcttcctggaggtcctagaaagctcagtggctgagcacggtgccaggttccagattccattgcttggagccatggccgcgacgctggtggtcatctgcacagcagtcatcgtggtggtcgcgttgactagaaagaagaaagccctcagaatccattctgtggaaggtgacctcaggagaaaatcagctggacaggaggaatggagccccagtgctccctcacccccaggaagctgtgtccaggcagaagctgcacctgctgggctctgtggagagcagcggggagaggactgtgccgagctgcatgactacttcaatgtcctgagttacagaagcctgggtaactgcagcttcttcacagagactggttagcaaccagaggcatcttctggaagatacacttttgtctttgctattatagatgaatatataagcagctgtactctccatcagtgctgcgtgtgtgtgtgtgtgtgtatgtgtgtgtgtgttcagttgagtgaataaatgtcatcctcttctccatcttcatttccttggccttttcgttctattccattttgcattatggcaggcctagggtgagtaacgtggatcttgatcataaatgcaaaattaaaaaatatcttgacctggttttaaatctg

SEQ ID NO: 128977 - DNA, 526 bp, Homo sapiens
ttttcttcatagaggagcctctgagattctcattcggaactctgggctcttatgttagccacaattctaacaagctttgcaatctggtttctcagtcacggaagaatagaagaacaactcagaggaggaagaagtcagacatagccagacacggctgctagcagttccaccaatgaaagaggagaccaggatgtttaaaacaggcaaacacaaggtgcgaaaaaccagaagcgaaaacttctgaggtcatttaagcaaggactatcgttatccccggaagcagagagaagttccctttgcccaacatcacactgcaagcacgtgttggagctgagattcaaacccaggcatccagggtccagggcccatgcttttaatatattccatatcttaggagaatttcccctatttaaacaataaaagtgcaaaaatcttgtggctagccaaaattttcagttgtttggaaaacttatttatccaataagtggaaaactcacttgtcctccaacaattctggataaatgaa

SEQ ID NO: 128978 - DNA, 536 bp, Homo sapiens
gagaaaaggagatgccggccggagttctagcaccgagaaggagagtactggaatacctgagttttggctgggcacagaactgtctggaatacagactgcaattcccagccttctgtgcagttctgtgtggccatgtgactaagttgtggtcaatatgagtcacggaagaatagaagaacaactcagaggaggaagaagtcagacatagccagacacggctgctagcagttccaccaatgaaagaggagaccaggatgtttaaaacaggcaaacacaaggtgcgaaaaaccagaagcgaagttccctttgcccaacatcacactgcaagcacgtgttggagctgagattcaaacccaggcatccagggtccagggcccatgcttttaatatattccatatcttaggagaatttcccctatttaaacaataaaagtgcaaaaatcttgtggctagccaaaattttcagttgtttggaaaacttatttatccaataagtggaaaactcacttgtcctccaacaattctggataaatgaa

SEQ ID NO: 128979 - DNA, 590 bp, Homo sapiens
gagaaaaggagatgccggccggagttctagcaccgagaaggagagtactggaatacctgagttttggctgggcacagaactgtctggaatacagactgcaattcccagccttctgtgcagttctgtgtggccatgtgactaagttgtggtcaatatgagtcacggaagaatagaagaacaactcagaggaggaagaagtcagacatagccagacacggctgctagcagttccaccaatgaaagaggagaccaggatgtttaaaacaggcaaacacaaggtgcgaaaaaccagaagcgaaaacttctgaggtcatttaagcaaggactatcgttatccccggaagcagagagaagttccctttgcccaacatcacactgcaagcacgtgttggagctgagattcaaacccaggcatccagggtccagggcccatgcttttaatatattccatatcttaggagaatttcccctatttaaacaataaaagtgcaaaaatcttgtggctagccaaaattttcagttgtttggaaaacttatttatccaataagtggaaaactcacttgtcctccaacaattctggataaatgaa

SEQ ID NO: 128980 - DNA, 618 bp, Homo sapiens
tgcagtggttcacgctgtaatcccagagctttgggaggccgaggcaggcagatcacctgaggtcaggagtttgagaccggcctggccaatatggtaaaaccccgtctctaccaaaaatacaaaattagccgggcatggtggtgcatgcctataatcccagctactcagaggctgaggcaggagaatcacttggacccgggaggcagaggtcacagtaagccaagatctcacaattgcactccagcctgggcaaaaagagcgaaactctgtctcaaaataaataaaataaaataaaataaaatatttctgtaacacagctgctgctgagggactagtgctaccagagggaattgagttaagtgtggcaatgccaactgactctcctctccttccctctaaccacccacctgcacgcacccaaacatcagctgaactgttctgcatgtgttttctgagcgggcctcctactcgctggcctccctggtttaacacattgtgaccttcaccaagagcatggacttctattagtttggccttcaacaccggacccaaacactgccttctccatgaggttccatctttcccaccaccaaggggtaactctgcttttcttggatc

SEQ ID NO: 128981 - DNA, 546 bp, Homo sapiens
gggggcttcgctgagaagggggcatctgaataaaggcctgaaggaaatcggggattgagcctcacagttatgccagaggcgacagccaatgagtcctgagggggtaagtgggcttgttcaaagagggggcaggaagctggcgctgcaggcatcgggaagagccacgcatcctgcactgtaccagcctgcagacgcagacagggagcagcgatgagggatggacgcccctccctgggagcagcctccccacctgactgagcagaggagattcgtgtcctgctgctctttctggacagagatggcttttaaggtcccttggcccagtcccccagcctgagcctggagtctgggtttgttgatggagcttcctgagtcttggcagctatcaaggttctaaccctggttctgctgcttcctcttagtgcaactgtgagcaagccatgtcacctcactgagccttggtttcacatctataaagtgggttaacaagccagatctctgatgttgtcagctctacaagggtaggcattttcatgaggcttcttc

SEQ ID NO: 128982 - DNA, 450 bp, Homo sapiens
ctttatttttaaaccaccgggaatacttatagtctctatttatagagaggaaagttagagttataaatactccttagtgtgacagaagcgttattactagtagagtaagcctcattaaactccagaagatgaaataaatagcacaactttgtgaccatcttctggtattgaatatcgtcctttcgggggaaaaaattgcctgttcttaggagtcctgtgaggttttgatgatgtatttgtttgttgtttattatggagattttagattttagtaattagagtcagtttttctttaactttataaattaaactcttaagttccttacagccccaaaatactgtgggtaaagttatttgccttctatagctaatctttaaaagactaaagaaaccttggttttctgagaactgtcttgtaaaacctcaaaagtgtggtgggaagcaaaggtc

SEQ ID NO: 128983 - DNA, 343 bp, Homo sapiens
tcctgcctccagcctcgcaaataatccttctgggattataggcgagagtcactgctctggcctaggtgacttgtttgtttctgtgtaggaactttttgttcaaaaagtcttagcccaagaatcctaagttctggagtgggaagctagagacctcagctcatcttgtagcttttactcttcagatgaagaacctgacccccagagagatcgggtgacttgtgtgagggagtaagctggctggctgtggccttcttcacagttgttcaatgccacttatttaaaacatgcccattggttttttattttttaatttttcttttgatgggaatagcaaggttttata

SEQ ID NO: 128984 - DNA, 444 bp, Homo sapiens
agggatccagtaagaggccaagctgggactctgggccaggtggctgtgctgggccctgcccttgggagaccccagcgctccaactcctgctctccgtcagttgccacccctctgagttcctcctgcacttagtgttgacctcacttccactgcagactggttagagtcttctgaccccttcccagggcctttctgtgtggctcccgccgaggcctgccccacagcagtccagcagccactgcgaatgcgttgctcatgggtactgacgtagcagtccgaggagtgacagtgctgccaccctgacagtgccgttgccgactcttgtctccagtctccatgggcccctgccctgcccgtgtccttgtttgactttcactctgccccctgtagccgcacttctccccacttcctccaggctgggccctcccactcagcagatgccct

SEQ ID NO: 128985 - DNA, 862 bp, Homo sapiens
ctgaggccccagaaagacaagatcccaccgtcctttgcaggaagatgtccaaagagttgcatgagggctcaggagctgagctaaagataaaagcattgcatactttgggcaggcactgtctcttcgccaaactcaactcctggaagagccatttttgttcgaaaatgctggagctgccaacaggaggagctgactcctgctcccatgggctcccaatgaaggctctcctgaacattcccggcctccaggcaacccaacccagccacccccagagtcccagttccactatgaggacaacctgaatgctgaggctggagaaaaaaggcagatcagagaagcaagggcaaggagagaatgcagaggaggcagaaaggaaggaggagggatcactgaagatggtgagaaatctaggggtggaaagagaaggcagacagaaagggattgaagaagaagagcacggctcaaacagggacaggaaggagatgggggcaggaggtctagagaaacggcccacactgcctgtgaggacaatctcccatactccatcaacacccgctcctcggccagcccctcattcagtccagcccagctggggagggatttctagaccactcatcttagcccacccagtcctaggggcctggagaacagaccagctgaatgggccaggcataaggtaggggctggagaggcagagagagaagggttactcctgaggctcagcccaattaccggctccctgcctgtggggagagaggtgctctgtgaccttaaacaactaagttacttttctgagtctctgctccctcgtttgcaatatgacagccaacctctgaggcctctcccagcctaaaaaatgttt

SEQ ID NO: 128986 - DNA, 2638 bp, Homo sapiens
  misc_feature (2610)..(2610): n is a, c, g, or t
ggcggctagaccggtggcggcggcatctggagtagcactgagatcttccggtggcgggaactgcagtcatggatcatattacggtacccaaggtagaaaacgtgaaattggtggatcgttatgtgagtaagaaaccagctaatgggattctttatcttactgcaacccacctgatctatgtggaggcttcaggtgcagcccggaaagaaacatggattgcactccatcacattgccactgtggagaagttacccatcactagcctgggttgtcccctgaccctccgctgcaagaatttccgggtggcccactttgttttagattctgaccttgtgtgccatgaggtttatatttcactgctcaagctttctcagccagcattacctgaagatctttatgctttttcttataatcccaaatcctcaaaagagatgagggaaagtggatggaaactgattgacccaatatcagactttgggcgtatgggaatacccaacagaaactggaccataacagatgccaacagaaactatgagatatgcagcacctaccctcctgaaatagtggttcctaaatctgttaccttgggaacggtggttggaagttcaaagttcagaagtaaagaacgtgtccctgtgctctcctacctctacaaagagaacaatgctgccatttgccgctgtagccagcctctctctggattttacactcgctgtgtagatgatgagctcttgttggaggccattagccaaacaaacccagggagccagtttatgtatgttgtagacacaagaccaaagttgaatgccatggccaaccgagcagctgggaaggggtatgaaaatgaagacaactatgccaacattcgcttcagattcatgggcattgagaacatccatgtaatgcggagcagtctgcagaaactcttggaagtttgtgaattgaaaactccaacaatgagtgaatttcttagcggcctggagagctcagggtggttaagacacattaaagctattatggatgctggaattttcattacaaaggcagtgaaggtagaaaaggccagtgtcttagtccattgttctgatggatgggaccgcacagcacaagtctgctcagtggctagcatcctcctagatccattttataggacattcaaaggactcatgatcttgatagagaaggaatggatatccatgggccacaagttttcccaaaggtgtggccacctcgatggggactctaaagaagtgtcccctatcttcacccagttcctagactgtatctggcaattaatggaacagtttccctgtgcctttgagtttaatgaaaacttcctgctggagattcatgaccatgttttctcctgccagtttggaaacttccttggtaactgccagaaggatcgggaagatctaagagtctatgagaaaacacattctgtgtggcctttcttggttcagaggaaaccagacttcaggaaccctctctataaaggcttcactatgtatggggtactcaatcctagtactgtgccctacaacattcagttctggtgtgggatgtataaccgctttgacaaagggctgcagcccaagcagagtatgctagagagcctcctggaaattaagaaacagagagcaatgctggagacagatgtgcatgaactagaaaagaaactaaaagtccgtgatgagccaccagaagagatctgtacctgctctcaattaggaaacatattatcccagcatctgggaagtcctttgaccaatcctcttggctttatgggtatcaatggagacctgaataccctgatggagaatggcaccctatccagggaaggaggcctccgagctcagatggatcaagtaaaaagccagggtgcagacctccaccataactgttgtgagattgtgggcagccttagggccataaatatctctggggatgtgggcatctctgaggccatgggcatctctggagacatgtgcacctttgaggctacgggcttctccaaagacttaggaatctgtggggccatggacatctctgaggccactggcatctctggaaacttgggtatttctgaggccaggggtttctctggggacatgggcatcttgggggacacaggcatctccaaggccagcaccaaggaggcagactactccaagcatcagtgagttagttactcatcttccatgctaggtatacctacagcagctacaatgattcttgtcccagagagggctatgctgcttttccaattggtttaagtgggtgaagccagggcacccctctccccacttaagtctggaagggaattactttactgattaagtgaccaatatgttcatattaagcagtacagagtgtaggcaagagaaagaatatgttattgttctaaaatgggatttaactatagaaatgttgcctctcagctgagacacatattaagctggttctactgtctgttttccttaatgatcgacctgccctattttctatcctcactgcagtaatgtgaaagtgaagtggaaatattgtcacaatggtcaataatgacccttttgagggtatggagagatggtatacagcaggtaactgtgnattgcagaataaattgaaagaaaatttt

SEQ ID NO: 128987 - DNA, 2528 bp, Homo sapiens
  misc_feature (2500)..(2500): n is a, c, g, or t
ggcggctagaccggtggcggcggcatctggagtagcactgagatcttccggtggcgggaactgcagtcatggatcatattacggtacccaaggtagaaaacgtgaaattggtggatcgttatgtgagtaagaaaccagctaatgggattctttatcttactgcaacccacctgatctatgtggaggcttcaggtgcagcccggaaagaaacatggattgcactccatcacattgccactgtggagaagttacccatcactagcctgggttgtcccctgaccctccgctgcaagaatttccgggtggcccactttgttttagattctgaccttgtgtgccatgaggtttatatttcactgctcaagctttctcagccagcattacctgaagatctttatgctttttcttataatcccaaatcctcaaaagagatgagggaaagtggatggaaactgattgacccaatatcagactttgggcgtatgggaatacccaacagaaactggaccataacagatgccaacagaaactatgagatatgcagcacctaccctcctgaaatagtggttcctaaatctgttaccttgggaacggtggttggaagttcaaagttcagaagtaaagaacgtgtccctgtgctctcctacctctacaaagagaacaatgctgccatttgccgctgtagccagcctctctctggattttacactcgctgtgtagatgatgagctcttgttggaggccattagccaaacaaacccagggagccagtttatgtatgttgtagacacaagaccaaagttgaatgccatggccaaccgagcagctgggaaggggtatgaaaatgaagacaactatgccaacattcgcttcagattcatgggcattgagaacatccatgtaatgcggagcagtctgcagaaactcttggaaggcagtgaaggtagaaaaggccagtgtcttagtccattgttctgatggatgggaccgcacagcacaagtctgctcagtggctagcatcctcctagatccattttataggacattcaaaggactcatgatcttgatagagaaggaatggatatccatgggccacaagttttcccaaaggtgtggccacctcgatggggactctaaagaagtgtcccctatcttcacccagttcctagactgtatctggcaattaatggaacagtttccctgtgcctttgagtttaatgaaaacttcctgctggagattcatgaccatgttttctcctgccagtttggaaacttccttggtaactgccagaaggatcgggaagatctaagagtctatgagaaaacacattctgtgtggcctttcttggttcagaggaaaccagacttcaggaaccctctctataaaggcttcactatgtatggggtactcaatcctagtactgtgccctacaacattcagttctggtgtgggatgtataaccgctttgacaaagggctgcagcccaagcagagtatgctagagagcctcctggaaattaagaaacagagagcaatgctggagacagatgtgcatgaactagaaaagaaactaaaagtccgtgatgagccaccagaagagatctgtacctgctctcaattaggaaacatattatcccagcatctgggaagtcctttgaccaatcctcttggctttatgggtatcaatggagacctgaataccctgatggagaatggcaccctatccagggaaggaggcctccgagctcagatggatcaagtaaaaagccagggtgcagacctccaccataactgttgtgagattgtgggcagccttagggccataaatatctctggggatgtgggcatctctgaggccatgggcatctctggagacatgtgcacctttgaggctacgggcttctccaaagacttaggaatctgtggggccatggacatctctgaggccactggcatctctggaaacttgggtatttctgaggccaggggtttctctggggacatgggcatcttgggggacacaggcatctccaaggccagcaccaaggaggcagactactccaagcatcagtgagttagttactcatcttccatgctaggtatacctacagcagctacaatgattcttgtcccagagagggctatgctgcttttccaattggtttaagtgggtgaagccagggcacccctctccccacttaagtctggaagggaattactttactgattaagtgaccaatatgttcatattaagcagtacagagtgtaggcaagagaaagaatatgttattgttctaaaatgggatttaactatagaaatgttgcctctcagctgagacacatattaagctggttctactgtctgttttccttaatgatcgacctgccctattttctatcctcactgcagtaatgtgaaagtgaagtggaaatattgtcacaatggtcaataatgacccttttgagggtatggagagatggtatacagcaggtaactgtgnattgcagaataaattgaaagaaaatttt

SEQ ID NO: 128988 - DNA, 2311 bp, Homo sapiens
  misc_feature (2283)..(2283): n is a, c, g, or t
ggcggctagaccggtggcggcggcatctggagtagcactgagatcttccggtggcgggaactgcagtcatggatcatattacggtacccaaggtagaaaacgtgaaattggtggatcgttatgtgagtaagaaaccagctaatgggattctttatcttactgcaacccacctgatctatgtggaggcttcaggtgcagcccggaaagaaacatggattgcactccatcacattgccactgtggagaagttacccatcactagcctgggttgtcccctgaccctccgctgcaagaatttccgggtggcccactttgttttagattctgaccttgtgtgccatgaggtttatatttcactgctcaagctttctcagccagcattacctgaagatctttatgctttttcttataatcccaaatcctcaaaagagatgagggaaagtggatggaaactgattgacccaatatcagactttgggcgtatgggaatacccaacagaaactggaccataacagatgccaacagaaactatgagattcgcttcagattcatgggcattgagaacatccatgtaatgcggagcagtctgcagaaactcttggaagtttgtgaattgaaaactccaacaatgagtgaatttcttagcggcctggagagctcagggtggttaagacacattaaagctattatggatgctggaattttcattacaaaggcagtgaaggtagaaaaggccagtgtcttagtccattgttctgatggatgggaccgcacagcacaagtctgctcagtggctagcatcctcctagatccattttataggacattcaaaggactcatgatcttgatagagaaggaatggatatccatgggccacaagttttcccaaaggtgtggccacctcgatggggactctaaagaagtgtcccctatcttcacccagttcctagactgtatctggcaattaatggaacagtttccctgtgcctttgagtttaatgaaaacttcctgctggagattcatgaccatgttttctcctgccagtttggaaacttccttggtaactgccagaaggatcgggaagatctaagagtctatgagaaaacacattctgtgtggcctttcttggttcagaggaaaccagacttcaggaaccctctctataaaggcttcactatgtatggggtactcaatcctagtactgtgccctacaacattcagttctggtgtgggatgtataaccgctttgacaaagggctgcagcccaagcagagtatgctagagagcctcctggaaattaagaaacagagagcaatgctggagacagatgtgcatgaactagaaaagaaactaaaagtccgtgatgagccaccagaagagatctgtacctgctctcaattaggaaacatattatcccagcatctgggaagtcctttgaccaatcctcttggctttatgggtatcaatggagacctgaataccctgatggagaatggcaccctatccagggaaggaggcctccgagctcagatggatcaagtaaaaagccagggtgcagacctccaccataactgttgtgagattgtgggcagccttagggccataaatatctctggggatgtgggcatctctgaggccatgggcatctctggagacatgtgcacctttgaggctacgggcttctccaaagacttaggaatctgtggggccatggacatctctgaggccactggcatctctggaaacttgggtatttctgaggccaggggtttctctggggacatgggcatcttgggggacacaggcatctccaaggccagcaccaaggaggcagactactccaagcatcagtgagttagttactcatcttccatgctaggtatacctacagcagctacaatgattcttgtcccagagagggctatgctgcttttccaattggtttaagtgggtgaagccagggcacccctctccccacttaagtctggaagggaattactttactgattaagtgaccaatatgttcatattaagcagtacagagtgtaggcaagagaaagaatatgttattgttctaaaatgggatttaactatagaaatgttgcctctcagctgagacacatattaagctggttctactgtctgttttccttaatgatcgacctgccctattttctatcctcactgcagtaatgtgaaagtgaagtggaaatattgtcacaatggtcaataatgacccttttgagggtatggagagatggtatacagcaggtaactgtgnattgcagaataaattgaaagaaaatttt

SEQ ID NO: 128989 - DNA, 1312 bp, Homo sapiens
ggcggctagaccggtggcggcggcatctggagtagcactgagatcttccggtggcgggaactgcagtcatggatcatattacggtacccaaggtagaaaacgtgaaattggtggatcgttatgtgagtaagaaaccagctaatgggattctttatcttactgcaacccacctgatctatgtggaggcttcaggtgcagcccggaaagaaacatggattgcactccatcacattgccactgtggagaagttacccatcactagcctgggttgtcccctgaccctccgctgcaagaatttccgggtggcccactttgttttagattctgaccttgtgtgccatgaggtttatatttcactgctcaagctttctcagccagcattacctgaagatctttatgctttttcttataatcccaaatcctcaaaagagatgagggaaagtggatggaaactgattgacccaatatcagactttgggcgtatgggaatacccaacagaaactggaccataacagatgccaacagaaactatgagatatgcagcacctaccctcctgaaatagtggttcctaaatctgttaccttgggaacggtggttggaagttcaaagttcagaagtaaagaacgtgtccctgtgctctcctacctctacaaagagaacaatgctgccatttgccgctgtagccagcctctctctggattttacactcgctgtgtagatgatgagctcttgttggaggccattagccaaacaaacccagggagccagtttatgtatgttgtagacacaagaccaaaggcagtgaaggtagaaaaggccagtgtcttagtccattgttctgatggatgggaccgcacagcacaagtctgctcagtggctagcatcctcctagatccattttataggacattcaaaggactcatgatcttgatagagaaggaatggatatccatgggccacaagttttcccaaaggtgtggccacctcgatggggactctaaagaagtgtcccctatcttcacccagttcctagactgtatctggcaattaatggaacagtttccctgtgcctttgagtttaatgaaaacttcctgctggagattcatgaccatgttttctcctgccagtttggaaacttccttggtaactgccagaaggatcgggaagatctaaggtgaatttactttgtgagaagacactgaacagggagaaggtggtcagtgcaaaaagaatgtacctaccaccctgaatttggcatagcagtcaagaaaggggaggagataacaataataaaaagaacttttgaagc

SEQ ID NO: 128990 - DNA, 189 bp, Homo sapiens
gctgctcaacgcagggacgagctgctcaactcaggggcgagctgctcaactcaggtgcgagctgctaactcaggggcgagcttcagagaggagcctgggcggcaggtgggaccctcactccccacggtgtcctcgctccggctcagtctacttctcaggccctcccacgtcctctgtatcttctgcatg

SEQ ID NO: 128991 - DNA, 586 bp, Homo sapiens
gttacaactactttggagaaaattatctaatatttggtaaagctgaaagtaattttattcctctctctctctctctctatatatatatatatatacacaccccggggaaactcaggtgtgtacagggaatcatgaacaataactatttattacggtactcttggaatagcaaaaatttgaaaaaaaccaaatgtcttaatataaagacgataaataaattttggtatgttcatacggtggaatagtatgcacctcttaaaatgtattaactagagctacatagataagtatagataaatttcttaagctaatgttggatgtgaaaagtaacatataaataactttttaaaaaaataaatgagttatatgaaacagtttatattattttttatggatttataaatgtgtagtaataatataaaaatattttttgaaatgattaataccaaagcctagataatggtttcctctggggaagaaaggaacaatatgatttgggcctcagtgatacctgtacagttaagtaaaacattggagataatgcaggtaagtgaaataaacatggaactacgtgtagatttattca

SEQ ID NO: 128992 - DNA, 815 bp, Homo sapiens
cctgatgctacaactaattatgcagcccagctcactcatctcctggcatctccatgttgccagtctttcattcgttcaaaaatagttactcaaacctaccattccagatgctggtgaacaagcagcaaacaagacagacatagtccctgttctcatagccctgacattttaatgggggaggcagagacaaataataaacaagtacacaaataaacgcagaatataatggcagaaggtgaacctcaacaaataccagggtaaggagtctgatttggtggggtacggggagactttagataaaatgttcaggacccacagaggtggcacgtgaacagctatgccaagatctgagatcagctatgtcaagatcccaaagtgctaggattacaggcatgagccactgcacttagcctgggctgactagaggagcagtccgtctgctaaaaacagataacattgacatcatgcctgacaactattctttttgggcacgcgatgagtgccccgttcaataaaagcattttccagcatgatacgctaggtgctgcaggggtacccaaacagagtgtccgactcatggtccactactacgagggctcacacaagggaaaaaccgtaagaggattcttcaaggaggaggttgtggatttcctctcccatttttatgaaataccccgcgggtgcggcaaactacgaacgttgtttcagcaagaagattctaggacgggagtgttaaagggggcagaaagagtggatccctaatacaggagtactccaagcaagacattatagaagagtccccacatcaggggagt

SEQ ID NO: 128993 - DNA, 174 bp, Homo sapiens
ataaagagacatcttacaaaggtgtggacagagtgttagagaaccgcaaggggaaaatacagtaatcctatacagccaatcctatccctagcctgaagggaataagagaatggttactgtattagtcagaattacaaaacagaactaatggaatatgttggtgtaaggagggcg

SEQ ID NO: 128994 - DNA, 475 bp, Homo sapiens
ggctctgccccttcctagcttgtgaccattggtaaatgcatctcatgcatctctctctgcctctgttctctctgagtaatggaaggaccataatagtgcttttctcatagtctgttgcaaggattaaatgagtgatgtgcttagtggcgggcacatcgttcatgctgctgttgttacggttgttattgttatgtagccttagggtttccttctcactgtgaacaatggaagacagtttccctggatgttacacacagcatttaggctcccaggttagcctatgctgtaggtgaactagagatatctggttgtcagggatacaaatctactctgaggatgagaaaagttttggtgggctgacttgagaatcttaacaccatttacgatacaatactgataggaacatgtgttttgagtttctaacaactaacttcagcaactgtaagttagaagcttcagtaaaaataggagtatg

SEQ ID NO: 128995 - DNA, 367 bp, Homo sapiens
gacttttcaatatatgtgcctatactctttagagttgtctttgtttcattttcttttttgagacagagactaggtctgtcacccaggcttgagtgaagtggcaggaagacggatcactgcagcctaaacctcctgggcttaagagaccctcttgcctcaaccgccagttagctcacaggcacataccacatccccagccactgttttgatttttttttttttttttggtagagacagggtctcacactttgttgccagggctggtctcgaattcctggactcaagcaatcctcccgtgttagcctcccaaattgctagggttataggtgtgagccaccctgcccagcctatgtttatttcagatgtt

SEQ ID NO: 128996 - DNA, 1116 bp, Homo sapiens
gcctgctttcttgttcttttccctcatttcttgttcttcctcagtcctttcctcctcattttccctagagtattccaggccctgacacggtcatcagggaggttcattcttgtgttgctgtgactgccgccagtgccaccaccttgcgaggtgtgttggccgatggactcggtgtcctcagtgtcttctctgtcctccagctccactgaccacctggcttcacccctccctgggccccaggagtccggctggcatggaccacagccacagcacccccgtgcccctcacttggtggttggctttggccagcgggggcccccagcaggaggtcgaggaggaagggagagcgagggcctcgtctttactttcccggcttctttgtgagctgcctggagctggccgagtccagcctctccctccttctgggttccgacaatctctccttccctggtctgtcctgtgggcggctgcagcccggccctgactggcacagggctcttgcaccgcccctgtggctcacctgctccctccccaacatgaataaaccctcctgaagccacaaaaaaaagaacaaaagataaacaaagacataaagaatacatctaagaaaaatacatacaacgacaaaagggggcgggcgccgccgatcaaaaagattattcccctcgaggggggcgcgccaaaaattattgcgccgttgaccccgggttgtttgttttcacaaaggtcggcgcccattagtagtagcgccgcgttataataaagccgcaaggcgacatcgggcgcagggagataacaacaacgacgcttgatgtggtggcgaaaaccaacctctgctatcatggggaggaacatgctttttgggagagaagggcaccaacttatcttactgtggggcggatcagcccaaaactaattgtgcgagcgaacactatcagctacacggataatatttaagaccgccctcaagaggagcaataagtataacatatacaagagttgtttatcgcgggtggtaacaacagacgctggtaaaaatacggcgagcgcgttatagaaacaatttaagcgtataacaggaatattatctgttgagaaaaattttatcacacggag

SEQ ID NO: 128997 - DNA, 279 bp, Homo sapiens
ccccacggggagcgcaagaaggcactggaggctgttgcgaaggagcagtgggtttcgggtcctcatgaccggccctggttccgggtgtgaggctgtggagacgcatgggtctgcctttctcatccgcagcttcctgttgctacttgggaagctccatgtttgctgtccggttgtgtttcgagtctgttctcttgggcgtctgtgccgtggaagttccttgtgcttgatagggccagcacgtgtgaacaatcttcacttcagctagaagctttgaagtct

SEQ ID NO: 128998 - DNA, 477 bp, Homo sapiens
tggggaggcctggggctgagacccaagctagagtctcagaggagggggaggagtagtaatgcataatgccattcactcacacactcattcattcaacaactatatatggatgctgactcagagccaggcactcatgatcacatgactcagagtctaatggacgataagaaacaccagttgttaattgcccattaatgtatgaagccctgtgctaagtgccttacctgcataagataattcagtctctgcaaccgctctgaggttaacttgccttctatcctcatgtcgcacagacgaagccgaaggaggaggatcgaggaacttggcccaggtcccacagctaaggaggcggcaaaggaggactgaagggcagttgactcattcatcctcgatttttttcttgaaagcctcctgcatgcttcctttcctggggacttgtttgccctctcacttgttttcccccatagacagccgagc

SEQ ID NO: 128999 - DNA, 220 bp, Homo sapiens
ggatcccctgcttcctgaggcatcccctgagcatgcatccccatcccctctccagtgctgtgcgtgtgtgttgtggtggccactgtcggggtcactttcttccttgttttgggctgtgagcttggggcatggctgctggcctcgggggactgactgtgggctctctggacagatgcttttggtcacggcatctgctgggcagtgagctgttgggctgtga

SEQ ID NO: 129000 - DNA, 333 bp, Homo sapiens
ctgctcccagtcattgctgccttgccactcctgaagcatagcaagagtgccctgggctccgcaccttggccctcactcttcctttctgcctgaaatgattgtcccccatcttcacatgactgtgtccctcatttcacagactcccacagtgaagtcttccctgatcactcaaacagcatccctccccatttcattccctgagagtttttcctttacagcacatatcaccactgaacatttgtgtactgtctatgtatctgtgtaggatgcatagaacagggactacatcagttttgtttgttgctgtatccccagtcttacaatagcatctac

SEQ ID NO: 129001 - DNA, 754 bp, Homo sapiens
ggaagtatgtttactttagcaggaatgtggatagggcaggccatgattgacatctctagcaaccttggtgaaaatatgtcagatacagccagctgaatttgatcaataaaaacttgcgcttttttttttcaaagaacattggattggaactttagaaaataactagaatttattatttacaatataccagatgcttttcctagtactttacacgtatttactcatttaactcttaccacaaccatgtgagtgaagtactattattatctccattttatggaagaaaaacattagccccaaaacttgcccagagtaaagtagccaagttttaatttcaacttgggagtgcctggctctaaaatctattttaatggtgtattgctttgccctctttttcactgagaaccattcagaaaggatatggtctgtatcaaagttggccaacatgcaacttgccaaatctgattgctattctggaatccttcctaatttagcactttagtagttaatatggatttaccaggatttgaatgtgaaatgaagcctatctgccatctctgtttgagggttctaattttattttatttttccactcaagtatattctcacagagggtattctaattttagatagatgtactattatgcttcatcatcggtttatatcagcctgttttaaaatgtatttcagccagccgtggtggctcacgtctgtaatcctagcactttgggaggccgaggcgggcagatcactt

SEQ ID NO: 129002 - DNA, 401 bp, Homo sapiens
gctcagcagaacagcgagagctgtgcgcccgagccaagaatgagtgctactcaagccacgtgccgggttccttacgacgatgacttcctaacatccatttaactcctaaaccaataataggaatctctcattttgcttgctaatgattggtttagaaaaggacatgagaaattttttaaaaaatattttttggcgtagagggcttttggaatgcttttcctcacttttaaaaagaggcatccagtctgggcaacatggtgaagccccatctctacaaaaaatacagaaattagccaggcatggtgacaggcacctatagtcccagctactcgggaggctaaggtgggaggattgcttgagcctgggaagcagaggttgcactgagatcatgccactgcact

SEQ ID NO: 129003 - DNA, 906 bp, Homo sapiens
gtttcattgtgctatcattgggtaggaaaattaggaataatttcttatgtacttttcttaactttctataaatttaactgaatacttttatagtccaaaaaatgaaatagatttcattttttaaaaggcgaattggagcctttcattacagaagtatagtctgcagctcatcgtaataatcttattgcataatttagaatcacttccacagagcccttggccatataagtgaaggcggcacagttcagacctgcactgtgatacgtggctgtttaattaaaatttaaaatccagctcctcagtcacactagccccattccaagtgctcagtagccacatgtggcaagtgacagcttttctagcatcatagaaaattcgattgcccagcattggtttggaagaaaaaacagggaatctggagccagaaaacttggaatcaagtctgcctacaagctgacacttgctgtgtgaaatggggcagtttactcaacctaagcctatttccccatgaccaaattgggactgaggataataccatgtaccatatacagaggttaagaaaattaagagaatgcaggtgacagttctctgaaaacaatagtgtggtttaccaggtagatgctgcttcccagtcccccagcttgaagtcagtctagctcttcaaggactgattccaaatctttgaatgcttcacaccaagaattttgcctgaatgccaccatcaaaatcagattagctcttattacagttcctggaccaagcccgtggcaatgtgcacatttcatttcttccttgtaaaaagctttaatacacagctctctctatacaatgacagctcctaaaagttttctttaataatttaaaatcttcactgtatttccattcctacaattaaaaagactccct

SEQ ID NO: 129004 - DNA, 812 bp, Homo sapiens
atgagcttccatttgttgaactctacattgtgactgacaaacttggctgcaccttaaaattacctgaagagcttttaaaacttgctgtcaattaaatcaaattctctgagagtgggacctaatgctcagtgtgttttttaaagctcccagtttatttcagtgtgtggctaaagaaccacaacacaatatcctaaacttctcattactgatcattctttcttcaatgttctttttctttattcatcatcacttaacatttcctctaaggctttattagcatagttctataattccttagagttaaagaaaattcagatatttttacatcattgaaagctaaaactttgttacttacataagtgcttaaaaggcatgcaatgcccataaattctgtgttagattcaaaatagttaaccttattttatacattatagaaattctaaggttaattttttaaaaattaggtcttaaaatgcttacatttacaaatctgatcaatagttgcaacctcttgttactgtttgcttttataaattgaccattagatgcttgtgctcatgagttgacacattgaaattatgcaaggttgaattttgaaaaatctctgtcaccatatttaatggttcaagggaatgaaaggattctagttacataggcctaaaggacataatgaaatttaaaatttgtttcccttagaaaagattaagatatattttcttaaaagatattaagaaaggtattcttccatatcctaagttcccttagtaagtttccatgattagcatcaattgttgaagtgaagttaatttatg

SEQ ID NO: 129005 - DNA, 647 bp, Homo sapiens
gtccaaaacccaacctgaaataacattaaggcttaaagatggagaataatctcctttgacttcgtgtcctgcatcctaggcacactagaataggggttaaacccccaagacctatggcaaccccagccccatggcatttctgggcttacactggtagctctacagttctcaggtagtcctgcacccatggcttcactaggcattatcctagtggtgactgtgtggtggctttgcttccatggctccatttggcttgtcctagtgggggctcttctatagtagctccatcactgtgacaagtccctgcctgggcccccagttctctgtgatatactttaaaatcttggtataggaagccatgcccccaccactcttgcattctgcatgcctgcagacctagcagtatgtggacattgccaagatttgccacttctaccttccagagcagtgggtcaagccacacctgtagttgtttgagccatagttggggcagccaagagcactgcccaagcaagatgcaggatgcagagacccaaggcagccatgggcagtaagcccatgaagggaaccctaggcccatcccccagaaccattctgccgtcctagaactcttggcttgtgataggagaggaacccttgaagatttc

SEQ ID NO: 129006 - DNA, 475 bp, Homo sapiens
gatgtacttgatgtcacacattttacatgtttgttttcttcttttgctctccaaacaataagtgaggtaggtattggttttctcactctacagatgaagatgcggagactcaaagacagggacttgcccaaaatcacattggcacagtcagagtaagtgatttaaatctaagttggctctatggttttttacttcatctctcttggctgttctggcatatactgatttatttcttttcttctgtgtgtttctccaccccaggacactcccaagatgaagaaaagataatagagtcaagccattatttatctgaacccagagccttattaggggaaagtccaggagtctcttggattccccagtcacttgtatttcctcatcccaaccgctagcacattgtattctgtggtctgtttatgtttctgtagctggtgcaagactgtgagctcttcatggacatgggcaatgtctagtt

SEQ ID NO: 129007 - DNA, 846 bp, Homo sapiens
gcgcatttacagcaattcttggtggatggcaagattttcacagcttttggagaagttttaggtgaccagttttatcttcctagcatcatcttaaggaccgtttggtttgtttctgctgcaactccttgctgccgcagctagcgagatgcgaggcagagaggggacccaccaagggcagagagacagacagcaaacagcacaggatgggaaaactgagaggtagggaggaggtaaactgagggtggagggacgccctcacgcccataacccctctcccctttttatcagagtggaattgttgtaaatatcaaaaggattaaacaagcaaaatcatcaaattgttatttgatgaggtgggcacagagccacagagagtgccctgaaggacagggcacatgccagggaaccagggatttgggtcttgtctctgtccctctcttcacgcccatagggcactgccaggccagcgtttgaacatagcgtattgccccacctaggatgatgggaaaggggcatgtgcaggcctctgccctgctcagctgctttagcaaagtcttggagaaggacacggagacaaatttatttgatctgcagatggcacagagctggtaaccaacaattctgatgatcaaattgacttacgagacgacctggacaaacctgaggtgagctgaatcaaaaattaaagttactgagaaaatacactttaaattttgcattcaagactaggcacaagtggctcatgcctataatctcagctctttgggaggctggggtgggagcatcacttgagcccaggaatctgagaccagcctaggcaacatagtgagaccctgtttctaccaa

SEQ ID NO: 129008 - DNA, 155 bp, Homo sapiens
aatagctttgactgaaggaaactgagagagttggtgctataggttgatttgtatcatggcactcttttatcatttgcctgtagctgtatttgcttaggagaaccatgcttcagggcacagtgccagctcactcatcttgggcacacattatggag

SEQ ID NO: 129009 - DNA, 1085 bp, Homo sapiens
attcctattgcaccataatttaatactgagagattttcttccggggatttctgcatctggtctctgtttacatccccaaacgcagcctgcttagaaacagtcctggtcttgcctgtttggtagccactgactgctgatgtctcctggccagcagtttggggaggtctccactaccacagccgccctgatctcctcgagcacagggctctccaccaggactcgggctgggcatgcgcccctggcttgagaactttccagagaacattcccattggcttcgcagctcaccaggctgtggttggaacctgagaggtacattatgctccatttccttcactcatgattacgaccagctgccccatcgccctcatttagactttatctgcatttgctgttgggttctctcttcatcttgtccgctgtgcctgccgaaaccactggtctttggtaagaaaactcctttaccttctccacctgcttcctagaacagcccctctgccttcctgtggatggagagctagcctgcccctgatgatactcctgtccttctggctttctcaggaagcagcggcacccacatagggaggctgcggaaggggcacaatctgtgtgctttccactggtcccgagagagagtggcctggcccttctcgttagttcctctacccgagtccttctacctcttcctgtcccttttgctttattgcctggcctcgtggacttcatcacatgcttttagcatttgagaacctggccaggatggaaatgtcctattaaatgttccttatacataaaatgatctgaggaaaatccaaaattatttcctaacatcttacgtactgggtataaaagaggttcgctcttcagatatacagagcacacacttactgtattgaaaatatgattacattcagcctaggcaaaccatcattttaggcttacatgacataaatgtatttttgttaaatcttaagacatttctgtccacaggcatggtgatataagaaagagaaaaaaagaaaagaaatatttaaaaaatctttacacattctttgaagttgtatcattgttttatataccactgag

SEQ ID NO: 129010 - DNA, 436 bp, Homo sapiens
gtttgcaaagactaacactctggtagtataagaagaagaagggaaggaaatgatgacttattcaaaactcacaatgactgtattttacaaatgagaaacagaggcagaataaagttaagtaaactgctacaatgtacattttcagtaagtggcagagccgggactcatccatagggatcttggtcaggactgagatccagctcccattcccacagcaaatcacgatttacttggggtagccccctgacttggccagggcatgaatgtcttctgtgcgatttttttttccattaaaaaacacattgggccaggtgcagtggctcacacctgtcatcccagcactttgggaggtcaacgggggctgactgcttgaggccaggagttcgagaccagcctggggaacatggtgaaactccatctctacaaaaaatataaa

SEQ ID NO: 129011 - DNA, 340 bp, Homo sapiens
gtgtagggggttggagtgcatgtcaggttgcacggcagctttctcattttatttaggcccaggacttgggttcttctatgtagtttttcttcatagcacttgccatcatttgcaagtgtatatttataggagcactttgaaggaaggactatgttttttccacggttgtataaccagtatctggcatataataaatactcagtaaatatttgttgaataaattaactaaacaaatagactttgtaaatttttttctgtcccagtctttttggagagtggattcaaccaaactgtaggcttttgaagaggtgtaaggcatctcaaaggcagacagagattt

SEQ ID NO: 129012 - DNA, 430 bp, Homo sapiens
ctgggaggcagcatgcacgtgaggcccacgtttgtttcctgaagcctggtgtttatgcatgcctatcctcactgagatagagtcatttttcagagcaatttaaccatggccgtgggcctgtccccacagagattagataacacagacacacaacagtgcaagttttagggaaagatttaaagtatccaagctcattggcaggccaggtgtcttccagcggaaagaggaggctagaagtagcaggcttgcccgttgctggggccactttgagaagcagcattttcatattgctacatcccttgagcagcatttgtgtgtgttctagggcattcagaaatgtctctttatttcccattgtggctcttgaattccagggcactgcatgggcacttggctctcatgctgttcaacctcactttaaaatccagca

SEQ ID NO: 129013 - DNA, 186 bp, Homo sapiens
ggcatttggagccttgatcctggagaaactgattctcctatgttagctaatttctagagatagcaaatgattcccctgaaatatgcaaagtctcctttgatatacaagccaaccaatccagagcccacacaaccatctccattatcaaactctcacacactaagccaatattcctcctgtcctaag

SEQ ID NO: 129014 - DNA, 166 bp, Homo sapiens
caatgagcaagacagacgcagaccctgtcctctggagttaacagtatagcaggggaaacagaaataaggttgacacaaatgctaacacagttaattcaattgtgagtaatgccacaaaggagacaggcagagtccggaagccacctcaccctctatccctgacctg

SEQ ID NO: 129015 - DNA, 380 bp, Homo sapiens
cacccttcaacccctagtacactgtattaccttctaagcttgatgtttcttcatagctttccctatgagagccaagattgttgttttatctactgctctttccccagtacctagaacagttccccaaatattctcaggtttgttcaatgtgttgttcaactcttttaaattcttactgatttttgtctgattgctctattcattactgacagaagtgtagtaaaatcatccactatggttgtcagtttctctacttattcctgaagttttgataatttttactttatgtattttgggattatgttacttggagtacagaaatttagaagtgacttataacctgaggaattgtcctttgtcattatctagagattgtttat

SEQ ID NO: 129016 - DNA, 384 bp, Homo sapiens
gtcctcatcttaacagtatatccgacatggtagagactctacccttcttgaaatacttcacttttcttatgggaaaccacttcttaccatatttcctggccagtccgtctcattaatctttgctggttcattttcctcttctgacctctaaatgtttgttccccagagctcagttctcagaattcttatgtatctacacttttcccctaatctcatctattaaataatgcatagaccgacctctcccctgaacttcaaacttgcatgtgtaactttcctctttaatctgcacttgagtgtctaacaagaatttcaagcttaacttgtctacagccaaattcttggctctaaaatctcttcttcccttcatcctccttaactcaa

SEQ ID NO: 129017 - DNA, 191 bp, Homo sapiens
tatgtgaaatatatcctaagtgactcttttggataagatatcctgatgggtagcctttgagtagagagaggtgacgagacattagctttggagttccaaagtcaaattacacagaggcagaagaaaccatctagataatattttttttgagatggggtcttgctatgttgcccaggctggtcatgaactcc

SEQ ID NO: 129018 - DNA, 409 bp, Homo sapiens
tcttggaaaggcctttcttcctatccttatctgtctgtactctatcattctttaaaaacaaaacagaaatatgtacagctttttgcaatgtcaattataccacaataaagtgttttaaaacaaacagcaacaaccaaaaaacctcagatatcggttccaaaaactttgttcttaagctggaaatgattgcttccattttgaaattttataggacattgtatctctcttatagaaaaaaatacatcctttatattctgtctctgtttttagacatttgctttaagatagatggaagagcatgctctttttcatttagaccttttgtgaatacctcagcagaaaacagtttagtatgcaccataccacaggtgcagcataagctgctactcaacaggcagacctcaccagg

SEQ ID NO: 129019 - DNA, 312 bp, Homo sapiens
agctgggattacaggcgcctgccaccacgcctggctaattttttgtatttttagtagagccagggtttcactatgttggccaggcttgtctcgaactcctgccctcgttatcctcctgctggccaccaccacggaggcacctggtgagtacttcttcttagaaagggtgcagctcaagaagtaccagggcatgggctcactggatgccatggagaagagcagcagcagccagaaacgatacttcagcaagggggataaggtgaagatcgcacagggtgtctcgggctccatccaggacaaagggtccattca

SEQ ID NO: 129020 - DNA, 511 bp, Homo sapiens
aggggagtcgtccagtagttgtttcagtcaagggtctggaactcagggctggggacacacatttggtcaccatctacctatgaatggtatttagagacactggaataaaaaagactggaaccgagaaacaagccctggttgttcagacaaaggaagagccagcaaaggaaacttcagacacagcatcccaggaagacagaagaaaaccaagaaactatcgtcagagatgccaacataagaaaagggtgtttcaaggaggaagtgggccatggagctataatactgctaaataaataatcttgcaaggaacccctgtattttgtaacacggaagtcactggtgacattataaaaaacagtttcaagggcaagttagggaggaagtctggataagggtcggggagaggagagaatggaatataaggtaaaacaaggatatacaagcaactttacaggcatttacccagattttcccatttgatccccacaattaagtccattttacaattgag

SEQ ID NO: 129021 - DNA, 327 bp, Homo sapiens
atcggtaggaaactaacacccccacatgcattgttatctcagtgagaatggaagcatctggtcagcttggtgtctgcataacaaacacagcagcggctgacatttattacatgcttaggcaggtactgtgcgaagcattttacatcttttttctctccctggcttctcacaatacccccagagggtcctcgtttcttgtgcaagcatggagagtcactcacattgggactcgcatcagatgtgctgtaccaaaaacatatttgatgagctagctaaatgtgggggtggggagaggtaggctttctgagagaagaggccagttggaaa

SEQ ID NO: 129022 - DNA, 768 bp, Homo sapiens
agcagaaagggtggggagccaggtgaagccaggttttcagagtcaggtcggaagggaaggcagaacccagcaacctgggctgcacgaagcagcaatgggagtggtctgggcaagggtctggcagggatcccacccctctgcagcccagaaacccagccacctgggagcgctggcaggggcaccaggctccctggagtaagcctttgagagcaagtcgactgtgacagcccagcctgcgaggaaccctgcctccgaaagttccccaaagtcagtttggggaagtttcttccagtaaagtttccatgaggtggccttctggctgaggcaatggggtcagtccagagcaaaattctcaagtccttgtgtcctcttgtctctgcctgagccttgtctgctaccccacccagatgcctgactttaaatgactggtaacagcttaaaatatgatccgttgtaggggagggcactcctcacatcttagcaagaatcaaaggctaatatttacaagtactttccaactttcatcgcttcccagaaggaacacccagctccccacagcatgggagaaagatggtaaccctgagaagtcaaatatcccactgtgtgttgctgggcagtctctgggcctcagtctcccatctctaaaatgaggaggctgattgaggtcccaggtgtgacttctcagactctcaaacctcaaggctatataataggcaaacagagttgataacaactccaggtaaacagacatgtctttttaaagtattg

SEQ ID NO: 129023 - DNA, 261 bp, Homo sapiens
agaaacaatctcctgatgcttctgcctctgattgaaccctgactcatacaggtgatgcaatctcaacagaagggctagggggaactagaagcctggcagcgcctgctctcaggcaagtgtgagggttttcctgacaatcagaattctgcctgagcctcctgggccaacaggagctttgcacagcagaagccactgacctcctatggatatttctgcaagcttggatgcacgaatgagttgtcagaagcacttggtttcctg

SEQ ID NO: 129024 - DNA, 129 bp, Homo sapiens
gagcccaataaggagagagaacagggcagggaaacatctcccggcttcatgtaaatccgccttctgtattaacatgctttaattgtgcctaattatgtacttgcttatagtttttattctgttgtccaa

SEQ ID NO: 129025 - DNA, 186 bp, Homo sapiens
cactatatatttttcttttgttttgttatgtcttctcccatgatactgcaaaccctacttctccaaaatacaggcaaggggtttttgttggttttgtttgattgttatgtccctagcatctagaacagtgcccaactgtttaataaaagaatgaatggatgaattagtgaaggctaattatttgta

SEQ ID NO: 129026 - DNA, 325 bp, Homo sapiens
atacaataaaacgcacccattttaagcacatggtttgatgagttttgacaaatgcaccagccccctccaaatccatcagcctagaacactcccgcctcccgtttgtggtccatctttcctcagcacccccaggcccaggcaatcactgacccgctctgtcactgcagatttgtgcagtctcgtccagagcgttagggaggtggaatcaggcaggaggagctccttcgcgtctggccgcctttgctcagcccagcggtttaggcttcgggtggcagttgcgtgcatcagtggttggttcctctcggttgcgtggacgtactgcagc

SEQ ID NO: 129027 - DNA, 604 bp, Homo sapiens
atatttctgttttgttgtttgagatgggagtctcgctctgtcacccaggctggagtgcagtggcacagcctcagctcactgcaacctccctgtcccatgctcaagcaattctcctgcctcagcctcccgagtagctgggactacaggcatgtaccaccacacccagctaatttttgtatttttagtagagatgggggtttcaccatgttgtccaggctggtctcgaactcctgacctcaggtgatccgcccaccttggcctcccaaagtgctggaattacaggcgtgagccacgctcctggcccttgtatatttttctaagtataaggtgacaggatgtgattctctaaaagcacaagcatttttggagtattcctcaccacacatttcaaaagctgaagaaaagtctccttcatttactgtttccttcctatgatttaggatttagaagctgctatgaagggggacagaaggagccagttgtactggaacatctccgcttcaccttctgggtcacctgtatgctatgtatttggccatgtttcctagtacaaagagccctttatatttagattccttatgggccaatttcctgatggaaaaaa

SEQ ID NO: 129028 - DNA, 488 bp, Homo sapiens
agatgaggaaattgcaggctgatgctctcttacaacagcactgagagtcccacaggagatcctcactagctacttgacagcattcagcagcctcccagtgcaggtatgtgaagacatttgctttactaagcaaatgataaggctctctgactctcatcagaatctccctgctagtcgtcctcactggcctagaccacaggaaaagatgaccctcttgttacctgcagtgatagaggtgaatggttgcagcagggaatgtaaggcccaggagtataaagtatttactatggccgggtgtgagggctcatacctgtactctcagcactttaggaggccgaggtgggtggattccttgaggccaggagtttgagaccagccttgccaacatggtgaaaccccgtctctaccaaaaatacaaaaagtagccgggcgtggtggatacgcctgtaatcccagctactcgggaggctgaggcataggaatcgttt

SEQ ID NO: 129029 - DNA, 370 bp, Homo sapiens
gcatggctctttaaattctcacaacaactctacgaggtggattctataattactctctcttcaacgtaacagaaaacttacatcaaagaggtaagtgagctgcccaagtgcatgcagcctgacactcagaatgtgaactcgagtcagtctgattcctgagctcctgcctctacagcatcgatcactatacccagggaggaagtgagatcacactacagctcctatgtcaccccgtatcactcagtaatacatctgagaatcacggtgatatggagcctcctgcccacagcaggagtggatatgtcaggtagccagccagcctgcctatgcagcagcagcagcttgataccagaaggtccctagatgtcag

SEQ ID NO: 129030 - DNA, 356 bp, Homo sapiens
ggttgctattatgtttaccagcaccattaaatctggcacgtgttcagcttcacaccgtattatcatgggaccaaatagattagaataattgatgtttccaaagccttttttgaccattcatggtctcatttgataaatctttcagatatgatatcatttcgaacttgtgtttactaatggatcacagaagaagggcagaagagcaaaaccatttatagcttccttgtgcagggtctcctcctcctgttgaaatggacaccagtctggcctgttggtgctcaggttgcagcatgagggcctggacaagaatccatgtactgtttccccctgctcgtttcttgagattggagaagtat

SEQ ID NO: 129031 - DNA, 886 bp, Homo sapiens
gggattgttcagaaggctccatagatgatggctttgggccagacaatcagattatgctaagggaagttaagataaaatcctgttgcctatactgaagagaaacatattatttgctatgaggtaaaatagcctcttctactaaatctgaatgttctagtgagttgaagtgttatttatattcaaaagaacatatagataggtgtaggggtgagttattgctatagtgagaagctgtaaagcaatattttgttgattatggtaaaaattggttaaatgcattgggtaacttttccaattttaagctcaattaataagaagggaaattgagaccctgagtaggttttctgagataggcgtctgtataaattgagacttaagagaagtcaggatgatgaaggaaggctaaaagattggattgttcaggcttgagactagaagagtggggagttaataacagtctttaaggatgaagggttcttataagagaaagaagactagctgttttccatctccagtgagtacagaacaagaagatgggatttaacaaatatttattgaacatctccaccaagtgcagaacaagaggatgggaagtataagtgctttagatgagaactaaaaaatgtactaagatgaagattttaaatccttgagaggttatgaattttgttttttagagatcttttaaacaatatagattttctcttcataactttataaataggcactagtgtcaattcaccttaacaaacgtttattgcattcttaaagccccttccagtttaatgatttcagcaatgtgtcagtgaatagagggctgataactttgtagaactagtcaacatttaagctgtttaaaataataatcgtgatgttagttataata

SEQ ID NO: 129032 - DNA, 471 bp, Homo sapiens
aaacaccatattatttaggaggatagggactgtctgttcagcactgtgtcctcagcagtgcctggtcctgtatgcaggacccaggtttcatgctttctaatttcacctgagaacttctcactaagccccctccctggctgtccaccctcaggtggaagtaagattttcttcttctgaatgttcataacactgaatctaaacctcagatctgcaaatgcatattttctactttgtagtgtttgtgtagtaattccattaatagggtgtcaatgtctggaagatagggcagggtcaatgtctgattcaatctggtgtcctcctgtatcccttatatcatcaggcactgcgtttatctgagtgtttggatggaaacccacatattcctcatttctactatgagatattgaaccaggattgcccaactataaaattgtatgatcgatgtaagatagaacagagaagtaccttccc

SEQ ID NO: 129033 - DNA, 551 bp, Homo sapiens
ccccactcgtccacggttggcttggaatctccaaaccacctgtcctccttctgtgagaagaggaaaaggggaagtctcagctacgtgaggaggctgaggcaggagaatcgctcggtcatgggaattggttctctcatgggagagaacttttttcttcaagagatgtcatttcaggttgtagatttgtgagtgggcgagaaacagactgtagagagtttaggagttagtgggtgctgaggagagaggcagtgggtatgcaccatttggcagggagaagaacgtgcgtagaaggtagctacaaagatgctcagaggagctcaaagctctgagaatttctcagttgaaactatttttcttaaaggtcaccatttacctccttcttgccagataacatctttcctttaccctcaatttgatttctttgcaatatttgacacaatttatctcttaccccttcctttccttaaaactctcttctcctgtggcttctgtaatatgacaggtactgcccagatatcttcctacatgactgaccactaattctctttttt

SEQ ID NO: 129034 - DNA, 349 bp, Homo sapiens
cactaagacccaccgtaagtgccttcacatgtagcgtctcatgtaatcctcatgagtgacctgcaagacaagctacttcagacaggagtctgagaggctgtggccttgctaaagtccaaaaccagttaggtgtgaatggagactcaaatccagatttcctattgccaaatactgtgttcttcctattacaggactctgcttaatacatcatcctcaaaaaagttgcttctcagttattttctaaaactcctcacaacccggagaagtcaaaggcttgtcgtagtccggtttgcaatgtcagagccttcatatgtcatgaaatatttggagtgctgggtgggcaggaggg

SEQ ID NO: 129035 - DNA, 492 bp, Homo sapiens
atactttttcaagctgactcttcctgagtggtggttagggaggagctgtcttggggctgttctggagctgttgaggtcgggtgtctgtctggatactcacagcctatctgttgaggagaatgcagttctcattgtgctgcctttggtggtgctgtgtgtggctttttagatgtgggtggaggtgagttgggggagttaatgagatcttttttaggtgcttttgataaagtagtctgcactagaggattcattgtgactttttcccttaacctgcacatacttctctgctcacccttgctgtctttctcatgtctttgattttccaatctcctcttggttgaatttacataaaggctctgctatggtttaaatgtgtcccccaaagtttatgtgctggaaactcaatcctcaatgcaacagttgagatgtggggcctaataagacagccctcatgaatgaattaaagttgttattgtggtaatagattagtaa

SEQ ID NO: 129036 - DNA, 192 bp, Homo sapiens
atttcacctgcaaatatctatgttggcacttagtcttggaccctcttcttcaattttaacctaaattcagaacacataaaaataaggccaggtgtggtggctcatgcctgtaatcccaacactttgggaggccaaggcaggtggataacttgaggcaaggagttcaagactagccgggccaacatgtcaaaa

SEQ ID NO: 129037 - DNA, 467 bp, Homo sapiens
ctcttctccctatcctaaacctgacatggtcacttgaaataatcttcctctggttttttcttttaatttaatttttattccaatagcttttggagttcaagtcgctttttgttacatggatgagttatatagcggtgaattctgttcctccattttttaaaccatacacctttcactggctcctcttcaggccgcaaatatactcaggtctctcagagagtataataataaaatccttccttggcctggctttccctgctagtcgcctctctatctccttatgttcactgcctcatgtctgaaagactagtctatattttctgtgtctactgtcttcccttttcactctgcaaccactcacaatctgtctccagtgctccactaaaagtgttctcactgaggtccacgtgaccctcttcttgccttgccatctgtgtatttcttgatatctctggtgtttaacagtc

SEQ ID NO: 129038 - DNA, 143 bp, Homo sapiens
gactggtcttgaactcctggactcaagcgatcctcctgcctcggcctcccaaagtgctggaattacaggcatgagccactgagctcagcttgaaatcactttttgtagtagcaaaaatgtatgtgctgttacttctgccccca

SEQ ID NO: 129039 - DNA, 549 bp, Homo sapiens
cctcctagctggcgagaagttaccaggtaactgcactcctgacgggcttcatgttgcaggccctgaaaccagctgcctgggaccaaatcccagctctcatctcggcaaagttactgaatctctctctcccccatttcctcatgcgtaaaatggggaaactaacggcacgctcctccagggccatcagtagggccaagtgagttaacgctgcagagtgccaggactggggccagcacacaccacgtgtgcaggaagcgctgaatacttctattcgctattacgtacaaaggaaggtttaaaccaggtttaaacctatcaacaccttcccacagttcttaacacaaattccaaacttcttccccagctcacacagcccagtgtgacccaggccctgcagccctctcctgtctctccacgcccctgctgcccactgcagtcggggcacctctctcccatcctccatgtgcctgccctgtcttgactctgagccttcatctgtgcaattctctctgcctggaacagcctccccctctcctctgcccacctaac

SEQ ID NO: 129040 - DNA, 324 bp, Homo sapiens
taccctgaggtcataaagaatatataccaacatatttttcttctaaaagttttagttttactttaaatttttcttctgaatatttggttttcattttggttttacatttatgtctttgttccatttggaatttattttgtaaagcaggtttccctgtttcctagtcctctgttctgttccattgagccagtgagcaattgccatatttacaatatttagtcttcccatccatgaacatgatatactgttaatttattcaggtcttcttttatgcccttcaaggatgttttgtaatatttcccataaaaccctcgcacagatttt

SEQ ID NO: 129041 - DNA, 599 bp, Homo sapiens
ccctgtctgctcattgtcctggctcaaataccagattccatagtcagtttccagaatctccatcctgcctatttcctgactgaagtaatcatgtcagataatttctctgttctatttatattctccttagaatacttctacagcttctactgaatagtcaatttaccatagctcctgaaaggacaaatggaccctgatccaatctgggcttatactccttcctaagtgtttacaatttgaacacaaatactttagttagtctgtgtcaagcatgggtgctagaaggctatgtgacatgccaggggaggggaggggcagccattttccatcatggacacagaagcgaggagtatcagtctaaagaagttatcaaccagaggcactagaaaaagcagaaatgagactccacatagccacagagagatggaaaagaaatcctggccttggttcttcatgaaattcaattgcatgctctgccattgagccccaagagaaaacaaatacttttgcaccaggtgggttggcgcacacctgtaatctcagcactttgggaggccaaggcgggcagatcacttgaggtcaggagttcgagaccagcc

SEQ ID NO: 129042 - DNA, 417 bp, Homo sapiens
gcccgccctgtctcactgctgaacactggtagtgtttctaattttttgctatcataagcaacccaccattgaagatcctcccatttaaaaactttgtccacatttccaattatttctttagaatagagctctaggagaagaatcattagatcaaaaggtatcagcgttttaaagaatctagatccgtgctgcccaatatggcagcctctgccatatgtgactaaaatgagaaaaatacaggtttttggctctttcaattgacattgagtaaagtgaaaattcaattcctcagtcacacttgccagatttcaagtgctcaggagcgacacagggccagcagctactgtactggacagcgtagatggagagtatctttattgcggcagaaagttctaatggatggtgttgtctcggcac

SEQ ID NO: 129043 - DNA, 126 bp, Homo sapiens
gctgtgcaggagggaaagtgctctacccctgtgtgatccacagctgggagcaactgatctgctgaggctatgctgagtctaggctcgaggagggcaaggccgttgaacgtgcacaagcggcacgcc

SEQ ID NO: 129044 - DNA, 436 bp, Homo sapiens
ataccccagagtattcttttcatattattcaaatcctctatttgaaatcaagctacagccatagttttatttcaccagtttattcttcacaaataagatgttctttaaaataatgaacatgaaagtatttcattcaataaataaagcaaagtacttacctataatgctgattctgtaacaaataaaaatcagataatcatgactacaattacagaacctaacctcagggtaaagaattcctgacaactgagtccccaagatctgctccatgagggttctcaacatagaaacccaaaagcccatgaagtaagtcctcactggatgaggtaaccaagtatagttcaaactagtaattaaaagatagaagtttgatcctatttagtaattcattatattacttaaaattaataatctaaaattcttaattacgagttag

SEQ ID NO: 129045 - DNA, 351 bp, Homo sapiens
cttgctttgatatggaaaataaactggagaagatcaggctgaaagacaagatcagttaagatgtatttgtggtacaacacaaacgaggctcagccaaggtacagctagctggggaggagggagctggatgaattcaaggcatattcaagaagcagaatgaacaaacgtcatggggaatgagggagagtaagccaagtatgggcacatcttgtcttagtgtgcttcactttatcatgcttcacagataatgcatgtttgtttttgtattttaataattgaaggtttgtggcaatcctgcattgagcaagtctatcagcactgtttttccaacagcatgtgcccagttcatgc

SEQ ID NO: 129046 - DNA, 435 bp, Homo sapiens
tcatacgttcaagtcctaacccctgtgccttagaatataaccatacttgaagatagcatatttaaaggggtaactgagttaaaacgaagtcaaaggatcaatgactgtcttcactgaaagaacttaggacacagatctacacacagaacagcaatgtgaagatgcaccaggccaaggagaggtctcagaagaaaccaaccccactggcgccttgatcttggactttgagcctctagaactgcgggacaatccatgtctgctgtttaggctgagatagagcaagtgtgagcagggagccaccaaagccaccggcaggggcaccctgggggacagtgtgacagtgtcctgcaccccagcctgtgggtttgcaggggatagggacagtgacctcagccagtccctcgagcccctgcctgcttctgcccagcttctccc

SEQ ID NO: 129047 - DNA, 460 bp, Homo sapiens
gggaccctgtgctgaagggcaactagttgggtgatatcattaactatggataattttatagaccctaggatgtgtcaacctcattggggtttacactgtaattactgccgacttttttagtatcttttttttcttttggagacagggtcttgctctgtttccaggctggggtgcagtggcatgatcatggcacactgcagcctcaacttccagggctcagttgatcctcccatctcagccccatgagcagctgggactacaggtatgcaccaccatgcctggctaattttctttttctttttttttttttttttgtaaataccgggtctcactttgttgcccaggctggtctcgaactcctgggctcagacaatccttctgccttggcctcccaaagtgctgggattatgggcatgagccactgtgcccggcctttagtatcattttgaatcatttaatc

SEQ ID NO: 129048 - DNA, 293 bp, Homo sapiens
tagagcccagaaaccccccaaacagtatagtcttcatgcaactaaaatccctttttagatcattttggggttttttaaatgctatttttagaaatttgaagtggcctgctttttttaagcatttaaatgaagcacctcctttagggaactgttttcatgtgttctatcttctaaatcatgcaaaaagtaggaaaaaaagaaactctggcatagttctcctagcattcaaaaggaaaaatatgtttccattcacaatcctaagtcaaaccgcttatattcgtttctgtaaaatt

SEQ ID NO: 129049 - DNA, 365 bp, Homo sapiens
catgtgcaaacctggactagggagaacagggacaaagaaggccgagtagtgattcaaaagggagaccaaaagccccaacatttaccaccaaacacctcagaacaaaaaatatagattcctgggcctctccccagaccaagtgattcagagcatctggggttgattctgatcaacatggcatcaatatttttaaaaagcactccatacctgtaatcccagcacttttggaggctgaggcaggcagatcacgaggtcaggagatcgagaccatcctggccaacatggtgaaaccccgtctctactaaaaatacaaaaattagctgggtgtggtggtgcatgcctgtagtcccagctactcgggaggc

SEQ ID NO: 129050 - DNA, 401 bp, Homo sapiens
aaaaaataaaaaattttaaaaaaggaacatctactatgtgctaattgtgcatgttgggaaaataactatcaattaataagtccttctggacttcaggaacttacaatctagtaagagagatagtcaagccaatagccataattcaatatgagaagatatatgagatatatatgagaagatgtatatatgatatctcagatatcagagaagtacagagtactcgttccttaactactataggaacacagatgagggttaagttaattttccttagggttagagatggttcagaaagactaaaaagaggagaaaatatttgttctgggccttaaaagatgagtagaaatttgctgaccaggtgaatagtgaaacaggtataaggagaggagagaatagtatga

SEQ ID NO: 129051 - DNA, 432 bp, Homo sapiens
gtagattattttctactatacttagatatttggtcttagcgtgtatttccacaacagaaatacagattatcttcagttatgttcactctgtttggatagtcaaccatattagtctagatggatttttggaggtgttgtactttggaggttataaattaagtcttctttcttgtcttttatatagaagtctactttatgtctttgggtagacattaccatcatctaaaacagatactgaagaaacctttattcatgttaacaattgatcagaacatgtctgtatacattattagtacatttttgtttgtttttaaatatttgaatatttatttcaccagatgctcaaataaggagatgagtaaactctgataaacgagtttaatgacaaattgcgacgaagattcttcactttacttgatggtaaaaaaaaaa

SEQ ID NO: 129052 - DNA, 1072 bp, Homo sapiens
ccggctgtgagagggaaggagcatgcgtgcagccgcgtgggggagtctcacggtgactttaccgaggaaaatgaaccagacggaaagacagcactctgtgcgcctccacttaggtacggttctggaaaatgccaaggaatgcagggtgccggcaggcagctaggtgaccgggagggaacatgaggggacgcgaagagatttggggataagggctactgcattatctcgaaggtggtgatggtttcacgggtgtattcgtgatcaaagtgtgtcagttttccactgtagatctgcgcagtttgttatgagtttcttacgtcggttatgcctcatccaagttgtggggatgtagattcatgcttaccaaagcttccatgcttcataggcatgcctgaccccctcagttgcagaacgtcaacacgcccctgatgaggaagctggcgcgcctcaagctcggcctcgtggaaatggctctgggcatgctccagttcatctgggaggaggcccacgggcagcagagtgagcaggggtccctggagaagctgctggcggactatctgcagaacaccagtgactacacttccgtcggcctgcaatggttcacgctgaagcggactctagcacacggggcactggcacagctggggagcctgcagccgctgagcgtgggctgtgtggagatccgcgcccggctcctgggcctggccgggagggccctgcacctgctggccatgcaagctgaccctgtgcaccctacctgctactgggaggcgggcccctcggtgggcgccaagctgagcggcctcaagtctctggagctggaggtagaggaagagggtgccacaaagtccagcagggacccgccggcctccagggcagccccggaggagcactgcaggagaggcgaggacctgaagaggaggatggttctggcccagcagtacctggctcaggcgtcagaggtgctgctgcagtgcctacaggtggcccttggcagtggcctcctggatgtcgcagcagccgccagcctggagatggtggagtgtgtcggcaccctggaccctgcaactac

SEQ ID NO: 129053 - DNA, 816 bp, Homo sapiens
ggaagcgtatggcctggcccagggtgccgtagctgaggaagaagggaggcttcacagcatccagggcttatatggcctggcccagggcgccatggctgaggaagaagggaggcttcacagcgtccagggcctattgtcacttcaagacttgcagaacgtcaacacgcccctgatgaggaagctggcgcgcctcaagctcggcctcgtggaaatggctctgggcatgctccagttcatctgggaggaggcccacgggcagcagagtgagcaggggtccctggagaagctgctggcggactatctgcagaacaccagtgactacacttccgtcggcctgcaatggttcacgctgaagcggactctagcacacggggcactggcacagctggggagcctgcagccgctgagcgtgggctgtgtggagatccgcgcccggctcctgggcctggccgggagggccctgcacctgctggccatgcaagctgaccctgtgcaccctacctgctactgggaggcgggcccctcggtgggcgccaagctgagcggcctcaagtctctggagctggaggtagaggaagagggtgccacaaagtccagcagggacccgccggcctccagggcagccccggaggagcactgcaggagaggcgaggacctgaagaggaggatggttctggcccagcagtacctggctcaggcgtcagaggtgctgctgcagtgcctacaggtggcccttggcagtggcctcctggatgtcgcagcagccgccagcctggagatggtggagtgtgtcggcaccctggaccctgcaactac

SEQ ID NO: 129054 - DNA, 466 bp, Homo sapiens
cgagactccatctcaaaaaaaaagaaaaagaaagtcgtcagataataaggagtgctgggccactattttatagagagtgtttggggaaactgtctctaataaggtgatattgagcataaactgagacatggagagagttttgaggctacctagaagaaaagtggttgagacagaggaaacagcaagtacaaaagacctgagatgggagcatgcttagggtattcgaggaataacaagaaagctgctgagttcaggacaagaatgagtgggagagggcaatgggagacctttctgatcctgtagaacctgtttgctacagtgagaagtttcttgactttcacatttagtgatatgacatgctaattagagagttttgggcaggggaacttgatttgatttactcggctttctgaagaacagactaagagaagacgagaggccgccgggatgcgagccgggctgtgtg

SEQ ID NO: 129055 - DNA, 238 bp, Homo sapiens
gtagagggaggaatggacagcaaaaggacatgaagcggcggccaggctcggtggcagcactttgggaggctgaggcagggggactgcttaagcccagaagctcaagacctcaaggcgatccgctcgcctcgtgctcccaagtgctggggactacaggcgtgagccaccaggcccaggctcaaacacatcattctgagtaaaagccagacatgtatgatgtgggcaggtgggtttattt

SEQ ID NO: 129056 - DNA, 749 bp, Homo sapiens
agtactaaaacttagtacaaagctatagtaatcagatactatgaaattgacataaggacagacatatagatcacttgactaggcttgacagtccagaaataaaccttcacatttctgatcaattgattttctacgaggcagccaacacaattctgttttaaatatggtggtaggacaacggagtagctacattcaaaagaatgaagtgagacccttaactcacaccataaacaaaaactaattcaaaatggatcaaagacctaaatgcaagcattaaaactataaaactcttagaagaaaacataggaggaaatcttcatgaccttggattagtcaatggattctaagatatgatacccaaagcataagcaacaaaagaaaaaatagaaaaattggactttatttttttaagagatggggtcttgttatgttgcccaggctggacttgaaatcctaggctcaagtgatcctcctacctcagcctcctgagttgctgggactacaaacatgtaccgccatgcccagctaaattggactttaaaatggaaaacttttgtgcttcaaagacgtcaaaaaagtgaagacaacccacagaatgagagaaaattttcacaaattgtatatctgataagagacttgtgcctagaatctataaagaatgattaccactcaataataaaaagacaaataaccccattaaaaacaggcaaaggatctgaatagacgtttctccaaagaagataaataaa

SEQ ID NO: 129057 - DNA, 426 bp, Homo sapiens
gagattaccttgtgagcctacaccaccagggccccgggttttaagtacaaaactgggtggctgtttggacaggcactgagcagcaggaattttttcatattcctgtggcacctggaactccagtgagacaggaaaactgtccactcccctggaaagggggctgaagccagggagccaagcgatcttgctcagtggatcccactcccacagagccccgcaaactaagaaccacactagcttgaaattcccactgccagcacagcagtctggagtcggactgggaggaccaagtttggttgggggaggggctaccgccattactgtggctttagtaggcggttttcccgacggtgctaaggagactcggaggtttgaactgggcagaattcaccacagccagcaaagtgactgtggccagactgcttc

SEQ ID NO: 129058 - DNA, 331 bp, Homo sapiens
gcctggggagggtgtatgcgtgcgtgtgcgcctgtgtatgggtcagtgcccgctattttaggaggaggccatgggggccagagttctcttccgatttcctcatgctggcctggtcagtcagctgcatctccgggataggaggccctgactcctctgctagggtcttttagaggcgaatccggctgacctcttcctccccctcctctcaagccaggacagtgacctgggaggagctagtggccacgtgcgggtggctggcacagcccagactgtgggaactggggtgccagcctgtatccccgtgtgtgggcagctgacacagcccggcctg

SEQ ID NO: 129059 - DNA, 436 bp, Homo sapiens
actcccaattccaaagttcctgagtccatattctcacaccgctccagccatttgactctgtaagccttttactacaggaaggaccttttgctatctcaggtgtcctgtgctcaggattctcaagaggcaggatgagtaggagattggcaatatgattcagagtatgggcagacacagcacagtctactctcggtccattatccatatttgtggagggcagctacggataagaggggaaaaaaacaaatggctctatgtaacaggtgctgaaatctgggtcctgtactatatttatcagtatgtttgtgatagtggtcatgatgctaattacatgggacatgttataatgaaggctgtcaatcctgaaacttaattcaagaaaagagtttaggccgggtgtgatggctcaagcctgtaatcccagcactttgggagg

SEQ ID NO: 129060 - DNA, 330 bp, Homo sapiens
tatttagaatgcacttactgtttttaatgaagccatgaatcttcagggtaaaaaaatacaaaaaggaatgaagacttagaccaatttacttatttatttattttctggactaaaaccacttctgtgctgttctatgcttgtcactgcatcatgtgtctccccctacaggtaaagagcaggcagctgtactagtttcaccgctcctgtagaagaatttgtattttccaaagtcaaaatccagaagtcttttgctttagggtgctggtctctatgcctctggggtataagcagtagatataatcaaaatagctataactacagagatatgtc

SEQ ID NO: 129061 - DNA, 641 bp, Homo sapiens
gggtggggaacaactcctactaaccctttgagatgctgagttttcttttaaagtaaaggaaatattacaagattttctgaaactgccaacctttagcaatattttcagacattctccaacattttcctttgtcggcaatcagagatgacctttgtcagcaatcagagatgacctccacactgaggcgaatgttccactccccttacccttttccttttgtctctctttccctcctctcttcatccagtaactccagttagcctccattgtctccaagccggcttttgtcctcatccacaacgcctccacacaagctctgaacacctgtccattgctaacttgagactgccatgctgttaggaagttcaagttcaccacatggagatgaaataagatatcatgataaacatccccagctgatcccagcctccagtgatccatcaactacatatatgatcctaagtcacatgtgtgaccccgagcaagatcagcagaacaatcactcagccaacccacagaaccctgaaaaaatataaatcattatagtttaaaccacaagttttgggtagcttgttatgctgctattgataattaaaacaaactggaatattttcatctagatggcaatctactcaattgtt

SEQ ID NO: 129062 - DNA, 395 bp, Homo sapiens
gccattagctccccctgcagaatgtcttcagaatcggggcccggtcagtctcctgggtgacctgctgttttcctcttaagatcctttccactttggttgctgctttcgggactcatcgagtccttgctcaacaggataccccttgaagtggctgcctgggccacatccccttccaaacaagaaatcaaaatattagaaatcaatttttgaaatttcccctaggaagactcatttgagtgttcaagttcagagccagtggagaccttaggggagggtggtcacaaggattttgcacagtgctttagagggtcccagggagccacagaggtggtgaggggctgggtgctcttttctccgtgcatgaccttgtgtgtctatcttcattaccacaatgc

SEQ ID NO: 129063 - DNA, 474 bp, Homo sapiens
caaaagaacaattttggtaggggcgtacatgatcagtaatatctgaaaatatggcagaggagtaaatcaaagctacatcaataaaatagattaacttcccaatagggcagtattgggaatatcttctcatttgggggtggggttaggctctgagtataatagaaagacataggttttattctactagggtgagctggagttcatatcccgttcaaatgggtttcagtttttttcagctgtaaaatggggggtaataccttcctaatggtgtcatttggagggttaaattagataataaatgttagtaactggtgtatcctctggcaaatagtaggaacttaatcttatcgttatttttagcaacaatatgggagctccatcccttccccaccctctcaggtgtggttaaagcaagtaacaaaatcactcccagtgggtgcaaagagtcctgtctatcgccgtacctggcacacg

SEQ ID NO: 129064 - DNA, 650 bp, Homo sapiens
gacacaggagaactagagaaccctgctccggtgggatttgcagttttgattctccctagcctggcctccatcaacaaagataccttgagtcattcatttttccacttccaatcactgaatcccaagtggagacctcaagcaaattcactctccaacaatacttctagagaatttgaacagatgtatgccattcttcaaagagattttcacaagactaaggaagccaggatgaattttgtcacctttttatgtatatcagtgtacaatctcctttttgctgtaatgtagctcattttcaaatgctattaagtggctaaaagctcaaaccttaccatactaaaaaaaaaccatgaagtttcttttatcccacctctcctagacaatacatgttaccatgaaaaccaaataaaaagatgatatatccatggcattaaatacaaggatagactagtagattaaacattctttaatggagtgaatattcttctcatagtagtgtcttttaaactcatctctccgtttacattcccaatgcacctgctctagatgcaagctttattattgccttctaattattctccccgacctccaaactctctcctccccaaaccataatttatgtcacaggaagaataatcttcctaaaatag

SEQ ID NO: 129065 - DNA, 303 bp, Homo sapiens
cagtgacacctgagcacgtcttgcctgagtcccaggtgagctgtgctttccagctgttgagggctacctttctctgctatgtatgattaatactgtccaggaggggttcagaggtgtgttagtcccgggtgttctctgggcaactgggtacctcccaggctgtgggctgacgccttttctcctttttttctgccttctcacttaaaaaaatcatgttctgttaattcctttatcgcctggccaattcatagccaggtggctaggctgcttctgtacagtggcaggttctgagctgaagtccat

SEQ ID NO: 129066 - DNA, 359 bp, Homo sapiens
ctccaagctcttcagcctagagaagcttgagccctgaccacggggcctgagaataggagcgaaggaggctgtgtctagaggaaagaggagacacccacccaggactgaggcacccagaggatgcactgaggccccagaggtgtagtcaagagggttataggaatttggagaagagaggcactgctgacgtgtcacttgctctctgagtgtcactagtggacaaatcactggagccagctcctaccacttgaattttgtctgttagagggggtcctgctggtggcttgaaatagaccacgacagaaatgtttacaccacagaaattggcaaacgctacacgtcaagcaccagagaccaga

SEQ ID NO: 129067 - DNA, 301 bp, Homo sapiens
cggctctctggggtgacagttcctcagacctcccttgttttgagggctctggcagttttgaggattggtctcatgttttgtaggacgttcctcagttgcgattgtctgatgtgtttctcacagtgggcagagctggagtgaacgtttttgtccctgggtttggtaactgctgcttagaactcaggagaggtgcacggctctttgtcccatgttgtgaacagatgggtaggcagtggataggtagttgtttcttcagcctccccttgtgtctttcaagcgagcactgtgtgtcacgtgggga

SEQ ID NO: 129068 - DNA, 158 bp, Homo sapiens
cttgacctccctctaatttcttacacttccataggtgaagtcacctcaacctgtgattttaactatgaattatttctaaagccctcttcaacaccaccctttctcccaagctccaaatctgcgtgactaaacacttgctaagcacatacacctacata

SEQ ID NO: 129069 - DNA, 455 bp, Homo sapiens
catgttatttgtgttgttttgcacctagcctttttcattcaacagcatgaaagatctcatatcagtaggttgagagtttcttccttgttttcagctgtgtcatatgccttctatagaattatagcatttatcaagttcattattaatagacatttggttgtttccagtccatttcctgctacaaatgatgctgcattgaatatcatgcatttcacacgtgaggggtatatctgtatattaaattgtcagaaatgaaattgatggctcaaaggatatatgtatgtaattttaatagattctgtcaaattgcttcccatagaggttgtgccatttgcatgcccagtagtaatgcaagagaatgcctgtttcacctcaacgttgccaacacaaaatgaaagtttgaacattctaacctgatggataaaagaacagtacatcagtatagttttaatttg

SEQ ID NO: 129070 - DNA, 384 bp, Homo sapiens
gtgaggatgaaagcattaacgcaatctaaatgttcaggtagcactcgctgttttgattcctcggctggaatttacggtgcctggaacttgggcccaatgaggcaataactgggattttcttctctttttttggagacagggtctcactctgtcaccaagcctggagtgcagtggcatgatcccggctcactgcagcctcttgacctcgccaggctcagctgatcctcccacctcagcctcccgtgtagctgggactacaggtgcacaccaccacacctgggtaatttttctgttttttgtagtggtgggttttatttatttatttatttttgagatggagtcccgctctgttgcccagactggagtgcaatggcacgatctcag

SEQ ID NO: 129071 - DNA, 174 bp, Homo sapiens
cagtgatgaaaaataattgaagagaacttaaaaagtggaaatatatcctatacccatgggttggatcaacagttttaaaatgtctataccaaaggtcgtatacagattcaatgccatccctccaatatgccaaagacattcttcaccgaaacagaaaacacgaccctaaaatat

SEQ ID NO: 129072 - DNA, 394 bp, Homo sapiens
atatgccaaggcactgttctaaagtactttacaactagtacatgatctatacctcataatgttacaaggtagatatgttatctccattttacagatgaggaaactgaggcacagggaggttgaagtaatctgctcaaggtcacagagctagtaagtagctgagtgggattcaaatctagaggacctggctcttgagtctgtgttcctgaccactaggttaggtatctggctttttaatttgtttttaaccccatataaagcaagattttagctttccatttctctcacactcaactaaactgggtctttctacacgctgtgacctctaagcacctgatctttcccaattctcctggttcaactcaacgttctgttaaaccccatcctttgttct

SEQ ID NO: 129073 - DNA, 304 bp, Homo sapiens
cggctaatttttgtattttttatagagatgaggcttccccatgttgcccaggctcacctcgaattcctgggctcaagcaatctgcccaccgcagcctccctaagtgctgggattacagacatgagccaccgcgcctggcctcttaactttaaaatctaactgactacctttcacccttaatcatcacagcacattctcatttcgtaagtgaagaaacgcccacaatgcatgttcatttgttaaatataccccatttttagttgtttatcgtaattaaagaaaatgaaagcagccatatatttga

SEQ ID NO: 129074 - DNA, 229 bp, Homo sapiens
ctatgtgcctagtatagccacagaaatgtgcacaggattttgacatgcaataaattgcatatatttgagtatacacattggtgtgttctgaaatatgtatgcacctgaaaatacatttctatcagtgcccaggatatttaagaagttcaaaactcaacccgaaagtcaaggaaggcttcctagaagaggcgacacatgaggagcatgtgaaagaatatgaaaaagccag

SEQ ID NO: 129075 - DNA, 330 bp, Homo sapiens
actgaatatctttatggtcagttccagccaagtcagccataggataattcagcaaatttacttcttttcgggtacaatgatgaatttttcaatgactgtgcagtccctggttcatgagggatccttaacaggtatttggtgtgagggaacccaggccaatgcaacagtccctagtagtttaatccaggaggacagagtatccaaaagagacatatcctgaagagcaatgctcagaaagccatggagtgacctgagcatactgtgcaaggcttggaagcgatcccatccgggcttgggagagacaggagagggataacatggagagttctg

SEQ ID NO: 129076 - DNA, 250 bp, Homo sapiens
ctttggccctcccaccttcgggagcaccaactctcccacctgaactggagcagagggtacggagtttctgttgttttaaatcccagcatgcacacctgcatataccccatgctttcctactttttaaaaagtttgggctcccaaggtacagagtcgcctcaacaacagtgcactgagcacggactctgggcctgagggagttccctggggtggacgaagtgggcagagagcacatggccggtgggaggag

SEQ ID NO: 129077 - DNA, 347 bp, Homo sapiens
gccttattagtaaacatgttagtgtgaattagtttgtcaaaatagttctaaaagctatctgaaagcagattatgaggtaggagagggcaaggtgggaatggtagaaattgtacatagaaggcaggcctttgaggatggtataaccgtcacctgaggcagtaggtgtgaggaacaaggaacataaaatgggtagattctaaaaagggagatggcagggcatttaaatgatttattcatttgacaaaactaaatatctattgtgctgggcagaactaagaatgaataacatcatcactgcctcagggagttcagtctagtgaaggaccagggcatgtaatatcctatct

SEQ ID NO: 129078 - DNA, 406 bp, Homo sapiens
cttggactgggttacctggaaagtagagattgaagtgaacagggattttaaaatctgagttgtatatgacaggtgcaaacctaggggagccagaatgagtaagaagggaaactacgcaaagacagatgggaaatcagtgggatgggaaacattaccaccttggctcctgcttccagaatggccaagtcattcagccggtctaccaggaacttctccagagaggtcaaagggagaaactgtaccttgcagcagtccagggatgcagggaggggactatatctacctgattccctcttatccctttcccattgatcagagtttgctccatggggggttcaactccctgtcacttctagcttgcatcacaaggcagcttcagtggctgctcagggtgttttgcccagct

SEQ ID NO: 129079 - DNA, 668 bp, Homo sapiens
atcccaaagtgctaccctctaaaattatggataaaaggctctattaatatttatgtctccttgtggcaggccacagatatgaattaattactgcatctgcacagatgtggcctgattacgcaaggcggaactaagctaaacagccagcatgataaacccaagactggcaaggtagcaggagaattttgagatatattcaagttgaatgcttttatcggttctaagttgttagttcttggaggagagtattgttccctaacaaagcctaacacagtgtgcagtacacaacaagtactcactaaatatttgtgagatgaataaaaccaagaatcttgaatatgttttaggcctatcactataaaaaaattttaatgtcttattgtaattgttctattttgttttgacaggtgatgaaaataatgcttcccttagttgaaattcttaggaaaatggctccataaatatgtatgtaggatgctattactcactcattattgacagttgtatcaagtgtgatataaaacacaattttcagtgacaatggaataattacagtcttgtagtcttggaatagcccctgatcactactgttgctgattctgtcattatattttgtgtcacctggttcccagtggactgtcaacactctttacatcctggaatctgaa

SEQ ID NO: 129080 - DNA, 548 bp, Homo sapiens
cagtacagaaaagacagggaaacctgaatccagtctagtgagcagtttggagggcaactgtcattctgaccgtctccttcaaatcccagttcaatttcctaccagctgtgcaggttagtactgtaccttttgtttcctcatataaaataaggacaataataacaatttaatagagattaaacgtattaaaccgtataaagcattcagcaaagtgaatggatcatgctaagctctcaagaaattttagctgctattattattttctatagtttatattgttctgaatatgttaactctgtcaacaattggtaagcagcaaacgtctccatttttctaggactgtcccagtttatgcctagtataaatattattaacacccttttccttttaaaaagtattctagtttgagaaacaaattatatggtcaccttagcagggagtcccagaatagaaatagaaaataccacccagaatatacccaaggattttaaatcattctactgtaaagacacatgcacacatgcgtactggcccggggtaccgagctc

SEQ ID NO: 129081 - DNA, 356 bp, Homo sapiens
ctgggaagtccttcctgagccacttctgggcttccttccaaggctggtaaagggaacgcctaactagctccaagactgacctggggccaccatacctgacctgcccaccatctcagaacagtcataagaggctcctgccagctctcactacttcagaggaggcagttgaggacgcctggcacacggtgagccctcaaaggggaaggggagccaagcacggtcaagtggcggaaacagactccagagtgagacagactcaggttcccattctgcctctactatccccaagcacttgcctctctctgcctcagcatccttgtgtggaaaatgtgattaagaatcccttcctttagctg

SEQ ID NO: 129082 - DNA, 705 bp, Homo sapiens
gtcagacattactgatggtgggcatgggatttcttttgggattgatgaaaatgttttcagattgtggtgatgattgcacaattctgtgaatatgcataaagttttgaatatatattttaacgtagtaaattttacgctatgtttattatatctcaataaaacttttatttaagaaaagacgaatacaggagcacccagatttataaagcaagtccttagagacctacaaagagacttagactcccacacaataataatgcaagactttaacaccccactgttaacattggacagatcaatgagacagaaagttaacaaggatatccaggaattgaattcagctctgcaccaagcagacctaatagacatctacagaactctccaccccaaatcaacagaatatacattcttctcagcaccacaccacacttattccaaaattaaccacatagttggaagtaaagcactcctcagcaaatgtaaaagaacagaaattataacaacctgtctctcagaccacagtgcaatcaaactagaactcaggattaagaaactcactcaaaaccgctcaactacatggaaactgaacaacctgctcctgaatgactacttggtacataacgaaatgaaggcagaaataaagatgttctttgaaaccaacgagaacaaagacacaacataccagaatctctgggacacatgtca

SEQ ID NO: 129083 - DNA, 250 bp, Homo sapiens
ggaccttttcaagactggtgaggaggatgcagggaggccgtggcagggaccacaggcagatgccttgccaaggaatgcccaccagccagagagatggagtctagcacctgcagacacatgcagagaccggaggggcagggggctgatggatcaccaccctcctctgccagttcacccccagacagggagaaggagctagagagtaaagcaatgtaagatgatttgcccaaacgtgactagtgagtaagat

SEQ ID NO: 129084 - DNA, 862 bp, Homo sapiens
gacatttctaaaatcgcttcataaaacaatatttatttatctttatctttatcttatcttttctactgcctttcattccttcctgcattttcagtttcaatatgggattattgtcccttggaaagaacttgtcacagtatttttttttttttcctttttgatggagtctcgctctgtcgctcaggctggagtgcagtggcgtgatctcgctcactgcaagctcctctctcgggttcacaccattctcctgcctcagcctcccgagtagctgggactacaggcacccgccaccatgcccagctaattttttttattttcagtagagacggggtttcaccatgttagccaggatggtctcgatctcctgacctcgtgatctgcccacctcggcctcccaaagtgctgggattacaggcgtgagccaccgctcccagccgaactcgtcacagtatttttaaacaactcacggtaattctaattcagactgctaacagtgaaatagttcagtttcagtttttcttaacacaactttattaatttgctcaaagctaagcacaaagtttagaccatattgaagaagaaaagaaatagacaccacctcttgatagaaggagtggcaaagttgcattgtaaacaggcatgcaggatggaaagaattgcatggacatctttgaaaaaactcaacaaataaagagtattctacaactctttatttttcagactcactgtgttgatcattttatatgtattcatttattcgatcctcccaataacctaacagatactattgtaatgtcaatttccattttgcacacgaaggacttgaagaacataggactttatttaatgtctaaaaaacaca

SEQ ID NO: 129085 - DNA, 627 bp, Homo sapiens
catgcccagttatgcctgcaaaggagagggagctggggtatttgtccaccagctcccatctgtcattggctgagagctgcttccaggagcattaattctccagcacttccagctactccaggaaaaaaaaaattcttcaactgagagttggaggtgttgagagactctggcacaccaagaagacaggaacaggacaccaacagtggctgatgatacactgccaaggtcacacagctagttagcaacagatctatagtggaatccagacagtgtctccatcacccaggctctctgtagtgatctgcgcttcacatccgaggcaggcagagggatggtgtgggccttagatgggaaggctgggaacctgaagctcctatgtctgtatcacttttgcttctctgagtagctgccctgatttcacacttgaggggcttggccattttagattccttcctgctctaggagcctacatactacactggaaatgatggggagctctctacctcacatgcagcctgatgtttgttagaaacacctccttgcgccaggcatgatggctcatggctgtaatcccagcaatttgggaggctgaggcgggtgtatcacttgaggtgaggagttcaagac

SEQ ID NO: 129086 - DNA, 252 bp, Homo sapiens
tcatttaataaaatacaataaggagaattaagaaagaaggctgcaggggaacatcctgcttattatctctgtaatgagaggactattttttctcccatcagttgccaatgatgaggttttttgtttccttttgtgcaggcacaattgtgatattcaacgagagtagtgcgaagtgccactttacagccaaacattcaattcctcctaattcacaagggagagagggatcaagttgtgcagctgggaggtgat

SEQ ID NO: 129087 - DNA, 216 bp, Homo sapiens
gtggaattcaacacaagggagacgcaaaggagattcccaggatgacggtgaaaggagcttgtgtggccactacatagcaggcctgtagagcaagcagtccaggttggagcaaaggatggaaacatccagaaagaatgtttccaaaaattaatcagcagctggaaatgaccatgttgagagttttaaattccaatggagagtttggaaaggatttag

SEQ ID NO: 129088 - DNA, 673 bp, Homo sapiens
tttaagaaaaacaagcaagcagtcagcgttaccactatttcccttccaacttgtccttttctattttctaactagctgtgagcaaaacaagctgccaaaagctctaaatactttccaaatgctttcttgcctacaagtaggtctagccagaatgtatcatttcagaaaccttcagccacagcccattcagtaacttctgcctgcagctcaacctttgggttcttccagaaggtctgttactctggagttctccagtggttggatatcatttccatatcatggctacactgttaagtccttgataattccagaaaaaacattcctgcttgatttttattttattttggagatgaggtcttgctatgttgcccggtctgttctcaaaaccctgggctcaaagggacccccacctcagcctcccaaagcgctggaattacagacatgaaaggtagccaataaatgcatatgtaaaataaacatttcaaaatatcagatgcttaagaaatattaccactgaccagcttctttatcattggaacacggcatacttttgaaaaaacaaacaaacaaactcaaccatcatagttttctttcttttcctttttttttctttttttctcgagatggagtcttgctctgttgcccaggctgaagtgcagtggggcaatctcga

SEQ ID NO: 129089 - DNA, 305 bp, Homo sapiens
tacaggtgctttaaaaactctgagttataactcactagtgggtcctgtaattagtttgagcattgtggtcagcattaaagacacacaagcaaaacagaccactagactgtggattaggatcggaaacatcagaatgtatctccccttagtagggggtcatatcgtttcctgacatttttgtttgctttcagtatatgcaaatatgtctgtgtatatatatgtataataattgacttttgatacataatattgtttcttactgttggtcttgggcaaaaaagtttgaaagctactgtgtcaactta

SEQ ID NO: 129090 - DNA, 367 bp, Homo sapiens
  misc_feature (310)..(310): n is a, c, g, or t
tgaaattctgacagttactacaagatgaatgaaccttgaatacattgtgctatatgaaagcagccagacagaaaaggacaaatatttcttgattccacttacatgaggtacccagaatagtcagatttatagaaacagaaaatacaatagttctaacttgaagctagaggagaaagtagtaggaagtaactgttttaacaggcatggagtttcagtttgggatgatgaaacgcctacaggatgaatggggataaagacgacttgggccgggcgcggtggctcaggcctgtaatcccagcacttggggagngcgaggggggcggatcacctgaggtcaggaagagacgcgcagggtagcgagctcgaa

SEQ ID NO: 129091 - DNA, 714 bp, Homo sapiens
gtggttactggactctgaatgtgataagagaattatgaagtaatttttagaatagcaaagcataaaagctggatcttggaaattccccatttatatcaaaatgagatttatcatgtttatgctgctgcagtgtcgtatttaaatatctcctgtcattttgaatactaatttttcttactgtccttttacagatcagtagctttaattttgttattacatgttcacatataatttccctgatgtttatttgttattaaaggtggtgaaattattttagtttctttaatttcattaaagaagtagagaactggttaaaaaaaaatactggttaagagcaagttgggaaaattggaactcatttgaaattataatatttaaaatattaaagtaaatgtttaagatatacttttaatttgcttacatgtggattataagccagtattaatgaacactttacaattagtttaagagacaaatatataaataaataactgaaggcagcatataataaattggtacaaagtttttgggtgagagatcacactgtagggatgtggcatttaagatagattttggtatgaaatgagaacttcgaggtggggaaaccacagcagaggaaaggagatgagaatatgcaggtcatactggggaggggaatatctggttgtatagttcagctgaatagtgatgggcttttgtggcacacaggccata

SEQ ID NO: 129092 - DNA, 609 bp, Homo sapiens
taaattcgcggccgcgtcgacgcagtgtcgtatttaaatatctcctgtcattttgaatactaatttttcttactgtccttttacagatcagtagctttaattttgttattacatgttcacatataatttccctgatgtttatttgttattaaaggtggtgaaattattttagtttctttaatttcattaaagaagtagagaactggttaaaaaaaaatactggttaagagcaagttgggaaaattggaactcatttgaaattataatatttaaaatattaaagtaaatgtttaagatatacttttaatttgcttacatgtggattataagccagtattaatgaacactttacaattagtttaagagacaaatatataaataaataactgaaggcagcatataataaattggtacaaagtttttgggtgagagatcacactgtagggatgtggcatttaagatagattttggtatgaaatgagaacttcgaggtggggaaaccacagcagaggaaaggagatgagaatatgcaggtcatactggggaggggaatatctggttgtatagttcagctgaatagtgatgggcttttgtggcacacaggccata

SEQ ID NO: 129093 - DNA, 1559 bp, Homo sapiens
gaacaagctggaatcagataaagttgtggaaaggaagtcgaggtttcactctgccatatcagtaggaggtactaaagccaaactagtagcagcaaagtgaacagaaatggtaagggggaaaaataggaaaggaaagaacaacgtggattgcaagacgtcttactaaaaacaaagaattacacttggaacagaagaaattcattaccattgccttacactgtgcaacaacttgataaaaatataaatccaataaaacaaactcaaagatgagaaaattgtaaactggagatgaaaagggagattgcagacctaaaggaaaattgaagaccgtaaaaacatagtgacagaataaataagtcaggagaaagaacagaagcaatactgctgaaaataaaagtattttaatagaagaaagcccagtaaggaagcccagtaaattcaactgaaaagggacaaagattaagaagaaagaagctattatgaaagacaaaatacaatcaagaattgggaccactgaagtcccagatgtagagaagtcaacaaatgggacagaaaattcaaataaaaataagtccaaagaaagcttattgagatgaagaaaaaatggtctgtaggccaaaggaacatgccatgttccagaaaatgtcatgtgggaatacggaagcactacgatatcttaaactatttaaattcaaagaaaaagatttaggaatctaagaagaaaaagtaaaggagggaaaaacaaaatcaagctcgcctcagacttcagtgcagcactaaatgccagactatgatggttgtgaggaaacagttccaagggaaagaaacttttccgaggggcatattttttttccggaagaacaaagggaattcagcacccatgaaccgtttttggaaaaacaaaaacttgctgagtaataaaatccaggaaatagcaaattaagagataaatcaaaataaagaacttaagagtagagaaaggtaaaaagacttggtgagtatttattctatttaaatatagaagtaatacatctatagaaattgtgggtaagatagaatgcgattgttattaatctagacaaaaatatacagccaaaaaaaaaagaagtcagagaggaagatggaaggaaacatgagaataccaatattctcttctttcaaagaatggaatagtaaatatggtataaaattaaaagatgctatgtgaatatataatactgcaacttttaatatctttcataagttttatttaaaaccttagagggatatcataggaaattatactttcttatggacaaaaaaatttaaattttaacaactcctttgactttattttagtcttttcccaagtaacattaaacagaaacactgtgtgtgtgtgtgtgtgtgtgtgtgtgtgtgtgtgtgtgtttatgcatagaaagatctgtgggattatgttcgcctaatattaatgatagtaatagtttttacagaagaaaaaagaaagatgtttgaaaaataagctagaatcaaatatgccaagatgttaacaattgttgatgctggatggtaggaat

SEQ ID NO: 129094 - DNA, 319 bp, Homo sapiens
ccatgtggaagaacactgagtaactacagaagaaatgctaatgaaacattaaaggagagatcaaattgactactaaaccaaaaggtatctctgataaggaagacgtccaaaaagaagagctgtgggaaaggagaggaagagagaaacatcttgggataatcaaaaggaagtagccaatgcaaataatcaataagctgtaattaacacagaggaaacacagtctcacaagatgcatggctgaaatgaactgaatattgtttgtttttgagatggagtctcactctgttgcccaggctggagtgcagtggtgcgatcttgg

SEQ ID NO: 129095 - DNA, 690 bp, Homo sapiens
atgtcatctttattctttctcacagggcccagcatggggcctaacacagttagacttaagtaaatggattcaactcactggtccccagcactgtcctctgcatgatgttaccgaaatggagacaaccaaaactaactggacaacttagtcagctggactggaagactgcacttccaaatggaaaggtttgcagtggctcctttggaaatgtggcttcaagggtggagaggggggaagtgaatgtggggctcgcattataggctttgggggttacagagcttgctggtgttgcttgcccttacgctctgtcaaatctcaggcagatgaaacaagatgtaagctttctaaattatcaatagagggcctgtcattcaaatggaagataagaccagagaaaataaaaaaaaaaaaaaaaaacttggttgggcggcccagggcccgagaaaagagcttccaaaaccatgtctgtttggggcgcggcggcccccagtggggtaacgcgaccgtgggccaacaggggtaccaagaggagacacgtggcccatgcacacaggtggcgtgggttccccccaatataaaaagcgcgcggccgcgccaacgggcggtccggaacacacccggaaggagttcggacgggccagcggctcacacacgggccaggcgaggcgatataatccgccacgagcgagg

SEQ ID NO: 129096 - DNA, 472 bp, Homo sapiens
tatgtattatttaatgttatgaagtacttgacctcctggatataatttctgattttagaatttaactgcttcattcagacttctcgtaagttagcaattttaacatatatgctgtctaattttctaatttgacattctagaattgttaattttagataaaacctcctgttacgttgtgtcttaagatcttagaaagtcagtgcatagtagttgatgtttgtcaactctaaaaacagtgatataattgagagaaatggtcagttgaattacccttgtgaaatttctgcatttacttcctctcttacctagctgggtcttagactgttaactgtcaatttgtagggatggaaggaggttgagatttaataacaggagataaagtatgaatgtgtgcttattttcagacttagaaataatgcattattttggattattcacagcttttaaaattttttctctctgagacagggtc

SEQ ID NO: 129097 - DNA, 777 bp, Homo sapiens
ttactctaattgtgcaaggcatccttcattagagagtgacttagactttaatcatgaatgttgaaggttggcctagaagaatctttcctgatagtgggatataattatgcttgtaacaaaacaagaatggattctaattctgagtctaattaatttgctaattccaggcattgtcagaaaagtgatgcaaactgtaaactttctgttaggtaataatgctaacttgtttcccacacagcatcattgaaaaggctatcagttggggttctgagtcgtttatatcgaagagccagcctcttagtctggagttttccactctccaatttgaggaagagaggagagtagaaaagagatgttaatggggatggtacatgtgaaacgttggaagatttggaagcaatcctagattatatttaaaaagcaatctagcttttttctttagaaaatatctaactatacaagcaatgcgtagtaatcacatcagggtaaatggggtatccatcatttcaagcgcaggtaacatattttttttacacccgatccaggttatgccattcaagcttctttattataatttacttccattactggttggatttttactttttatagtttaccctttcatctaggcctattggggatgtcgttctaatttcccgactcatgttggcccgaggtctatttcccatgagcagttaaatccaaatcgctaaggtgttgcgagatcagaacccatccttttcaacctcccagggctgctgtaacattctctctaga

SEQ ID NO: 129098 - DNA, 762 bp, Homo sapiens
gaattctattaaaatacttgaaatgactaataggctagataaacagccaatacatttttaaacatttctaatttgatcaagaccatcacttctcttaagggagtacagacaaaactcaagttacttagtaaataaaatgattcctgtaatgtgtactctgctgtttagtggtaactttctcaaaattttcctcttttccctttgcaaatatagcaaaataaatctgtttcaaacagggcaggaaatagttactcagaatgggttactggtaacaggctttaaagtgagtggtgacaggcatttagaatcatactagaaaaaagtataggcaaggttttcaaaagaaacgggtagtttaaaatgtatttcattaaagaataattaaataaaattcatcattctcatttttaactttttatttttattgtctttttgtaactcttggattaagaaacagaaggtaaaaattaaatagcaattagagatatatagttaaataataacagttttgcttctttgtttctgaggaactgcaacgtaacattatggagtggagtgcatcctgttcttttcacctcccaagatgattatttttctatttctggagtcatttttttgagattctgtccaaataatcatttacctttgaggaagtttacactatgaataaatgtaatcccaatgtttgaatacctttaagctttttgatatattaaaaatatttttgagctgtatcactaggtataacctcaggtagatgga

SEQ ID NO: 129099 - DNA, 399 bp, Homo sapiens
atagtatagttacattacattctattaagcaatgctctgttgatggtcatttagatttttaattcacttttattttttgagacggagtctcgctctttcacccaggctggagtgcagtagcgctatctcggctcactgcatgctccgcctcccgtgttcacgccattctcctgcctcagcctcccgagtagctgggaccacaggtgcccgccaccacgcccggctaattttttgtatttttagtagagacagggtttcactgtgttagccaggatggtcttgatctcctgacctcgtgatctgcccacctcggcctcccaaagtgctgggattacaggcgtgagccaccgcgcccggcctaattcactattttaaataatgtggcgttcaagtcaaaac

SEQ ID NO: 129100 - DNA, 243 bp, Homo sapiens
gtgtaggccaggctggtctggaactcctgacctcaagttatctgcccgcctctgcctcccaaagtgttgggagtacaggtgtgagccaccacacctggctgcaagcattgtagaccagagtagacttaaagtatactttgttacaactcatgctcagtctgaggtcactgataaaattgaaactttctgtaagataacaaggaaatgaagtcttttttttttttttttttttttttgagaggg

SEQ ID NO: 129101 - DNA, 499 bp, Homo sapiens
cagagtccaaacagtgcccagagtccaaacagtgctcagagtccaaacagtgcccagagtccaaacagtgcccagagtccaaacagtgcccagagtccaaacagtgcccagagtccaaacagtgcccagagtccaaacagtgcccagagtccaaacagtgcccagagtccaaacagtgcccagagtccaaacagtgcccagagtccaaacagtgctcagagtccaaacagtgccaatagggagaggggtccttatgtagtcaactaaagcatgaatgaggagtaagaaggtaacctgtttaaaccattcctttaaaaaaaaaaaaagacacccattaggatggatattattaaaaaaaaatagaaaatagcaaatgttggcaaggatgtagagaaattggaatccttgtgtaacgctggtggggatgtaaaatagtacaactgctgtggaaacagtctggcagttcgtccaaaaattaaacacagaattaccgttaaga

SEQ ID NO: 129102 - DNA, 405 bp, Homo sapiens
agggtaacatgattttagaactttattctaggggaattcttattcacagctaaagaagaaatgtacagtcaagttcaaagttcttcccccagttctcagcagagtcaagacaaggaccatttacaacaatccacacaacaaacgagcattcagaaaagggttcaccactgtagaaaattactcttgtagagttttatcatcttaaagctgccaacttaattttcttttgaaactagaagaagaagtggtgataacttttaattgagtgaagcacactgttatttggaaaaagacaacgataattcacacacagaatgctccttgctggtgggtgaaggccagattgctgcagttggacttagaactccactttcacatagaactttgctgacagtaactaattaa

SEQ ID NO: 129103 - DNA, 200 bp, Homo sapiens
tacgaaattaacctgattggtcccagggctcatattccatcctaccttttctgctatgcatctattgcaaatagctaaatggtccaacagaagtgttagttgttcctatcagagacgtcaggaatcacctctggcggtggggaaggtggctcttggccagggcgctctcacccacccctgcccacgaggatggccccttt

SEQ ID NO: 129104 - DNA, 313 bp, Homo sapiens
tttcgccacagtcaaaatacacagtaactattttaagaactcattaaaaattgtgtgtgtgtctgaaaagaccaagaccatattaatgagaagtgtattttccatctcttagatttaatcttctcttcccttatatctccaaatagccaagaagaagaaaagtcattactgtatgagcattaacataggtggttctaaatcacatcacagctgtcattcttgttgtgtcagtcaaggaatctgatgaaacatagaacaatttcagacaggccaaggcctcctatgaggtaagaaacacttcgagagaagccac

SEQ ID NO: 129105 - DNA, 571 bp, Homo sapiens
ttggaccatcaagatgataaattgaaagtaggtactcactgggctttacaaattggctatatgaacatcattgttattcatttggtcctgtgagctaaaagagctaatgtatgaggaatagtcacttcattcaaccaatatttaatgagctcctactcagtgccatgtactatactaagtactagggatacaataaaaggaaaaaacagatccattccctgcatgacaatccaaaatagtccattttgaatggcataaaccagcagtctttttgttgttgagacagggtcttgctctattgcccaggctggagtgcagtggctgatcatagcttgctgaaacctcaacctcctgggctcaagcaatcctcccacctcagcctcctgagtagctggcactacaggcatgccccaccacacccagctaagttttgtattttttgtagagatggggtttcaccatgttgcccaggctggtctcagacttctgagctcgagagctccacctgacttggtctcccaaagtgatggccagcagtcttttctagtgataagatatttttaccccttca

SEQ ID NO: 129106 - DNA, 230 bp, Homo sapiens
tatctgctgttagttcctggagattttgtcctgagctgagtctccagggacactcgcggtgggtgtgtgctgtgcttggctgagctgcagtgcttgagaggacaatcctaagccccttgttgatgtgcagcaacttcatcttctttcccagccctcattggaaggattggattagatgagaggtttcagcatttagccgacctctttatgtaggaaccccaactaaaaca

SEQ ID NO: 129107 - DNA, 559 bp, Homo sapiens
acaactatcagatgtcctagatatttggtaggtgaaaaaagtttatataataattagctgagcatataacctaactcccttttacataaaaacaaagtattttttgtacagttctgcaggcatgcaactaaatagaggcaagactgtacagtagtttgttcaccatttcagaaaatcgtgccattaatggctgagctggctcctggtgtttgagtctctgatacaacagaatatagatcagtctgcacaggatagtagagtgttttaaggccaggcacagtggcttacgcctgtaatcccaacactttggaaggatgaggtggaggattgcctgagcctaggagttagaggttactgtgagccatgattgcacgactgcactccagcctggcaacagagtgagaccctgtcttttttttctttttttgagacagtcttcctctgttacctaggttgcagtgcagtggcgcagtctcggctcactgcacccttctgcctcccgggttcaagcggttctcctgcctcagcttcccaagtagctgggactatgtgtgtgcgc

SEQ ID NO: 129108 - DNA, 910 bp, Homo sapiens
atagaatcgagccggtccccgtggtgtgtcatgcacacactcacatacacacactcatgtacactcatacacacattcacatatgttcatacacaatatcctcatgtacacttacactcacactataacactatacacacacagcactcaacacactacacacacactcatgtactctcacactcataacactacacacacaggacactcatgcacacaaaaaacacgtacactcacatatactcacaacacagtcatacaccacacatacattcactacacacaacacacgtacactcacaatacacatgcaacacagatacactacagacaacacatgcactcatagcacactagcacacatatatacactcactacacacctgcatgcacacatatacacacttgcacatatacactaactacacattcatacttacgtactcaacacactctcacgcaaacatgcacattctttgctattttgtagcagcaagggggcttagccaagggtaatggccaagtggcccgaggtatttcatggctcaaaagtgcagtcagtaggcgagaatgccgtcgtcccactcgtttagaatgcgtctgctttaaagggtacgtgcctggcactcacgctaaaaggctgacacacggcgtctcctaagcctcctccctctactgccagaagcagctccggagggcacaagactcatgcaagacttgtccctcgtggttcttccacctccatcctcctaaaggtcgctcacacttgcttctttatcttgagtgcacatatgaaggcggtgcgcgctctgggaagggaaggagggaagaattcctgtcctattctatcaggaattggggagagaaaagctgctaggaggaataaatgaaggggacttttcaaacactg

SEQ ID NO: 129109 - DNA, 677 bp, Homo sapiens
ggtttagagaaatatattttctcctagacgtctctctttatataagtgctcgaaaatataaacaggttaagatgggcatggttgttgtaaagcagaaattactttctcaatgcccattccccaactttttaacatttttagttaattctgatctcaaattctgccttgcagagtttttcaaaggcaagatcacagttgtatgtcttgtcagaatgctcctgtcatgacccgtgaatttcatttgtgtcaaattctagagtaaaactaacagtcttttggctagacttcctccgtgttgcctttggaagtcaggggtaaaaaggatggacttatgaggttgatttacaatgggaaaaaaaatgatttcattatttattttcttccacatacctcataaatgtctatgtatcatgaaaaattatttttgttaatatgcccattattcattattaatgaattataccagtctctctttctctcatattttctttatcatattgttgaaaccgtaaggtttttacactgctaggacctcccctagaagatcgtgtacataatcaatattaagtagatagtacaaaatattgattttagaatgcttacactaaattaacttgaataccatattccattctaatgttttcaaagtacacctttcctcatacaactataatgag

SEQ ID NO: 129110 - DNA, 1231 bp, Homo sapiens
gttcaactcccacttatgagtgagaatatgcggtgtttggttttctgttcctgtgttagtttgctgagaatgatggcttccagccatccatgtccctgcaaaggacatgatctcatcctttttatggctgcatagtattacatggtgcaattttaaagcagaaattattagcacctacccctaaaatgtgaacaatattgtgctcactttggcagcacatatactaaaatttgaacaatacagagaagattagtgtggcccctgcacaaggatgagacacaaatttgtgaagcttttcatacttaaatatatatgaacaatatttataaggagggttattcttttttgttttttgtaggtctgttttaatcttcaggtctgtgaagttaaatttggggaattaggaaaggccatatcaaattttatctatatttaagcagtcaaactataaagtattccttaagttttgggaaatgaacttgttttcaatttaattaaatacttcttttgatttgcttcacttgtaatgtaggaactggaagaggaggcaacagtatttggggcaagaagtttgaggatgaatacagtgaatatcttaagcacaatgttagaggtgttgtatctatggctaataatggcccgaacaccaatggatctcagttcttcatcacctatggcaaacagccacatttggacatgaaatacaccgtatttggaaaggtaatagatggtctggaaactctagatgagttggagaagttgccagtaaatgagaagacataccgacctcttaatgatgtacacattaaggacataactattcatgccaacccatttgctcagtagctatgatagacctggacaaataacttgacaaattgctggaacacacttattgtggtttacccggttttaattatgtcagagattgcatcatccttctgcttgtttacaactatgatcttctatgaaatggtggtaccaaggggcgcccaacagcttttatccccattcttagagcatattctttattataatgattatccaacatatttctttaattttaatacaaaaaatacatcatttaatttttgttacatatgaacattcatttttaaatgctcagcctcaagtgcaggcatttttgagtggcctgattacatattcctcccacagcaagtccgtatcctggaagtgttattttataataaaatttaaaaagttttaaaga

SEQ ID NO: 129111 - DNA, 1602 bp, Homo sapiens
ggcaggccgagtgtaaagcattgcttgaggttgcccaggtagtttcgccttacacttcttgtcccagtgcaattattagtagagctccctttcactgtcaaatttccggttggggataaattgcattgtcgttttggtttgagataggaagatgaggggaggaaggaggtgaggcggtaaggggcgttctctctcttgggtcccgcgcccaacttccgctggcccaaagaaactataattttgaaccaacagacctctgctggcatctgcgattgcatttttcctgttttaacaacggctgtgctagacgaagtggtgaagcccaaagacttatttttgagctcgctgtaagactgagaaatcacgtagtccttcctgaaaccactaagaggaaaaatgtctgtgacactgcatacagatgtaggtgatattaaaattgaagtcttctgtgagaggacacccaaaacatgtgagatggagtctcgctgtgtcccccaggctggagtacaatggcgcgatctcggctcactgcaacctccgcctcctgggttcaagcaagtcttctgcctcagcctcccgagaactggaagaggaggcaacagtatttggggcaagaagtttgaggatgaatacagtgaatatcttaagcacaatgttagaggtgttgtatctatggctaataatggcccgaacaccaatggatctcagttcttcatcacctatggcaaacagccacatttggacatgaaatacaccgtatttggaaaggtaatagatggtctggaaactctagatgagttggagaagttgccagtaaatgagaagacataccgacctcttaatgatgtacacattaaggacataactattcatgccaacccatttgctcagtagctatgatagacctggacaaataacttgacaaattgctggaacacacttattgtggtttacccggttttaattatgagccagcttgacgtggttgtggccgttgggcgagatgaagctacactgtgaggtggaggtgatcagccggcacttgcccgccttggggcttaggaaccggggcaagggcgtccgagccgtgttgagcctctgtcagcagacttccaggagtcagccgccggtccgagccttcctgctcatctccaccctgaaggacaagcgcgggacccgctatgaggattccatatggctctcatatcattccattccatctctgccaagatttggataccgcaaaaatttgtgtttgtggaagattctgtctgaactctttcattcaaggaactactaccatgaatctgcattctgttgcccacactgtggtcttagtagataatttgggtggtactgaagcacctattatctcttatttctgttctctaggctgttatgttaattcctctgatatgttaaagtaatgggtgagaccagaaaaagaaatttcaataacagatcagtttggggtgcatgtatgattttgcagcgtcaaattggagtaagggaagatttctgtatacttgctggagaggaggaatgtgtatagttactcatttagatgactccaaaacttttattaaaaccaattttagtttt

SEQ ID NO: 129112 - DNA, 1558 bp, Homo sapiens
ggcaggccgagtgtaaagcattgcttgaggttgcccaggtagtttcgccttacacttcttgtcccagtgcaattattagtagagctccctttcactgtcaaatttccggttggggataaattgcattgtcgttttggtttgagataggaagatgaggggaggaaggaggtgaggcggtaaggggcgttctctctcttgggtcccgcgcccaacttccgctggcccaaagaaactataattttgaaccaacagacctctgctggcatctgcgattgcatttttcctgttttaacaacggctgtgctagacgaagtggtgaagcccaagtatggagtaacgtcattaattctttcattcacttattcgaatgcttgctgagttctgtgttgctactggtttagttcttgggatactgcgagtgaacagtgggcggcgaggctgttgttgcaacgtcagagtaaaagaaggaccctgcacctcggcctcccaaagtgttaggattataggcgtgagccaccacgcccggcgaggtttttatttaaaatgttcagtaaagatgagcgtgtgtgagttaagacaggaaaatgagcctaattctttttttcttttgggactagagacttatttttgagctcgctgtaagactgagaaatcacgtagtccttcctgaaaccactaagaggaaaaatgtctgtgacactgcatacagatgtaggtgatattaaaattgaagtcttctgtgagaggacacccaaaacatgtgagaatttcttggctctttgtgccagtaattactacaatggctgtatatttcataggaatatcaagggtttcatggttcaaacaggagatccaacaggaactggaagaggaggcaacagtatttggggcaagaagtttgaggatgaatacagtgaatatcttaagcacaatgttagaggtgttgtatctatggctaataatggcccgaacaccaatggatctcagttcttcatcacctatggcaaacagccacatttggacatgaaatacaccgtatttggaaaggtaatagatggtctggaaactctagatgagttggagaagttgccagtaaatgagaagacataccgacctcttaatgatgtacacattaaggacataactattcatgccaacccatttgctcagtagctatgatagacctggacaaataacttgacaaattgctggaacacacttattgtggtttacccggttttaattatgtcagagattgcatcatccttctgcttgtttacaactatgatcttctatgaaatggtggtaccaaggggcgcccaacagcttttatccccattcttagagcatattctttattataatgattatccaacatatttctttaattttaatacaaaaaatacatcatttaatttttgttacatatgaacattcatttttaaatgctcagcctcaagtgcaggcatttttgagtggcctgattacatattcctcccacagcaagtccgtatcctggaagtgttattttataataaaatttaaaaagttttaaaga

SEQ ID NO: 129113 - DNA, 1320 bp, Homo sapiens
ggcaggccgagtgtaaagcattgcttgaggttgcccaggtagtttcgccttacacttcttgtcccagtgcaattattagtagagctccctttcactgtcaaatttccggttggggataaattgcattgtcgttttggtttgagataggaagatgaggggaggaaggaggtgaggcggtaaggggcgttctctctcttgggtcccgcgcccaacttccgctggcccaaagaaactataattttgaaccaacagacctctgctggcatctgcgattgcatttttcctgttttaacaacggctgtgctagacgaagtggtgaagcccaaagacttatttttgagctcgctgtaagactgagaaatcacgtagtccttcctgaaaccactaagaggaaaaatgtctgtgacactgcatacagatgtaggtgatattaaaattgaagtcttctgtgagaggacacccaaaacatgtgagaatttcttggctctttgtgccagtaattactacaatggctgtatatttcataggaatatcaagggtttcatggttcaaacaggagatccaacaggaactggaagaggaggcaacagtatttggggcaagaagtttgaggatgaatacagtgaatatcttaagcacaatgttagaggtgttgtatctatggctaataatggcccgaacaccaatggatctcagttcttcatcacctatggcaaacagccacatttggacatgaaatacaccgtatttggaaaggtaatagatggtctggaaactctagatgagttggagaagttgccagtaaatgagaagacataccgacctcttaatgatgtacacattaaggacataactattcatgccaacccatttgctcagtagctatgatagacctggacaaataacttgacaaattgctggaacacacttattgtggtttacccggttttaattatgtcagagattgcatcatccttctgcttgtttacaactatgatcttctatgaaatggtggtaccaaggggcgcccaacagcttttatccccattcttagagcatattctttattataatgattatccaacatatttctttaattttaatacaaaaaatacatcatttaatttttgttacatatgaacattcatttttaaatgctcagcctcaagtgcaggcatttttgagtggcctgattacatattcctcccacagcaagtccgtatcctggaagtgttattttataataaaatttaaaaagttttaaagaattaaatcgtaggacaaattaattaaaatattgtgtaaaattaccttcaggct

SEQ ID NO: 129114 - DNA, 1279 bp, Homo sapiens
ggcaggccgagtgtaaagcattgcttgaggttgcccaggtagtttcgccttacacttcttgtcccagtgcaattattagtagagctccctttcactgtcaaatttccggttggggataaattgcattgtcgttttggtttgagataggaagatgaggggaggaaggaggtgaggcggtaaggggcgttctctctcttgggtcccgcgcccaacttccgctggcccaaagaaactataattttgaaccaacagacctctgctggcatctgcgattgcatttttcctgttttaacaacggctgtgctagacgaagtggtgaagcccaaagacttatttttgagctcgctgtaagactgagaaatcacgtagtccttcctgaaaccactaagaggaaaaatgtctgtgacactgcatacagatgtaggtgatattaaaattgaagtcttctgtgagaggacacccaaaacatgtgagatggagtctcgctgtgtcccccaggctggagtacaatggcgcgatctcggctcactgcaacctccgcctcctgggttcaagcaagtcttctgcctcagcctcccgagaactggaagaggaggcaacagtatttggggcaagaagtttgaggatgaatacagtgaatatcttaagcacaatgttagaggtgttgtatctatggctaataatggcccgaacaccaatggatctcagttcttcatcacctatggcaaacagccacatttggacatgaaatacaccgtatttggaaaggtaatagatggtctggaaactctagatgagttggagaagttgccagtaaatgagaagacataccgacctcttaatgatgtacacattaaggacataactattcatgccaacccatttgctcagtagctatgatagacctggacaaataacttgacaaattgctggaacacacttattgtggtttacccggttttaattatgtcagagattgcatcatccttctgcttgtttacaactatgatcttctatgaaatggtggtaccaaggggcgcccaacagcttttatccccattcttagagcatattctttattataatgattatccaacatatttctttaattttaatacaaaaaatacatcatttaatttttgttacatatgaacattcatttttaaatgctcagcctcaagtgcaggcatttttgagtggcctgattacatattcctcccacagcaagtccgtatcctggaagtgttattttataataaaatttaaaaagttttaaaga

SEQ ID NO: 129115 - DNA, 1226 bp, Homo sapiens
ggcaggccgagtgtaaagcattgcttgaggttgcccaggtagtttcgccttacacttcttgtcccagtgcaattattagtagagctccctttcactgtcaaatttccggttggggataaattgcattgtcgttttggtttgagataggaagatgaggggaggaaggaggtgaggcggtaaggggcgttctctctcttgggtcccgcgcccaacttccgctggcccaaagaaactataattttgaaccaacagacctctgctggcatctgcgattgcatttttcctgttttaacaacggctgtgctagacgaagtggtgaagcccaaagacttatttttgagctcgctgtaagactgagaaatcacgtagtccttcctgaaaccactaagaggaaaaatgtctgtgacactgcatacagatgtaggtgatattaaaattgaagtcttctgtgagaggacacccaaaacatgtgaggaactggaagaggaggcaacagtatttggggcaagaagtttgaggatgaatacagtgaatatcttaagcacaatgttagaggtgttgtatctatggctaataatggcccgaacaccaatggatctcagttcttcatcacctatggcaaacagccacatttggacatgaaatacaccgtatttggaaaggtaatagatggtctggaaactctagatgagttggagaagttgccagtaaatgagaagacataccgacctcttaatgatgtacacattaaggacataactattcatgccaacccatttgctcagtagctatgatagacctggacaaataacttgacaaattgctggaacacacttattgtggtttacccggttttaattatgtcagagattgcatcatccttctgcttgtttacaactatgatcttctatgaaatggtggtaccaaggggcgcccaacagcttttatccccattcttagagcatattctttattataatgattatccaacatatttctttaattttaatacaaaaaatacatcatttaatttttgttacatatgaacattcatttttaaatgctcagcctcaagtgcaggcatttttgagtggcctgattacatattcctcccacagcaagtccgtatcctggaagtgttattttataataaaatttaaaaagttttaaagaattaaatcgtaggacaaattaattaaaatattgtgtaaaattaccttcaggct

SEQ ID NO: 129116 - DNA, 1284 bp, Homo sapiens
gttcaactcccacttatgagtgagaatatgcggtgtttggttttctgttcctgtgttagtttgctgagaatgatggcttccagccatccatgtccctgcaaaggacatgatctcatcctttttatggctgcatagtattacatggtgcaattttaaagcagaaattattagcacctacccctaaaatgtgaacaatattgtgctcactttggcagcacatatactaaaatttgaacaatacagagaagattagtgtggcccctgcacaaggatgagacacaaatttgtgaagcttttcatacttaaatatatatgaacaatatttataaggagggttattcttttttgttttttgtaggtctgttttaatcttcaggtctgtgaagttaaatttggggaattaggaaaggccatatcaaattttatctatatttaagcagtcaaactataaagtattccttaagttttgggaaatgaacttgttttcaatttaattaaatacttcttttgatttgcttcacttgtaatgtaggaactggaagaggaggcaacagtatttggggcaagaagtttgaggatgaatacagtgaatatcttaagcacaatgttagaggtgttgtatctatggctaataatggcccgaacaccaatggatctcagttcttcatcacctatggcaaacagccacatttggacatgaaatacaccgtatttggaaaggtaatagatggtctggaaactctagatgagttggagaagttgccagtaaatgagaagacataccgacctcttaatgatgtacacattaaggacataactattcatgccaacccatttgctcagtagctatgatagacctggacaaataacttgacaaattgctggaacacacttattgtggtttacccggttttaattatgtcagagattgcatcatccttctgcttgtttacaactatgatcttctatgaaatggtggtaccaaggggcgcccaacagcttttatccccattcttagagcatattctttattataatgattatccaacatatttctttaattttaatacaaaaaatacatcatttaatttttgttacatatgaacattcatttttaaatgctcagcctcaagtgcaggcatttttgagtggcctgattacatattcctcccacagcaagtccgtatcctggaagtgttattttataataaaatttaaaaagttttaaagaattaaatcgtaggacaaattaattaaaatattgtgtaaaattaccttcaggct

SEQ ID NO: 129117 - DNA, 1365 bp, Homo sapiens
ggcaggccgagtgtaaagcattgcttgaggttgcccaggtagtttcgccttacacttcttgtcccagtgcaattattagtagagctccctttcactgtcaaatttccggttggggataaattgcattgtcgttttggtttgagataggaagatgaggggaggaaggaggtgaggcggtaaggggcgttctctctcttgggtcccgcgcccaacttccgctggcccaaagaaactataattttgaaccaacagacctctgctggcatctgcgattgcatttttcctgttttaacaacggctgtgctagacgaagtggtgaagcccaaagacttatttttgagctcgctgtaagactgagaaatcacgtagtccttcctgaaaccactaagaggaaaaatgtctgtgacactgcatacagatgtaggtgatattaaaattgaagtcttctgtgagaggacacccaaaacatgtgagaatttcttggctctttgtgccagtaattactacaatggctgtatatttcataggaatatcaagggtttcatggttcaaacaggagatccaacaggaactggaagaggaggcaacagtatttggggcaagaagtttgaggatgaatacagtgaatatcttaagcacaatgttagaggtgttgtatctatggctaataatggcccgaacaccaatggatctcagttcttcatcacctatggcaaacagccacatttggacatgaaatacaccgtatttggaaaggtaatagatggtctggaaactctagatgagttggagaagttgccagtaaatgagaagacataccgacctcttaatgatgtacacattaaggacataactattcatgccaacccatttgctcagtagctatgatagacctggacaaataacttgacaaattgctggaacacacttattgtggtttacccggttttaattatgtcagagattgcatcatccttctgcttgtttacaactatgatcttctatgaaatggtggtaccaaggggcgcccaacagcttttatccccattcttagagcatattctttattataatgattatccaacatatttctttaattttaatacaaaaaatacatcatttaatttttgttacatatgaacattcatttttaaatgctcagcctcaagtgcaggcatttttgagtggcctgattacatattcctcccacagcaagtccgtatcctggaagtgttattttataataaaatttaaaaagttttaaagaattaaatcgtaggacaaattaattaaaatattgtgtaaaattaccttcaggctatgtgtataaggtatatatgaaacgtaaatgaacttcatgtttaa

SEQ ID NO: 129118 - DNA, 1308 bp, Homo sapiens
ggcaggccgagtgtaaagcattgcttgaggttgcccaggtagtttcgccttacacttcttgtcccagtgcaattattagtagagctccctttcactgtcaaatttccggttggggataaattgcattgtcgttttggtttgagataggaagatgaggggaggaaggaggtgaggcggtaaggggcgttctctctcttgggtcccgcgcccaacttccgctggcccaaagaaactataattttgaaccaacagacctctgctggcatctgcgattgcatttttcctgttttaacaacggctgtgctagacgaagtggtgaagcccaaagacttatttttgagctcgctgtaagactgagaaatcacgtagtccttcctgaaaccactaagaggaaaaatgtctgtgacactgcatacagatgtaggtgatattaaaattgaagtcttctgtgagaggacacccaaaacatgtgaggctggagtacaatggcgcgatctcggctcactgcaacctccgcctcctgggttcaagcaagtcttctgcctcagcctcccgagaactggaagaggaggcaacagtatttggggcaagaagtttgaggatgaatacagtgaatatcttaagcacaatgttagaggtgttgtatctatggctaataatggcccgaacaccaatggatctcagttcttcatcacctatggcaaacagccacatttggacatgaaatacaccgtatttggaaaggtaatagatggtctggaaactctagatgagttggagaagttgccagtaaatgagaagacataccgacctcttaatgatgtacacattaaggacataactattcatgccaacccatttgctcagtagctatgatagacctggacaaataacttgacaaattgctggaacacacttattgtggtttacccggttttaattatgtcagagattgcatcatccttctgcttgtttacaactatgatcttctatgaaatggtggtaccaaggggcgcccaacagcttttatccccattcttagagcatattctttattataatgattatccaacatatttctttaattttaatacaaaaaatacatcatttaatttttgttacatatgaacattcatttttaaatgctcagcctcaagtgcaggcatttttgagtggcctgattacatattcctcccacagcaagtccgtatcctggaagtgttattttataataaaatttaaaaagttttaaagaattaaatcgtaggacaaattaattaaaatattgtgtaaaattaccttcaggct

SEQ ID NO: 129119 - DNA, 1558 bp, Homo sapiens
ggcaggccgagtgtaaagcattgcttgaggttgcccaggtagtttcgccttacacttcttgtcccagtgcaattattagtagagctccctttcactgtcaaatttccggttggggataaattgcattgtcgttttggtttgagataggaagatgaggggaggaaggaggtgaggcggtaaggggcgttctctctcttgggtcccgcgcccaacttccgctggcccaaagaaactataattttgaaccaacagacctctgctggcatctgcgattgcatttttcctgttttaacaacggctgtgctagacgaagtggtgaagcccaagtatggagtaacgtcattaattctttcattcacttattcgaatgcttgctgagttctgtgttgctactggtttagttcttgggatactgcgagtgaacagtgggcggcgaggctgttgttgcaacgtcagagtaaaagaaggaccctgcacctcggcctcccaaagtgttaggattataggcgtgagccaccacgcccggcgaggtttttatttaaaatgttcagtaaagatgagcgtgtgtgagttaagacaggaaaatgagcctaattctttttttcttttgggactagagacttatttttgagctcgctgtaagactgagaaatcacgtagtccttcctgaaaccactaagaggaaaaatgtctgtgacactgcatacagatgtaggtgatattaaaattgaagtcttctgtgagaggacacccaaaacatgtgaggaatatcaagggtttcatggttcaaacaggagatccaacaggaactggaagaggaggcaacagtatttggggcaagaagtttgaggatgaatacagtgaatatcttaagcacaatgttagaggtgttgtatctatggctaataatggcccgaacaccaatggatctcagttcttcatcacctatggcaaacagccacatttggacatgaaatacaccgtatttggaaaggtaatagatggtctggaaactctagatgagttggagaagttgccagtaaatgagaagacataccgacctcttaatgatgtacacattaaggacataactattcatgccaacccatttgctcagtagctatgatagacctggacaaataacttgacaaattgctggaacacacttattgtggtttacccggttttaattatgtcagagattgcatcatccttctgcttgtttacaactatgatcttctatgaaatggtggtaccaaggggcgcccaacagcttttatccccattcttagagcatattctttattataatgattatccaacatatttctttaattttaatacaaaaaatacatcatttaatttttgttacatatgaacattcatttttaaatgctcagcctcaagtgcaggcatttttgagtggcctgattacatattcctcccacagcaagtccgtatcctggaagtgttattttataataaaatttaaaaagttttaaagaattaaatcgtaggacaaattaattaaaatattgtgtaaaattaccttcaggct

SEQ ID NO: 129120 - DNA, 1247 bp, Homo sapiens
ggcaggccgagtgtaaagcattgcttgaggttgcccaggtagtttcgccttacacttcttgtcccagtgcaattattagtagagctccctttcactgtcaaatttccggttggggataaattgcattgtcgttttggtttgagataggaagatgaggggaggaaggaggtgaggcggtaaggggcgttctctctcttgggtcccgcgcccaacttccgctggcccaaagaaactataattttgaaccaacagacctctgctggcatctgcgattgcatttttcctgttttaacaacggctgtgctagacgaagtggtgaagcccaatctgtgacactgcatacagatgtaggtgatattaaaattgaagtcttctgtgagaggacacccaaaacatgtgagaatttcttggctctttgtgccagtaattactacaatggctgtatatttcataggaatatcaagggtttcatggttcaaacaggagatccaacaggaactggaagaggaggcaacagtatttggggcaagaagtttgaggatgaatacagtgaatatcttaagcacaatgttagaggtgttgtatctatggctaataatggcccgaacaccaatggatctcagttcttcatcacctatggcaaacagccacatttggacatgaaatacaccgtatttggaaaggtaatagatggtctggaaactctagatgagttggagaagttgccagtaaatgagaagacataccgacctcttaatgatgtacacattaaggacataactattcatgccaacccatttgctcagtagctatgatagacctggacaaataacttgacaaattgctggaacacacttattgtggtttacccggttttaattatgtcagagattgcatcatccttctgcttgtttacaactatgatcttctatgaaatggtggtaccaaggggcgcccaacagcttttatccccattcttagagcatattctttattataatgattatccaacatatttctttaattttaatacaaaaaatacatcatttaatttttgttacatatgaacattcatttttaaatgctcagcctcaagtgcaggcatttttgagtggcctgattacatattcctcccacagcaagtccgtatcctggaagtgttattttataataaaatttaaaaagttttaaagaattaaatcgtaggacaaattaattaaaatattgtgtaaaattaccttcaggct

SEQ ID NO: 129121 - DNA, 961 bp, Homo sapiens
ggcaggccgagtgtaaagcattgcttgaggttgcccaggtagtttcgccttacacttcttgtcccagtgcaattattagtagagctccctttcactgtcaaatttccggttggggataaattgcattgtcgttttggtttgagataggaagatgaggggaggaaggaggtgaggcggtaaggggcgttctctctcttgggtcccgcgcccaacttccgctggcccaaagaaactataattttgaaccaacagacctctgctggcatctgcgattgcatttttcctgttttaacaacggctgtgctagacgaagtggtgaagcccaaagacttatttttgagctcgctgtaagactgagaaatcacgtagtccttcctgaaaccactaagaggaaaaatgtctgtgacactgcatacagatgtaggtgatattaaaattgaagtcttctgtgagaggacacccaaaacatgtgagatggagtctcgctgtgtcccccaggctggagtacaatggcgcgatctcggctcactgcaacctccgcctcctgggttcaagcaagtcttctgcctcagcctcccgagtaagtgggattacaggcgtgcgccaccatgcctggctaatttttgtatttttagtagagacagggtttcaccatgttggtcaggctggtctcaaacttctaacctcaggtgatccatgcacctcagcctcccaaagtgctgggattacaagcatgagccactgcacctggccttttttttttttttttttttctcaagacggagtcttgctctgtcacccaggctggagtgcagtggcatgatcttggctcactgcaaccttcgcctctggggttcaaacgattctcctgcctcagcctcccaagtacctgggattacaggcacccaccaccatgcccagctaatttttatatttttttagtagagacggggtttcacca

SEQ ID NO: 129122 - DNA, 1044 bp, Homo sapiens
ggcaggccgagtgtaaagcattgcttgaggttgcccagagacttatttttgagctcgctgtaagactgagaaatcacgtagtccttcctgaaaccactaagaggaaaaatgtctgtgacactgcatacagatgtaggtgatattaaaattgaagtcttctgtgagaggacacccaaaacatgtgagatggagtctcgctgtgtcccccaggctggagtacaatggcgcgatctcggctcactgcaacctccgcctcctgggttcaagcaagtcttctgcctcagcctcccgagaactggaagaggaggcaacagtatttggggcaagaagtttgaggatgaatacagtgaatatcttaagcacaatgttagaggtgttgtatctatggctaataatggcccgaacaccaatggatctcagttcttcatcacctatggcaaacagccacatttggacatgaaatacaccgtatttggaaaggtaatagatggtctggaaactctagatgagttggagaagttgccagtaaatgagaagacataccgacctcttaatgatgtacacattaaggacataactattcatgccaacccatttgctcagtagctatgatagacctggacaaataacttgacaaattgctggaacacacttattgtggtttacccggttttaattatgtcagagattgcatcatccttctgcttgtttacaactatgatcttctatgaaatggtggtaccaaggggcgcccaacagcttttatccccattcttagagcatattctttattataatgattatccaacatatttctttaattttaatacaaaaaatacatcatttaatttttgttacatatgaacattcatttttaaatgctcagcctcaagtgcaggcatttttgagtggcctgattacatattcctcccacagcaagtccgtatcctggaagtgttattttataataaaatttaaaaagttttaaagaattaaatcgtaggacaaattaattaaaatattgtgtaaaattaccttcaggct

SEQ ID NO: 129123 - DNA, 307 bp, Homo sapiens
cgggaaggtgtcgaggatccctcataggttcgcaggtactgatgaactaataaattctctctgagcctgcagttttgggtctctcataccagcagcatacatagtagaaaatgggttgaaatatgagtcatgggatctagattctagtcctgactttgtcattaacttgtaatatgatctcaagtagtatggttcaatctttcttctagaccacagttggaggtattatgaaagggggctggggaggaggctgttgcggctgatttccttctggaccaaaaggtctattattctatcttcctcttga

SEQ ID NO: 129124 - DNA, 462 bp, Homo sapiens
ttttgtccttgcgggaggtagctggaacacggggaggcctgtgcggggccagggctgccattgtggggaagtttgcctgagtctagggtccacgtagcaggtgcgctcagttctcacaatgagcagcatcttgtgactttgcctctatgggcaataaaggtgtgatttggactctgacctaatattttagtttcccaatttgttcagagcctgggtggtttactgggcccctttaggaactccagtggaccttatgggggagggagggcccggtgagagacacaacttcccctccagcctgactgtgactttgtgctgcccatgactgtgtcatgtgcacagctgggagggccccactgccatcggctagacctacgtagggtgaccttggttgaaccaggagcacctaccccaatgttatcgtgccctagggacaatgggaagcagcacctgagatggtca

SEQ ID NO: 129125 - DNA, 431 bp, Homo sapiens
gaagccccatggagctctgcctgggagtaaccaagcctgttttgtgtttcttgctctgctctgtatatatagagcttctcttccctcctccgtagctgaaagcccccaaccggtccgaaagctccttgaagaccgtgctgccgtgcacagacacgggttcctcctgcagctggagcccacggtgaataggcaggcgggccacagggccctgtgtgtccctgctgcttgcagtggccatctgctgcccacgctgtcagcaggttctttggactggcgtctggagggtacacaaggcgccatccctgaagtgctgcctggggcctgctgttggccacagtggaattcctcagactcaaagccctcccctcagggaagtggtgcaaagcccagtctgtagtacttgcttgggacccaggtgtcctgactcatca

SEQ ID NO: 129126 - DNA, 136 bp, Homo sapiens
catctgtaaagaagccacagctataatcatggtcaatggtgaaagactgaaagctttccccctgaaattaggaacgagacaagaatatgtgctttcatcactgctattcaacagtgtgctgcaagttcaattagac

SEQ ID NO: 129127 - DNA, 498 bp, Homo sapiens
ggttaactgcgggcttctgtggggagcagtactactgtgtctgtcggcagtggccatgggaccctcaggcccgtcctgtacatggagcagggtgcacagtcaccctccatcctgtggcgagaggctggcccggcccggccaagcgaggcagaaggtgtcggccaagtggccccgaccccatcccgcaatctctcagctgctttttattacctttgtgccccatttgggagtttgcttcctccacctggacactttgcccgggaggtcatcagagcccaaccccaggctctgctcggttggagaggggatgacttcaccaccacctgaccttcctagggtcctggtctcactgtcagctgggggtccgttgtgtgtatttgtacagttttgctgtatggggtttgtcacccaaaagctgatgctgagaaaggcaaatccaacaacagacctaaagccacctctggagccgccagctgggctccgtccccagagcctaag

SEQ ID NO: 129128 - DNA, 587 bp, Homo sapiens
tcataaagttggcaaaaatagtgtgataaaaccaggggctggtgaggatgtggaacaataggaacattctggtaggacatatattcctcatcactttggagagccatttgaaaaacacatatcttgtgaaccagcaataccacttctaagtgtccaactggagcaccaggagaaatgtaaaataatgttcactggggcatcctaactatctaactgtcccccaaaaggggaatggaaaaatcggctcattctgataaaaagaatgaactggatctatgaatcagcataaatcacgtcaatcatatgatcagtaaaatacgcaggttttggggtttttgttttgtttttgagacggagtcttgctctgttgcccagcctggagtgcagtgacacaatcttggctcactgtaacctctgcctcctaggttcaagtgattctcctgcttcagcctcccgagtagctggaattacaggtaggtgccaccatacccagctaatttttgtatttttagtacagacggggtttcaccatgttggccaggctggtctcgaactcctgacctcaggtgatctgcccaccttggcct

SEQ ID NO: 129129 - DNA, 530 bp, Homo sapiens
aattaatatttgactgttcagtaatcattactgacatcttgtttttcacttttaaatgcctccaatttaccatagcactttgttaaaataaattgtgacttttaactttttcatgaacataactgctacataaatgttctttagaattttagacatatctcaggcacacaaattattagttctcacaaattagagaacacttataattgtgaactctaaatagaaaccttcattttaatcactgagcaacagtatatagagcaatattgttgatcctgataaacactgcatataaagaaaaactgtaatatacaatatataccatctcaagtatgcttagctttgaaaatgatgaaaatagaaggcaaaagtaagtgagtaataaagatgttatagtaactgcagtagtggtacatgtttcacaaagattttaataaaagcacataaagctacaataaaagttctatattccagtttcttatagtccagaaatagcagtgatttggcatttggcaaattgaaagttaccc

SEQ ID NO: 129130 - DNA, 647 bp, Homo sapiens
tgttctaatgaggaatactgcatttaattgctgttattttcagttccaccttgattttgatgtctttatagtgaatttgactcacattcatttcttatcaaagggagattaaatctatgtagttttgagatctggactatgctttgagaagtcagatgtttgtgaaaaatgtctttggatttttttttcttttttcttttgatttctttgctgtagattagtttcctaaagggttaatgaaagatatattgacttttttagttatgcttttatttattcatcaccatgaaaatttatcagtacacttgtgaaaatttatcaattatcaattgtggaaaattgtgaatacacttgcactagaatgtttcattttattacctagttaaaccagccactttttgtaatttgtacttaagaatatgctgttttgattatatttctaagtaaataaatttttccattattaacatagaagtcttgtttgtgttatttgctgctgggaagatgctctgaagcttctgccattgtcctttgcatgtcatgtgggtggttatgctttttagacacttacatggtttttaatggaagagagtgatggatatactaccatgagaagcactaatatcctttttgaagttcaccattga

SEQ ID NO: 129131 - DNA, 170 bp, Homo sapiens
taaaataaattgatcaattctcatattccaggatttgagaaagtttatacttaactctggaatgcagagattctgaccctgtaaaaataacatttatatgccagataactctgttaagcatatgacatttattacttttttttttttttttttttttgaggcagagtctc

SEQ ID NO: 129132 - DNA, 880 bp, Homo sapiens
gtgtcttgttttttgttgcttgaagtcaaaagcattcctaactgacaccctaggtgagttgagagtttccagatagggttggtggtcagtggtgttaaatgttgcagagaaatcctataagcttggaagatgtctggaggatttggctcttgagaagtcaattttacctttttttcttttttaaaattttttggtaaaatatacataacataaaatcttttaagctgtggttaaatgtacaattcaatggtattaagtacatccaagatgttgtgaaaccatcatcactattttcataactttttttatctcaaaaacaaaatactcattgataataacttatcactgctcccatctcctgttaacctctattctactttctgtctctatgaatatgcctattatagatatttcatataagtagaatcatacatatttgttcatacatatatgtccttttgtgtctggcttatttcacttatcataatgttttcaatgttcatctgtattgtaacatgtgccaaaaaaaaaaaattttttttacgaacacaactctttttgcgaagaggggtctccaagttggcagcccctttggtggtgcgtgcccggaattcatagtccgggtgacgggggggctggcttataggggcctgggcgttctccacggggtacacattggcgggcgggcggaagggaatccatcgcaacggtggcgcctgtgcgcccccggtggcgcggtgggcgcccaccctgttacttgtggtgcccacatctttgtacctacacgcgcggccaagaggttactcctctgcccgtgtgtgtgttcccgccctgccgccgagttatgtacggtatgcacaccctctgccgttcgtcactc

SEQ ID NO: 129133 - DNA, 385 bp, Homo sapiens
tggtctcgaactcctggcctcaagtgatccatccgccttggcctcccaaagttgctgggattacaggagtgagccaccatgcccgaccaagaaaaccctcttgaatgctctctcctgaactcctgacctgaggtttggtgtctgaggctggggagagctcagatagagggatgttcaactctagtatctatgaggtgagactcaggatggttcttgtaacgtcttgaaacctcttgaagatttatgctgtgtgtaatagctcatcaagaaaccctggtaataatccttgaaatagacctgcgaactctgctttaatgaattttacatgatggcgttggagaaatgaaatccccttaccctcattaatcctgagacacagcaatca

SEQ ID NO: 129134 - DNA, 364 bp, Homo sapiens
tcatggaattagaataaaacccctggagaaggtgtgtgctgacttgatcacaggcaaaaagtttaaaaatctcaagtaaaaggaccagtctgtatgcctaccaagactctgaaaatcactacaagaaaaactccttgtggtgaaagttctaaggcactgggatggtttccagatgagaatccaaaagtgactcactgacttgcacagtccttccaagattgtcaagcagattatttccatcagtgttgcgccaggaatcgattctgaagtcaccaatgcagatgtttaagtcaactattttaataaattaattggccgggcgcggtggctcatgcctgtaatcccagcactttgggaggccaag

SEQ ID NO: 129135 - DNA, 437 bp, Homo sapiens
taatattcagaagttaagcaggacattccagatttgttagggagaattattaatcatatcccctcaccccaccaaaagaaaaacagcagtgaggtgtgacttaatcacaaaggactccatctgcctttgtgcctcaatttagagcttatattttaaactgcttttctctatgtggcttctgaatataatacatatcctgattggcaatcatggacttcagtctacctctgtagagtaacatctctttgaaaaactctcatgttgaactttatatgggccataactcattttctgatagcccaatcacatatttctccatatcattaaaatctaagcatccatatgtgtatgatgtggtagcatacataatttacttttattgatataaaagtaacagtaaatcagaagagataataatgtattggaaagaaaactga

SEQ ID NO: 129136 - DNA, 180 bp, Homo sapiens
ctctgtcttccagaaaggctgtaccagcatggtgagtgtataatggacatgagcatggacatgggatggacatgagaatgttcatctgtctataccctctccattactaggtataatcactctagaaaatctttaataatcttttatctggtccccttggctttagcctttccctatgca

SEQ ID NO: 129137 - DNA, 789 bp, Homo sapiens
ctacactacgtgtatcctacaagtctagccttctgaggaaggaaaaacaggacagtagttaggagataatcataggctcaaaaggttctttcccccaagattagaaactggagagcacttgaaagaagaaaggaaaacccctgagaaagaacatggctgaagatgctgaaaaaagacctgaaagtggatatggttttcatgactccccataatgtgccccatgatgtcccctccggcctcatcactcacttctcatcgttttacacagcacccaaactacagcagactccccctagctccctaaacacaccacgcctggctaattttgtgtttttagtagagacgggtttcaccacgttggccaggctggtctccaactcctgacttcaggtgatccacccacctcggcttcccaaagtgctgggaccacaggtgtgagccaccacgcctggccctcatgtgctgtcttaatccaggagctctgcgtctgtggttccaactgcctggatacacttccctcaatctcccagctgctaagcccaccaccactccacccggttatgtccttctcatgttttaggtctcacttgtcacctctttgaaagaagccttctttaatcccatctatccttcttatgtggaccttagcacccacttcttccccttcagagctgtccccacaccgtatgagcattctctcacactttctacctcctgaccagtctcctatctgtgtgagggtaggtatctcatccatcttattcactgctgttatctgcagcaccttca

SEQ ID NO: 129138 - DNA, 368 bp, Homo sapiens
tgcctcacaggtgtgagagttaattaatgtttgtggggcagctttgagatccacagatgaaaggtgctctataaacgcaaaatgcaattcctcattagcactgtcagacggttcccaggggaaacagttcaccctgcaccacgaggctgctaccctcagccagatgagtctgagacacgtctgggaaagggctacgtatttaggcagagtgcttttggagggagggttcaaggataggtcactagcttccagaaaagatgggtgtttttagaacatgtctcattctcagttggcatcgtgtccctgaggcagagggagagtggccttcagtgcacacagctggagggaccatagttcagagggaacag

SEQ ID NO: 129139 - DNA, 226 bp, Homo sapiens
tacaggcatgagccaccatgcccagcctagcagaggtatttttgctgtttgttttctctcccccttatttgtgtgtgattcctaccaggcagagtacaggacccaataaataggcctcaataaatgttgagtaaatgaatgaaaagaacttcaagtctccctgccaatcaaagtaatcaatctctccatgattacaccattttcctcttaatcataattatttata

SEQ ID NO: 129140 - DNA, 796 bp, Homo sapiens
gtagagcaaattctatcacctcattctttttgtttttcttgaaactctgttgcccgggttggagtgcagtggcctgatagctcactgaaacatctgcctcctgggctcaagcagtactcccaggttcaagtgattctcatgcttcaccctctcgtatagctgagactacagatgcgcaccaccacacctgcctaatttttgtatttttacgagagatggggtttcgccatgttggccaggttgatctcgaactcctgacctcaagtgatccgcctgcctcagcctctcaaagtgttggcattacaggcatgagccatcgcacctggctcttttcttgttttttaatgtaagcatttatatctataaattcccccctgcgcattgcttacattgcatcctctaagttttggtatgtcctgtgtttgttttcatttgtttctgttacctaatttttcttctttgagtgtgttgtttaatttccataaatttgtgaatttccagttttcttttgttattgatttctaacttgatttttttgtggtcagagaagaaactttgatatctgtctttttaaagttattaagacttgtctgagcatggtggctcatgcctgtaatcccagcactttgggaggccaaggtgggcagatcacttgaggtcaggagtttgagaccagcctggccaacatggtgaaaccctgtctctaccaaaaaatacaaaaattagctgggtttggtggcgtgtgcctgtagtcccagctactcgggaggctgaggcaggagaatcacttgaaccc

SEQ ID NO: 129141 - DNA, 482 bp, Homo sapiens
attcagggagataggattagtttctgttggtggcaggagcctgacagctagtggtgatggagctgctggggcagagggccgctcactgcccctaatgggacaggtggcagcaagtggatcacttgctacagctccaggaggtaagaatgcttgggcattggcaaaagtccatagggctcagcagcctcctgagtttgggaggtaagactctcctcctgctgatgcatctcgtgaacctgccacaaaccctcctgtctgtgctgtgcaggggagcttgcccagataaattgagggcacttggcatcataacttgatgaatttctccagtgttaccacttgatagcaatatatataaacaggaatggttactatggagacttactacaagctgccaccctgtgttggagataatttcctcttcagcttaaacatatcagaatatgacaattctataaagaaaagcagttctgaaaacttaacac

SEQ ID NO: 129142 - DNA, 473 bp, Homo sapiens
ctccctccttggcctcccaagtagctggagctgggcagagtagctgggaccacaggcgtgcaccaccaagcctggctaatcttttgtatttttggtagagacacggttttgccatgttgcccaggctgggcctgaactcctgaacttaatcagatttttagtagaaaggtggtgaggcgttcctagggactgccacaggttccatacgagtgtgatagtcgctgccctgggttttggtttctattggtctgaaaattccttaccagttaagtggctgttactcctcagtggactcagaggacaagctggccacatctgcaggggagtgaacttaggttgtgtgatggactcttgagtctgcaagatgccaacttggctgcatccaaggctcccttgtggcacagcacccagggctgctctgtgagtggctgctgcctgcaggggctggagagaggaggaagggtgtgcacagt

SEQ ID NO: 129143 - DNA, 594 bp, Homo sapiens
  misc_feature (56)..(56): n is a, c, g, or t
tctacaggatcttgatcaagagcatacccctctaacaattttcattactgctcccntacaggaaccatgagatgggacaaaaaccctctctggattccaggaaactcctgtactaaaggagcctccttcccatggggaaatgtcgcaggtgggagtcagaagaggcctgcgatgagggaagagccatctggagcacctactttgataactaacaatgactgttgggcattgttctatgtgctttccttacatgatgtgtttaatcaacaaactctaggaagtagctactattaacatccacatttcacagctgaggaccctgaggccccatgaacttaagtcactccttaacctggacccctacacgatgctattctgcctgctgtgcacttggaagttctacatactaggtctcttgctggtgacagcctgtgagctagatggcattatctatgttgttcagatgaagaaataagacacagagacatttagtaagttcataaggtcacgcagctcatggtggcagagtcaagattcaattccaagtccttctgaccaccgcccaagctctctctagacagttgcactggtttc

SEQ ID NO: 129144 - DNA, 372 bp, Homo sapiens
acggccgcttttcctttaactctcagcttctatttaaaaagctaatttgggagcttgtcgatgctcccaattcagacattttaaataggaactgaaagtcaggagctgccagggcactagatttcctcccgttgccaccagcacagctgaggcatttgttcagtcactcctctggccctggccgtgtgtgtctgtgtgtgtgagcacccgcgagctcagggtgtatttcaggctatcttttctatttaaagacggtgctcctatggatgactattctttctctgtgtgtgtgtcctttccaagctgtgcacacatgaggattcttctttagtctcatggctgtggccggtatttgcaaagcttgtcaccgtg

SEQ ID NO: 129145 - DNA, 628 bp, Homo sapiens
atatggaaaaatcttcttggcccataaatttataaaaatgaaaaacagaaatagaattaattttgagccctaactcattctagtaataaataatatatccactgatttcatgacctaactagaaaaacttagactcgcttttggccatggagacatacatttccaacaaaattttacttctgcataataattatttcttaaaatttattacatcttatttttttatcaattatgatctaaagataattgtaattataacccaagcagaaaaaatccaatatttagagacttattgccacaggaaaattttaaaaattaaatgtcaatttatatatgtaacttattgtacatagaagtatggtgacaaaacctataaaatattttctacacgaaatacattacattagaataaaagtctgtggaaatgaaaataagagctcaaagagaaaaaaattgatgtcaaatttcagactattaaagaacagtctgtttatagcaattggacacctgatagcatataatattcatactctattgcagccatcccttcctttttggcactagggaccagttttgtggaagacaattattccatggatggagggagtgggggctgttcggggagatg

SEQ ID NO: 129146 - DNA, 358 bp, Homo sapiens
acagttctgaatgcgcaggagtttatagatggtaacgtcttttctctggatcattaattctccttactactctgtgattttaaaaacttagaatgttggctagtgtggtggctcatgccagtaatcccagcactttgggaggctgaggtgggagggtcacttgaggtcaggagttcaagaccagcctggccaacgtggtgaatccctgtctctactaagacacaaaaaaactagtctataatcccagctacttgggaggctgaggcaggaggatcgcttgaactcgggaggtggaggttgcagtgagctgagatcatgccactgcactccagcctctgtgacagaacaagactgtctc

SEQ ID NO: 129147 - DNA, 778 bp, Homo sapiens
aacagagaaagctgccagcctagaccagtatagagtaccaggggctctcggtaagaggcaacacttctcctgcctcccagatcaaggggcttctcctccagcacccttattagctacttattttggagcacctgctctgtatcaggcagggcacctggtacattgtagactctaatttgatcctcacaacagtcctacataacagctattattatccttattttatatatgagaaactcaaggttcagaaaagttcacagctgaatgtcatatacttgataagtaattaagcagggctttcaacctgagattttcatttagataaactcaacttcaaaactcacattaaaatcacagtatcacttggattccccagtatagtatataagaatggaaatggtaagagcaaagggtagggaaagatgaatcaataacagcatcaaactcacagatgcaacagctgaagtggcatggggctgcaaataacagagcatcctgtagaaggaatatggtctagaaagtgagggctggttatcagagggagatatgaaagaagagagagtggggttctgcggggcagagagagatactgtggaacaaacttaaacttttcactaatagtacaaaagtagtttattttaaattacaatggaaatttatatttgtaaattaaaatagtgctatgtaaaaatatacttagaaggtcatatatgctttaagagaaaaaaaaacatattttctaggaactataaattaccggaataatgtaaaatcacag

SEQ ID NO: 129148 - DNA, 110 bp, Homo sapiens
tcaggaggtagaatgttattcttttaggctttgaaagggtaacatttgtatataaaagctactacttttttaagttaaaaataattaggaaacagggtgtccctgtgttg

SEQ ID NO: 129149 - DNA, 734 bp, Homo sapiens
aagaggggtgtggactgggggtgctctgcctgggacattccacccttccccactccccccacccagctcttctgtaacagctcactcttcctcacttttcaggtctcaagttaaatatcccccctctgggaagcaccctaggcacccccaaactcgggatggtgctcctactgacctttcacacaggactcacctctcacaagctctacggacaggactgagttcgtcctgcttaccatgatagccccaggacccagcacagggtatagtacacagaaggtgctcagtaaatctttgttaaatgaaagaaacatgggatttttaagtatattagtcttacctgacttccttgactttaaaaaggaaattgagggcacattgagaaaatgagacaaatgtgggggtcaaaatcatgtcatgtgactaaatcacgatcccaaaattttccaacaaactagagcagtgaacagggattagcaaaatgagatttaacaggaatacatgtaaaggcctgtatttggcttgcaaaacccactaactaccctagtactggatgggggaagccattgctgagacagcacacatgcaaaagacttcagactttcagttgactccatatttaccaagagaatgtatccaaccttgggatacattaagaaatatgtagcaccctgccaggcgtggtggcttacgcctgtagtcccaacacttggggaggccgaggcaggtagatc

SEQ ID NO: 129150 - DNA, 197 bp, Homo sapiens
agtcacctaagtaagctttagctgacttctaaggacaggcatgccatagaatataaacaatgggtcaaagttatttaaaatcattgttagacaaaggaaagatggatggaggaagaagacgcaaaagggaagatgataggaagagaaagaaaaagtttgtagccagagattgctttatggatatgtaaccagtgcag

SEQ ID NO: 129151 - DNA, 647 bp, Homo sapiens
tagccgggatggtctcgatctcctgacctcgtgatccgcccgcctcggcctcccaaagtgctgggattacaggcgtgagccaccgcgcccggcctgaaatgcaattttaagagtgccttcaaatgccatctcagagagatgatctgcagggccacagggcatcaacaatcaagaagagttctaaaggaggccaacaccattttaagagactggttggtctggtggataacggaagactggaagagttaaatacgtatagtttagctgggcagacccagtagggagcaatagaaggtggtaaatgtggatgtggtagcaatctaaaaatatccataagatgtaaaggattagaaggaagtattatttagcatgcaaatcagaaagaatcactagatattttaaagaatgatatgaggaattaggttctgagatcaaaaaattggaaaactgatattataaataaagtgaaaaagaaagcattctcaaatactttttacttgagaagatgggaaaaaaaattctttggataagaattgaaaatggggttaactttagggagacatctaagagcacctgaaataaatctgacctctcgcattcacacacaagatttatatttgctagctaaattctagcgtgagggagca

SEQ ID NO: 129152 - DNA, 184 bp, Homo sapiens
ttacatatggctctcctcctgaagatacgccccactcagaaaaattcaggtaaaactcagccggaaaccacagcctcaatgacctaaggagacagaggacaattcagagtgactacagcggctagaaagtgagaggagaaatcagagagaaacataaagaagacccaaattctgcatatgaact

SEQ ID NO: 129153 - DNA, 194 bp, Homo sapiens
agctgcctggagctctgtggggaacctacgccaagtcccgggcagcggttcccgaaagcagccccagtgacattgcacccggcgccgggctgggatctcctccgctggggccgcccgtgggaggagacctcgctgggtggccgggctcaggcgctctcgagcggatttggggtcacaggctgggacaccgcgga

SEQ ID NO: 129154 - DNA, 675 bp, Homo sapiens
ggtccaaatttattcgtttgcatgtagatatacatttgttccagtaccgtttgttaaagactgtttttcccattgaattttcttgttatacttgttgaaaattgaccataacatatatttctgtactttcagatcaatgcgtatacatctcgcattgatctagttgtctatctttgtaccagtaccacaccatatttgattacttgtacttgaaaactctggattattatagtttttaagtttcaaatcgagaagtgtaagtgctccaactttgttcttttcaagattgttttggccattttgaatacctagcattttcatttgaattttagaatcagcttggcaatttctccaaaaaaaaacacaacacaaaaaaacaaaaacacacgtgtgtgtgcggcgcgcgcctctgggcccttgagaaaagcttttttgagacacctttcgttgtggggcgccgggggcccccgtgggtacgggaaccggtggccaaacgtggttccccaagggggaaaccgcggctgatgaccaagggcggggaatttctccccaattataaaaagcgccgcgggggaaccggaaggtttctcgtgacaaatttccagaaggcatctcggagggcccatacggggctctttacacgggggttccagcgagccggatttcaattacccg

SEQ ID NO: 129155 - DNA, 415 bp, Homo sapiens
taagaggtgtctacgggcttggaaggacgggctacaccgcttgcatcaagacggcggctgctgtgagatagtccaactgcatcttagtttccatttcgaaaatgagactggccactaaatgactctaaggactcatcagcactacctttttctgaactaagaatgtctaagacaagtgctactagcagtttgagagaatcccacatctggagaggaaggaaataagaacaacacgcagaaagacggaaaacaaatagatcaatgacagtactcctttgcaaaaggtgccaagaatctaaataaaatagtccccgggataaacatggcgcccaccgcggcaggacataatcaccagaaaataaagattccccgcctcattccattttataaatcacggcgccatcccaaaagaaat

SEQ ID NO: 129156 - DNA, 425 bp, Homo sapiens
ttattttccttctttatgggaaaaagaggagaggggactggctgcctgcagacaggtagctccacagggcaccgatagggttggggacaggtgggatatgcaagccttcacgtgactggccgtctctgccaaggtgcaggcagctcctagcatggagacatccctcatggaagtgagctttcccacccacctccatacccacatttctcagaaacagaccttcactctgctcttctccatcctgttctaagcctggtcagctgacctccatgaacttcatcaaaggacccccttgcccttggacttttacatgggtttggccagtagaagccagtggctacaaatcaaaggaagaacagagaggccaagatatttattctacttcctcctccttgccagatcacattggttaagtttctcctctg

SEQ ID NO: 129157 - DNA, 369 bp, Homo sapiens
ggtgaaggagaatgaaatatctgctcagggaatgcagggccccaaccaccgcttaccccacgtggctggcagagcccagggactactaccctctggagagggagatggaacagcactgaaaactgcggaccagtggaagctggccagctacacgtgaggtgtcctggtcttcctgccccagcatgggggcagggcaggcagcattgggccctcccagtgaggtcacaggggctaagcagcctgctggacaccatgccaagtgggaccgggcagcccccagcggccagcaccctgcatgcccctgcaggtcccgccagcctcagtgccctctgctacagatggcagataccgtgctcaccagaaaggcca

SEQ ID NO: 129158 - DNA, 674 bp, Homo sapiens
ggagataaaggatagatagccttccacaaaacgcttcagtatggcaagaagaatcatctaatattgacaaataaagcaacgtgacatctgtgttgaattccaaattgacttgttgagctgtgcaaaaaagtaaaagaaggtgcttattttcaggatgtgaaatacattgggaaaagccaaggtcaaagatgaaacatgactcaatgccaaagattttcaatcttaatgaaaatctctttcaataagaaattgacgattgagaaacagtgtcattgttagaagttcgatgttcttttgggggtctaacagacgaagccccagagaactgacttttattaatagatagcttaagatttatagcttaggaagaacagattaatagtttttggagtaaagcctgaattatagaaggatgacctgagccctggcatgagtgatcaatcagttcagtgtctgcaactgcacaattttaagaactcttaaaaggctctttggccactgaaaatgcattataaaggataagtccataaccagccaagtctggaatatatgtttatatggctatacagatccagtgtttctttaaaaataaagcaaagggtatgacacaggttggtttgctgttacttaggatatgtacgattgaattgagcctaagataagtgggatgtact

SEQ ID NO: 129159 - DNA, 342 bp, Homo sapiens
tgtcactcctggctagatatccaggcatgccccatgcccactaggtcccatgggtacaacaaactccaggcaccagtacatgatgttattcattgaacggcactcactttatgatctgtggctggcacactgttaattacatggcaaggagaggtcaatatcaagctaaaatggaacccagctgtcccacaatataatcacgtccacctgagacactgagccgtcacctttaaatcacttgtaagcactagctttcatagcctctcttctatcaataagccacaccacaaatgcagtccctgaatcctgcagtttttcagcataaagcgacattttcttagc

SEQ ID NO: 129160 - DNA, 201 bp, Homo sapiens
ttcccgccttggccacccaaagtactgggactacaggtgtgagcctgtagggagataaccattcttttcagatgggaaaacacagacccagacacataacttgcttgggttctcccactaggccctgatttttaaattttttggtagagataaggtctggctttctggcccaggctggtctggaactctaggcctcaagta

SEQ ID NO: 129161 - DNA, 471 bp, Homo sapiens
gtagctgggattacagacacgtgccaccacacccagctaatttttgtatttttagtagagacacggtttcaccatgttggccagcctggtctcgaactcctgacctcagatgattcatctgcctcggcctcccaaagtgctggaattacaggtgtgaaccacaaacccaaccctttctgcctattttctagtccaaatcctcagtttttgtttgcatgtactgaaataatgcaacataattttcatattagtttcagaaaattaagaatcagaaaaataaggctattgtaaaataattcacataatgcttgtcaaagcctactgccaatgtgttattttttatcatctgctatgataaattagcattgacattaattgacacgactggttttgataagtgtaaaacatcaaaagctgattttacaatttatgtgtaaagatctaaaatggtgattttgcatcctatattct

SEQ ID NO: 129162 - DNA, 190 bp, Homo sapiens
actgttttttactcgttctccaactccaacctcttagtggacagcatcaagcctggagacatctgatggccccccactgcagctactccctggtggatcagaaggtcccagtggaaagaagttgaccgtcactgcccgatcgagtgagagtttagagtttactttcctttcccgtcttctggtggacaaa

SEQ ID NO: 129163 - DNA, 483 bp, Homo sapiens
gaccagagccccgggcacggccccagctccgtggggctctcacggtgccaatcacaagacccagggttgtgcttttgagttttagaattagtcattctttagagcagccagctagtggcatttcctaggaaaactgtgacctgtgacaaatcgctgcatttttaatgtcaagatgtgttttcccacataaattcaccggagacatccgggccccgcttcgatgtaacatgagaggaagtcggcgtcctggccacgaaatgcagttcacttttttttaggcttttatatggattatgttttgctgacccacgcccgcattttcagattttgtatctaacagacagtgctcagtgcaaatcaacattccagcggtcaggactgaccccggggcagcactgggctcaggcttcagcgcgactgtccgcatggctccctcccgtcctggcaccaatttctgaataaagtcctttctaccaaaaaaaa

SEQ ID NO: 129164 - DNA, 402 bp, Homo sapiens
catgttgcttctccctctttgcagagtaaactgcaactcatcttcaagatctaattcataacaagtagacacaatccaataaaaaaatagaaacaaggtttgaatagacattttaccaaagaagatatatgagtggctaatacactcatgaagatactcaacatcattagtcattagggaaatgcaaaccagaaccacgagatactatttcatatccactaggatgattataatcagagccagacaataatacatgtctggctgaggcaggaggatcttttgagcccaggagttcaaggccagcctaagcaacatggtgacatcccctctctaccaaaaataaaaataaaataaaacaaaataaaataaaaatcagctgtagtcccagttactcgggaagct

SEQ ID NO: 129165 - DNA, 717 bp, Homo sapiens
agagaattagatgatatattcaaagtgctgaaagaaagaaaaactgccagataaaaataccatacgcagtgaaactattgttaaaaaatgaatgcaggctgggcgtggaggctcatgcctgtaatcccagcattttgggtggccgaggtgggcagatcacttgaggtcaggagttcaagaccagcctggccaacatgatgaaaccccgtctctactaaaaatacaaaaattagcagggcatggtggcgtgcacaggcatggtagagtgcgattgtggtctagctacctggaaggatgaggcaggaggacaggttgagcccaggagtttgatactgcagtgcaccataactgtgcctgtgaacagccactgcactccagcctaggaagcatagcaagacatctgtcttttagaaaataaaaaataaaaaaaatagaaataattttttttaaattaaaaaataggtaaataaattttttaaaaataaaatgagagataaagtctttcctagataaggaaaaactgagaaaattcatcaccactaaaccagccatataagaaatgcttaggccaggtgcctgtaatcacactttgggaggccaaggcgggcagatctcttgagctcaggagtttaagaccagccctgggaaacatgacgaaacctcatctctaaaaaaatatgaaagttagccaggcatggtggtgtgcatgggtaggcc

SEQ ID NO: 129166 - DNA, 292 bp, Homo sapiens
ctcttctagaaagctactcaaactttcactttcattgctaatgaataagaatgtcctgactttagtcaatacgctgaatttgttatcatctagttttgactttgttttttaatcttgaatactctttagagaaaatgttagttcactattgtttaatttgtatttctttaaagttggggttttattcatgtaactcaccaattgtgtttcttatggattgtgttcattttcctggaagaaaggtcatttttttccttattaatttctaagaatttttttttttttgagacag

SEQ ID NO: 129167 - DNA, 194 bp, Homo sapiens
ctatttaacaataccactaagtaaaaagaacagattttccaagttatgcagcaataccagagagcaggattaaatgtttaaaaatttttcattatctacttccatcacagaaattttctctaaggtcatttctatagcggttatagagggtccactgctaaagtgagtaaagattttttcaatataatgcatat

SEQ ID NO: 129168 - DNA, 461 bp, Homo sapiens
tgttttgagcagaggataagagggtaataggaaaaccacttttaagtagtctatggttctcttggagtatttcaaaattaatctcacttttaaatgaaaagaattaaactttagtctgacctagagacgacagccacctacaagattttagaaatcgtacaatggaaatggcagaatggtggagggattgcaagttgctagatcagtgatttttaagtggggtgattttgtcccccaagggacatttggcaatatctagagacatttttggctatcacaattgagggacagggatattattactatccagaggtcacaacccgggatgctgcaaaatataacacaaaagactctctcctcacagcaaagaattatacagcctcatgtcaatattgttactgttgagaaactctgtgctaggtatttcatttgaaatagaacacagttaaaagataattctg

SEQ ID NO: 129169 - DNA, 434 bp, Homo sapiens
ggtgatgatgggctactgaggcctccttacatgtatctagttaagaatatacatggtttcctgcgtgagaagcatgagagggctacaaggtgggcttggcagaatgttctgggcgttagcccagaaaaccagcttggccaagtccacactttcatgtctacggtgagagaggaaccatgagcaaatgtttacaattttttgtgcttctgctcaatttttttctctccaattgactgggtaagcctcctgccatagtcaaagggcttcattcatttgttcattcactcactcaccaaacaagtctgtctggcacaacacgaggcatgggggccgtggtcagtgtgagtgagactgataggtctctctctcccacagtctgatggacaggcaggcagacagatacagagcaggaaattacaagcgcaattactgtt

SEQ ID NO: 129170 - DNA, 618 bp, Homo sapiens
caagtttctgttgagattgacctatcaattatatagtaatgaataaaatcttagaaataatattgttacaaattgtaaaaaccaaatcttcttaagaatcacatttatgaattgggaaattggtagatccatttttcacttgccagggtagaatgacctgatttatatatgattagagtgataaaagattaagaaatggaaattatcagtttctattagagatatatttattagagatattggttagctgtggttcttcccagtattaggagaattagaaaattatttcccttaagtaattaaatgagatatgatatgattttcagcatctgaaaactaaattcagtttaattttgtaacattatttgaccctttctgcaaaattttatatagtgaaataagattgaaaatttaacttgatgataccatgtcagataattagattccttacattttctcctaacctttaaggatcccagatataattttgtggattgctgctttgaagataccagtccatgtgtgctgctgcaataaaattcctgagactgggtaatatataaagaacagaaattaattttcttactattctggaggctgggaagtacattattaaaa

SEQ ID NO: 129171 - DNA, 610 bp, Homo sapiens
tgacaggggcctggatgagacaagagacttgtcttgcctttgcagacagtgaatgtcagcttgaggagaagaaaagggggacttcaatgataattactggggtgtgttggtttgttggcctcattgtgaatgcctgaaaacaacttaggggtattttgaggagttcaaattcctctcttcacaggttggggacttgaagtcaatttctatagtcacaggcaggtgagtttatagtcaaaatcatgttccatatacaattcactcattcctgctactcactcttctatctccctgggctttgcttccttactcagatgtcaaggatttctatcatgtagctttttgatgctgctttacttcttcctgtctcttgctatcactatctgaaccttatggcacccataaggttcctggggacataaggtgtctctggggacaaggggataatgctgaggaaatgggagacaaggactcaggggagtagtccctaaagcacaacagttctgagagcgtcccaactggatggagcgtacacttgttcacaggctcctaaaggtgcttgaccgcaccagagcaaactcaccatgcaatggacatcattgttaagtgt

SEQ ID NO: 129172 - DNA, 804 bp, Homo sapiens
ggggagagaggctctgggttgctgctgcttctgctgctgctgctgctgtgtggctgtttctgtacactcactggcaggcttggtgccggctccctcgcccgcccgcccgccagcctgggaaagtgggttacagagcgaaggagctcagctcagacactggcagaggagcatccagtcacagagagaccaaacaagaaccctttcctttggcttcctcttcagctcttccagagggcttgctatttgcactctctcttttgaaattgtgttgcttttacttttcacccttctgcttgggttttatgagggctttgttaagtcttagagggaaaagagactgagcgagggaaagagagaggcaaagtggaaaggaccataaactggcaaagcccgctctgcgctcgctgtggatgaaagccccgtgttggtgaagcctctcctcgcgagcagcgcgcacccctccagagcaccccgcggacccgcacctcggcgtggccaccatggtcaggagagttcagccggatcggaaacagttgccactggtcctactgagattgctctgccttcttcccacaggactgcctgttcgcagcgtggattttaaccgaggcacggacaacatcaccgtgaggcagggggacacagccatcctcaggtgcgtcgtagaagacaagaactcaaagcgtggcctggttgaaccgttctggcatcattttgctggacatgacaagtggtctctggacccacgggtcgagctggagaaacgccattctctggcactacaggctcccgcatccagacacc

SEQ ID NO: 129173 - DNA, 1214 bp, Homo sapiens
  misc_feature (1214)..(1214): n is a, c, g, or t
ggggagagaggctctgggttgctgctgcttctgctgctgctgctgctgtgtggctgtttctgtacactcactggcaggcttggtgccggctccctcgcccgcccgcccgccagcctgggaaagtgggttacagagcgaaggagctcagctcagacactggcagaggagcatccagtcacagagagaccaaacaagaaccctttcctttggcttcctcttcagctcttccagagggcttgctatttgcactctctcttttgaaattgtgttgcttttacttttcacccttctgcttgggttttatgagggctttgttaagtcttagagggaaaagagactgagcgagggaaagagagaggcaaagtggaaaggaccataaactggcaaagcccgctctgcgctcgctgtggatgaaagccccgtgttggtgaagcctctcctcgcgagcagcgcgcacccctccagagcaccccgcggacccgcacctcggcgtggccaccatggtcaggagagttcagccggatcggaaacagttgccactggtcctactgagattgctctgccttcttcccacaggactgcctgttcgcagcgtggattttaaccgaggcacggacaacatcaccgtgaggcagggggacacagccatcctcaggtagggctttcgggcaacttttctgctgcgcgcgtctacacgtgtgtgtgtgtgtgtgtgtgtgtttgtgtgtgtgtgtgtgtgtgtgtctgatctccttgaactccagctcctgatgctgcaggcttgtggtgtgtgtgtgtgtggtgtgtgtgtgtgtgtccctgtacaccgacggggggcttatcgctaaccaatatccgggggaatcgggcccttgtcagccgccacggtgtggctacgtgtgcgcgctctgaggaccgtgttctcttatggggacgctaactacccgatgacatgagtgctgtgcccgttcccactatgtcactgcgggccatgccctcgaagttgggcgggcctaatccggacacaaggtggggatatggccccagggtgaccgctgttccctggccccgtgggtggttgtgtttctgcccccacctctacccccctcggggttgggcgcacactgcgactccgcgcaacccacaggtggcctcgcgttacaacgcaagcggtttctcggggtgctcactgtgccgtggtgcacttctctctn

SEQ ID NO: 129174 - DNA, 726 bp, Homo sapiens
accttaggccaatcttcaaagactttgaaatataatattattattatcattattttccaactattctgtttcgagtcaagggtagtgtgtttgaagtttttattcacaataacctcaatttttgttaatgattaatttctagtttttatatctttggttaaagggtgatatctatagtctaccttttatagaattatgactatttcctttataacaaatttgtgaatgtttcatgagcatttaaacagaagatatgctctctgtttcttagcacaaaatttattataaggttattgttattttccccttgtattttatttctggctatttttattttgtatcattcaccattttttttttttggtgcaaaaagcttcatgccagttatatcttaactgatttatatatgtccttaataattgaaagttaccactttttcccatctaatgctatttaatattaaattctatttgtcaatattattatggataatactgtttgcattttttataatgtaaatattatatgacaatattgctgatgttaatatagtgatactaatgttaatattggtatcattaataatgttatattaattattgttacttgcatatttttattgaattattaggtgtagtttggcctatctttagtactcaataattttttttgagaaagttggtattggtttggtatttttaactggtctgaaagctttttataata

SEQ ID NO: 129175 - DNA, 631 bp, Homo sapiens
caaagtgctgggattataggtatgagccaccaaacactgccagaattttaaatatcaggatataggaaaggttttgctttcgttttcaattttgtttttgtcttatggcacggggccaggcagggcaaagggtagattccattgacacttatttttaattttctgcccaagtacgttcccaccattgttcctggtgtttcagaccctctccagggtctgcagagtcttgtttggctggagccccttctactctagtctaatgcccctctgccctaattcctcaactaccaggccgtcactgctttccattacccacaaccatggagaaagctctcatcagctaatgtgccttctccagtttgccacattattacattattgtctggacatacctgtttttttgttgttgttgtttgtttgtttgtttttgagacagggactcgctgtgttacccaggctggagtgtagtgttgccttctcggctcactgcaacctctgcctcccaggttcactcgattctcctgcctcagccccctgagtagctgggattacaggcacctgccaccacgcccagctaatttttgtatttttagtagagatgattttgccatattggccaggctggtttcaa

SEQ ID NO: 129176 - DNA, 569 bp, Homo sapiens
gaacacttaataccttgcttgggcagatagctccagtttgcagaaagtctagacaggataccctgctatgtatctagatttactgagaagaagcggcccaagctaatcagaattttaaagtaggtttctcagctgggcgtggtggctcacacctgtaatcccagcactttgggaggccgaggcaggcagatcacttgaggtcaggggttcgagaccagcctggccaacatggcgaaatcctgtctctactaaaaatagaaaaattagccgggcatggtggcacgcacctgtaatcccagctattcaggaggctgaggtgagagaactgcttgaaccctggaggcggaagttgcagtgagctgagattgtgccactgcactccagcctgggcgacagagcgagactccgtctcaaaaaaaaataaaataaagtaggtttctctatacctttgaattttctgtctcccatgataacctttgggtaaacatgtccatcagaatggaaacaaatcattttttaaaatagaaattattctcatacctattttagtgggaatccccctgagaaga

SEQ ID NO: 129177 - DNA, 509 bp, Homo sapiens
caggagacaggaccactggaatagacgggaggaggtaaagagtaagagtataatgtttctacatcagtatttctccaaatgtgttcaacaaaaatgtatacctcaaaaatatccgcctctatacgctagttcaaatacatgatgttctttctgagcacttcagttccaaaaatattccttagaacaattctcctgtatctaaattcttttcataggttctacgtagtattcttgcacctacaacttcaccagttactcctactaccaggaggcctcctatgggctagaataccactttcaaatttcacaaattcagtggcttaagccttttggcctcctcatgagtaacccatcagggattgtcaacctgtctgtctctttgtctactggatgggactttattttcctacctgcctctctcatgtcatttctgcattaatttctgggacctcttaaccctcttcactttctccaggatcactgtgatgataggttcagaattcctccct

SEQ ID NO: 129178 - DNA, 325 bp, Homo sapiens
aaactgccctcttgttgaggcggtgcacatgagctgggactgcacttggagtttccaggcacattgcagggttggatgatgctcagccgacccaggcctcatctccacatgagtagcatctcatgagtgcacctccacatgcaccctccccgcctcctccctccagtcggtaaaatgtcttagcatctcagattgtcagagttttgtttgtgcaacttcttagctctccttgtgatgtttaatatgcgaagaagccgtgcagatgtcggattccccattgcctgcattatcagtggctagaatgcaatctagttcacagccaaca

SEQ ID NO: 129179 - DNA, 511 bp, Homo sapiens
ttttaagtttagacaagcaactgtggaagttccaagaggtgcactcctgcatcacctcacaaactaacaatcgttgtgaactatgttactgagtaaaagcattctacccctcaggtgtgctgggagcagaaaagagggttaagaaccactgttatatactatcaaattcctctacaaggttagatgagtaacaaagaagcaagttatcaaagtaactgttagaggacactgtgctggaaaggcttttagaagaaattgccactgtctaaattaaaacagtaaaagtacataatctctattagctattttgaaaatgcttatgtagctattagaatccctgaaaatacttatgtttatcttaaaaataatgtattttcacagattccaatgttgacataattctttaataaaattaactggaaaacctagtatttctaaacttttgtaagaatctatcaggaaaagaagagagcttcttttcaagacaaagtaaataagtaaatgactagat

SEQ ID NO: 129180 - DNA, 173 bp, Homo sapiens
ggagtgggagctttacctgccaaaccccagaggctgccttgccagagagcagaggagaatggagatggggcaggggaagcaggcgtcgacccacgaggaaaaatcagagcagaaggaagctctgggatgagtggttgagaccagctgcctctggtgttcacagagggcatggg

SEQ ID NO: 129181 - DNA, 1013 bp, Homo sapiens
agagtgcaagggacatagaaggaagtctttagaacttggatgggagtccaagttctgccacttccaggcctttgtgcattcagccagttacttaagctgtttggcctcagtgtccatatattgcattaacaccgggaataacaatttttaccttacaagattgttaagggaattaaatgagatcatgtgaataaagagcctgccatagagttgcactcaataaacactattttacttccccctgaattccctacctgtacttttggcacatgaaaaaataattaggtagaaataggctggagtccagcaggggaagacaaactaatctttcctggactacatttttacatggataaaaatttttgccactgcaactctaagcagcactcagtatctttgagatattagtgatgtttttctctgatgttcttttagctcctggggtcactgtgggctaagagaggtggagacaggctttgtgcaacgctgccttgtccccctgctcagaggcagatgtgacttaataggaagaatcctagaggccttcagatgctgtagagaagattcatgtttgatgagagagagcctggatgacatgaaagttgttgtttttttccagagaaaaggaaagagacataacattccccctacccgcccaagcatcagcttcctcttctgaactggttgctgtggagattaaaaactttgtacacagcacattgcacacaggcgatacgcggttgttagaatctcattaccattgacaatggctaattatagatgtgaacatctaaatgtgtctgaaggggacagagaagtttggtaaggataacttacaatctttccatcttttgttttgttttgttttgttttgttgtgttttagagagggtcttgcaatgtcgcccaggctggagtgcagtggcatgatcttggctcactgcagcctccacctcccgggttcaaataattttcaaatctctgcctccaaagtagctgggattacaggcacat

SEQ ID NO: 129182 - DNA, 835 bp, Homo sapiens
atctaataagacactaccacatgtctgagctttcctgttagccgaaaaaactgctagtccctggatcttctccctactttccacagcactcaccaaagcaggagccagtaggtcagtgggaacagtctctggactcacttttccagtgagtcccatatattcctttgaagctcttggcatatttttagatgatatattcataacttgcttctccttcaaaattaaatgttctatttagaatggctcttggggatataaatgataattttgaagagcaggatatttgctccctcagatctttccatcattgaagccatttagagagcaatagtagaggcacaaatgattcaggttactgtaatggctcaggtcatggtaaaatgagtgtcttggatgcctttcctctgtgttttatgtttttttaaaatgagatgtcttcatgaccttgtaaatgagagaaagttcaaggggatccgaggtaaatgtctgtcccagatccacagacaactcaagaatttctcaggatgtttctcagtagagatagggagtggctggttggctttgtggcttttcaaatcccttgccttccgctccactaagacctagcagtcctctaaagcctcattcatatttccctcttttcaaaaaaaacgtctgagatcatcctaattggaagtgcccttatgtcctctgaacccttacggtactgaacactcttttgtggcatttgtagttactgctctgtacggtggccttgttcatgagtctctcctcagctaggtcgtcagctccacagtaactgaaactaagtgtgatttcttttgtttcccaccct

SEQ ID NO: 129183 - DNA, 140 bp, Homo sapiens
cgagactttgcctcaagaaaaaacaacaacaaacaacaacaacagaaaaaagttcctatcaaagactttctctttgtacacacacttttaaggtattctgaattcacagacattcatatctaacctaccacagcctctac

SEQ ID NO: 129184 - DNA, 674 bp, Homo sapiens
gatttgtccagtgtcctacagttggttggtgtgaggctggatttgaaaattggggatcttggatcttgactcttcagctctcatcacctcacactgaccccctctccccccgaaacatgagggaatattggaggaaggcattgatgataattgaaagacaaaaatacagaacctcagaggaattattaaaagaactgcacatatgtagttcagaaatctttgagaccctactgtatctaatagtgcttagaatcttcttatataataatattattaatattctataatctagaatagattatagtaggattcgttttatgatgacttgggctgtatctttaagaaaacaaaagattatagcaaaaggagtttagggcaaacataaataaaaattgatactaaaatcgtatgtatgctatttccaaaaaagggaggagggaatatatgagacctttcaagttcctctggtactataattacattttctctcatcttgcttttgattggattagaattcacgcaattaaagataatctagggccaggcacctataatcccagcactttgggaagcagaggcaggaagattgcctgagcccaggattttgagaccagtctgggcaacatggcaagaccccgtctctttaaaaaaaaaaaaaaatctaagtgaaaaat

SEQ ID NO: 129185 - DNA, 401 bp, Homo sapiens
agctctagaggactcgctcgcagctagctgactcaaggaggatacacatcgtcactatactgatgatgaaacacaactgacagataaacttcgctcttgggagccattattagtttcctggggctgccacaacaaaccaccacaaactaggtggcttaaagcaacagacatttatttcttgcggttctggagtctgcaagtctgaaaacaaggcattggcaggaccatgctccctccaaaggctccagggaagaatgcttctttgcctcttccagcttctggtggttgctggcaatccttggcattcttcggtttgtggcagcacaactccagtctttcctctttgctttctcatggccttcctttctgtgcctcctctgtatcgtcaaacctctctctcc

SEQ ID NO: 129186 - DNA, 346 bp, Homo sapiens
atctagatctgttttagaacttgatttctgaggatgatgtaagaatatcacaatgtctggccagacacggtggctcacgcctataatcccagcacttcgggaggccgacgtgggcggatcaagtgactcttgaagtcaagagttcgacatcaacctggccaacatggtgaaaccctatctctactaaaaacacaaaaaattagctgggtgtggtggtggacacctgtaatcccagcaactcaggaggctgagccaggagaatcacttgaacgtgggaggtagaggatcctggagtaagccacgattgcaccactgcactcgagcctgggtgacagagtaagactcc

SEQ ID NO: 129187 - DNA, 516 bp, Homo sapiens
tgcaagagtctaaagtttgcttttttaattgttcattgttaaatcttttatagatcactctggttgggatttgctcacttataaggagaaagtcaccaacagcttgatctattatttttccctcttcaatgtggattaaggtctttttatggatgctttcctgtcattaaaaaatatgtatcctttagacttctttccaaatggaatcatctttgatgctaatatttatactctgtgttgtatgaagaataaaactaagagccccagccacttttgaagatgtgtgtctttacaccagggccagtctctgctgctcctccctgagagccagtcattctttgtaacaatgcattatttcacctgagttgaaggttttcattagtgtgaggaagtagcccttcaacatatggactcatcagattttaattgtactaacttttaaattgactgctaccttattctgtgctgtttatatgcctttatttttccagttcaacttttttttctagtgttctg

SEQ ID NO: 129188 - DNA, 437 bp, Homo sapiens
aagcgtacatgcgggtttcttttaacttctgtgagtttgaaattttgttaaaatttaaaattacaaaaaaaatttcagaaacatagatgggtacttacgtatttagagtaagaaaaattatttcccacctgtcacccccaatttttatcccgagtcgcatataatgatttaaatatttttaaatgcacaggaaatagaaatttttggttaaaatgattgtttgcagaacagatcttcacatttagaacaggagaattgtggtcacatataataacttgaaagatcatcagttattggttcagtcttaaactataggttgagagtccctaatgtgaaaatccaaaatcttaaatgcttcaaaatccaaaattttatgagggctgacatgacaccacaagtggaaaattccacacctgacctcatatgacaagtcacag

SEQ ID NO: 129189 - DNA, 136 bp, Homo sapiens
cttgggcctgttgatgagcagaggtgagtaaaaataaaacagccgtaaccacgaccccaaaccatcctgatttcttcatccctggcaggcacccaggtggaacccagctgaaattgcagctcattagcacggacag

SEQ ID NO: 129190 - DNA, 336 bp, Homo sapiens
tgcatgtacattatctatacatggtatctctatcaaaaacagtgccctgtacatagtgggcacttgactatatctaatagattttctccttgaaaacatgagaacattttagaaaaatttttctgtcaagccaatttttcaacaattacaaaactaaaccaaatttccgcaaatagtttgttctacccaggagaagcttagctgtgtaacagagaaccagtcagaacaaagatgtaatatagtaattagagtactcacaaacaaagccttattttctagaaacataagacatcaaaaaaggccacatgcagagaaaaaatatggctactagatagg

SEQ ID NO: 129191 - DNA, 484 bp, Homo sapiens
ctaaagaacccattcccaaaaagtcatggataaaagaaaagaaactgagcttttaagtgtctcaaaagaggtcggctggaaaataagttcagaagaaaatacattaccacaaacatgaacaatatagcaaacatgagagcaaattacacttagacatttcctttatcagaatttcctttaaattcattccatggccacggcttttcttaggctaactacagtagacatagctcttctattatgatatctcctctgcactttctagtatactttacatcacaacatgagttttctttttcaagcaaggtttagttattgttcccttctgtagctgtgccttcccaaagctaccagttgtcctcaaatcaaattaaaacatctaaacatagggtttcaaggctccataaattcctgggcccaaaccactccagctttatcatcctacagtcaatgcacactggctcacattttctatctatttact

SEQ ID NO: 129192 - DNA, 439 bp, Homo sapiens
atttgcaggaattcaggtggcgggcctttgcatgtttcaaagtcctaggtagcttaagccaggcttagctgcaaggggagagaccctaaggagagaaaaggagaacaagtgataggatgaagaaaggggagagattcagaactggcgctacagggcacgtgaacgtgacaccaattgtgttattgtggattcagaaaaatgactagaataacacactgggaaaaatgttacgaggaacactaggtgttacaaatcctcgagggagatgtgatggcattaagttaaaagaattaggtgagaggtcacaaactctatagtgggctgttgtggtgtctttaacattttaacttaggcactaattaaaaaaatcagcagcagtcgtctgaaaatgtgtggattttttttttttttacatcttttgaaaattcctagtgtgtgg

SEQ ID NO: 129193 - DNA, 573 bp, Homo sapiens
actttgggaggatcacttgaggccaggagtacaagaccagtttgggaaacaaggcaagaccccatctctacaaaaaaatttttttaatgcaaaataagccaggtgtggcagtgcatgcttgaagtcccagctacttgggatgctgagaaaggaggacctcttgagcctaggagttcaaggtttcagcaagctatgatcacgccaccacactccatccagcccacgtagcaggacaagaccttgtttgtttaattctgagtaagaatgttagctttccagcctcagtaagatttatttatttatttggactctgtgatgcaacagtagttggctaacattataatgtaaaaaattaattggtaatgacgaatgatctctaactgattattatttagtagtcagaactaggagatgaagacaagtctataataaaatctggaaattaaaataaacttaatatgaacatatttcctcataatctgtttctcccaaaggtaatactctactttccaaaaataaatgtaaaagttattttaaaaaaactaatttttttttttgagaaggagtctcact

SEQ ID NO: 129194 - DNA, 415 bp, Homo sapiens
agatggatcctagggtcccacatgggaatctgcctgtgtagacgcctgtgttccagccccttggttcactgtctccacctctgggaagagggaagggtccaaggaagaagcagcgcaggaggttcttggagggggcaagacatctgtgtagagagtggggtggtgtgggggaggccagaacccctccctcctgcccttgaggtgctgttcccataaccccaccttggcctcaaggtctgggcgggtaccttgagcttcctgtgggattcttgtaccttggaggcagtgactcacgcgctaggcagcagatctgtgtcatggtctccggccttgcctctgattaaagagggactgatgcggctcgtctgcagcctgggtctgggatgcctcccacactggaacccacctttatccc

SEQ ID NO: 129195 - DNA, 162 bp, Homo sapiens
tctcttacataaaagttgtagagacagtgctgggagttctcatgtacccttcccatagttttctctgatgttaatatcttacataaccatggtacagtgatcaaaaccaagaaattaacattggtacatactattaagctaaacttaaattttatttgaatg

SEQ ID NO: 129196 - DNA, 457 bp, Homo sapiens
tatatctgtataaacaacacaggtttgaactgtgcgaatcttcttacagatgaaacttaagattgttaactaaaaaaaagatggtagaaaattacatatagttttattttatgtcttaaataataataatcaggaaatttggataaatatataaaaagttattagcagccaggcatggtgactcactcctgtaatctcaacactttgggaggctgagacgggcagatcacctgagggcaggagttcaagaccagtctagccaacgtggtgaaactccgcctctactagaaatacaaaaattagctggacgtggcagcacatgcctgtagtcccagctactcatgaggctgaggcaggagaattgcttgaacccgggaggcagaggtttcaatgagtggagattgcgccagtgtactccagctcatcagcctgggtgacagagagagactccgtccca

SEQ ID NO: 129197 - DNA, 427 bp, Homo sapiens
agactcaactttagtgattaggagccctggctcctaatagtcagcctgggttcagatccaaggtgtggcagttctagctaggtgtccttggacatgttatttaataatcctaagactagttttagttttatcatctgaaaagtgagatacctgctacatagggttgttgtggagaataagtgatacagtgtatgtgagtctcagtgtagtgcctgtttcagagtaagttattctggctccggatcccttgctttacactagtttagatcccatctcgttcaagtgataaaagtcaagagaggctgggcgcggtggctcatgcctgtaatcccagaactttaggaggctgaggctggcagatcacttcagtccaggagttcaagaccagccctggcaacatagtaagactccatctgtacaaaaaaaa

SEQ ID NO: 129198 - DNA, 140 bp, Homo sapiens
tccagaagcagtgactgctattgcatgaagaccacagtatctattttgtgagccaatcaaaagggaccctccctctggcctttcccttcctcgtcagggctgggtccacacaggagagtcccaagaacaaccaaggttct

SEQ ID NO: 129199 - DNA, 153 bp, Homo sapiens
taatgaccttggcttggggtgtagtactataagctattatccgtccttaatacctcactttctaacacaacagagaaaagcttgagataagagggaaaatgaccaatagacagggagtggtaggcagtggggaatgtaactgtccttggaggt

SEQ ID NO: 129200 - DNA, 448 bp, Homo sapiens
caaaaagagggaagaaaaagggaaagagttttctttctaccccttctctccaccaggatatgggcctttggaaagaaggttagggtgtgttttctctggattcgttgtggagtgttactttcatcaataacttcttgttatatttagccagtcaacagctcaaagagcctaccagaaccgtcagaaggagtgtgtgaggggaatactctcgaactctagtctgtcttgaagtaattcagtctaaatttctttttttctttttttgaaacggagtctcactctgtcgcccaggctggatacagtggcgtgatctcagctcactgcgacttctgcctcctgagttcaagtgattcttctgcctcagcctcccgagtagctgggattacaggtgactgccaccaagcctggctagtttaatttttgtatttttagtagagacaggtttcac

SEQ ID NO: 129201 - DNA, 663 bp, Homo sapiens
gcattggcattcttatagagcttcccagggtgaagtgtatactgatgcctgcaaatcactttgaaatgcatcaaaaataagatgaattaatgcatggatagagagatggatagatttgtgagaaaacaagtataatgaaaggtcagtttagaatctggctgttgggactatgggtactcactatacaactttttgaactttaatatatgtctgaaaaattttaaaacagaacttcagggagagaaaatttccaagatgttgtggatatacagccaagtttggggaccactctgaatcattgatatagaataagatcaaggtgggaccaagaggccaaaaaagaaaagaattttactctaaaaaaaaaagcagaactttgccaaaagaaaaaaaaaaaaaaaaaaaaaaaattttttggggccggcttcgggccatgagaaagtttttaagcccttccgttgtggccggcggcgcgcccaagaggttattggaaacttggccaaaggctggcccaaagggaaaccgtgggctagaactatggcggtgggtttcctcaccattaaaaacgccggggaaccggctgttctgaacatcccgtggcgtcggaggctaccggtcttcaacgggttccacggagtcaatataccgcggcgggagagggag

SEQ ID NO: 129202 - DNA, 397 bp, Homo sapiens
ctcaagtgatatgcctgccttggtctcccaaagtgctgggattataggcatgagccaccacacccagcctagattgctttaaattatagaagtagtaaatgtgtatttcatgaacaaatttaaataccaaagggatatgaaatgaaaaagataaagatcatttttcttttctcctctccatccagttctccagaggacaccgttaagtttcttgtgtaaagagagagaggtgatttagacagatacactcttaagtttgaatgtttctgttaaactacagtttaattataactttcagaaaatcatgaatgctcctctttgtgcaggataaagacagctggtaatccagccaagtctcccgttgctaccatatttttagtatttgataccacagaaa

SEQ ID NO: 129203 - DNA, 885 bp, Homo sapiens
agtggtggtgctcacctgcagtcccagctactggggaggctgagacacgagaatcgcttgaacacaggagatggaggttgcagtgcaccgaggtcgggccactgtactccagcccgggtgacagagcgagactctgtctgaaaaaaacaaaaaatgcaattctgaataccgcttccttatcagaaggtcactaaagaagcacaatcacggactagtttgggggaaaacacgggacttccactgggcaggtgcagtccaataaagaaatctactgtaaagcactgaatttacaactcgatttgctggacattgttttagaaaagcaaatccacattaaacaccatgactgcattttgttgttgtcagactttaagcctaaaataactatgtcaaagagtgtggcaaagaatgaagtactcaatcaataccttgctaatgacagttcatacctgggcccctgatgaaatacatcagtccacgtggattgactgggctatagttactaaagtatcaacttggatagatactaagttggctatttaatgtaggttttatatctttttcagctttaattattttttaaatcaggggaaaaaaacttcaaaactcttaaactttttctgaatagactgttagcatgaaaaatctatcactttaacattaaaatatgacttttcttcctttatctgactgctctactacatatgcccagtaaatacattcctggatcccccaaagcacataggagagtatatacagggcttcttccctatgtgtgtgtgttgcggggggtgggcgggggagattttagggctcaaagggaggaaatatactttgcattcttttttcattcaaaaaactgtatttcaaaaaaatttttttaac

SEQ ID NO: 129204 - DNA, 632 bp, Homo sapiens
gcgaggcgactctaaggatctccaaacaccgcatctaatctgcccaaacttctattctccatctcctaaacaaggggttacagtgtgtgatttctaaggttctgcctaagttccacatattaaaattttatatcaacaaaaaccaccacactgataaaatgaaagaaatcattataaagcattttattcacttaatgaagtaatctggagttcacatataattacatttttaagaaacacatttctgtacttgctttagttctcaatcagttgtttcaaagaaagaatgaaagctttagttaccaagagaatttactgaaattataccgtatgattcaggagaatgctttggtccctgacccctcctcctcttcctcaaatctttcaaagaacaaagtacaccaagagcagcattcagcctttgtgcttttgtgttcccttctcactggaattgtcaacctggtcctccacaccctgcacatctccatcacccgtctccgtgtaaaccaacattttcaatgctgtattcattttcaggctataaaatcgaggagaacaggaattgtgcctttgtttctcactgaaaccccagaatgcagtatagtgtccggcacacagtgaccattcagtat

SEQ ID NO: 129205 - DNA, 176 bp, Homo sapiens
ggccacggcatgtggatggatattagtttgagttttaaaaactcgactgaaaaggtggctcaagtctgtaatcccagcactttgggaggccgaggcaggcggatctcctgagatcgggagtttgagaccagtctgaccatcatggtgaaacgccatctctgctaaaaatacaaaaa

SEQ ID NO: 129206 - DNA, 484 bp, Homo sapiens
gaccccgtgattcactcccttcagcctcccaaagtgctgggattacaggtgtgagccactgcgcctggccaattttttttgtatttttagtagagacggggtttcaccatgttggccagactggtctcaaactcctgacctcaggtgatccgcctacctcggcatcccaaagtgctgggattacaggcgtgagccactgtgcctggcctatatacattcctttagtacatactcgccctaagctattataattattaaacaaatcattggagggaaaaggagttgccaacagcagcaaagagtgtacattgtataataaagccttgtgtcaggagtgtttaattggcaacataggaaacatttttaaaagccaagagtcaggagctggttttttaaaaaactaaacgtcttagggaaggaactctttttccatcaaggaatgaatgttgggttgagtgggtaaaggaaatgtgtcatatacatg

SEQ ID NO: 129207 - DNA, 166 bp, Homo sapiens
ggagatttcagaaaggaaaggtcagccacaagcctagcatttgctatcagccatctgccaagcaggaagtgctactcagatctatttttaatcatcttccccaggctagggcttctgggaaaattcagaggccagggttattccaagacaaacatttaattgctac

SEQ ID NO: 129208 - DNA, 1296 bp, Homo sapiens
ctcagaagcacgtgcgccttacgtaatagcgggttattcttcggtttgcctcctcccagtggcgtggatttgctcccgacccgcttttggggcgtgcctgcttcctcctctctgttagatgagccccagagaggcgaagccacttgagctcgtgagtgacagtcagatgtcaagccctgctctttctaaagcgtgctgccttcagaaaagaagagccagaaggatggaaattacttcagaaagatgaataccagctttgaaggaataaaagctgacgaggaattgaaggagttgaggcacgagcttgaacagggttgcatgtttggcccttgattgtaaatgcccattgctgcacctgttcctgttacttggggagttgcagcagaaggaacagcggcctgggactccagagaactgggttccctctcatccctccagggccaccacttcttgtgggcccttgggcaagtcactgtactttctgagtctcagtttccccatttgcagaatggaaataactaccccggtctaccaacttagaagaattgctttgaggatctgataaggtggtgtggatgatgctgccttgggggctttacagtctggagctcaagggaccccttaagttgggcttacttagtaactccaggggtgggcagaacaggactccaatgagggtttattctttttcccttttttttcttttcctatctcttaacttttatctttattattttacaatgcccttgtaagatgaaacaagtgatgctgaaatatcttttctttttaacctttattttagaattggggtacatgtgcaggtttgttacataggtacagtgtgggctgctgaggtttgggagtacgaatgaattagtcaccccagtggtgagcatagtgcccgataagtggttttttcaacccttactcccatccctctccattcttgtgttccccagtgtctgctgttcccatttttatgaccatgtgtactcaatgtttagctcccacttagaagtaagaacatgcccagcactttgggaggccgaggtgggtggatcatgaggtcaagagatcgagaccatcttggctaacaaagtgaaaccctgtctctactaaaaacataaaaaattggccgggtgtggtggtgggcacctgtagtcctagctactcgggaggctgagacaggagaatcgcctgaaccggggaggtggaggttgcagtgagctgagattgtaccactgcactccagcctgggtgacagagtgagactccatctcaaaaaaataaaaataa

SEQ ID NO: 129209 - DNA, 1412 bp, Homo sapiens
ctcagaagcacgtgcgccttacgtaatagcgggttattcttcggtttgcctcctcccagtggcgtggatttgctcccgacccgcttttggggcgtgcctgcttcctcctctctgttagatctcgctctgtcacccaggctggagtgaaatggcacaatcttggctcactgtaacctccgcccccaggttcgactgattctcgtgcctcagcctcctcagtagctgggattacagatgagccccagagaggcgaagccacttgagctcgtgagtgacagtcagatgtcaagccctgctctttctaaagcgtgctgccttcagaaaagaagagccagaaggatggaaattacttcagaaagatgaataccagctttgaaggaataaaagctgacgaggaattgaaggagttgaggcacgagcttgaacagggttgcatgtttggcccttgattgtaaatgcccattgctgcacctgttcctgttacttggggagttgcagcagaaggaacagcggcctgggactccagagaactgggttccctctcatccctccagggccaccacttcttgtgggcccttgggcaagtcactgtactttctgagtctcagtttccccatttgcagaatggaaataactaccccggtctaccaacttagaagaattgctttgaggatctgataaggtggtgtggatgatgctgccttgggggctttacagtctggagctcaagggaccccttaagttgggcttacttagtaactccaggggtgggcagaacaggactccaatgagggtttattctttttcccttttttttcttttcctatctcttaacttttatctttattattttacaatgcccttgtaagatgaaacaagtgatgctgaaatatcttttctttttaacctttattttagaattggggtacatgtgcaggtttgttacataggtacagtgtgggctgctgaggtttgggagtacgaatgaattagtcaccccagtggtgagcatagtgcccgataagtggttttttcaacccttactcccatccctctccattcttgtgttccccagtgtctgctgttcccatttttatgaccatgtgtactcaatgtttagctcccacttagaagtaagaacatgcccagcactttgggaggccgaggtgggtggatcatgaggtcaagagatcgagaccatcttggctaacaaagtgaaaccctgtctctactaaaaacataaaaaattggccgggtgtggtggtgggcacctgtagtcctagctactcgggaggctgagacaggagaatcgcctgaaccggggaggtggaggttgcagtgagctgagattgtaccactgcactccagcctgggtgacagagtgagactccatctcaaaaaaataaaaataa

SEQ ID NO: 129210 - DNA, 1566 bp, Homo sapiens
ctcagaagcacgtgcgccttacgtaatagcgggttattcttcggtttgcctcctcccagtggcgtggatttgctcccgacccgcttttggggcgtgcctgcttcctcctctctgttagatctcgctctgtcacccaggctggagtgaaatggcacaatcttggctcactgtaacctccgcccccaggttcgactgattctcgtgcctcagcctcctcagtagctgggattacagagttttacacctggaactcctgggtgggaaggtataaaccgtttaaagtctccggcaacacactaataaattgcttcaaaggaaagttctcaaccgttactctcagcagtgtgtgtattagggccatcctcaccacaccctttcaggtagcgagatgagccccagagaggcgaagccacttgagctcgtgagtgacagtcagatgtcaagccctgctctttctaaagcgtgctgccttcagaaaagaagagccagaaggatggaaattacttcagaaagatgaataccagctttgaaggaataaaagctgacgaggaattgaaggagttgaggcacgagcttgaacagggttgcatgtttggcccttgattgtaaatgcccattgctgcacctgttcctgttacttggggagttgcagcagaaggaacagcggcctgggactccagagaactgggttccctctcatccctccagggccaccacttcttgtgggcccttgggcaagtcactgtactttctgagtctcagtttccccatttgcagaatggaaataactaccccggtctaccaacttagaagaattgctttgaggatctgataaggtggtgtggatgatgctgccttgggggctttacagtctggagctcaagggaccccttaagttgggcttacttagtaactccaggggtgggcagaacaggactccaatgagggtttattctttttcccttttttttcttttcctatctcttaacttttatctttattattttacaatgcccttgtaagatgaaacaagtgatgctgaaatatcttttctttttaacctttattttagaattggggtacatgtgcaggtttgttacataggtacagtgtgggctgctgaggtttgggagtacgaatgaattagtcaccccagtggtgagcatagtgcccgataagtggttttttcaacccttactcccatccctctccattcttgtgttccccagtgtctgctgttcccatttttatgaccatgtgtactcaatgtttagctcccacttagaagtaagaacatgcccagcactttgggaggccgaggtgggtggatcatgaggtcaagagatcgagaccatcttggctaacaaagtgaaaccctgtctctactaaaaacataaaaaattggccgggtgtggtggtgggcacctgtagtcctagctactcgggaggctgagacaggagaatcgcctgaaccggggaggtggaggttgcagtgagctgagattgtaccactgcactccagcctgggtgacagagtgagactccatctcaaaaaaataaaaataa

SEQ ID NO: 129211 - DNA, 1885 bp, Homo sapiens
gtgagtaggcgtcattcttcacagtagtcctctgcctccaccgccccgggatctccttgcgctcggtcctctacgtggagtcacctatgcagaggaattccacggggcgggggcgaggacagggtgcgggggtctttatggcagacaatccccggctgagcgcttggccagagtttctgtgatgctagaatctggactgcctgcgacctctccgggactcggacaccagccctcgcctcctggtgatcttttaggtcctgcagagaagtgaagagatctcgctctgtcacccaggctggagtgaaatggcacaatcttggctcactgtaacctccgcccccaggttcgactgattctcgtgcctcagcctcctcagtagctgggattacaggatggagagtaaaggaggtaaaggaggactctgatgcctcagccatgcgcctgtgtgccgattcccattaagcctgcaccaatttgatttccaagactccagtcaatcctcagagctccaggaggggaggggcagcttttcctggtagctgctgatcaccagcagagggagccctaggactgcagggcctctttccttaccgttggtgaagcccttcactgtggcttcaaaactgtggaagacccgggatttgtggatcacttgcctttagaatagaatcaagaaataaagctgcagaagaaagaatctccatgtgatgagccccagagaggcgaagccacttgagctcgtgagtgacagtcagatgtcaagccctgctctttctaaagcgtgctgccttcagaaaagaagagccagaaggatggaaattacttcagaaagatgaataccagctttgaaggaataaaagctgacgaggaattgaaggagttgaggcacgagcttgaacagggttgcatgtttggcccttgattgtaaatgcccattgctgcacctgttcctgttacttggggagttgcagcagaaggaacagcggcctgggactccagagaactgggttccctctcatccctccagggccaccacttcttgtgggcccttgggcaagtcactgtactttctgagtctcagtttccccatttgcagaatggaaataactaccccggtctaccaacttagaagaattgctttgaggatctgataaggtggtgtggatgatgctgccttgggggctttacagtctggagctcaagggaccccttaagttgggcttacttagtaactccaggggtgggcagaacaggactccaatgagggtttattctttttcccttttttttcttttcctatctcttaacttttatctttattattttacaatgcccttgtaagatgaaacaagtgatgctgaaatatcttttctttttaacctttattttagaattggggtacatgtgcaggtttgttacataggtacagtgtgggctgctgaggtttgggagtacgaatgaattagtcaccccagtggtgagcatagtgcccgataagtggttttttcaacccttactcccatccctctccattcttgtgttccccagtgtctgctgttcccatttttatgaccatgtgtactcaatgtttagctcccacttagaagtaagaacatgcccagcactttgggaggccgaggtgggtggatcatgaggtcaagagatcgagaccatcttggctaacaaagtgaaaccctgtctctactaaaaacataaaaaattggccgggtgtggtggtgggcacctgtagtcctagctactcgggaggctgagacaggagaatcgcctgaaccggggaggtggaggttgcagtgagctgagattgtaccactgcactccagcctgggtgacagagtgagactccatctcaaaaaaataaaaataa

SEQ ID NO: 129212 - DNA, 1569 bp, Homo sapiens
gtgagtaggcgtcattcttcacagtagtcctctgcctccaccgccccgggatctccttgcgctcggtcctctacgtggagtcacctatgcagaggaattccacggggcgggggcgaggacagggtgcgggggtctttatggcagacaatccccggctgagcgcttggccagagtttctgtgatgctagaatctggactgcctgcgacctctccgggactcggacaccagccctcgcctcctggtgatcttttaggtcctgcagagaagtgaagagatctcgctctgtcacccaggctggagtgaaatggcacaatcttggctcactgtaacctccgcccccaggttcgactgattctcgtgcctcagcctcctcagtagctgggattacagatgagccccagagaggcgaagccacttgagctcgtgagtgacagtcagatgtcaagccctgctctttctaaagcgtgctgccttcagaaaagaagagccagaaggatggaaattacttcagaaagatgaataccagctttgaaggaataaaagctgacgaggaattgaaggagttgaggcacgagcttgaacagggttgcatgtttggcccttgattgtaaatgcccattgctgcacctgttcctgttacttggggagttgcagcagaaggaacagcggcctgggactccagagaactgggttccctctcatccctccagggccaccacttcttgtgggcccttgggcaagtcactgtactttctgagtctcagtttccccatttgcagaatggaaataactaccccggtctaccaacttagaagaattgctttgaggatctgataaggtggtgtggatgatgctgccttgggggctttacagtctggagctcaagggaccccttaagttgggcttacttagtaactccaggggtgggcagaacaggactccaatgagggtttattctttttcccttttttttcttttcctatctcttaacttttatctttattattttacaatgcccttgtaagatgaaacaagtgatgctgaaatatcttttctttttaacctttattttagaattggggtacatgtgcaggtttgttacataggtacagtgtgggctgctgaggtttgggagtacgaatgaattagtcaccccagtggtgagcatagtgcccgataagtggttttttcaacccttactcccatccctctccattcttgtgttccccagtgtctgctgttcccatttttatgaccatgtgtactcaatgtttagctcccacttagaagtaagaacatgcccagcactttgggaggccgaggtgggtggatcatgaggtcaagagatcgagaccatcttggctaacaaagtgaaaccctgtctctactaaaaacataaaaaattggccgggtgtggtggtgggcacctgtagtcctagctactcgggaggctgagacaggagaatcgcctgaaccggggaggtggaggttgcagtgagctgagattgtaccactgcactccagcctgggtgacagagtgagactccatctcaaaaaaataaaaataa

SEQ ID NO: 129213 - DNA, 1453 bp, Homo sapiens
gtgagtaggcgtcattcttcacagtagtcctctgcctccaccgccccgggatctccttgcgctcggtcctctacgtggagtcacctatgcagaggaattccacggggcgggggcgaggacagggtgcgggggtctttatggcagacaatccccggctgagcgcttggccagagtttctgtgatgctagaatctggactgcctgcgacctctccgggactcggacaccagccctcgcctcctggtgatcttttaggtcctgcagagaagtgaagagatgagccccagagaggcgaagccacttgagctcgtgagtgacagtcagatgtcaagccctgctctttctaaagcgtgctgccttcagaaaagaagagccagaaggatggaaattacttcagaaagatgaataccagctttgaaggaataaaagctgacgaggaattgaaggagttgaggcacgagcttgaacagggttgcatgtttggcccttgattgtaaatgcccattgctgcacctgttcctgttacttggggagttgcagcagaaggaacagcggcctgggactccagagaactgggttccctctcatccctccagggccaccacttcttgtgggcccttgggcaagtcactgtactttctgagtctcagtttccccatttgcagaatggaaataactaccccggtctaccaacttagaagaattgctttgaggatctgataaggtggtgtggatgatgctgccttgggggctttacagtctggagctcaagggaccccttaagttgggcttacttagtaactccaggggtgggcagaacaggactccaatgagggtttattctttttcccttttttttcttttcctatctcttaacttttatctttattattttacaatgcccttgtaagatgaaacaagtgatgctgaaatatcttttctttttaacctttattttagaattggggtacatgtgcaggtttgttacataggtacagtgtgggctgctgaggtttgggagtacgaatgaattagtcaccccagtggtgagcatagtgcccgataagtggttttttcaacccttactcccatccctctccattcttgtgttccccagtgtctgctgttcccatttttatgaccatgtgtactcaatgtttagctcccacttagaagtaagaacatgcccagcactttgggaggccgaggtgggtggatcatgaggtcaagagatcgagaccatcttggctaacaaagtgaaaccctgtctctactaaaaacataaaaaattggccgggtgtggtggtgggcacctgtagtcctagctactcgggaggctgagacaggagaatcgcctgaaccggggaggtggaggttgcagtgagctgagattgtaccactgcactccagcctgggtgacagagtgagactccatctcaaaaaaataaaaataa

SEQ ID NO: 129214 - DNA, 1471 bp, Homo sapiens
gtgagtaggcgtcattcttcacagtagtcctctgcctccaccgccccgggatctccttgcgctcggtcctctacgtggagtcacctatgcagaggaattccacggggcgggggcgaggacagggtgcgggggtctttatggcagacaatccccggctgagcgcttggccagagtttctgtgatgctagaatctggactgcctgcgacctctccgggactcggacaccagccctcgcctcctggtgatcttttaggtcctgcagagaagtgaagaggtattggacgtggccaggatgagccccagagaggcgaagccacttgagctcgtgagtgacagtcagatgtcaagccctgctctttctaaagcgtgctgccttcagaaaagaagagccagaaggatggaaattacttcagaaagatgaataccagctttgaaggaataaaagctgacgaggaattgaaggagttgaggcacgagcttgaacagggttgcatgtttggcccttgattgtaaatgcccattgctgcacctgttcctgttacttggggagttgcagcagaaggaacagcggcctgggactccagagaactgggttccctctcatccctccagggccaccacttcttgtgggcccttgggcaagtcactgtactttctgagtctcagtttccccatttgcagaatggaaataactaccccggtctaccaacttagaagaattgctttgaggatctgataaggtggtgtggatgatgctgccttgggggctttacagtctggagctcaagggaccccttaagttgggcttacttagtaactccaggggtgggcagaacaggactccaatgagggtttattctttttcccttttttttcttttcctatctcttaacttttatctttattattttacaatgcccttgtaagatgaaacaagtgatgctgaaatatcttttctttttaacctttattttagaattggggtacatgtgcaggtttgttacataggtacagtgtgggctgctgaggtttgggagtacgaatgaattagtcaccccagtggtgagcatagtgcccgataagtggttttttcaacccttactcccatccctctccattcttgtgttccccagtgtctgctgttcccatttttatgaccatgtgtactcaatgtttagctcccacttagaagtaagaacatgcccagcactttgggaggccgaggtgggtggatcatgaggtcaagagatcgagaccatcttggctaacaaagtgaaaccctgtctctactaaaaacataaaaaattggccgggtgtggtggtgggcacctgtagtcctagctactcgggaggctgagacaggagaatcgcctgaaccggggaggtggaggttgcagtgagctgagattgtaccactgcactccagcctgggtgacagagtgagactccatctcaaaaaaataaaaataa

SEQ ID NO: 129215 - DNA, 902 bp, Homo sapiens
ctcagaagcacgtgcgccttacgtaatagcgggttattcttcggtttgcctcctcccagtggcgtggatttgctcccgacccgcttttggggcgtgcctgcttcctcctctctgttagatctcgctctgtcacccaggctggagtgaaatggcacaatcttggctcactgtaacctccgcccccaggttcgactgattctcgtgcctcagcctcctcagtagctgggattacaggatggagagtaaaggaggtaaaggaggactctgatgcctcagccatgcgcctgtgtgccgattcccattaagcctgcaccaatttgatttccaagactccagaggggaggggcagcttttcctggtagctgctgatcaccagcagagggagccctaggactgcagggcctctttccttaccgttggtgaagcccttcactgtggcttcaaaactgtggaagacccgggatttgtggatcacttgcctttagaatagaatcaagaaataaagctgcagaagaaagaatctccatgtggctcctcttttcttgccggtctgctgaccctcaggggccatgccttggctgtcttctcatctcacattcacttccaggatgatgccgggttggagaatatggaaaacaaatctgacttgctcgagtgaaaaaggaatccactagaagaatgtcagaaagctcactcaacaaaaggaaaagctaaacagctaggccttatcagcctgggagccagaccgagcccttcccaggtgccaggaatctctgagcattgcctcaggcgattcagttccacacatctttgttcctgatacatctctccgtacaagattcaaattcccaggaaagaaactgattggctttcatggcagggtcatatttgacccactccta

SEQ ID NO: 129216 - DNA, 1079 bp, Homo sapiens
gtgagtaggcgtcattcttcacagtagtcctctgcctccaccgccccgggatctccttgcgctcggtcctctacgtggagtcacctatgcagaggaattccacggggcgggggcgaggacagggtgcgggggtctttatggcagacaatccccggctgagcgcttggccagagtttctgtgatgctagaatctggactgcctgcgacctctccgggactcggacaccagccctcgcctcctggtgatcttttaggtcctgcagagaagtgaagagatctcgctctgtcacccaggctggagtgaaatggcacaatcttggctcactgtaacctccgcccccaggttcgactgattctcgtgcctcagcctcctcagtagctgggattacaggatggagagtaaaggaggtaaaggaggactctgatgcctcagccatgcgcctgtgtgccgattcccattaagcctgcaccaatttgatttccaagactccagtcaatcctcagagctccaggaggggaggggcagcttttcctggtagctgctgatcaccagcagagggagccctaggactgcagggcctctttccttaccgttggtgaagcccttcactgtggcttcaaaactgtggaagacccgggatttgtggatcacttgcctttagaatagaatcaagaaataaagctgcagaagaaagaatctccatgtggctcctcttttcttgccggtctgctgaccctcaggggccatgccttggctgtcttctcatctcacattcacttccaggatgatgccgggttggagaatatggaaaacaaatctgacttgctcgagtgaaaaaggaatccactagaagaatgtcagaaagctcactcaacaaaaggaaaagctaaacagctaggccttatcagcctgggagccagaccgagcccttcccaggtgccaggaatctctgagcattgcctcaggcgattcagttccacacatctttgttcctgatacatctctccgtacaagattcaaattcccaggaaagaaactgattggctttcatggcagggtcatatttgacccactccta

SEQ ID NO: 129217 - DNA, 387 bp, Homo sapiens
gggcccctctcagattctctgcccgaaggtccctcattgttaccttcatccctaccaaacatagtttccaggcggaaactcaagagtttttgtatcccagcaatcctgtccaggacctgagccagggctctctgtgcttccagttcactctggtctcattttgactgaataggaaggcaaggggaatggacattagcctggggcctagtacctgtacactccccacggctcctttggtccctgacacccccagggcccaggaacagattactactaagggcttggctgtcactgactcccagcctcgtatctatctgcctgggaggggacttggcgagtgtctgggacacagggtgatggtagtaaagtggccctttctcccaggga

SEQ ID NO: 129218 - DNA, 721 bp, Homo sapiens
gactctgggcatggatttgggcagttaattagacagagcagctaaatcaagtgacatattttcctttaattgctcctaactagaataagaggatgatttgcgtcctgatttttatgaacttttgcattctttctcaagttctaaattcattgagtaaatccttcagaacatttgaccttgtattatgggttttgtggtttaaatttcccatgaagttaattataccatggacagtattggggtgaaagtatagtccctaagatcatgtttaaaatgttttgtctcagaattttaataccccttttggcctgtaaacactttgtagcaccatgataagcaaagacagtatttgatgcaggtcagttttaagtgggagaaggaggagtctctttaatttagagaggcttactacaggacatttcactgaacaattggttatcccaattgcgttttctagaggtttttttttttttggctttccctcaagttgtgttgtgtactgtgcaagaatacgaataggcaagagcgagtggagacggcctgtaataggcttccagttaagctcttaatttacgctggttgtctttatcggccaacgctcccacgtcgttatctgtgagagaatggagaagaaaaaatggcattctattttttgcaccctcttctccttgtgatcttacatcttcacttaaaagcaatcaggtgcgcaggtgaagagata

SEQ ID NO: 129219 - DNA, 354 bp, Homo sapiens
cgcggacatattactgacgtatagtatcgtggatattcctgaaaaaaggcgcgccgctcgatactcaatacgtgtaacaccgagtgtagggaagtacaacaaaggaaataaacagggttctgcaggtaggatgaagctgggcagtgggcaggccaaaggtagctgaggcctgaaggatgagaaagaggcatgtgtggaaagattgtgggaacagtgtttcaggtagatggaatggcaacagcagatgtcctgaggctggggagagcttgtgggtgttggcaacaggccgtatggctggagtctggcgaatggcggacaagagtggacgagaggaggtggaagatggggacagga

SEQ ID NO: 129220 - DNA, 494 bp, Homo sapiens
cacaacgtgacaatgagttcctcagttacatttctgagcacctgccaaatgccagggataacgctgggtgctgtgctgtcaacgacaaagaagatacggtcctacccctaaaaagcgacggtgggaggcatgtgaacaggtcgtcactgtccataggatcgaactgcgactgccttccagcacgcatgcttctggagaatagaggagaggaactcgcttctgcttggaggaacaggagcagggaacactggaggctccaagtaaagaatgagtaggtgcgtcccaggcaggaaagggatgggaggggaatggcaatgtgaagggagcaattgcaaaggctgaagtccagatgaggtcaaatgtgcttggggagaggcaagggtgtgtgtgtgtgtgtgtgtgtgtgtgatggttaacataagaaaagaagtttaagaaataagaagcctctagattgtgacgggctttttcttccatgctaaggactgtggtct

SEQ ID NO: 129221 - DNA, 284 bp, Homo sapiens
acatagggacgagctcaccacacaacaaccaagggtggggataccagtcaggtactgcggaaaacactggacatgaggtagaccaggtgcaccaggtccaggtgctgatgagaggtggagagtgggagacagggtcagtgagccacaggccagtccctaggctgagggcaatatgacaacaggacattggccaacttccagctgtcatcactgtctgtgtttcattttcacagttcgattaataaatgctctatattcagggatgcctgcggccttatttcttg

SEQ ID NO: 129222 - DNA, 378 bp, Homo sapiens
ggcttgcttaatgggttcatgaacaaagtggctatggcaacaggtatagcttctacatggcacaggtgtcctgccactaatcttccaatttttccttgcaagcttttgaacaaaattgactttctttcaccaaaacttgtctggcgactgggctactggcactgttgaatattcagcctgttcacaaaaaagaccaattgcaaatcccaaaaaaaagcttcattctccagaggaaaccaaccagtctcttagtgtcaggttgattacagtaggcctcttccatcatggaggaggcatcaattttttttttttacagtagttttaagtattttaggtatggttttgtctattatatttttaccaatattaccattctta

SEQ ID NO: 129223 - DNA, 167 bp, Homo sapiens
tgtgctgctgtctggtagttaactctttgaatccaagcataagacattaacccacattaaattagagtggcgattgtgaaagccattaagtgaggagaagctaatgaacaaagacattatgaaatagcactttttgctcaggcctttttctggcctgcaggtatgaa

SEQ ID NO: 129224 - DNA, 581 bp, Homo sapiens
tcaaaaggatgatataattaatatgtaaaatagtaataaatgaacatgatgatagcatcagtaagttcaaactttcttttgttattcttgaaattggcttattttgaagccagcttttaaaccagtccatttccagaataataataagtaaactaatgaatattagtatacaaatatgtaactatcagtgatctgtgtgtcagtgatgatcctttttgcctgacgcatacttgctatatttacttttttgtggatgattcacagtagttttgtataactagtgatgaaaatatgcttgcctttatttttattatgacaatttttttcaaattttgtgtgtagaatacagaaatagatatatcagttatatcttttggtaattacagttgacccttgaacaacataggagtgccaagccctctgtgcagttgaaaacccacataccactttcgactccctcaaaacttaactgccaacagcctactattgacaggcagccttaccaaaaacataaacagtcaattaacacatattctgtatgttctatatattatatactgtactcttacagtaaagtaagc

SEQ ID NO: 129225 - DNA, 581 bp, Homo sapiens
gggattacagatgcgtgccaccacacctgcttaatttttgtatttttagtagagacgggtttcaccatgttggtcaggctggtctcgaactcctgacctcaagtgatctgcttgccttggcctcccgaattgctgggattacaggtgtgagccactgcacccggctttttatttttttaaatttatttttattttttatttttaatgatgactacactggtttgaggaggaagagagaagaaatacagtatatatttgagtggcacatcctgaggaggctgcctgacatggggcagagagcatgctttatttatttattattaattaattaatttatttatttttatgagacagagtctcactctgtcacccaggctggtgtgcagtggtgtgatcttggctactgcaacatctgcctcccaagttcgagcaattctcgtgcctcagcctcctgtggtcccagctgctctggaggccgaggcaggagaatcgcttggaccctggaggcggaggttgcggtgagccgagttcatgcattgcacttccagcctgggcaaacaaagggcgaaagtccgaccccc

SEQ ID NO: 129226 - DNA, 745 bp, Homo sapiens
ggctgcctccctgaagccgagcttttgggggtctccacccactgccatcccaggggaagaaagctctgagcttggggtcatgcttacagggtcaggggctgctctcaggatcccctcccaccctcttccttaatcttatgtgcccatccctctcactcccctcaccccacttacaactcttcaacttacaccacctcaactctattccccagccccatgtcctgactcagtcattgtcacactgggtgattttgagcatctcactgagcaggacttcagtttctccatctgaaaatgggagtgatctcaactaccctgttcacaggagggaaaataaaatcatgaggatgagaaatgtttagggaggttataggctatggggacctccaagggctccccacatggaggttctgggggtctggacagaaccctggtgcttcggagctgagctcagcctctgcttcctccagggtggtagaagatgccactgaagtggaggtgtctgactcaaaagctgcctcagagctgtacttgcaggccaccgcaggtgaaggcaggtgagggcaggagagtatctgtcaccccatccccgctaggcatttggcctgagtccaccctttcctccacagggcctgctgtctgctcactctcaccatgtcctgcccagggcctgaccctcctgaggggcccgggacccagcgtgtgtggcaaggggctctacggatcctacagctcccaggagccc

SEQ ID NO: 129227 - DNA, 455 bp, Homo sapiens
aggagggccccctgcttggctgggaccacgaggttccagaggcccccaggtgaaatcgcctaagggagcggcccatgacagggacaatctgctctgctctctgctttcgtccacttggaacagagtgttcctgcctctgaaacataagagaaagggggaaagacattggtactgagcactgaagactgtcggttcacctggacccagaacccagtcataacatcccacagaacaagaacccttctctcgcaattcctccaaccaccatacttacggacactggcatgtgacagcttccagaaaatggaaatgcccacccaggctttcactcacacaaggaaacctgcatgctgttgggcagtcatattttttatttgagatgatcagcatttttctgtacatttgactacaggataacaataaactcatagtaatcctacagcccctgggacatt

SEQ ID NO: 129228 - DNA, 330 bp, Homo sapiens
aacgacttctgggttttcattggatttggttaaaactgagagcaggatgctcccctttgcttaacctctaccctcatggtatctgtaagcgatttccttcctgtttttcccttcttttaaaatttttattttttatctccaactttttatattgaaaattttcaaattacagaaaagttgaaagtatagtacagtgaaataatcatatatcccttacctttatctaacaaatgtcattttgtcacctttgctttatctctgtataagcacttttcttttgaaagaagcaacatcgtacttcaccctactacatcagcatgtatctcttaa

SEQ ID NO: 129229 - DNA, 639 bp, Homo sapiens
agctatatttttccacttattcagattaagtttctcactcactttaagacaataaacctggcgtattatgctaagacactttgctatcttttatctgttttccccgtgatttaaaagtcatgtgtgtttcagaacctccacaaggctgagaaaaaaagtagtttgtggaggtgaaagatgagatacattttcagcataatccttatttcttaaaaccatttgtttctactgatggtcgatttcaccatatttaaatcatctttgttcataagtcattaggatttaatagatgacactctaatcttataatgtggcttttttcactataaatctggggcaattttgaaggccatatatgtctgtttcaaaggtggagaaacaaaatataagcttaaattagatggaaagcacctgttctttttcattgactcccagagtacacttctgtcatcatcattttgtaggtgacagatctgagggccagggattccattagagagagagttgaaacctgaacccgtgactctagatacccagccctggcattcagagatttttgggatcaagtcagaatatagaaacttgaagatgattttctacttctggatgtcttgctgttttgtagcatgtttcgtgttt

SEQ ID NO: 129230 - DNA, 325 bp, Homo sapiens
tatgtttaatgttttataaaattctacacttgcttattattagataatttaatcattttaatttgctcagtgatataattggcattattatttttatgtatttatttattttttgttttgagacagagtctcactctgttgcccagtgccttccagctcgggtgacagagtgagactcattctcaaataaataaatgaatgagtgaatgctttatgtcatcattattgacactttttgcatcagctaacatttttccaaaacatataatgtcaacatccacgtatgctagaatgtttcgcaagctactccttttttttttttttt

SEQ ID NO: 129231 - DNA, 289 bp, Homo sapiens
caaaaaaccacagcttgcgatatgatttacatatcatatgatttactcagtttaagtgtacaattcaatggtttttagtacaatcacagataagtgtgaccatcaccatagtcagttttagagcattttcatcacctctaaatgaaactttatattttagctattcctccatttccccattcctttattcccgcattcaacacaatcataagcaagcacttgtctactttgtctctatagatttccctcttttggacatctcatatgaatggaattgtataatctgtgg

SEQ ID NO: 129232 - DNA, 516 bp, Homo sapiens
cagggtttagtattgtcacctaaatcaaattttgcattgggggttgcaaatcattgaaggttttgggctatggtgaaccatgatcaagtctgtttagaaaggaaagagggccaggtgcaggtagctcacatctataatcccaatgctttgggaggccaaggcaggtggatcacttgaggccaggagtttgagatcagcctggacaacatagtgagatcccatctctagaaaaaattttttaaaaattatccaagtgtgatggcacagaactgtagtcctaactacttgggaggctgaggtgggaggattgcctgagtccagaagtttgaggctgtaagtgagctatgatcgtgccactgcactctagcctgggcgactgagcaggactctatttcttaattaaaaaaaaaaagagctcaaatacacagaaatagagaatgaaacagtggttaccatggttatttcggggggaaaggagagggagctgtgggtcaaaagatacaaaatagcagatat

SEQ ID NO: 129233 - DNA, 491 bp, Homo sapiens
cagggtttagtattgtcacctaaatcaaattttgcattgggggttgcaaatcattgaaggttttgggctatggtgaaccatgatcaagtctgtttagaaaggaaagagggccaggtgcaggtagctcacatctataatcccaatgctttgggaggccaaggcaggtggatcacttgaggccaggagtttgagatcagcctggacaacatagtgagatcccatctctagaaaaaattttttaaaaattatccaagtgtgatggcacagaactgtagtcctaactacttgggaggctgaggtgggaggattgcctgagtccagaagtttgaggctgtaagtgagctatgatcgtgccactgcactctagcctgggcgactgagcaggactctatttcttaattaaaaaaaaaaaggaaaaaataaccagaaaggaattaatcacagtttatgggagtaatgctagctgaaggccgggggtcaagaggcctgag

SEQ ID NO: 129234 - DNA, 371 bp, Homo sapiens
ggggccttggggtaacagcaaaggactgcaaccagagaagcaactaggagtgtttcactctgggattccttcagtttggtaaaactccagacaaaaagcatgagggctggctgggcagggcctttcctgcttctgaaaatcagagcacctgaaattggaggtccagccagctgtgcgctctcttacagggcactgcgctgcagtaatagagcattccttagatactgggggacaccaggggtctccaaagtgcacagcactcaatcctgaggtgctcaagatgacccacggagttctagaagaaaacagtagaacacctattcaggtttatttttatgccatccttttacaattgtgtgtgttttcattag

SEQ ID NO: 129235 - DNA, 831 bp, Homo sapiens
cagctacactcacaggaggggcaaagagacaagagccctgccatatacccctgcagctccggagggcactgaggagttgtcccagggacctaacccaggtcactatcccatgcaggagacagtgtggtttggagctagctctgctgctaatccttgtgaccctgggcaggcagctaagtccctctgagcctcagtttcttcaccaataaccagtactaatcatcctggcccagagtcagaaggctggggggagaacccaatgagagagtgtagttgggagcactttgccgtcagatgatacagtgccccccaagcaccccacaggacagcgctgcctacatagtgacgtgatgttctgatgacaatagtgagaagctggagagcactgttgacagcatgttaccagcattctctttagcgtatccttggagctttgctaaggagacacaagtcagtggcctcaaatactgagcagctggtgaataatggaggcagaaggccacctcttttgggtgagggagctcactgcttcacagtggccttccagggacagtcttccagctttgcagatcacgaggggcgtccaggaagggctgaggccctcgtcctctgtgggcagtgacctccaagcccccaccctgtgccacagctcacccttttccaagtatggagagccttgtccagccctgtctcaccaagccctctgcgggaactcccttgcacttgacagatgagtgcacacccagcttatccaagggctcacccaaaaaccttcccaatttcataaaagatctacgcccggtgtggtggctcacgcctgtaatcccagca

SEQ ID NO: 129236 - DNA, 341 bp, Homo sapiens
ctgcatggggctctgagggattattccagctgtttggggactgtagccatggctcccagctgcagagcctgacaggcctggaggccggcaggaagaagatgggggctgtgcccgcctgccgagagctggctctgagactgactcttggcactggggtcctctgaggccccaggctcattctcacctcctccagagacccagctgacataccattctcatgagctgcagtcctgtgacccagctgatttctgtctcattggtggaaccctttagaggtggggtagggctcctaaaacattagccctactgccttccccacagattggcctctcttccctgcc

SEQ ID NO: 129237 - DNA, 307 bp, Homo sapiens
tgcgtgagagagtggacgttagacagtgagccgagatggtcgccacggatttccagcctagggcgacagagcaagactctgtactcaaaaaaaagaaaggaacagacatctgtaagctggtgtagcaaaagcctccaatggctccccatttcacgtagaaaaaatgccaaagtccttatgagagcctacccagcccaaagcagcttgactcctgttcccaaggtttcctttcctactgccctcctcacttgctaaactcaggctgcactggccctctcaccctcccttgacaacaccaggcatgttc

SEQ ID NO: 129238 - DNA, 456 bp, Homo sapiens
gtggaagagccagacagcgccaactcatcgttctacagcacgcggtctgctcctgcttccccggctagctcataggttcgcaggatgtgatgatggcagaataaggaggaaaagcatttaggtaaacagaaagatataaagctatcaaaacataaagatgggtcattctcaatctgcagatatttaattctgatgagtttttctttggatgagacaggcagtcacaatcctgtgctgacaaacattcggagttttcttcaatgtgccaatacctggttctaattctagaaacaccaagaatgattcaaatctagtaagtttctcatgaccacaaatatactgggtccgttttgggtgccttgagaatactcctataaactgagcctcccaagaaagctccagccagatttgtgacaaactctttcccctgcattgaaaccaacctaaagaactaaa

SEQ ID NO: 129239 - DNA, 197 bp, Homo sapiens
aagaggaaatgaacagtaggaatgacaacaacaaaaacaacaacaacaacagacagataatgagaagaaaaatagaacatggaggattcatccaaggaagaggttgttttaagccacatgttcaggaaaaggatgaatgattgataaaaactcacaacccttaagattagcttctgagtcaaactatcactgaaggt

SEQ ID NO: 129240 - DNA, 520 bp, Homo sapiens
gactgagaagtggcacaagatttagaaatcagggtggtggtggtgacccgggctacagcagttttagtggagagaaggaaatggagataattgtagagaataatccagtgacttcactgtgaaggagcaattggtatctggaggggcacatgacattcagagacttatttttatcatatttgaagattggtaggaaagagccaggagaagagaggttacagcagaggacggttcctgaagaggtaggatctgagctcaagtagagattgagttctctacaggaggccttagacactccttccttcctaagggaaagcttaggtggacatgtagctgtgtttgtaggtttggtgatgggaggtggaatttctttcattaactaaggcgggggaggtgttgaaggtatattgggactcttgagaatggcaaagggctgactattgcaactcacccagcggtagacagttaagggagaccgtgaaatcatctatgatcccaatctatagttaccttattttat

SEQ ID NO: 129241 - DNA, 356 bp, Homo sapiens
cttattttccttctctattgacttccttcactcagccagtagtagccagcacctgcaggttcactctgagtccatcacaggcatgtaggcgttcctttgccttaaatggctctgggaatcatcttctgtagccaagctccccaagctgtcacttatgacagctgcatgacactactgctgctgataatctatacatccaactcaccctctgccgtagttttcaggcttttgttttgtttgttttgttttgtttgtccttattcctattattactggctctcagccctgaaccccagcccagtcagtgaaagtcctgattccctcagcttctttgccctcccactaaagaagggttt

SEQ ID NO: 129242 - DNA, 285 bp, Homo sapiens
ttcttactgattttctatctgaatattctatcattgagatatagttgctgaagttttcaattataattgagaatttgcctatttctctctcagttctagcattatttcttcacatattttagctttgttgtttaatgcacacacatttagaattgctatgtcttcttgatggatttaccccttatcattacacaatgttcttttctgtctctggtaattctcttggctcttaggttgactttgatgttaatatagctattcatgctttcttttaattaatgtttg

SEQ ID NO: 129243 - DNA, 157 bp, Homo sapiens
tgcccagcctagttttattcattattgagaggaagaatcacaagggaaattagaaaatacttacagatcaataaaagtgaaaacacaacataccaaaatttaggggacacagcaaaagcaatcctgagggaaaaatttatagttatatatgcttaca

SEQ ID NO: 129244 - DNA, 358 bp, Homo sapiens
cctcagcattttggagtggaagtcgcaggccttggttgtgaacaaaactgacctctactgaccacttacagtgagttatgagctatgccagctccttccagttgtgcttgctatctcatttacttcctactacagtactggaaggtggctgtgattagctacatttaaaagatgaggaaattaaaggtcatcttttgtatcttgttcaaagtccctcaataaatgacagagttaggattctaacgactgactgtaaaagtacagtgtccaaacctatcctctatttaatgattagaaacagtggacacaagacaccagtgagagtgaggggtgtgtgtgtgtatgtatgtgtgtgtgt

SEQ ID NO: 129245 - DNA, 819 bp, Homo sapiens
cataaataatgacttctagcctcaaaaatcataaaatttacttaaaattataaagtataagcatttaaaaattaatttttttatttcttaattctgtaaacatttattgagtacctactatgttccaggcaccactctagccactttgaagatgtattagtaaactaaacaaaaacttttgctatcttggcactcatgttcttttagcagagacggtagattttaatattattaaaaggtaatagatgtttagaaggaaaacaggataaggaagattgggagagccagaaggcggcctggggggagatgggagattacaatactgtattaaaaagaaagtcagggtgggcctcattaagggtgctgatatttcagccaaaacttgacaaaggtaagaaagttgaccactttctagaaaacagcatttcaggccaagggaacaagagagatattaaggctggcatgcctggtgtattcaaggaacaacaaggaaaagatgtcgctgaagtaggataagtgaaagcaggaaaatagcaggagatgaggttggggatgtggagggccagtggtgatatagggcatgggtggtcttagaaactatggtgaggattttgactttcgttctggatgaaacaggaaccattgcagagttttgagcaggggacagatgggatctatttatgccgtaagtcaggtcaactataataataaatattgtaaatgatttaaacttccctgttgtaaaagagaaattatcagattcattcaaacgtgattgacatagaaaagctgaaatttaaggattgaaagaagatgtaa

SEQ ID NO: 129246 - DNA, 474 bp, Homo sapiens
agcagcaagactggcgtctccccgtacttctctcctctgaccatctctcaacacaccatgaccctggtcagaccactatcatctcccacctggatgttgccacagctgggcccccatgcttatacccaattctttcacagaaaatatggtctttgctggtgggctcccaccagcaaagacccgtaactgtccctccttcctcccttcccacagcacaaaccaagctaaaatgctagctcaacttctctcttttcacttcaaaacaacacaactcgccagccgggcatggtggcagtagctcacgcttgtaatcccagcactttggcaagccaaggcgggtggatcacctgaggtcaggagttcgagactagcctgagcctcccaagtagctgggattacaggcatgcaccaccatgctcagctaattttgtatttctagtagagacggggtttcgccatgttgctcaggctagg

SEQ ID NO: 129247 - DNA, 261 bp, Homo sapiens
tcagaagaacctgatgtcaaatcagatccatcttatagcaagtcgagccacctctctgaaacttgaatttaaatgatctaaggtcatttcctttggattttatagaaagaatagtgtcaggagaaaaagaaaaacaaggaaccatgacttgctaaacatactcagaaccaaaggttttctttctttccttttaaaaaaaaagtgatatacagtgaatacaggcttagttccctaatggtggcaaatgatgtaatgttcaca

SEQ ID NO: 129248 - DNA, 437 bp, Homo sapiens
ttcccagcctgtggaggcctcacagtggtagcttgttagcagagtcctcagaatatatccaggataaaaatgtgactttgtgcaagtccccagcttgaaacagggttacatcctgcttcctgggtgatgctacctggcagaggagcccaagggcagggggcaggctcctcgtatctgggtgtggtgccctgagctccttgccctgctgtttatttccagagcagaaccttggggctcactggagcagtgaccacctctaatcacaagagctggttgtactttttcttcgcaggctgcatagggtggaggatggggctggggcctctggagagtggcgattcctccctcagccccacatttctacctgctccccagggcaccttgttattacagttcaactggctggggtttgtcaggcctcaagccagcctacctgg

SEQ ID NO: 129249 - DNA, 217 bp, Homo sapiens
tttgtgatcgtagtgaatacattggacttttggtacttacagtcctttgatcactgaaaggggccatggcttcaggaatgatgcataaacccattctgtgcacttcagcaggcaggcagggtttgggcattgggtcaatgcagaaggaggaggaagaattctgcagtcactctggggctgctgctctcatcagtgagtcactaatgggcatcaggag

SEQ ID NO: 129250 - DNA, 725 bp, Homo sapiens
gcaaggaaacgcccagaaggataaagacctgggagctctagcttggaggtggaggtgagcctctcgcttgggctgaggaaggatgctgactgtgccttcccaggcaagcccgcctgcctgatagcttctccgcagggtttttctggtggtggtggtgatggtggtggtggtggtggtggtgatggtggtggtggtggtggtggtgatggtgtgtgtgtgtatttcaccacttcttacccagggctacagtatgtgacatgaatttcccaagctctgcttagctgttttcagaacagcccctaagcgcagctaggaggtggtgcaaatctttcacaatcattcacaaatctttttccgttgctgagaaaccaggagtattgctcaccttggcatctgtccttgaaagggctttagcttgaacaatatgcttctgctaccattcacccaacagtgctctgttcactcagtgaattgccatatccaaaatgaatacagttaatcaatattcctaatatgtctgaaattcctgcccctcctttttactcctactttcaaggagtatgtgttagatttaattgtgaatgagaaggaaggaccttacttctcatagaagggaagatgggatatttttaacacatatctgggtgagattgaaattaacttgtaaaaagtaacccaaattaataatacatatatttctatttttttctcaagaagaataaaaa

SEQ ID NO: 129251 - DNA, 633 bp, Homo sapiens
atatcctgagtgcctaagacagtatccagcatatggtgggttctcattcatttaaataaataaatgaatgacccaatgtgtcagtcaaggtaacctgggttgtgctgcagtaaacacaacctctaaatctgagtggtctatctcttatgcactgaggtcagttgggagctctcctccatacttcctcccattggaacccaggccgacaaagaagctgccatcttgaattttgcttatcactggatagaggaaaagtgagctgtaggttttgaaccagcaatagaatgttctggcctggaagtcatatgtgatcctttaacttacaattcactggacagagctagtcacatgttccctgccaaaccatgtggaagtatgtttgcaatctgactacattccaaaactattaatagcaataatgactactacatttaaggaaggctttaacttaattttttatgggaacttgaccattattagaattttggtgaggccatgaggcagctccatttcccagaatgacttttagaatcataagctaatcactttgaatcacgtgtcttagttttgggctgctattaacaaattacaaaatagactggtggcttaaacaatagaaatttatgtctcaca

SEQ ID NO: 129252 - DNA, 127 bp, Homo sapiens
attaaaaacaatccattgatactgatacttccaatcgcagtccaacacactgagggttgacttttggcattctactttccatctttataacttctctctccaaagggatgaaacttggctcccatta

SEQ ID NO: 129253 - DNA, 331 bp, Homo sapiens
ctaggccccaaatgacattcaagaccaaagattttgacatctatatgtaattataatatattgcattattaagaattactaaaaatttgcatgcataaactaaaatgggcccatttccagtttaccgaggactctaatttagcattctactaaaaagtctcggaaaggcacagcggctcacgcctgtaatcccagcactttgggaggccgaggcaggtggatcacctaaggtccggagttcaaaaccagcctgaccaacatggcgaaaccccgtctctactaaaaatacaaaattagctgggcgtagtggcacatgcctgtaatcccagct

SEQ ID NO: 129254 - DNA, 501 bp, Homo sapiens
tccttgagaagagatatgctctgtcttgttagcagtgtctggcggatagaaggtgttcaataaatttgttgcatgaatgactgcaggaatgaaggcctgagatcacgtcttcttctccttggagtctgtgtcctttttcctgaattgtcttgtgttgtccttgccttgggcatgttacttcctcagtgtcatttctgactgggcagctgtgtgaggctgctcctgtggaggtgctggagacaggttacaaatacatagaagtcattgaacttgtgtctgtctgtccaggccacagatgaggtgtgttggttgtccattatttcatatttgcacccatgacacttaccttccttctgctgggtcacctccccacccagtccttaagtctttgaaggaacaatgatagtcaactccagggaaattagcattttcaaggtaaggagggacacagaaaagcactctgctcatcctttctctctgtttgtggagtctgctggcagt

SEQ ID NO: 129255 - DNA, 434 bp, Homo sapiens
aacaaacaacctcagaaaagaaatctggttgcccataagacagtgcacagaaataaccacataaccactgaagatagatgtctattgagtgccttctgggtgctggcctctgttctaggtcctgtggattcgacaatgaatacatccagtgaaaattcccacccttgtgcaagttaccttctagttggtgttgcaggtaatagacaaaatgaataagtatctagtggcctaaataatcagaaggataatgaagaaacatgaagcaagaaagtgattggggagcgtataccaccaccatgggcagatgtgggctgccaggagggccgctttggcaagtgacagggtgatgtttggatgatgacttgagagaggtaaagtagtgacatatgtcatagtaatgacatagataaatggagggagaaggaggagcaggt

SEQ ID NO: 129256 - DNA, 768 bp, Homo sapiens
gttgaatgtaaatggcctaaatgcaccactaaaataatatagagtggcagaatggatgagttaaccaaccaagtatctgctgtcctcaagggactcaactgacacataagaattcacatgaacttaaggtaaatggatgggaaaagatattccatgcaaatggacacccaaagtgagcaggagtagctattcttatattagacaaaacaaactttaaagtaacagcagttaaaaaagtcaaagagggacattatatgatgataaattaactagtccaacaggaaaatgtcacaatcctaaatatatatgcacctaatactggagattacaaatttataaaacaattactactagacctaagaaattagatagacagcaacccaataatagtgggggacttcaattctctactgaaagcacaagacaggtcatcaagacaaaaaaccaacaaagacacagtggacttaactatacccaagaacaaatggacttaagagatatttacagaacattctacccaacaactgcagaatatacatgctattgatcagcacatgtagcattcgttctccaagacagatcatatgatagtccacaaaataagggtcaacaaatttaagaaaattgaaattatagcaggtactctctcagaacacagtggaataaaattggaaatcaactccaaaaggaaccctcaaaatcatgcaaaaacatgtaaattaacctgcttctgaatgatcgttgggtcaacaatgaaatcaagatgga

SEQ ID NO: 129257 - DNA, 510 bp, Homo sapiens
  misc_feature (57)..(57): n is a, c, g, or t
  misc_feature (73)..(74): n is a, c, g, or t
gctctagacgatcccttatatgctgtctcacctgagagaggctcctgcatgtgaagncctgccaatgacacannctggagagcacctaggatgggtgttctctaatgggggaggaaggtgggcttaggaggctgctagctgaacatgcgatttgcagttattaggcaaggtggggggcctgaactcaattatagactctgtcagggctgtttgactaaagtggctaagggaacccatatcaggtctgctgtgttgaaaccaaactgcccttttaccaacgtttctgctgtgcagcccagagaagtgtcagggaaggagagggagaaatgggagaaatacatattttcaaaaacactgtctcacttcctaagggtaatcaaaagcaaccagggaaaatttatttgtatgctgaaaaataatctgaagcaattagagacaaacattgttacagagaacttggaagttatacatgtacatgttactttctacctttgtttttttttctatttc

SEQ ID NO: 129258 - DNA, 481 bp, Homo sapiens
taattggccccatcctcaggctagattcttttcctgggatccttctctgcaagctcttctagctcttttcccaggagcctcctcagcccctacgttaatctgtttatgcaaacataacacagaaggcctggccctgccctcatgcctggcacaggttaggttctgacaaagcacctgccatgtaagctccctcatcctgtcctgagtgtgagattctagcatagggtagaaagataccaagaaagcacaaaagcttaatgtttgtggctctgttttatgaatatgttgaaatattcccaatttcaaaattgctgagtcaaaacgtcatgaatcccaggatctagtgggaattataatgcaaactggtccacaagggaaactgtatcaacggccagaatgaagcaaattagaatcacttcaataatcaaaagttaatgtaattctactgggtggctttataaagcttaaaaagtttgtttga

SEQ ID NO: 129259 - DNA, 609 bp, Homo sapiens
gtcaggagccatggcacctgcagccttccttgcttgtcacttggctgtccagtgactccatgtgcccaacagtaagtcccacatttgaggcctgaaaatgacaagaaacacagactgtgatccactctcacccttaatggtagggcagaaagcccaaatttatctctccaaaaagaatccaacgtaggctaagggggagtgttctcaccatcttatgtagtatcaagaaccatttctctcatccctagaaaagtcgtaagtgacaccaaggaaatgttttctgaggtgatggaatcttccattgcccaccccctctcattgagggctgaggggtaaaagtgatgggctctaaaatggtgtcagaggggacattcccttgtgctgccaggagcttcccacttgatggaggttccagttcattaagaggagtcagctgcccagactgaaccagtgctattaggttcctcatagcactctccagttcttttctgagtgactgaaatgagggtaatgattcagagctgtgaaggccaaaattgcctgaaacttggtaagaatctgaggttcagaaatcgtcttatttcccactccgtcccaaatgtgtgcata

SEQ ID NO: 129260 - DNA, 343 bp, Homo sapiens
acaccgctgttagagttctatgacgctagaccggtctcgtgtcccgtgtgctctggttctgctgctggaacttcacgcatggcagcagacccagaaaactgggttacctacctggtaagcagtattagatgccagctctccaacctttcaagccctccccactgggggtgaggtggagcggttctttatttctttgcctccacccaccgaaaatttgtccccagtttcccattctctccattgtgtctgtttctattattgtcctcaacacccacccaaacccagactctacagctgcactgtccaatgtggacaggagccacaggtggccatttaaattaat

SEQ ID NO: 129261 - DNA, 774 bp, Homo sapiens
cggctatcattcaaatttgcgaaacattgaaatagacatcgtaatagaaataaatgattttaactagattttcatcagttacatatccaatttaaattcaagaaagtttaaaaattaaaaaattcaaaaacgaaagacatgctacaatactattgtaattgaagtagttttttcttagtcctggttgcataacttccttgaaaggaaagcaataagatacaatgaaaacaacatcaaatttagagttagcaaacccaagttcaaattcaggctctaacatttctcagcttgacagagcttcagtttcctcatctgtaaaatgcaggtaacaacatttaactttatcagaaataattgtaaggacgatcccacaaaataatgaatgtcaaagtacttaataaggaatccagcactcttcagatacatattagtatttatcacgtcctctgggtttctctatcaaaagtggagaaggtttgtgtgccattattcacagcttcctacctactccttcttggagcagtagtaagtgtttacagtatagatgaaacctgtgttgatttaatcttgatgttatcattcaatctcttaacactcactagccatgttggccactcagcccagaaccgatgaattgggagaaagaacagtatgaacagcactgattttaaaaaccaggagatgttggaccctgcttttgggagatcctccaaccttactttcccctaaattacctcctctatgaagactttgtgttccctttgctatactgac

SEQ ID NO: 129262 - DNA, 171 bp, Homo sapiens
caattaagcaaaggttggtgtgttggtagtacaggactagggagtttcagaaggtgctggaaggggagatggaaaaggagatagagaaaaataaatgggaaacagcaggggggctggctgacagcaggaaattctgagcctaagggttctttgcagcttcccagcccctgc

SEQ ID NO: 129263 - DNA, 498 bp, Homo sapiens
tccataatgtgtgcccataataaaatgcaagctaccaagcaaaacttagaattttgggaagcttgtatccaccactgtgagcttgatgggcttctcaatatttacagacttttttttaagagatcagtggtgacattaatgaatgtgaccacatatgacatcaaatcacactgtgaccaaaaaccatgtttttgcaaccacagtgtcaatcaaaacataacactttaaagtgataagctcttcctactatggctactgatagtgtattcacccacttaacaaaaggacctactatgtgctacgttctgggtacagcagtggtaacagatttaaaaacccagacattgtccaaggagttttacatatgttaattaacttaatgctcacaataatgttataagaaatgtaacattaaaaacctctttttgtagttgtggacattgagccataggagttgagtaacttgattaatgtcacaagcttgtaagtaatggaacc

SEQ ID NO: 129264 - DNA, 554 bp, Homo sapiens
tgactgagagaaagcttgttattgagtaggtaaggcgcaggtgtgatgtcactgtgcaaatattgaaccaattaaaagcaaagccaagggtccagtgtagatgacttatctgcagatccagccctaggtctgtctgcctggcctcttaacatggggcaaaagctgcttaacctattgtttcctcctctccttccttccttccctccttcctgcctccctctgtctctccctccagctacccttggagtggtcattctcttggactgccaggttcccagaaaatacttgcaagcattttcaacaattcagttattttcaacaagcattgatgctctctctgcagcaccctgggcaagagcaagagggttggggagacagttcctgcctctagagagttctaagagacagcagaggacacaggcaatgaagccatggttctgtataaggcagattgcgctgggcctgttggggaggagggagaagggtgagtaattcatactagggtaattcatactatgagtaattcatactaggagaggctgcctgggggcgat

SEQ ID NO: 129265 - DNA, 828 bp, Homo sapiens
ggcacgtgccaccatgcctggcttattttttatattttagtagagatggggtttcaccatgttggccaagatggtctccatctcctgacctcatgatccgccctcctcggcctcccaaagtgctgggattacaggcgtgagccactgtgcccggcctgtttgagcttattcatgcaaactttagcagacttgactgggatttttactaacagctctaatcctctggggttttcagtgacagatgcagaacgttgaccaagatgggtgggggctgcggggggaagaaaaacagaaaatccctcaccccacagaaaagcaagagttggttgatagttccagttttatccttgagccacaccgcatgtaatttttctgcacatgaaaacatctggctcagatcatcatatcttgaaaagaagagcaagctacacattttcaacaatagagctgattaaattatagtgcagtgcatccacaggaaagaggcttggagccatgaaagtggctttggaataatgcccaataatagaaaggaaagcattttacaatcgctatggtctgtatggacccaccttctcctcatgtctttatctctatttcccacccacttctgaaggagttcagtttggcttctaccctcaacactcctgcactgataaccagggaggtatctgtgcagttaaagccaaaggtcattctttcattttcatcttgagaacattcagtatcctcatcgtgtttgtttcattcattcattcattcattcattcattcattcattcacattttcttttggacatgagagatgatgcattaaatgttgaaaaa

SEQ ID NO: 129266 - DNA, 322 bp, Homo sapiens
ttacaggtgccttaaccctggctggctaatttttgtatttttagtagagatggggtttcaccatgttggtcaggctggtcttgaactcctgaccttaagcaatcaacccgcctcggcctcccaaagtgttgggattacaggcgtgagccaccgcacccgcccctgcaaaacccctttcagattgaaggctgcctcggaagacttctgcacttcccctccccactgtaccttccttctcaacattaacaagctgtccgggtcaggatccttgcactccttgtactgtgccttgacctggagctctctgtgccttccttcctct

SEQ ID NO: 129267 - DNA, 411 bp, Homo sapiens
tgccaccacactgtgctcactttttcctctagctcatgctactctagccaacactggcctctggttggttctagaacattccagatcctctccctctgagggccattgcacctgctgtgcccgtgtctggaacattctttacatggcttttcatgtagccagcaccttttcatccttctgctcttggtttcagtgttgtctctccagagggtcctttcctgatctcttatctaaagcagccccatcaccactattagcccccattgcagtcctcctttggttttctgcctggtattcctattttgtttatgcgtctccttacttatttatctctaccttcaagaatgtgagccacaggagggctcctatgtcatcgctgtattccctcacttccagccctgcagagagcct

SEQ ID NO: 129268 - DNA, 179 bp, Homo sapiens
aacagagtgagatgctgtgtctaaaaaaaaaaaaaaaaaagaaagaaaaaagaaaggaatgcgcaaaattaatatgacatcagctggtgctaccgtgaagaaaaagaagctgattttaaaaatgagcaaaggactagaatagatatttctccaaagaggacataccaatggccaacacg

SEQ ID NO: 129269 - DNA, 497 bp, Homo sapiens
ctgatttgtgagaccatttctatagagtatgcaccagtaggcaggaagcaggtgagccaggaagcaggtttctgcccactgatgcacgcatacccttcctaaaatgcacagtttctggttttttcttcagaatggccactactttccccattaccacccccaactctaatgatccgcccagtgtcctcatccacctgcctatggagggaacatcaagttggtacaaagctatcctgccccctagccacaatgaattggcccggggcctccacctaagtcaaacagagtcatagtactttttcacttgagaccaatcgagtataaagctctaaggtgtaacacccatgagctactagcagcaatgtttaatccaaatggagaaaatatgtagtgtaaccaacaaatgctagaaagagtcagaggcaggagataaatggagtccctattccagtgctccttgaatgcttataataaattttctttttcacttaatctag

SEQ ID NO: 129270 - DNA, 623 bp, Homo sapiens
attgaatctatcttgaaaagagaattttttttcagaatgtgcttagaatgtattcataggtttaagctcccaaagacaggcatcctttcagttatttctgaagctctggtagagcctggtcctttactaggctagaatttttgaaaagaatttctaaaacttccaagcagtggcaatgttgtaagaattaacctgcaggttcccaaagccactacttttcaaagatgttatccatttgaatgtcagagttacattgtgcttgcttttaaaaaaaaatagacagcattttatgataacatcttaagcatataagggaaaaaaagactataatgttagctagaagtgtagcactcattcagagtcacgtgaccatgccgcaccacaatttaaaattagtttgaatcctctgcttgttcctgattaaatggttaatgtaaattaatttaatttagaatcggttctactgctataaccaatacaagccagacttctacttggaatcttagatcatatagctgactgatattgaagaatataggaatggttcaaaagagaaccacaaagtaactattaagaaacaaaagcctctcaagaaggttttaagaagtaagattttagaatcc

SEQ ID NO: 129271 - DNA, 539 bp, Homo sapiens
caggctggagtgcagtggtctgatctcggctcagtgcaacctctacctcgtgggttcaagtgattctcctgcctcagcctccagagtagctgggtctacagacacatgccaccacgtccggctaatttttgtatctttagtaaagacagggtttcaccatgttggccaggctggcctcgatctcctgaccttgtaacctgcccacctcggcctcccacagtgctgggattacaggtgtgagccactgcgcccagccacttttttgttttttggtggtgggaggggcagtgtggcagtggagatagtctaaattgactttctaatctcttttttttgtaaattgtgtgagtggatgcagtttgtgtgccttcatccttcattaagctgagagagatgattgtttctctgggacaacagttcaaccagcaactcagtttcttgggcattaagacagaagtttttgctttgtaatcctcggaaataatgcctatggtaggactgaggataaatgctttgaccggtattgagtggtagtgtag

SEQ ID NO: 129272 - DNA, 121 bp, Homo sapiens
agtggttattctttgaaattttggtttgatgccagatttgcctacgcaggctaggaagcagccccatctgaagaaatgacaagttggattccctacaagagccctctcctttcttaaccag

SEQ ID NO: 129273 - DNA, 735 bp, Homo sapiens
tacttactctctgagcgttatgcatatgaatatggctttagcttcccttttgcagagagaaaaatatcacagtatcctattaaaatttttgcaaatataaactgtttctgctttatgtttttaatcagaagtagaatttagaaaaataaatttcatatagtattttttcttcacaaagctattagagtaggaactgatttggttgaatttttttcctaagttaaatctgagactctcatgaacacaaagtgtatgtttttcatggaaatataaattaaatattttggagaattggatgtctatagataaagtataacacttggctgtctagaaccttgggaaatgagttattcaaaacaactgagttttatagatgacatagtgtttatcttgataggttaaacactttaaaatgtttaccattttgaataaaaactatctaaagatgtgtttgtttatttttctattttttaaaaaacagtacactaaacattttttagctttttcttgatgattcatgatcattattattattatagaaaaagctttttatggaattatagtaatgtttattgagagcttattgaaaagtatattctggccaggcacagtggctcatgcctgtaatcccagcactttggaaggccaaggcgggcagattgcttgagtccaggagtttgaaaccagcctggccaacaaggcgaaacttcatttccacaaaatattaaaaaaaaa

SEQ ID NO: 129274 - DNA, 382 bp, Homo sapiens
acacacacccctatcctagggtgccatgaatagcagaagggagcggggctggcaggatatgcccacagggcatctgccacctctgcaaaccagtctcatgtctgagaggattccagaatagaggtgtggcacacgggtacttccccagagctagtaccccagaccccagctcctgccttggactcaggagccccaaacaaaaccagctggaaccaaccccctcccttatgaccctctgcccacgaaggtagggtcccagggaagatgggcagctcctggaccctctaagaatgagaggactccagaaagtggcttgggggcacggtggctcacacctgcaatcccggcactttgggaggccgaggcaggtgggtcacctgag

SEQ ID NO: 129275 - DNA, 251 bp, Homo sapiens
tgctgagatgatctagaggatcccgagctctctctgtggggtcagacgaggggttggatgtgattgatttatcgatcagccatttattgagcacctcctgcatgccaggcacagagacaacaagacctggcccctcggagctcggagcctggcggggaagccagacacagggacgggcagttcagaacggtggacccagagccacttggggatccacgtgggaagggggattgtgggaccccagtgagccc

SEQ ID NO: 129276 - DNA, 260 bp, Homo sapiens
gtagctgggactacaggcgcccgccacgcccggctaatttttttgtatttttagtagaggcagggtttcaccgtgttaaccaggatgggacaatggtgatcttgatgagaatgaggacggactttgagcagggttgagaagcaagggtagtgaggctgggtttcctgtgtctctaggtaagtcccgtagctttccgtcagcccatgccacaccttcttcctggggacccttctgtgtgcggtgtggagagtagcttagga

SEQ ID NO: 129277 - DNA, 406 bp, Homo sapiens
gcaaattcctcattaaagtttcatccaaggaataaacaaagatgtaaaggtcccccactaccgttccctgtgtccacccctggtcctcaactgctgctacagccccgagatttcctaacactctcagtttagggagaggagggggtagtaaggaagtaggggagcagcagccagtgaggcgggacaagaatgctgggagagcggggcgtcctggaagccaagagaacaaggcagagagggcaagattagcatcgccagaggctgctgagacactgagtaagatgagggtgcaaaggaacccttagtgctcagctctgtgcaggcagagtcagccagtggtggggacacacgacagaatggggtggtgggcagtgaatgggaggtgtgcggaggaagtatgcctaga

SEQ ID NO: 129278 - DNA, 332 bp, Homo sapiens
gttaaacaaggataatacggcttcactaaatatgaaggaactcacacttaaagatgtggaatgtaaattctccaaaatgaaaactacttatgaagaggttacaaccaaattagaagaatataaagaagcctttgcagcagcattgaacgctaacaattccatgtcaaaaaaattaacgaaatctaataagaaaatagcaatgatcagcaccaagctccttatggagaaagagtgggtgaaatattttctcagcactcttcctacaaggcgaggtcaagagtcaccttgtgttgaaaatcttactagtatagtactcaacagtaaatatattc

SEQ ID NO: 129279 - DNA, 294 bp, Homo sapiens
actatctaaatgaacatgtgccaagatccttttatgttgagaagaaagattaaaagaatcatcttaattaaaatagcattgtatacaaaattgagctttaaatacgactccaaaataaataccaatagggatctttttttaaagttagtaagccaattctaaaatcttaatagaagagcaatggtgcattaagagtcaagataattctgaagatgacaaaaatgaaaggtatttaccttacctaatataagtgcagagcatacatttatattcattaagaaagggtgttcatgg

SEQ ID NO: 129280 - DNA, 275 bp, Homo sapiens
ggaaaatggcaacctaaaggtgcattatctaagaggaagaggaatcttcagattcctagatgtatcttctctaagccagtgctgctgaccttacctcaactactggaggacaacctgagccacaaaaagtcatttaagttgcaaaggcaaaaagagctctttctgtagcatcatgggtggtgaagtgcaagctccgcgggtccagatcaccagggctcaattccaggtctcccacctacccatcaggccaccttgggcagttagttagcctctct

SEQ ID NO: 129281 - DNA, 697 bp, Homo sapiens
cccaggacttgggtgtgtattggtgagggttggggtactctatgttgagtactcttaggagacacataactctgggccttaacagttaaggccaaagtcagttctttattcagtgctccttctttgctgctcaaattttttataccgagtgccatggagtttaaagaatagtgaaaaatcttcatggagacattggcctttgagtcaagtgtacctcctttagcacaactgactcaaagctcgattcctaaatctcatctaaatctccttgagattttaactagtaaagaagtgaggggctgaagagggtggtggtgggaactgagacaaaagcataaccctgtgttaggtggggaggcaaatttgagaatggctgtgtgtgccatgtggctggacacagtgcacatggagggaaataatagagatggcaagggtcattttatgcaaggatatgaaactcaactggagagttttgactgtgagacccccccctcagacggaattttgtctctgagactcccctcatgagagaccccaccaaatctatttttcaggcagtaggtaaaaatcatctttataaaatgtaaataacagcattttattcccctacttcagatcctttagtcaattcccactgctctcaggaaaaaatgggaatcttttcatatcaccaacaggccatagccttggcaggtga

SEQ ID NO: 129282 - DNA, 733 bp, Homo sapiens
gtgatacaagtaatttttttctctttaaacaatgaataataaaattacctacctcctgtgttttttgtgaggagtaaattaaaaaattatttccagttcttctccatatgcatttagcttgtttacttttataatctaatcacagccacttcatgtaaatagtatatctttaacttgttgagaggtgagtagacttcattcccatggcaaagtcttccttaaatgaattcaacacaattcctattgaaatcccaacagggttttaatgttgaaacttaaccaaatttactttcttttcctggaataataaatccaacatctctaagtacttagcatatatggacactgaattcaattcagttatatatgtatgacattatatatgttgaattatatgtatatgttgaattcatttgtaaaatgatacatgtacatgtgaggacgtccaggatagttttgaaatgagaaatgagagcagcatttccttggtgtcgtgaaaatatattatacatttattaaatattgaagaagtgtgggctgggcgtggtggctcacgcctgtaatcccagcactttgggaagctgaggctggtggatcacctgaggtcaggagttcgagaccagactgaccaacatggtgaaaccccgtccctactaaaaatacaaaaaattagccaggcatgggacaggaggctgaggaaggagaatcacttgaacctgggagatggaggttg

SEQ ID NO: 129283 - DNA, 738 bp, Homo sapiens
atggtgttctaatgttatgtgtagcacctgccatgtagagtcagggaattcgttttccgggtgaggttcctggctagctctaagattctgtaattctatgagggataaagcgttttagatgtgtttctccccattgtgccaggaaaacctggcagaggccataagttccttaattaaatcaaagtaccaatgttacagttgagttatatctcccccactgactctgcatacacactattggttggatactgtactgttgaagtccccaagttgactccaatttcgacttagctggattgaatgcggtcaataaggggttgcaccatgagctaaagtagaaaggtaaagtgatttaggcttctctaatatgctgtggaagtcagatcgactcaacaagagtttatacttaaatacattttaagttacgtgctcaggattttacaagcaccatggaagaatcaaaagaaacgtaagacagttttgcactgagaaacttaggctgagtgaccaactcacataaaattattagtcatctacctgaggcagaatatgatgaaacactaaagagcacagtttaagacaagacccagaaggtcagcccgtagatggggaaaggagaatggcaccatgtaaagaggaggtagacatgggttatgaaagacagattgatctgagagggaggagtgggaggtgagtggagtgttgggtacaaaaccttgggatagttgttgtaaagga

SEQ ID NO: 129284 - DNA, 181 bp, Homo sapiens
ccatcaccaccagccaaagacttaagtcattcctgactcttgctcccaagctcagcatccactccaccctagtcctctcagtgctgcttctgaaaagaatgtatcctgaatccaaccatttctcaccgattctactgctactgtcctctgccagcctacaggaggaaaagcaaggcttaca

SEQ ID NO: 129285 - DNA, 223 bp, Homo sapiens
gtctgttttatctgttgttcaagcaaattctttaaaacacttaaaatagttcagttcttcagttggttgaaatttatatggccatttcttttctaagcagtactctcagataaacaccagaatgctggtctatggacttcagtttgaaatcaatagtttactgtcttgctggaaggaggaaagtgatcttactgttgtggaaaatatatcactgcagaatcta

SEQ ID NO: 129286 - DNA, 364 bp, Homo sapiens
aggtggcaggtggggcggctacgtccaaggctaggctaagggtggagactctctgtatacacagggcagctgaatgagctgtgagctcaagccaggggaccacaggagtcctgattcccaggaccacagggacctgtcacctccccctgctatagttgtggcagcatggatgggccccagggtgctggacagagctcagctgcggagtctcctgagggtttggcacaggtaccaagagccctgtgtcctaggctgtgagaggaccccaggcgctcaaacatgtggggatccatgtaccccggctcgcccccatccaaggaggtgggtcacagctgtccccactgcaaaggaggctgacaagctg

SEQ ID NO: 129287 - DNA, 441 bp, Homo sapiens
taacccaatctgagaatgtcaagaaaaccttagcatgttaacataacctcagagattctacaaaggtctcccagaagaaacgatgcctaaataagacttagtgtggtcatatagaaggagagaaagggtattaatagtaaagagaaggagaaggagtggagccaatgcccagttcagttttgaactgcctccttgatacttccaagaggagattctgccgtcaggtagttagagaaacaagtcttaatctcaggagagacagctagactgtaaacacagatttgggaataatcactagataagcagaaatgagggactgtttacatgtcaaaattggaaggaaagccttgaaatttagtctgataaactaaagaaactccctaaacaatttgccagagagaaaaatacagaggaaaatttaaaacaaaatataaggctgca

SEQ ID NO: 129288 - DNA, 156 bp, Homo sapiens
aaactcttctgagacatgatactgttactgggatgggaaggctaaaattattgcatattttaaaatctggaagggtagaatttactgactcctaaatttaccctttcctgaaatgggagaaatgcaggtaataatatttatggtcagttctgtttt

SEQ ID NO: 129289 - DNA, 318 bp, Homo sapiens
accaaataaggtcaacttatgtccagccgagtagccaggtaccctggccaagcaagagtttactagactagacttgaccttcgtagagtctctcatgccttttgtcaaggaatttttatttattagtcattttattttcattaaaaaaaacccctccatatggattaaagacttaaatgtaaaacctaaaactaggctggtcatggagactcatgcctgtaatcccagcactttgggaggccgaggcaggtggatcacgaggtcaggagttcaagaccagcctggccaatatggtgaaaccctgtctctactaaaaat

SEQ ID NO: 129290 - DNA, 265 bp, Homo sapiens
tttctctgcctcccagattcaagcgattctcctgcattcaagtgattccccacctcagcctccctagtagctgggatacaggcacacaccaccacagcaggctaatttttttgtatttttagtagagacggggtttcaccatgttgaccaggctgttctcaaactcctgaccgcaggaagatcacttgagcctagtttaaggttgcagtaagctatgattgcaccactgaaatccagcctgggtgacagagcgaaacctcatctc

SEQ ID NO: 129291 - DNA, 153 bp, Homo sapiens
ctaccccctggcctggcctggtcaaaagggtgcacagagcccagccattctagaaaaggctactctttgcacccctctgctcagagacccctcctgatggattatgtctggggtccaggaatagcgatggtttcacatcccctgaaacatacc

SEQ ID NO: 129292 - DNA, 770 bp, Homo sapiens
atatgtcattatgtctgattttatttatttcttttaaaatctagccattatctccgtcatgccctttgatttgtttcagaagaaagctgattggcaggcggggtaaaacagagggaggcagcttttcagtagacttttcaaacacatattgaggtgatactcactcctggctaatccaggaatgccattaattagttaagctcatgtcttaactaggagtcttctcctcaataagcaattcacttctcttcctggtctatccctcaaaactaagaatgcgtttaccaaacaagattatcttacagctacagagatcacactccacatattcttaacctaaatattttattcactgatcttgcagagaaaaatttgtttggacaagttaacagttttaactggaatttatgttttaggaggaggataaactactatttctatgcaaatattactatacttttagaatccatgtgaatagtataaaatgatttttctctaaagcctagaatcattaatgtaatggttaaacatttctgcaataataaaacataaaatacgtggaaatactttatatattcaagttttaacaatcatttaaacatattaaaggtgatccaattttcagtcttgaaggaaggtcattattctttcatgtcaattctttcctcatgctcttcttactgattcctgattactgattaaaggatgtgttgtacaaggagggaattttggaaaattcacaaatacatggaaattaaacaacatactcc

SEQ ID NO: 129293 - DNA, 549 bp, Homo sapiens
tgggaggtaattgaatcacagggacgggtctttcccatattgttcttgtgatagtgaataagtctcatgagctctgaaggctttacaaatgagagtttcccttcacaagccctctctctccctctctttgcctgctgccatccatgtaagacatgatttgttcctccttgtcttccaccatgattgtgaggctccccagccatgtggaagtgtaagtccaattaaacctctttcttttgtaaattgcccagtcttgggtatgtctttatcagcagcatgaaaacggactaatacagtgatagtatttgaaaaggggcctttgggaggtaaacaaggttaaacaaggtcatgaggaccctaatccaataggatttgtgcccttatgaaaacagggagagacaaaccagagctcattggctatctcttccatgttgggacacacaaagaagatggccatctccaagacagaaatgtgatcatgctggcaccttgaccctgaacttctagcctttggaactgtgaaaataaatttgttttttaagccaccca

SEQ ID NO: 129294 - DNA, 350 bp, Homo sapiens
aaagatggaaaagatgaaactatctctgtttgcagatgacagaactgcttctgtgacaattcaagaaacatcaatgaaaaaaacatcctgctaaaaactgtaaagataaatgagtaattaagagaaattagaagtagattagaaaatttacatataattgcagatgtaatggtaaaattcaattaacaaaagaccataatgttagaaaaaaaaccaaacaaactaaaaacatctgacaagtaaaattccagataatttggagggagagggatggcagtagaaggcaaggaaacaaaatgtaatagagtttgttaaattattaatgctgactgagatgcatgtctgtcaga

SEQ ID NO: 129295 - DNA, 455 bp, Homo sapiens
tccataatgtgtgccaccagcacgctggctcatttttggtatttttactagagatggggtttcactatgttggccaggctggtctcgaactcctgaccttaggtgatctgcctgcctcagcctcccacagtgctgggattacagatgtgagccaccaccccagcctggaatttttaatctaaaagttacctgcaagggcattgaatttatgtaatttagccattttctcactctatgtccttaagcaagttatttaatccctctatgcacctcagttttcccatctacaaaatgagatacagtagggtcattgtaagttaaatgcagagattaaaaagcacttaagactgtatttgatgtgatggactgaatagcatctcctccctaaaattcatgtgctgtgagaaatgagtttctgttgtttgtttttattatggctgcttgagcagactaat

SEQ ID NO: 129296 - DNA, 588 bp, Homo sapiens
aagtctaaactagtagcttactaatttaggagtactggtgcagctacgatccagacagcagcctgttctctgagcttctccattccatggcttatccagacttctcatttatcactctctgggttctatgaaattgtggtgcaaagagtaaacaccctcaaccatagtaatgtatacttcaagataaataattccacatttcctatataaagttgttgaattttgattcaaaaatgcgtaagtattccaataagaaaaactttgtatgtagtgatttctatgtaaaaatattgttattattattatattcaaatggtttatatgttttcattgtcactcagttaagcagccaattctgttagctggtaattccacaaagagaagccatctgccccaggagcaacagaccaagctgccttggtctgagagggtgcatctgtggaactcttgcgcaacttacattttatgtcaccttttgattttactcccaagatactgtgaaaatgttgcacttggaatttatttatggctataacttataatattcattttaataataaagattgtctttgtaattacatagaaatt

SEQ ID NO: 129297 - DNA, 1204 bp, Homo sapiens
tccagggtaaattcactcttaagacagccaaaccactacatgccctctcccaagtgggagaggcccctaagcctctgagcagctgatacacccccaggtcaacagagtgactatgagcccatgctcaggacctgagaaacagccttgcaggccccatccaccacagacatgctcctggcctgcccaggagccctctgcctttaataagggcctgagaaacagtcccacaggctgcccccagcaggcacaccaccgagtgggccttgcacctgtctctcagacctgagagacaagcagctgtgtatgcccaagtctcagggccaagaaacaaccctgggagcttactctggccagcagactgtcaggccagctaagcagccacatacctatgtcccagcttgaggaacagccctttaggccacccccgacagaaacactcccaggccaactaagcagctgtgcgaccttgcatgagcctgagaaatagtcctgtatccattcccagcagatgcacctccagaccagccaatcagccatgaatgtccatgtcctggacctaagaaagagctccatgggctactcccagaagacatgcccttaggccagccgagcagcctcgtgtccacatcctggctcatagaagcagtcccctgggcttcccctggcaggcaccacccaggccagctgagcagcagtgtgcccacatcctgagctagaatagctctatggactacccccagcagacacacatccgggacagctgagaagtcatttgactgtatcccaggcctgagaaacccccttcttggccagccctggcaaagatattttcagtccagcttagcagctatgcagctatatatttggcccatgagtttccccccagcagactggccacaggccagatgagcagctgtgtacccacataccaggtatgggaaacagcccttcaggccactcctggagtgcattcttccaggccaggcaaacagctgtgtgcctgcatcctgggcctgagaaactgtcctgcaaagcacatctggcagtcatgccctggttgagcagctgcatccccatgctcctggctagagtgacagcaccatggccagccgcataaagccatactccaagttttctgacccactgtgtgcctgcacacacccctaccctgcgaacctatgagggatcctctagatcaccacca

SEQ ID NO: 129298 - DNA, 574 bp, Homo sapiens
ctctggcactgcagcatctagtactactgaggtgtaagcgcttacacctcagtagtacccatgacaacatttatttaattgaccaaacacgaacattatagaggaaggtgatcatttaaatgatatacttgaaattcatctgagtaaggaagctgagaacagtcaaagaagctaatttaaaaaataaaaataaataaaaagaaccacctaatccgctgatttctaatcatgccgagtgcttatctctcctgccaggcatacagcgagcgccttgcagagtctcacagcggcactgtcttctcttttgcagcactccgtacaaagtgagacctgtggccatcaagcaactctccggtaaggccctgctgtcgttttttaaactaaaagaaggaaaaagaaatcttgagcttgcccctgtgataaaatatatactagttaagcatttgaatctaagcatttgaaatatatatgagttacctttgaagcatttaactatatgttagttaagcatttgaatctgcatttgaagccgatacaactgcagaatctgaaccttgtactactgagggctctg

SEQ ID NO: 129299 - DNA, 625 bp, Homo sapiens
cgcctcccgcggcggctggcgtcgggaaagtacagtaaaaagtccgagtgcagccgccgggcgcaggatgggatccggctcctccagctaccggcccaaggccatctacctggacatcgatggacgcattcagaaggtaatcttcagcaagtactgcaactccagcgacatcatggacctgttctgcatcgccaccggcctgcctcggaacacgaccatctccctgctgaccaccgacgacgccatggtctccatcgaccccaccatgcccgcgaattcagaacggaatgagctcattctctatacatcactccgtaacttgttgtttttacctagtaaggagtcatgggcgtcccaccagcactccgtacaaagtgagacctgtggccatcaagcaactctccggtaaggccctgctgtcgttttttaaactaaaagaaggaaaaagaaatcttgagcttgcccctgtgataaaatatatactagttaagcatttgaatctaagcatttgaaatatatatgagttacctttgaagcatttaactatatgttagttaagcatttgaatctgcatttgaagccgatacaactgcagaatctgaaccttgtactactgagggctctg

SEQ ID NO: 129300 - DNA, 1852 bp, Homo sapiens
  misc_feature (1819)..(1820): n is a, c, g, or t
  misc_feature (1828)..(1828): n is a, c, g, or t
cgcctcccgcggcggctggcgtcgggaaagtacagtaaaaagtccgagtgcagccgccgggcgcaggatgggatccggctcctccagctaccggcccaaggccatctacctggacatcgatggacgcattcagaaggtaatcttcagcaagtactgcaactccagcgacatcatggacctgttctgcatcgccaccggcctgcctcggaacacgaccatctccctgctgaccaccgacgacgccatggtctccatcgaccccaccatgcccgcgaattcagaacgcactccgtacaaagtgagacctgtggccatcaagcaactctccgagagagaagaattaatccagagcgtgctggcgcaggttgcagagcagttctcaagagcattcaaaatcaatgaactgaaagctgaagttgcaaatcacttggctgtcctagagaaacgcgtggaattggaaggactaaaagtggtggagattgagaaatgcaagagtgacattaagaagatgagggaggagctggcggccagaagcagcaggaccaactgcccctgtaagtacagttttttggataaccacaagaagttgactcctcgacgcgatgttcccacttaccccaagtacctgctctctccagagaccatcgaggccctgcggaagccgacctttgacgtctggctttgggagcccaatgagatgctgagctgcctggagcacatgtaccacgacctcgggctggtcagggacttcagcatcaaccctgtcaccctcaggaggtggctgttctgtgtccacgacaactacagaaacaaccccttccacaacttccggcactgcttctgcgtggcccagatgatgtacagcatggtctggctctgcagtctccaggagaagttctcacaaacggatatcctgatcctaatgacagcggccatctgccacgatctggaccatcccggctacaacaacacgtaccagatcaatgcccgcacagagctggcggtccgctacaatgacatctcaccgctggagaaccaccactgcgccgtggccttccagatcctcgccgagcctgagtgcaacatcttctccaacatcccacctgatgggttcaagcagatccgacagggaatgatcacattaatcttggccactgacatggcaagacatgcagaaattatggattctttcaaagagaaaatggagaattttgactacagcaacgaggagcacatgaccctgctgaagatgattttgataaaatgctgtgatatctctaacgaggtccgtccaatggaagtcgcagagccttgggtggactgtttattagaggaatattttatgcagagcgaccgtgagaagtcagaaggccttcctgtggcaccgttcatggaccgagacaaagtgaccaaggccacagcccagattgggttcatcaagtttgtcctgatcccaatgtttgaaacagtgaccaagctcttccccatggttgaggagatcatgctgcagccactttgggaatcccgagatcgctacgaggagctgaagcggatagatgacgccatgaaagagttacagaagaagactgacagcttgacgtctggggccaccgagaagtccagagagagaagcagagatgtgaaaaacagtgaaggagactgtgcctgaggaaagcggggggcgtggctgcagttctggacgggctggccgagctgcgcgggatccttgtgcagggaagagctgccctgggcacctggcaccacaagaccatgttttctaagaaccattttgttcactgatacaaaaaaaaaaagtcgnncggccgcnaatttagtagtagtaggcggcagc

SEQ ID NO: 129301 - DNA, 2112 bp, Homo sapiens
cggctaggtagcgaggcgggtggttgactggacatcgatggacgcattcagaaggtaatcttcagcaagtactgcaactccagcgacatcatggacctgttctgcatcgccaccggcctgcctcggaacacgaccatctccctgctgaccaccgacgacgccatggtctccatcgaccccaccatgcccgcgaattcagaacgcactccgtacaaagtgagacctgtggccatcaagcaactctccgagagagaagaattaatccagagcgtgctggcgcaggttgcagagcagttctcaagagcattcaaaatcaatgaactgaaagctgaagttgcaaatcacttggctgtcctagagaaacgcgtggaattggaaggactaaaagtggtggagattgagaaatgcaagagtgacattaagaagatgagggaggagctggcggccagaagcagcaggaccaactgcccctgtaagtacagttttttggataaccacaagaagttgactcctcgacgcgatgttcccacttaccccaagtacctgctctctccagagaccatcgaggccctgcggaagccgacctttgacgtctggctttgggagcccaatgagatgctgagctgcctggagcacatgtaccacgacctcgggctggtcagggacttcagcatcaaccctgtcaccctcaggaggtggctgttctgtgtccacgacaactacagaaacaaccccttccacaacttccggcactgcttctgcgtggcccagatgatgtacagcatggtctggctctgcagtctccaggagaagttctcacaaacggatatcctgatcctaatgacagcggccatctgccacgatctggaccatcccggctacaacaacacgtaccagatcaatgcccgcacagagctggcggtccgctacaatgacatctcaccgctggagaaccaccactgcgccgtggccttccagatcctcgccgagcctgagtgcaacatcttctccaacatcccacctgatgggttcaagcagatccgacagggaatgatcacattaatcttggccactgacatggcaagacatgcagaaattatggattctttcaaagagaaaatggagaattttgactacagcaacgaggagcacatgaccctgctgaagatgattttgataaaatgctgtgatatctctaacgaggtccgtccaatggaagtcgcagagccttgggtggactgtttattagaggaatattttatgcagagcgaccgtgagaagtcagaaggccttcctgtggcaccgttcatggaccgagacaaagtgaccaaggccacagcccagattgggttcatcaagtttgtcctgatcccaatgtttgaaacagtgaccaagctcttccccatggttgaggagatcatgctgcagccactttgggaatcccgagatcgctacgaggagctgaagcggatagatgacgccatgaaagagttacagaagaagactgacagcttgacgtctggggccaccgagaagtccagagagagaagcagagatgtgaaaaacagtgaaggagactgtgcctgaggaaagcggggggcgtggctgcagttctggacgggctggccgagctgcgcgggatccttgtgcagggaagagctgccctgggcacctggcaccacaagaccatgttttctaagaaccattttgttcactgatacaaaaaaaaaaaaaggaattcatgatgctgtacagaattttatttttaaactgtcttttaaataatatattcttatacggaaatgggtactgtacttcttctttggtagagttgtgtatgctgcttccggtaagttctctcatggagacgaaggacactgtgcttttcccccagatgtatcttagagcaattgaccagtgtgatgcggtgcgtacgtccctgtaaattcagcattaaatgtcagcacggtgccctgagtgcaaggacatgcacgggtcctgtgtttctgagcagagggggacgtcagtgccgtgtgtgggacatctggggactgaggcaggttggccagactgtaggtcgtgtgtcggagcaaacgcacccatgaccatggg

SEQ ID NO: 129302 - DNA, 2045 bp, Homo sapiens
cgcctcccgcggcggctggcgtcgggaaagtacagtaaaaagtccgagtgcagccgccgggcgcaggatgggatccggctcctccagctaccggcccaaggccatctacctggacatcgatggacgcattcagaagcactccgtacaaagtgagacctgtggccatcaagcaactctccgagagagaagaattaatccagagcgtgctggcgcaggttgcagagcagttctcaagagcattcaaaatcaatgaactgaaagctgaagttgcaaatcacttggctgtcctagagaaacgcgtggaattggaaggactaaaagtggtggagattgagaaatgcaagagtgacattaagaagatgagggaggagctggcggccagaagcagcaggaccaactgcccctgtaagtacagttttttggataaccacaagaagttgactcctcgacgcgatgttcccacttaccccaagtacctgctctctccagagaccatcgaggccctgcggaagccgacctttgacgtctggctttgggagcccaatgagatgctgagctgcctggagcacatgtaccacgacctcgggctggtcagggacttcagcatcaaccctgtcaccctcaggaggtggctgttctgtgtccacgacaactacagaaacaaccccttccacaacttccggcactgcttctgcgtggcccagatgatgtacagcatggtctggctctgcagtctccaggagaagttctcacaaacggatatcctgatcctaatgacagcggccatctgccacgatctggaccatcccggctacaacaacacgtaccagatcaatgcccgcacagagctggcggtccgctacaatgacatctcaccgctggagaaccaccactgcgccgtggccttccagatcctcgccgagcctgagtgcaacatcttctccaacatcccacctgatgggttcaagcagatccgacagggaatgatcacattaatcttggccactgacatggcaagacatgcagaaattatggattctttcaaagagaaaatggagaattttgactacagcaacgaggagcacatgaccctgctgaagatgattttgataaaatgctgtgatatctctaacgaggtccgtccaatggaagtcgcagagccttgggtggactgtttattagaggaatattttatgcagagcgaccgtgagaagtcagaaggccttcctgtggcaccgttcatggaccgagacaaagtgaccaaggccacagcccagattgggttcatcaagtttgtcctgatcccaatgtttgaaacagtgaccaagctcttccccatggttgaggagatcatgctgcagccactttgggaatcccgagatcgctacgaggagctgaagcggatagatgacgccatgaaagagttacagaagaagactgacagcttgacgtctggggccaccgagaagtccagagagagaagcagagatgtgaaaaacagtgaaggagactgtgcctgaggaaagcggggggcgtggctgcagttctggacgggctggccgagctgcgcgggatccttgtgcagggaagagctgccctgggcacctggcaccacaagaccatgttttctaagaaccattttgttcactgatacaaaaaaaaaaaaaggaattcatgatgctgtacagaattttatttttaaactgtcttttaaataatatattcttatacggaaatgggtactgtacttcttctttggtagagttgtgtatgctgcttccggtaagttctctcatggagacgaaggacactgtgcttttcccccagatgtatcttagagcaattgaccagtgtgatgcggtgcgtacgtccctgtaaattcagcattaaatgtcagcacggtgccctgagtgcaaggacatgcacgggtcctgtgtttctgagcagagggggacgtcagtgccgtgtgtgggacatctggggactgaggcaggttggccagactgtaggtcgtgtgtcggagcaaacgcacccatgaccatggg

SEQ ID NO: 129303 - DNA, 1990 bp, Homo sapiens
cgcctcccgcggcggctggcgtcgggaaagtacagtaaaaagtccgagtgcagccgccgggcgcaggatgggatccggctcctccagctaccggcccaaggccatctacctggacatcgatggacgcattcagaagcactccgtacaaagtgagacctgtggccatcaagcaactctccgagcattcaaaatcaatgaactgaaagctgaagttgcaaatcacttggctgtcctagagaaacgcgtggaattggaaggactaaaagtggtggagattgagaaatgcaagagtgacattaagaagatgagggaggagctggcggccagaagcagcaggaccaactgcccctgtaagtacagttttttggataaccacaagaagttgactcctcgacgcgatgttcccacttaccccaagtacctgctctctccagagaccatcgaggccctgcggaagccgacctttgacgtctggctttgggagcccaatgagatgctgagctgcctggagcacatgtaccacgacctcgggctggtcagggacttcagcatcaaccctgtcaccctcaggaggtggctgttctgtgtccacgacaactacagaaacaaccccttccacaacttccggcactgcttctgcgtggcccagatgatgtacagcatggtctggctctgcagtctccaggagaagttctcacaaacggatatcctgatcctaatgacagcggccatctgccacgatctggaccatcccggctacaacaacacgtaccagatcaatgcccgcacagagctggcggtccgctacaatgacatctcaccgctggagaaccaccactgcgccgtggccttccagatcctcgccgagcctgagtgcaacatcttctccaacatcccacctgatgggttcaagcagatccgacagggaatgatcacattaatcttggccactgacatggcaagacatgcagaaattatggattctttcaaagagaaaatggagaattttgactacagcaacgaggagcacatgaccctgctgaagatgattttgataaaatgctgtgatatctctaacgaggtccgtccaatggaagtcgcagagccttgggtggactgtttattagaggaatattttatgcagagcgaccgtgagaagtcagaaggccttcctgtggcaccgttcatggaccgagacaaagtgaccaaggccacagcccagattgggttcatcaagtttgtcctgatcccaatgtttgaaacagtgaccaagctcttccccatggttgaggagatcatgctgcagccactttgggaatcccgagatcgctacgaggagctgaagcggatagatgacgccatgaaagagttacagaagaagactgacagcttgacgtctggggccaccgagaagtccagagagagaagcagagatgtgaaaaacagtgaaggagactgtgcctgaggaaagcggggggcgtggctgcagttctggacgggctggccgagctgcgcgggatccttgtgcagggaagagctgccctgggcacctggcaccacaagaccatgttttctaagaaccattttgttcactgatacaaaaaaaaaaaaaggaattcatgatgctgtacagaattttatttttaaactgtcttttaaataatatattcttatacggaaatgggtactgtacttcttctttggtagagttgtgtatgctgcttccggtaagttctctcatggagacgaaggacactgtgcttttcccccagatgtatcttagagcaattgaccagtgtgatgcggtgcgtacgtccctgtaaattcagcattaaatgtcagcacggtgccctgagtgcaaggacatgcacgggtcctgtgtttctgagcagagggggacgtcagtgccgtgtgtgggacatctggggactgaggcaggttggccagactgtaggtcgtgtgtcggagcaaacgcacccatgaccatggg

SEQ ID NO: 129304 - DNA, 2897 bp, Homo sapiens
actaatgtggcatcctgcctgtggagagatgcacagactgacccatccagacagcacagtggagcacgctctttcaacccacctgcacctgaccacagtgggcactcaggaagaaatgggtagagcgagtgaatgaatgaatgagcaagtcaaagacatgaacacatgacatctgactgtctccctgtgtgcttgtgtttcattctgatacatccctccctaaattcatctgctgagacaaaggattttaactggtgtttctacactgctttccccaagatgtggcaacccacaccccaccagcaacacctgtgatgtctgccgccctgtgtccttgtagcacctctcttaccaggtttccaaatgttgctaaactgctgggtcaaggaatagcatctgcctggggttagcctcacttgtgtggattttttcttactcctcttggccactgactgctcctggtctatgcctgttccattggctgcactgtccttccctgcctcttggccagaggctgtcgtgtgtcagcgacagaaacgttttggctgtcgtctgcacagccagtattctctccccatcacgctgggcctcgtgatgatggggggaggggggttgacatcacagagatcccagtgcattttcgacttcatcactgtcaccatcctctcttgttcatttgggggatacagccgccatcagctcaacagagcaaaagagagggaggccacctgcatccgccaggtgctgaaatgggtccaggcagctgccagagtctgacatttccaacttgatacagcacctgtgatcggcagtagtacccatgacaacatttatttaattgaccaaacacgaacattatagaggaaggtgatcatttaaatgatatacttgaaattcatctgagtaaggaagctgagaacagtcaaagaagctaatttaaaaaataaaaataaataaaaagaaccacctaatccgctgatttctaatcatgccgagtgcttatctctcctgccaggcatacagcgagcgccttgcagagtctcacagcggcactgtcttctcttttgcagcactccgtacaaagtgagacctgtggccatcaagcaactctccgagagagaagaattaatccagagcgtgctggcgcaggttgcagagcagttctcaagagcattcaaaatcaatgaactgaaagctgaagttgcaaatcacttggctgtcctagagaaacgcgtggaattggaaggactaaaagtggtggagattgagaaatgcaagagtgacattaagaagatgagggaggagctggcggccagaagcagcagtacctgctctctccagagaccatcgaggccctgcggaagccgacctttgacgtctggctttgggagcccaatgagatgctgagctgcctggagcacatgtaccacgacctcgggctggtcagggacttcagcatcaaccctgtcaccctcaggaggtggctgttctgtgtccacgacaactacagaaacaaccccttccacaacttccggcactgcttctgcgtggcccagatgatgtacagcatggtctggctctgcagtctccaggagaagttctcacaaacggatatcctgatcctaatgacagcggccatctgccacgatctggaccatcccggctacaacaacacgtaccagatcaatgcccgcacagagctggcggtccgctacaatgacatctcaccgctggagaaccaccactgcgccgtggccttccagatcctcgccgagcctgagtgcaacatcttctccaacatcccacctgatgggttcaagcagatccgacagggaatgatcacattaatcttggccactgacatggcaagacatgcagaaattatggattctttcaaagagaaaatggagaattttgactacagcaacgaggagcacatgaccctgctgaagatgattttgataaaatgctgtgatatctctaacgaggtccgtccaatggaagtcgcagagccttgggtggactgtttattagaggaatattttatgcagagcgaccgtgagaagtcagaaggccttcctgtggcaccgttcatggaccgagacaaagtgaccaaggccacagcccagattgggttcatcaagtttgtcctgatcccaatgtttgaaacagtgaccaagctcttccccatggttgaggagatcatgctgcagccactttgggaatcccgagatcgctacgaggagctgaagcggatagatgacgccatgaaagagttacagaagaagactgacagcttgacgtctggggccaccgagaagtccagagagagaagcagagatgtgaaaaacagtgaaggagactgtgcctgaggaaagcggggggcgtggctgcagttctggacgggctggccgagctgcgcgggatccttgtgcagggaagagctgccctgggcacctggcaccacaagaccatgttttctaagaaccattttgttcactgatacaaaaaaaaaaaaaggaattcatgatgctgtacagaattttatttttaaactgtcttttaaataatatattcttatacggaaatgggtactgtacttcttctttggtagagttgtgtatgctgcttccggtaagttctctcatggagacgaaggacactgtgcttttcccccagatgtatcttagagcaattgaccagtgtgatgcggtgcgtacgtccctgtaaattcagcattaaatgtcagcacggtgccctgagtgcaaggacatgcacgggtcctgtgtttctgagcagagggggacgtcagtgccgtgtgtgggacatctggggactgaggcaggttggccagactgtaggtcgtgtgtcggagcaaacgcacccatgaccatggg

SEQ ID NO: 129305 - DNA, 2098 bp, Homo sapiens
cgcctcccgcggcggctggcgtcgggaaagtacagtaaaaagtccgagtgcagccgccgggcgcaggatgggatccggctcctccagctaccggcccaaggccatctacctggacatcgatggacgcattcagaaggtaatcttcagcaagtactgcaactccagcgacatcatggacctgttctgcatcgccaccggcctgcctcggaacacgaccatctccctgctgaccaccgacgacgccatggtctccatcgaccccaccatgcccgcgaattcagaacgcactccgtacaaagtgagacctgtggccatcaagcaactctccgagagagaagaattaatccagagcgtgctggcgcaggttgcagagcagttctcaagagcattcaaaatcaatgaactgaaagctgaagttgcaaatcacttggctgtcctagagaaacgcgtggaattggaaggactaaaagtggtggagattgagaaatgcaagagtgacattaagaagatgagggaggagctggcggccagaagcagcaggaccaactgcccctgtaagtacagttttttggataaccacaagaagttgactcctcgacgcgatgttcccacttaccccaagtacctgctctctccagagaccatcgaggccctgcggaagccgacctttgacgtctggctttgggagcccaatgagatgctgagctgcctggagcacatgtaccacgacctcgggctggtcagggacttcagcatcaaccctgtcaccctcaggaggtggctgttctgtgtccacgacaactacagaaacaaccccttccacaacttccggcactgcttctgcgtggcccagatgatgtacagcatggtctggctctgcagtctccaggagaagttctcacaaacggatatcctgatcctaatgacagcggccatctgccacgatctggaccatcccggctacaacaacacgtaccagatcaatgcccgcacagagctggcggtccgctacaatgacatctcaccgctggagaaccaccactgcgccgtggccttccagatcctcgccgagcctgagtgcaacatcttctccaacatcccacctgatgggttcaagcagatccgacagggaatgatcacattaatcttggccactgacatggcaagacatgcagaaattatggattctttcaaagagaaaatggagaattttgactacagcaacgaggagcacatgaccctgctgaagatgattttgataaaatgctgtgatatctctaacgaggtccgtccaatggaagtcgcagagccttgggtggactgtttattagaggaatattttatgcagagcgaccgtgagaagtcagaaggccttcctgtggcaccgttcatggaccgagacaaagtgaccaaggccacagcccagattgggttcatcaagtttgtcctgatcccaatgtttgaaacagtgaccaagttacagaagaagactgacagcttgacgtctggggccaccgagaagtccagagagagaagcagagatgtgaaaaacagtgaaggagactgtgcctgaggaaagcggggggcgtggctgcagttctggacgggctggccgagctgcgcgggatccttgtgcagggaagagctgccctgggcacctggcaccacaagaccatgttttctaagaaccattttgttcactgatacaaaaaaaaaaaaaggaattcatgatgctgtacagaattttatttttaaactgtcttttaaataatatattcttatacggaaatgggtactgtacttcttctttggtagagttgtgtatgctgcttccggtaagttctctcatggagacgaaggacactgtgcttttcccccagatgtatcttagagcaattgaccagtgtgatgcggtgcgtacgtccctgtaaattcagcattaaatgtcagcacggtgccctgagtgcaaggacatgcacgggtcctgtgtttctgagcagagggggacgtcagtgccgtgtgtgggacatctggggactgaggcaggttggccagactgtaggtcgtgtgtcggagcaaacgcacccatgaccatggg

SEQ ID NO: 129306 - DNA, 1907 bp, Homo sapiens
cgcctcccgcggcggctggcgtcgggaaagtacagtaaaaagtccgagtgcagccgccgggcgcaggatgggatccggctcctccagctaccggcccaaggccatctacctggacatcgatggacgcattcagaaggtaatcttcagcaagtactgcaactccagcgacatcatggacctgttctgcatcgccaccggcctgcctcggaacacgaccatctccctgctgaccaccgacgacgccatggtctccatcgaccccaccatgcccgcgaattcagaacgcactccgtacaaagtgagacctgtggccatcaagcaactctccgagagagaagaattaatccagagcgtgctggcgcaggttgcagagcagttctcaagagcattcaaaatcaatgaactgaaagctgaagttgcaaatcacttggctgtcctagagaaacgcgtggaattggaaggactaaaagtggtggagattgagaaatgcaagagtgacattaagaagatgagggaggagctggcggccagaagcagcaggaccaactgcccctgtaagtacagttttttggataaccacaagaagttgactcctcgacgcgatgttcccacttaccccaagtacctgctctctccagagaccatcgaggccctgcggaagccgacctttgacgtctggctttgggagcccaatgagatgctgagctgcctggagcacatgtaccacgacctcgggctggtcagggacttcagcatcaaccctgtcaccctcaggaggtggctgttctgtgtccacgacaactacagaaacaaccccttccacaacttccggcactgcttctgcgtggcccagatgatgtacagcatggtctggctctgcagtctccaggagaagttctcacaaacggatatcctgatcctaatgacagcggccatctgccacgatctggaccatcccggctacaacaacacgtaccagatcaatgcccgcacagagctggcggtccgctacaatgacatctcaccgctggagaaccaccactgcgccgtggccttccagatcctcgccgagcctgagtgcaacatcttctccaacatcccacctgatgggttcaagcagatccgacagggaatgatcacattaatcttggccactgacatggcaagacatgcagaaattatggattctttcaaagagaaaatggagaattttgactacagcaacgaggagcacatgaccctgctgaagatgattttgataaaatgctgtgatatctctaacgaggtccgtccaatggaagtcgcagagccttgggtggactgtttattagaggaatattttatgcagagatgtgaaaaacagtgaaggagactgtgcctgaggaaagcggggggcgtggctgcagttctggacgggctggccgagctgcgcgggatccttgtgcagggaagagctgccctgggcacctggcaccacaagaccatgttttctaagaaccattttgttcactgatacaaaaaaaaaaaaaggaattcatgatgctgtacagaattttatttttaaactgtcttttaaataatatattcttatacggaaatgggtactgtacttcttctttggtagagttgtgtatgctgcttccggtaagttctctcatggagacgaaggacactgtgcttttcccccagatgtatcttagagcaattgaccagtgtgatgcggtgcgtacgtccctgtaaattcagcattaaatgtcagcacggtgccctgagtgcaaggacatgcacgggtcctgtgtttctgagcagagggggacgtcagtgccgtgtgtgggacatctggggactgaggcaggttggccagactgtaggtcgtgtgtcggagcaaacgcacccatgaccatggg

SEQ ID NO: 129307 - DNA, 1372 bp, Homo sapiens
cgcctcccgcggcggctggcgtcgggaaagtacagtaaaaagtccgagtgcagccgccgggcgcaggatgggatccggctcctccagctaccggcccaaggccatctacctggacatcgatggacgcattcagaaggtaatcttcagcaagtactgcaactccagcgacatcatggacctgttctgcatcgccaccggcctgcctcggaacacgaccatctccctgctgaccaccgacgacgccatggtctccatcgaccccaccatgcccgcgaattcagaacgcactccgtacaaagtgagacctgtggccatcaagcaactctccgagagagaagaattaatccagagcgtgctggcgcaggttgcagagcagttctcaagagcattcaaaatcaatgaactgaaagctgaagttgcaaatcacttggctgtcctagagaaacgcgtggaattggaaggactaaaagtggtggagattgagaaatgcaagagtgacattaagaagatgagggaggagctggcggccagaagcagcaggaccaactgcccctgtaagtacagttttttggataaccacaagaagttgactcctcgacgcgatgttcccacttaccccaagtacctgctctctccagagaccatcgaggccctgcggaagccgacctttgacgtctggctttgggagcccaatgagatgctgagctgcctggagcacatgtaccacgacctcgggctggtcagggacttcagcatcaaccctgtcaccctcaggaggtggctgttctgtgtccacgacaactacagaaacaaccccttccacaacttccggcactgcttctgcgtggcccagatgatgtacagcatggtctggctctgcagtctccaggagaagttctcacaaacggatatcctgatcctaatgacagcggccatctgccacgatctggaccatcccggctacaacaacacgtaccagatcaatgcccgcacagagctggcggtccgctacaatgacatctcaccgctggagaaccaccactgcgccgtggccttccagatcctcgccgagcctgagtgcaacatcttctccaacatcccacctgatgggttcaagcagatccgacagggaatgatcacattaatcttggccactgacatggcaagacatgcagaaattatggattctttcaaagagaaaatggagaattttgactacagcaacgaggagcacatgaccctgctgaagatgattttgataaaatgctgtgatatctctaacgaggtccgtccaatggaagtcgcagagccttgggtggactgtttattagaggaatattttatgcagaacgcgcctaatgggtaccgagct

SEQ ID NO: 129308 - DNA, 1338 bp, Homo sapiens
ttggtggcgttctagaggatcccattaggcgcggagaagttctcacaaacggatatcctgatcctaatgacagcggccatctgccacgatctggaccatcccggctacaacaacacgtaccagatcaatgcccgcacagagctggcggtccgctacaatgacatctcaccgctggagaaccaccactgcgccgtggccttccagatcctcgccgagcctgagtgcaacatcttctccaacatcccacctgatgggttcaagcagatccgacagggaatgatcacattaatcttggccactgacatggcaagacatgcagaaattatggattctttcaaagagaaaatggagaattttgactacagcaacgaggagcacatgaccctgctgaagatgattttgataaaatgctgtgatatctctaacgaggtccgtccaatggaagtcgcagagccttgggtggactgtttattagaggaatattttatgcagagcgaccgtgagaagtcagaaggccttcctgtggcaccgttcatggaccgagacaaagtgaccaaggccacagcccagattgggttcatcaagtttgtcctgatcccaatgtttgaaacagtgaccaagctcttccccatggttgaggagatcatgctgcagccactttgggaatcccgagatcgctacgaggagctgaagcggatagatgacgccatgaaagagttacagaagaagactgacagcttgacgtctggggccaccgagaagtccagagagagaagcagagatgtgaaaaacagtgaaggagactgtgcctgaggaaagcggggggcgtggctgcagttctggacgggctggccgagctgcgcgggatccttgtgcagggaagagctgccctgggcacctggcaccacaagaccatgttttctaagaaccattttgttcactgatacaaaaaaaaaaaaaggaattcatgatgctgtacagaattttatttttaaactgtcttttaaataatatattcttatacggaaatgggtactgtacttcttctttggtagagttgtgtatgctgcttccggtaagttctctcatggagacgaaggacactgtgcttttcccccagatgtatcttagagcaattgaccagtgtgatgcggtgcgtacgtccctgtaaattcagcattaaatgtcagcacggtgccctgagtgcaaggacatgcacgggtcctgtgtttctgagcagagggggacgtcagtgccgtgtgtgggacatctggggactgaggcaggttggccagactgtaggtcgtgtgtcggagcaaacgcacccatgaccatggg

SEQ ID NO: 129309 - DNA, 941 bp, Homo sapiens
tggttaactggcgcatcttgtctttctctgagaacagcgatctggttatggggcatttctgtctctaatgtcactgtctgctgcattccctgcagagcgaccgtgagaagtcagaaggccttcctgtggcaccgttcatggaccgagacaaagtgaccaaggccacagcccagattgggttcatcaagtttgtcctgatcccaatgtttgaaacagtgaccaagctcttccccatggttgaggagatcatgctgcagccactttgggaatcccgagatcgctacgaggagctgaagcggatagatgacgccatgaaagagttacagaagaagactgacagcttgacgtctggggccaccgagaagtccagagagagaagcagagatgtgaaaaacagtgaaggagactgtgcctgaggaaagcggggggcgtggctgcagttctggacgggctggccgagctgcgcgggatccttgtgcagggaagagctgccctgggcacctggcaccacaagaccatgttttctaagaaccattttgttcactgatacaaaaaaaaaaaaaggaattcatgatgctgtacagaattttatttttaaactgtcttttaaataatatattcttatacggaaatgggtactgtacttcttctttggtagagttgtgtatgctgcttccggtaagttctctcatggagacgaaggacactgtgcttttcccccagatgtatcttagagcaattgaccagtgtgatgcggtgcgtacgtccctgtaaattcagcattaaatgtcagcacggtgccctgagtgcaaggacatgcacgggtcctgtgtttctgagcagagggggacgtcagtgccgtgtgtgggacatctggggactgaggcaggttggccagactgtaggtcgtgtgtcggagcaaacgcacccatgaccatggg

SEQ ID NO: 129310 - DNA, 1629 bp, Homo sapiens
actaatgtggcatcctgcctgtggagagatgcacagactgacccatccagacagcacagtggagcacgctctttcaacccacctgcacctgaccacagtgggcactcaggaagaaatgggtagagcgagtgaatgaatgaatgagcaagtcaaagacatgaacacatgacatctgactgtctccctgtgtgcttgtgtttcattctgatacatccctccctaaattcatctgctgagacaaaggattttaactggtgtttctacactgctttccccaagatgtggcaacccacaccccaccagcaacacctgtgatgtctgccgccctgtgtccttgtagcacctctcttaccaggtttccaaatgttgctaaactgctgggtcaaggaatagcatctgcctggggttagcctcacttgtgtggattttttcttactcctcttggccactgactgctcctggtctatgcctgttccattggctgcactgtccttccctgcctcttggccagaggctgtcgtgtgtcagcgacagaaacgttttggctgtcgtctgcacagccagtattctctccccatcacgctgggcctcgtgatgatggggggaggggggttgacatcacagagatcccagtgcattttcgacttcatcactgtcaccatcctctcttgttcatttgggggatacagccgccatcagctcaacagagcaaaagagagggaggccacctgcatccgccaggtgctgaaatgggtccaggcagctgccagagtctgacatttccaacttgatacagcacctgtgatcggcagtagtacccatgacaacatttatttaattgaccaaacacgaacattatagaggaaggtgatcatttaaatgatatacttgaaattcatctgagtaaggaagctgagaacagtcaaagaagctaatttaaaaaataaaaataaataaaaagaaccacctaatccgctgatttctaatcatgccgagtgcttatctctcctgccaggcatacagcgagcgccttgcagagtctcacagcggcactgtcttctcttttgcagcactccgtacaaagtgagacctgtggccatcaagcaactctccgatattcatttctccagcaccatttgttgaaaagatgatcttttctcccactgaattaccatgacacctttgtggaaaatcgatgggccatgtatgtgtgagtctttttctggactccagatcctgtcgtgtgaatttacatgtcttaaaacaacagcacaccatcttgactaccgtagataaatagtaggtcttgaaatcaggtactctaagttatctctggtttcttttttctttttcaaaaatgttattgcttttattttcaaataaattttagaatcagtctatgaattgcttccaaaaaaacagtctgctaggattttgactgaagttgcattaaatatacagaccaatgtgggaagaattaatatcttaagaatgttgagtcttctggttcataaatatggtctatctccccattcatttgggtttcctttaatgtttctcaataatgtgttaccattgttaatatgaagtacttaataaatactgataaatacatcactatttcatgta

SEQ ID NO: 129311 - DNA, 995 bp, Homo sapiens
aaaagaatgctataagagagagaagcattaacaaaatggaatagtaagtcctttcctaggcactaagtactttcaatgtaaatggattaagctgctcaatcaaagacatacagtgaattccgaaaacccaaacaagatcccactataataacgtctacaagagactcactttagatttaaggacacacacaggctgaaagtgagaagatatttaatacaaatggtaaccaaaagacagcaaggttgtcctgatcccaatgtttgaaacagtgaccaagctcttccccatggttgaggagatcatgctgcagccactttgggaatcccgagatcgctacgaggagctgaagcggatagatgacgccatgaaagagttacagaagaagactgacagcttgacgtctggggccaccgagaagtccagagagagaagcagagatgtgaaaaacagtgaaggagactgtgcctgaggaaagcggggggcgtggctgcagttctggacgggctggccgagctgcgcgggatccttgtgcagggaagagctgccctgggcacctggcaccacaagaccatgttttctaagaaccattttgttcactgatacaaaaaaaaaaaaaggaattcatgatgctgtacagaattttatttttaaactgtcttttaaataatatattcttatacggaaatgggtactgtacttcttctttggtagagttgtgtatgctgcttccggtaagttctctcatggagacgaaggacactgtgcttttcccccagatgtatcttagagcaattgaccagtgtgatgcggtgcgtacgtccctgtaaattcagcattaaatgtcagcacggtgccctgagtgcaaggacatgcacgggtcctgtgtttctgagcagagggggacgtcagtgccgtgtgtgggacatctggggactgaggcaggttggccagactgtaggtcgtgtgtcggagcaaacgcacccatgaccatggg

SEQ ID NO: 129312 - DNA, 1467 bp, Homo sapiens
actaatgtggcatcctgcctgtggagagatgcacagactgacccatccagacagcacagtggagcacgctctttcaacccacctgcacctgaccacagtgggcactcaggaagaaatgggtagagcgagtgaatgaatgaatgagcaagtcaaagacatgaacacatgacatctgactgtctccctgtgtgcttgtgtttcattctgatacatccctccctaaattcatctgctgagacaaaggattttaactggtgtttctacactgctttccccaagatgtggcaacccacaccccaccagcaacacctgtgatgtctgccgccctgtgtccttgtagcacctctcttaccaggtttccaaatgttgctaaactgctgggtcaaggaatagcatctgcctggggttagcctcacttgtgtggattttttcttactcctcttggccactgactgctcctggtctatgcctgttccattggctgcactgtccttccctgcctcttggccagaggctgtcgtgtgtcagcgacagaaacgttttggctgtcgtctgcacagccagtattctctccccatcacgctgggcctcgtgatgatggggggaggggggttgacatcacagagatcccagtgcattttcgacttcatcactgtcaccatcctctcttgttcatttgggggatacagccgccatcagctcaacagagcaaaagagagggaggccacctgcatccgccaggtgctgaaatgggtccaggcagctgccagagtctgacatttccaacttgatacagcacctgtgatcggcagtagtacccatgacaacatttatttaattgaccaaacacgaacattatagaggaaggtgatcatttaaatgatatacttgaaattcatctgagtaaggaagctgagaacagtcaaagaagctaatttaaaaaataaaaataaataaaaagaaccacctaatccgctgatttctaatcatgccgagtgcttatctctcctgccaggcatacagcgagcgccttgcagagtctcacagcggcactgtcttctcttttgcagcactccgtacaaagtgagacctgtggccatcaagcaactctccgctggtgtcgaggacaagagaaccacaagccgtggccagtctgctgagagaccactgagggacagacgggttgtgggcctggagcagccccggagggaaggagcatttgaaagtggacaggtagagcccaggcccagagagccccagggctgctaccaggaaggccagcgcatccctccagagcattcaaaatcaatgaactgaaagctgaagttgcaaatcacttggctgtcctagagaaacgcgtggaattggaaggacgcaactgaaacggctggagagcctggctagccgtctacaaggaaaacatggagaagctgactgaggagcgggatctgcgcatgcagccgagaa

SEQ ID NO: 129313 - DNA, 594 bp, Homo sapiens
ccaccgcgccctaattctaacaaaaacaaatcagtcatcgtttcccttcttccaggagactgtgcctgaggaaagcggggggcgtggctgcagttctggacgggctggccgagctgcgcgggatccttgtgcagggaagagctgccctgggcacctggcaccacaagaccatgttttctaagaaccattttgttcactgatacaaaaaaaaaaaaaggaattcatgatgctgtacagaattttatttttaaactgtcttttaaataatatattcttatacggaaatgggtactgtacttcttctttggtagagttgtgtatgctgcttccggtaagttctctcatggagacgaaggacactgtgcttttcccccagatgtatcttagagcaattgaccagtgtgatgcggtgcgtacgtccctgtaaattcagcattaaatgtcagcacggtgccctgagtgcaaggacatgcacgggtcctgtgtttctgagcagagggggacgtcagtgccgtgtgtgggacatctggggactgaggcaggttggccagactgtaggtcgtgtgtcggagcaaacgcacccatgaccatggg

SEQ ID NO: 129314 - DNA, 591 bp, Homo sapiens
  misc_feature (552)..(552): n is a, c, g, or t
cgcctcccgcggcggctggcgtcgggaaagtacagtaaaaagtccgagtgcagccgccgggcgcaggatgggatccggctcctccagctaccggcccaaggccatctacctggacatcgatggacgcattcagaaggtaatcttcagcaagtactgcaactccagcgacatcatggacctgttctgcatcgccaccggcctgcctcggaacacgaccatctccctgctgaccaccgacgacgccatggtctccatcgaccccaccatgcccgcgaattcagaacgcactccgtacaaagtgagacctgtggccatcaagcaactctccgagagagaagaattaatccagagcgtgctggcgcaggttgcagagcagttctcaagagcattcaaaatcaatgaactgaaagctgaagttgcaaatcacttggctgtcctagagaaacgcgtggaattggaaggactaaaagtggtggagattgagaaatgcaagagtgacattaagaagatgagggaggagctggcggccagaagcagcaggaccaactgccnctgtaagtacagttttttgatgctccgtcgaagtgggga

SEQ ID NO: 129315 - DNA, 306 bp, Homo sapiens
aagaaagaaaaagaaagagaacgggagaaagaggagaaatatctcagcatgcacatcactgtcacaggcccacggcgcctggttaacacggaactcctgtcctttctagtacctgctctctccagagaccatcgaggccctgcggaagccgacctttgacgtctggctttgggagcccaatgaggtaagtgcggggcttgcaggcaccacgtcccagggggaggcagctcaggatcttggacgccagtgggaccacccccatcgctcttcctccttcttgctttttcctcttctttttaaagactg

SEQ ID NO: 129316 - DNA, 724 bp, Homo sapiens
gcacgctctcacacggtcatcttcagccagcactgcaataccacagacttcatcgcacatgttctgcatcgccaccggctcgccttggaacacgaccatctccctgctgaccaccgacgacgccatggtctccatcgaccccaccatgcccgcgaattcagaacgcactccgtacaaagtgagacctgtggccatcaagcaactctccgatattcatttctccagcaccatttgttgaaaagatgatcttttctcccactgaattaccatgacacctttgtggaaaatcgatgggccatgtatgtgtgagtctttttctggactccagatcctgtcgtgtgaatttacatgtcttaaaacaacagcacaccatcttgactaccgtagataaatagtaggtcttgaaatcaggtactctaagttatctctggtttcttttttctttttcaaaaatgttattgcttttattttcaaataaattttagaatcagtctatgaattgcttccaaaaaaacagtctgctaggattttgactgaagttgcattaaatatacagaccaatgtgggaagaattaatatcttaagaatgttgagtcttctggttcataaatatggtctatctccccattcatttgggtttcctttaatgtttctcaataatgtgttaccattgttaatatgaagtacttaataaatactgataaatacatcactatttcatgta

SEQ ID NO: 129317 - DNA, 2194 bp, Homo sapiens
cgcctcccgcggcggctggcgtcgggaaagtacagtaaaaagtccgagtgcagccgccgggcgcaggatgggatccggctcctccagctaccggcccaaggccatctacctggacatcgatggacgcattcagaaggtaatcttcagcaagtactgcaactccagcgacatcatggacctgttctgcatcgccaccggcctgcctcggaacacgaccatctccctgctgaccaccgacgacgccatggtctccatcgaccccaccatgcccgcgaattcagaacgcactccgtacaaagtgagacctgtggccatcaagcaactctccgagagagaagaattaatccagagcgtgctggcgcaggttgcagagcagttctcaagagcattcaaaatcaatgaactgaaagctgaagttgcaaatcacttggctgtcctagagaaacgcgtggaattggaaggactaaaagtggtggagattgagaaatgcaagagtgacattaagaagatgagggaggagctggcggccagaagcagcaggaccaactgcccctgtaagtacagttttttggataaccacaagaagttgactcctcgacgcgatgttcccacttaccccaagtacctgctctctccagagaccatcgaggccctgcggaagccgacctttgacgtctggctttgggagcccaatgagatgctgagctgcctggagcacatgtaccacgacctcgggctggtcagggacttcagcatcaaccctgtcaccctcaggaggtggctgttctgtgtccacgacaactacagaaacaaccccttccacaacttccggcactgcttctgcgtggcccagatgatgtacagcatggtctggctctgcagtctccaggagaagttctcacaaacggatatcctgatcctaatgacagcggccatctgccacgatctggaccatcccggctacaacaacacgtaccagatcaatgcccgcacagagctggcggtccgctacaatgacatctcaccgctggagaaccaccactgcgccgtggccttccagatcctcgccgagcctgagtgcaacatcttctccaacatcccacctgatgggttcaagcagatccgacagggaatgatcacattaatcttggccactgacatggcaagacatgcagaaattatggattctttcaaagagaaaatggagaattttgactacagcaacgaggagcacatgaccctgctgaagatgattttgataaaatgctgtgatatctctaacgaggtccgtccaatggaagtcgcagagccttgggtggactgtttattagaggaatattttatgcagagcgaccgtgagaagtcagaaggccttcctgtggcaccgttcatggaccgagacaaagtgaccaaggccacagcccagattgggttcatcaagtttgtcctgatcccaatgtttgaaacagtgaccaagctcttccccatggttgaggagatcatgctgcagccactttgggaatcccgagatcgctacgaggagctgaagcggatagatgacgccatgaaagagttacagaagaagactgacagcttgacgtctggggccaccgagaagtccagagagagaagcagagatgtgaaaaacagtgaaggagactgtgcctgaggaaagcggggggcgtggctgcagttctggacgggctggccgagctgcgcgggatccttgtgcagggaagagctgccctgggcacctggcaccacaagaccatgttttctaagaaccattttgttcactgatacaaaaaaaaaaaaaggaattcatgatgctgtacagaattttatttttaaactgtcttttaaataatatattcttatacggaaatgggtactgtacttcttctttggtagagttgtgtatgctgcttccggtaagttctctcatggagacgaaggacactgtgcttttcccccagatgtatcttagagcaattgaccagtgtgatgcggtgcgtacgtccctgtaaattcagcattaaatgtcagcacggtgccctgagtgcaaggacatgcacgggtcctgtgtttctgagcagagggggacgtcagtgccgtgtgtgggacatctggggactgaggcaggttggccagactgtaggtcgtgtgtcggagcaaacgcacccatgaccatggg

SEQ ID NO: 129318 - DNA, 2374 bp, Homo sapiens
cgcctcccgcggcggctggcgtcgggaaagtacagtaaaaagtccgagtgcagccgccgggcgcaggatgggatccggctcctccagctaccggcccaaggccatctacctggacatcgatggacgcattcagaaggtaatcttcagcaagtactgcaactccagcgacatcatggacctgttctgcatcgccaccggcctgcctcggaacacgaccatctccctgctgaccaccgacgacgccatggtctccatcgaccccaccatgcccgcgaattcagaacgcactccgtacaaagtgagacctgtggccatcaagcaactctccgctggtgtcgaggacaagagaaccacaagccgtggccagtctgctgagagaccactgagggacagacgggttgtgggcctggagcagccccggagggaaggagcatttgaaagtggacaggtagagcccaggcccagagagccccagggctgctaccaggaaggccagcgcatccctccagagagagaagaattaatccagagcgtgctggcgcaggttgcagagcagttctcaagagcattcaaaatcaatgaactgaaagctgaagttgcaaatcacttggctgtcctagagaaacgcgtggaattggaaggactaaaagtggtggagattgagaaatgcaagagtgacattaagaagatgagggaggagctggcggccagaagcagcaggaccaactgcccctgtaagtacagttttttggataaccacaagaagttgactcctcgacgcgatgttcccacttaccccaagtacctgctctctccagagaccatcgaggccctgcggaagccgacctttgacgtctggctttgggagcccaatgagatgctgagctgcctggagcacatgtaccacgacctcgggctggtcagggacttcagcatcaaccctgtcaccctcaggaggtggctgttctgtgtccacgacaactacagaaacaaccccttccacaacttccggcactgcttctgcgtggcccagatgatgtacagcatggtctggctctgcagtctccaggagaagttctcacaaacggatatcctgatcctaatgacagcggccatctgccacgatctggaccatcccggctacaacaacacgtaccagatcaatgcccgcacagagctggcggtccgctacaatgacatctcaccgctggagaaccaccactgcgccgtggccttccagatcctcgccgagcctgagtgcaacatcttctccaacatcccacctgatgggttcaagcagatccgacagggaatgatcacattaatcttggccactgacatggcaagacatgcagaaattatggattctttcaaagagaaaatggagaattttgactacagcaacgaggagcacatgaccctgctgaagatgattttgataaaatgctgtgatatctctaacgaggtccgtccaatggaagtcgcagagccttgggtggactgtttattagaggaatattttatgcagagcgaccgtgagaagtcagaaggccttcctgtggcaccgttcatggaccgagacaaagtgaccaaggccacagcccagattgggttcatcaagtttgtcctgatcccaatgtttgaaacagtgaccaagctcttccccatggttgaggagatcatgctgcagccactttgggaatcccgagatcgctacgaggagctgaagcggatagatgacgccatgaaagagttacagaagaagactgacagcttgacgtctggggccaccgagaagtccagagagagaagcagagatgtgaaaaacagtgaaggagactgtgcctgaggaaagcggggggcgtggctgcagttctggacgggctggccgagctgcgcgggatccttgtgcagggaagagctgccctgggcacctggcaccacaagaccatgttttctaagaaccattttgttcactgatacaaaaaaaaaaaaaggaattcatgatgctgtacagaattttatttttaaactgtcttttaaataatatattcttatacggaaatgggtactgtacttcttctttggtagagttgtgtatgctgcttccggtaagttctctcatggagacgaaggacactgtgcttttcccccagatgtatcttagagcaattgaccagtgtgatgcggtgcgtacgtccctgtaaattcagcattaaatgtcagcacggtgccctgagtgcaaggacatgcacgggtcctgtgtttctgagcagagggggacgtcagtgccgtgtgtgggacatctggggactgaggcaggttggccagactgtaggtcgtgtgtcggagcaaacgcacccatgaccatggg

SEQ ID NO: 129319 - DNA, 3159 bp, Homo sapiens
actaatgtggcatcctgcctgtggagagatgcacagactgacccatccagacagcacagtggagcacgctctttcaacccacctgcacctgaccacagtgggcactcaggaagaaatgggtagagcgagtgaatgaatgaatgagcaagtcaaagacatgaacacatgacatctgactgtctccctgtgtgcttgtgtttcattctgatacatccctccctaaattcatctgctgagacaaaggattttaactggtgtttctacactgctttccccaagatgtggcaacccacaccccaccagcaacacctgtgatgtctgccgccctgtgtccttgtagcacctctcttaccaggtttccaaatgttgctaaactgctgggtcaaggaatagcatctgcctggggttagcctcacttgtgtggattttttcttactcctcttggccactgactgctcctggtctatgcctgttccattggctgcactgtccttccctgcctcttggccagaggctgtcgtgtgtcagcgacagaaacgttttggctgtcgtctgcacagccagtattctctccccatcacgctgggcctcgtgatgatggggggaggggggttgacatcacagagatcccagtgcattttcgacttcatcactgtcaccatcctctcttgttcatttgggggatacagccgccatcagctcaacagagcaaaagagagggaggccacctgcatccgccaggtgctgaaatgggtccaggcagctgccagagtctgacatttccaacttgatacagcacctgtgatcggcagtagtacccatgacaacatttatttaattgaccaaacacgaacattatagaggaaggtgatcatttaaatgatatacttgaaattcatctgagtaaggaagctgagaacagtcaaagaagctaatttaaaaaataaaaataaataaaaagaaccacctaatccgctgatttctaatcatgccgagtgcttatctctcctgccaggcatacagcgagcgccttgcagagtctcacagcggcactgtcttctcttttgcagcactccgtacaaagtgagacctgtggccatcaagcaactctccgctggtgtcgaggacaagagaaccacaagccgtggccagtctgctgagagaccactgagggacagacgggttgtgggcctggagcagccccggagggaaggagcatttgaaagtggacaggtagagcccaggcccagagagccccagggctgctaccaggaaggccagcgcatccctccagagagagaagaattaatccagagcgtgctggcgcaggttgcagagcagttctcaagagcattcaaaatcaatgaactgaaagctgaagttgcaaatcacttggctgtcctagagaaacgcgtggaattggaaggactaaaagtggtggagattgagaaatgcaagagtgacattaagaagatgagggaggagctggcggccagaagcagcaggaccaactgcccctgtaagtacagttttttggataaccacaagaagttgactcctcgacgcgatgttcccacttaccccaagtacctgctctctccagagaccatcgaggccctgcggaagccgacctttgacgtctggctttgggagcccaatgagatgctgagctgcctggagcacatgtaccacgacctcgggctggtcagggacttcagcatcaaccctgtcaccctcaggaggtggctgttctgtgtccacgacaactacagaaacaaccccttccacaacttccggcactgcttctgcgtggcccagatgatgtacagcatggtctggctctgcagtctccaggagaagttctcacaaacggatatcctgatcctaatgacagcggccatctgccacgatctggaccatcccggctacaacaacacgtaccagatcaatgcccgcacagagctggcggtccgctacaatgacatctcaccgctggagaaccaccactgcgccgtggccttccagatcctcgccgagcctgagtgcaacatcttctccaacatcccacctgatgggttcaagcagatccgacagggaatgatcacattaatcttggccactgacatggcaagacatgcagaaattatggattctttcaaagagaaaatggagaattttgactacagcaacgaggagcacatgaccctgctgaagatgattttgataaaatgctgtgatatctctaacgaggtccgtccaatggaagtcgcagagccttgggtggactgtttattagaggaatattttatgcagagcgaccgtgagaagtcagaaggccttcctgtggcaccgttcatggaccgagacaaagtgaccaaggccacagcccagattgggttcatcaagtttgtcctgatcccaatgtttgaaacagtgaccaagctcttccccatggttgaggagatcatgctgcagccactttgggaatcccgagatcgctacgaggagctgaagcggatagatgacgccatgaaagagttacagaagaagactgacagcttgacgtctggggccaccgagaagtccagagagagaagcagagatgtgaaaaacagtgaaggagactgtgcctgaggaaagcggggggcgtggctgcagttctggacgggctggccgagctgcgcgggatccttgtgcagggaagagctgccctgggcacctggcaccacaagaccatgttttctaagaaccattttgttcactgatacaaaaaaaaaaaaaggaattcatgatgctgtacagaattttatttttaaactgtcttttaaataatatattcttatacggaaatgggtactgtacttcttctttggtagagttgtgtatgctgcttccggtaagttctctcatggagacgaaggacactgtgcttttcccccagatgtatcttagagcaattgaccagtgtgatgcggtgcgtacgtccctgtaaattcagcattaaatgtcagcacggtgccctgagtgcaaggacatgcacgggtcctgtgtttctgagcagagggggacgtcagtgccgtgtgtgggacatctggggactgaggcaggttggccagactgtaggtcgtgtgtcggagcaaacgcacccatgaccatggg

SEQ ID NO: 129320 - DNA, 1443 bp, Homo sapiens
ttggtggcgttctagaggatcccattaggcgcgttctgtgtccacgacaactacagaaacaaccccttccacaacttccggcactgcttctgcgtggcccagatgatgtacagcatggtctggctctgcagtctccaggagaagttctcacaaacggatatcctgatcctaatgacagcggccatctgccacgatctggaccatcccggctacaacaacacgtaccagatcaatgcccgcacagagctggcggtccgctacaatgacatctcaccgctggagaaccaccactgcgccgtggccttccagatcctcgccgagcctgagtgcaacatcttctccaacatcccacctgatgggttcaagcagatccgacagggaatgatcacattaatcttggccactgacatggcaagacatgcagaaattatggattctttcaaagagaaaatggagaattttgactacagcaacgaggagcacatgaccctgctgaagatgattttgataaaatgctgtgatatctctaacgaggtccgtccaatggaagtcgcagagccttgggtggactgtttattagaggaatattttatgcagagcgaccgtgagaagtcagaaggccttcctgtggcaccgttcatggaccgagacaaagtgaccaaggccacagcccagattgggttcatcaagtttgtcctgatcccaatgtttgaaacagtgaccaagctcttccccatggttgaggagatcatgctgcagccactttgggaatcccgagatcgctacgaggagctgaagcggatagatgacgccatgaaagagttacagaagaagactgacagcttgacgtctggggccaccgagaagtccagagagagaagcagagatgtgaaaaacagtgaaggagactgtgcctgaggaaagcggggggcgtggctgcagttctggacgggctggccgagctgcgcgggatccttgtgcagggaagagctgccctgggcacctggcaccacaagaccatgttttctaagaaccattttgttcactgatacaaaaaaaaaaaaaggaattcatgatgctgtacagaattttatttttaaactgtcttttaaataatatattcttatacggaaatgggtactgtacttcttctttggtagagttgtgtatgctgcttccggtaagttctctcatggagacgaaggacactgtgcttttcccccagatgtatcttagagcaattgaccagtgtgatgcggtgcgtacgtccctgtaaattcagcattaaatgtcagcacggtgccctgagtgcaaggacatgcacgggtcctgtgtttctgagcagagggggacgtcagtgccgtgtgtgggacatctggggactgaggcaggttggccagactgtaggtcgtgtgtcggagcaaacgcacccatgaccatggg

SEQ ID NO: 129321 - DNA, 1769 bp, Homo sapiens
  misc_feature (1736)..(1737): n is a, c, g, or t
  misc_feature (1745)..(1745): n is a, c, g, or t
cgcctcccgcggcggctggcgtcgggaaagtacagtaaaaagtccgagtgcagccgccgggcgcaggatgggatccggctcctccagctaccggcccaaggccatctacctggacatcgatggacgcattcagaaggtaatcttcagcaagtactgcaactccagcgacatcatggacctgttctgcatcgccaccggcctgcctcggaacacgaccatctccctgctgaccaccgacgacgccatggtctccatcgaccccaccatgcccgcgaattcagaacgcactccgtacaaagtgagacctgtggccatcaagcaactctccgagagagaagaattaatccagagcgtgctggcgcaggttgcagagcagttctcaagagcattcaaaatcaatgaactgaaagctgaagttgcaaatcacttggctgtcctagagaaacgcgtggaattggaaggactaaaagtggtggagattgagaaatgcaagagtgacattaagaagatgagggaggagctggcggccagaagcagcaggaccaactgcccctgtaagtacagttttttggataaccacaagaagttgactcctcgacgcgatgttcccacttaccccaagtacctgctctctccagagaccatcgaggccctgcggaagccgacctttgacgtctggctttgggagcccaatgagatgctgagctgcctggagcacatgtaccacgacctcgggctggtcagggacttcagcatcaaccctgtcaccctcaggaggtggctgttctgtgtccacgacaactacagaaacaaccccttccacaacttccggcactgcttctgcgtggcccagatgatgtacagcatggtctggctctgcagtctccaggagaagttctcacaaacggatatcctgatcctaatgacagcggccatctgccacgatctggaccatcccggctacaacaacacgtaccagatcaatgcccgcacagagctggcggtccgctacaatgacatctcaccgctggagaaccaccactgcgccgtggccttccagatcctcgccgagcctgagtgcaacatcttctccaacatcccacctgatgggttcaagcagatccgacagggaatgatcacattaatcttggccactgacatggcaagacatgcagaaattatggattctttcaaagagaaaatggagaattttgactacagcaacgaggagcacatgaccctgctgaagatgattttgataaaatgctgtgatatctctaacgaggtccgtccaatggaagtcgcagagccttgggtggactgtttattagaggaatattttatgcagagcgaccgtgagaagtcagaaggccttcctgtggcaccgttcatggaccgagacaaagtgaccaaggccacagcccagattgggttcatcaagtttgtcctgatcccaatgtttgaaacagtgaccaagctcttccccatggttgaggagatcatgctgcagccactttgggaatcccgagatcgctacgaggagctgaagcggatagatgacgccatgaaagagttacacaaggatcccgcgcagctcggccagcccgtccagaactgcagccacgccccccgctttcctcaggcacagtctccttcactgtttttcacatctctgcttccctctctggacttcttggtggccccagacgtcaagctgtcagtcttcttctggtcgnncggccgcnaatttagtagtagtaggcggcagc

SEQ ID NO: 129322 - DNA, 1491 bp, Homo sapiens
cgcctcccgcggcggctggcgtcgggaaagtacagtaaaaagtccgagtgcagccgccgggcgcaggatgggatccggctcctccagctaccggcccaaggccatctacctggacatcgatggacgcattcagaaggtaatcttcagcaagtactgcaactccagcgacatcatggacctgttctgcatcgccaccggcctgcctcggaacacgaccatctccctgctgaccaccgacgacgccatggtctccatcgaccccaccatgcccgcgaattcagaacgcactccgtacaaagtgagacctgtggccatcaagcaactctccgagagagaagaattaatccagagcgtgctggcgcaggttgcagagcagttctcaagagcattcaaaatcaatgaactgaaagctgaagttgcaaatcacttggctgtcctagagaaacgcgtggaattggaaggactaaaagtggtggagattgagaaatgcaagagtgacattaagaagatgagggaggagctggcggccagaagcagcaggaccaactgcccctgtaagtacagttttttggataaccacaagaagttgactcctcgacgcgatgttcccacttaccccaagtacctgctctctccagagaccatcgaggccctgcggaagccgacctttgacgtctggctttgggagcccaatgagatgctgagctgcctggagcacatgtaccacgacctcgggctggtcagggacttcagcatcaaccctgtcaccctcaggaggtggctgttctgtgtccacgacaactacagaaacaaccccttccacaacttccggcactgcttctgcgtggcccagatgatgtacagcatggtctggctctgcagtctccaggagaagttctcacaaacggatatcctgatcctaatgacagcggccatctgccacgatctggaccatcccggctacaacaacacgtaccagatcaatgcccgcacagagctggcggtccgctacaatgacatctcaccgctggagaaccaccactgcgccgtggccttccagatcctcgccgagcctgagtgcaacatcttctccaacatcccacctgatgggttcaagcagatccgacagggaatgatcacattaatcttggccactgacatggcaagacatgcagaaattatggattctttcaaagagaaaatggagaattttgactacagcaacgaggagcacatgaccctgctgaagatgattttgataaaatgctgtgatatctctaacgaggtccgtccaatggaagtcgcagagccttgggtggactgtttattagaggaatattttatgcaggtaagagtcttgcagagcaatcaagcctccagccactcttattagccccacttagtaagggtttgcgttaaacgagcacgcctgggtggtcccgcatattccccgggctgccgacagttcagcctccagaaagccttcagggt

SEQ ID NO: 129323 - DNA, 1924 bp, Homo sapiens
cgcctcccgcggcggctggcgtcgggaaagtacagtaaaaagtccgagtgcagccgccgggcgcaggatgggatccggctcctccagctaccggcccaaggccatctacctggacatcgatggacgcattcagaaggtaatcttcagcaagtactgcaactccagcgacatcatggacctgttctgcatcgccaccggcctgcctcggaacacgaccatctccctgctgaccaccgacgacgccatggtctccatcgaccccaccatgcccgcgaattcagaacgcactccgtacaaagtgagacctgtggccatcaagcaactctccgagagagaagaattaatccagagcgtgctggcgcaggttgcagagcagttctcaagagcattcaaaatcaatgaactgaaagctgaagttgcaaatcacttggctgtcctagagaaacgcgtggaattggaaggactaaaagtggtggagattgagaaatgcaagagtgacattaagaagatgagggaggagctggcggccagaagcagcaggaccaactgcccctgtaagtacagttttttggataaccacaagaagttgactcctcgacgcgatgttcccacttaccccaagtacctgctctctccagagaccatcgaggccctgcggaagccgacctttgacgtctggctttgggagcccaatgagatgctgagctgcctggagcacatgtaccacgacctcgggctggtcagggacttcagcatcaaccctgtcaccctcaggaggtggctgttctgtgtccacgacaactacagaaacaaccccttccacaacttccggcactgcttctgcgtggcccagatgatgtacagcatggtctggctctgcagtctccaggagaagttctcacaaacggatatcctgatcctaatgacagcggccatctgccacgatctggaccatcccggctacaacaacacgtaccagatcaatgcccgcacagagctggcggtccgctacaatgacatctcaccgctggagaaccaccactgcgccgtggccttccagatcctcgccgagcctgagtgcaacatcttctccaacatcccacctgatgggttcaagcagatccgacagggaatgatcacattaatcttggccactgacatggcaagacatgcagaaattatggattctttcaaagagaaaatggagaattttgactacagcaacgaggagcacatgaccctggtgagtggcttattctgcctgggtgggcagccaggcggtgggctggcgaagcaggtcatccatccagctcacactggaagccaagaagctgaaattattagtcttcttggaacaaggtgtctataaatctggttttcaaggtcatgactcttactaggaaagtccgggcagggcctccctcctgatgggtcctccttcatggtcagaggcagcattctcccattcctccatctcttttggatttgaaggagataagtgggtgaaggccgtgcatctcgctctgctttccagagaattaaaaccagctctcccattgaaggcacagccccagcatggcactctgaaagcccacctatgtgggggcaactccaacacagctcccgctccccaagccagcatcccccaccaggcccacaccatagcccagcacccctccataaccaggacaaggtggccagagaaggggtagggggcctcccccatgagaaggtgcacttaggttgcccagcatctgccttttggaaaggacaggcactgggcacaccaaggcacacaaggaccagagcacgactcatgcctggaatccagcactttgggaggccacggcaggaggattgcttgagtccaaaagtttgagaccagtctgagcaatattagcaagactccatctccacaaaaaaa

SEQ ID NO: 129324 - DNA, 846 bp, Homo sapiens
tctgcaggacgctgctgccgtcctgggatacatccatccaactcacctctgcctatctctcagagcgaccgtgagaagtcagaaggccttcctgtggcaccgttcatggaccgagacaaagtgaccaagctcttccccatggttgaggagatcatgctgcagccactttgggaatcccgagatcgctacgaggagctgaagcggatagatgacgccatgaaagagttacagaagaagactgacagcttgacgtctggggccaccgagaagtccagagagagaagcagagatgtgaaaaacagtgaaggagactgtgcctgaggaaagcggggggcgtggctgcagttctggacgggctggccgagctgcgcgggatccttgtgcagggaagagctgccctgggcacctggcaccacaagaccatgttttctaagaaccattttgttcactgatacaaaaaaaaaaaaaggaattcatgatgctgtacagaattttatttttaaactgtcttttaaataatatattcttatacggaaatgggtactgtacttcttctttggtagagttgtgtatgctgcttccggtaagttctctcatggagacgaaggacactgtgcttttcccccagatgtatcttagagcaattgaccagtgtgatgcggtgcgtacgtccctgtaaattcagcattaaatgtcagcacggtgccctgagtgcaaggacatgcacgggtcctgtgtttctgagcagagggggacgtcagtgccgtgtgtgggacatctggggactgaggcaggttggccagactgtaggtcgtgtgtcggagcaaacgcacccatgaccatggg

SEQ ID NO: 129325 - DNA, 739 bp, Homo sapiens
cgcctcccgcggcggctggcgtcgggaaagtacagtaaaaagtccgagtgcagccgccgggcgcaggatgggatccggctcctccagctaccggcccaaggccatctacctggacatcgatggacgcattcagaaggtaatcttcagcaagtactgcaactccagcgacatcatggacctgttctgcatcgccaccggcctgcctcggaacacgaccatctccctgctgaccaccgacgacgccatggtctccatcgaccccaccatgcccgcgaattcagaacgcactccgtacaaagtgagacctgtggccatcaagcaactctccgagagagaagaattaatccagagcgtgctggcgcaggttgcagagcagttctcaagagcattcaaaatcaatgaactgaaagctgaagttgcaaatcacttggctgtcctagagaaacgcgtggaattggaaggactaaaagtggtggagattgagaaatgcaagagtgacattaagaagatgagggaggagctggcggccagaagcagcagcaaaacaaaaaagaccaactgcccctgtaaatacattttttgggaaaccacaaagaagtgtcttcttaacgggtgttccatttccccaaaagccttgttttttaaaaaaacctggaagccctggggaacccacttttgtatttgggtttggggacccccaaggaaaaattgcgtcctagaaccaattaaccccaacccg

SEQ ID NO: 129326 - DNA, 106 bp, Homo sapiens
gtggtggagattgagaaatgcaagagtgacattaagaagatgagggaggagctggcggccagaagcagcagaggtagggtctgcgctggggccacgggcggccggg

SEQ ID NO: 129327 - DNA, 446 bp, Homo sapiens
tgggactacaggtgcccaccaccatgcccagctaatttttgtatttttagtagagatggggtttcgccatgttggccaggctggtctcgaactcctgacctcaggtgatccgcccacctcaccctcccaaagtgctgggattacaggcgtgagccaccatgcctgaccataaagacatgtttctaaattctcctgggacaacagtgaagttctacctttccttcctactttaccgaaggaacctgaaaataaggctgctttctgaaacttaaactactaagtcagtgatatttagagcagatgtaagcagctgtctagacacagaatggcttcccaggctcgcaagacttgtcatgaagcccccagcacgtcaacagaaagcatccaagctagaagaggcactggctcacagcagcaccccagaaaggaagcgtctcagggacaga

SEQ ID NO: 129328 - DNA, 372 bp, Homo sapiens
tgctgggattacaggtgtgagccaccgcacctggccaaaacaattattttagctaaaagtcatacattttctcttatttaaatgacaggctgatttttgtctctgcttacaggaaacacataccttggaagtggtcaaccttcatagtctgaaggaggaagtggtcaaataccaagatcagaacctggtctattaatcactaggcaggagtgtgtagaggaagacagactggggaatggagaccctgctagggaccacatcaaacccaggttacaatcaaacattggtacctgaaagctgttctgtctccacctggagacttttcacttctttgctctggacaggcttggctgatcccagcatttaacaaca

SEQ ID NO: 129329 - DNA, 766 bp, Homo sapiens
ggagttagttgcattcaatattatctgctagaaaattctttaagttagtattgtttaataggggaaacaattcaggacatgggcctaggcaaaaattttatgacttaagacttcaaaagctcaggcaacaaaaaacaaaaatagacaattgggactatattgaaccgaaaagcttctgcacagcaaaggaaacaatcaacagagtgaagagaccacctgtagaatgggagaagatattagtcaactattcatctgacaagggactagcacagaatatacacagaactcgaataactcaatggcaaaaacacaaataatttgatttaaaattggacaaaggaactgaatagacatttctcaaaagaagacataaaaatggccagcaagcatatgaaaaaatgcttagcatcgctaatcctcagggaaatgctaatgaaaatcacagtgagctagctcaccttagttagaatggctgttatcaaagagacgaaaaatagtaaatgttggtgaggatgtggagaaaagggaactcttacacacattctcttgtaattttgtctttgagaattattgctgatcattttaaatcttatggctatctatagctaatggaagtgtaagttagtacagccattgtggaaaacagtatggaggtctctcaaaaaaaaaactaaaaatagaactgctgtatgatccaggaattccactaccaggtgtttactcaaaggaaagaaaatctgtatatcaaagggatgtctgcaatccc

SEQ ID NO: 129330 - DNA, 353 bp, Homo sapiens
ggccctcatccagatgccaatgccatgaccttggacttcccagaaccatgagccaaataaactaattatgttaattatatctcaataaaactaatttttaaaaaagtattacttcatctttgtcactttcttcacataactaacttctcatttaatagcaaaaactaataataataaataagttttccagggatgactttagtgccagacttagtctcctttttgtacatcaatcagaaaagtgtgcacgtggttcctgacttacaatggcttgacttacagttttgctactttacaatggtaaaaaagcaatatgcggctgggcgcggtggctcacacctgtgatcccagca

SEQ ID NO: 129331 - DNA, 442 bp, Homo sapiens
agcttcctgaccttgtccctgtctccactaaaaatacaaaattagctgggtgtggtggtgggcacctgtagtcccagcagagggactcttgaggcagaggttgcggtgagccaagatcgcgccactgcactccagcctgggcgatagagcaagaattcatctcaataaataaataaattcattcattcatttctttgctatgtagactgaccagaatggattctgttgcttgcagctaagacccataactgatgtacttggcattcaaggctcactgtggtgtggtctttgcttatatctctggtcccatctgccaccattcccagcctagtactttaccctccagtgaaagatctctctccctcttccatactctctcatggcctctgacccttgtacaggctgacagatccatatttatttcacctctgtcatcacctcc

SEQ ID NO: 129332 - DNA, 554 bp, Homo sapiens
tgaggtggctcacacctgtaatcccagcactttgggaggccaaggggggtggatcacttgaggtcaggagttcgagaccagcctggccaatatggtgaaaccccatctctactaaaaatacaaaaattagctggatatggtggcacatgcctgtaatttcagctactcgggaggctgaggcgggagaatggcttgtaccctggaggcagaggttgcggtgagccaagatcgcgccactgcactccagcctgggcgatagagcaagaattcatctcaataaataaataaattcattcattcatttctttgctatgtagactgaccagaatggattctgttgcttgcagctaagacccataactgatgtacttggcattcaaggctcactgtggtgtggtctttgcttatatctctggtcccatctgccaccattcccagcctagtactttaccctccagtgaaagatctctctccctcttccatactctctcatggcctctgacccttgtacaggctgacagatccatatttatttcacctctgtcatcacctcc

SEQ ID NO: 129333 - DNA, 274 bp, Homo sapiens
acaggggatatatgtgtgtttacttggagatgcataaaacatttcctgaagaacacacaagaaagcaataacattagtttctttgggggtggagaaagtaaataactagggaacagaaaggagtcttcatagcatattcttaagagccgccagaattttaaaccatgtatatataattctttccaaacatgctcatttttcaaaatatatgatttatgaacctaaaagcttctgattttgaattttagaaatattcgtatcgcctatcctttta

SEQ ID NO: 129334 - DNA, 520 bp, Homo sapiens
acctgactccaaagctcatattcttcctatcatgccttccacagatggccaggacccctagcagccctgaaagtctgcaggagataaatgtacctggaggatggaagaagtgggtgctcgcctcatggagtgcataggtcaggatgattagtagggccctttggcacccaagagacccagaggctgatgcaccaaaagtggccctggcagcagtggcatagctagggtgagggcagaagtgggaagaaacaccaggttttcaattcacatcgcttgggcatctcctttgcaggagaggagcattgctcctcttctcctctgcaggggccgctaggctgtgtcgccagctttggatcccaacagagcaggattcagatcctgactgccatttatttgatgagtgacccttggaatctcacccgtaaaaatgaagaaaatggccaggcacagtggctcacacctgtaatcccagcactgtgggaggccaaggctggggatcacttgaggtcagcagtttgag

SEQ ID NO: 129335 - DNA, 192 bp, Homo sapiens
tataaaccgtggctcttctgcccctggtcccacaggctggagcttggtgtcaggcacctctcctggcagcaccacgggaaggaaggtcctgagaggcctcgcttcaccacacacgcgtcagaggagggcgggccggtgagctgagctcctgcgtgagagcgggagctgccacctgtgagacccgcaggggca

SEQ ID NO: 129336 - DNA, 171 bp, Homo sapiens
cgagcggccgtgggacagtatccggatcgagtcccccaatccgctgcaagcaggcgcagatccgggaggtggctatcggccccggggacgccgtcagagcgcgctgctccggatctgggggtgaagttgacacccgggacaagagagctgaacgcggcgtggcggacagtg

SEQ ID NO: 129337 - DNA, 476 bp, Homo sapiens
tgctaatattttgtatctattgtttccataaaccaaaacagagaaccctgtatggtgaatgctttaagttttcataggtcatttgcttcttcttagtcacatctacaggtaaatatttttaaatcaatgatcttttcctcagtataatcagtggttctatatgactttaaagaatgagctgttttggctgggcgtggtggctcacgcctgtaatcccagcactttgggaggccgaggcgggcagatcacgaggtcaagagatcgagaccatcctggccaacatggtgaaaccccatctctactaaaaatataaaaattagctgggcgtggtggtgcatgcctgtaactccagctactggtaagtctgaggcaggagaatcacttaaacctgggaggcggaggttgcagtgagccaagatcgcaccactgcactccagcctggcaacaggatgagactctgtctaaacaaacaaaca

SEQ ID NO: 129338 - DNA, 924 bp, Homo sapiens
tatataacctaaacctgtagttaccatatagaattcctatttgtctttcaaaaatctgaagaaagactgttcttcaaaagtctgacgacatttccaaaaagccttttctaatcttccaactcttccttctccttctatcctctggactgccatgatattcaattgcactgcatttattgcacttagcatactgaattataattaacaattacataaacctttctcctactaggttgcctcttatttgggatctagttaatggagagtttattgttagcaaaataggattttgatttaaagacatttattttaaaaatatcagtagtatatttatattagatacaatatagccaataatatgaaaacttttctcattttccaaaatatgtctgttcttctatggctttattttgttctctttataagaaacactttcagaagtgcaatagcaaagattatttgagaaaataatcttataatgcatttgtgcctggacttctttgtttctttgtttttgctttcgagcatttcattatccttgtggccatgaaaatatttcaattaaatatcatcacttttgaaggaaattctaatagggagcaagaatgtcccaccaagagacagggtcaagacaccagccttagctgctggcctttctcagaaatgtaagtggccactgcttttaaatggacacatgctccacttcttggaatctgttagtgttttataagggatggctgtttttgagtagttaagggtataccttcaaacttccaagattctaggtgagcctagggttccagttttgactctagaattctggcttagcctttcagtcttccacttcctcacaagccctttactttgaaagtctcccaaaccagctatgaaccccttggccagcaggcactcccttggtaaatt

SEQ ID NO: 129339 - DNA, 266 bp, Homo sapiens
cttttattcatttgtcatttaaaatcttgtttttatgaattttatgatttgagagaattttcatgtcaaaatatcctttcttttctgaaagaatattttagcattaaatattagaaggaatacaatttcagtagttatgtgatgaataaatttagctttctgaaaacagaccgcacttgctttgttttttccatttggcaatgaacctgtgcactagcatttaggaatcatttaggaattatcagtgtagtggaaacagccttgct

SEQ ID NO: 129340 - DNA, 362 bp, Homo sapiens
tgggctggggggaggcagagtcagtctctcaggtaaggcaggattttcagtagcaccgtacggctcccatgcttcctccactgcccctcttccccagccagctgggctggggaagagggcggggctggggaagagggttcactcttaggaaatccacctgaggggaggcaaggggaagccccaggaaagggccggggtgctggaaatctgagaaatctgagctgagaggcaggcagggtctgttttcatgcaccacatgcccaacctaacctgggccttcagggagctgtccacaccctgtccacaagccatgtgttcaggacttgacccacaagccacccagccttctgtacccattccac

SEQ ID NO: 129341 - DNA, 164 bp, Homo sapiens
tctatgatcacaaaagctttcatatcacttcagctgactttacacttttttgtttttttttttgagacagagtcttgctctgctgcccaggctggagtgtagtggcgcaatcttggctcattgcaacctccacctcccaggttcaagcgattctcatacctcag

SEQ ID NO: 129342 - DNA, 289 bp, Homo sapiens
gttattttaattggagaaacctgtgtaagctaagtttccttattgttccttttactctttataattgacataggtgaatttattcattcagccaatttgtttaagtaaatactggggaggcttcataagtcacaaagatattttgatatgtaaatgtagcaaacacaatgcttgctgtaatagaggcaccattattggccataaatatttctgctggagttagtttgtagctccaagtaaagataaagaaatatgcgtggtgaagaaataaaatcgattctgtatgtgg

SEQ ID NO: 129343 - DNA, 3159 bp, Homo sapiens
cgcgagagtacccctgatgagctacttcgcccacccgcggagctggccctggagcatcagccaccccaggccgggctccccccactggccttgtctcagctctttaacccggatgcctgtgggcgccgggtgcagacagtggtgctgtatgggacagtgggcacaggcaagagcacgctggtgcgcaagatggttctggactggtgttatgggcggctgccggccttcgagctgctcatccccttctcctgtgaggacctgtcatccctgggccctgccccagcctccctgtgccaacttgtggcccagcgctacacgcccctgaaggaggttctgcccctgatggctgctgctgggtcccacctcctctttgtgctccatggcttagagcatctcaacctcgacttccggctggcaggcacgggactttgtagtgacccggaggaaccgcaggaaccagctgctatcatcgtcaacctgctgcgcaaatacatgctgcctcaggccagcattctggtgaccactcggccctctgccattggccgtatccccagcaagtacgtgggccgctatggtgagatctgcggtttctctgataccaacctgcagaagctctacttccagctccgcctcaaccagccgtactgcgggtatgccgttggcggttcaggtgtctctgccacaccagctcagcgtgaccacctggtgcagatgctctcccggaacctggaggggcaccaccagatagccgctgcctgcttcctgccgtcctattgctggctcgtttgtgccaccttgcacttcctgcatgcccccacgcctgctgggcagacccttacaagcatctataccagcttcctgcgcctcaacttcagcggggaaaccctggacagcactgacccctccaatttgtccctgatggcctatgcagcccgaaccatgggcaagttggcctatgagggggtgtcctcccgcaagacctacttctctgaagaggatgtctgtggctgcctggaggctggcatcaggacggaggaggagtttcagctgctgcacatcttccgtcgggatgccctgaggtttttcctggccccatgtgtggagccagggcgtgcaggcaccttcgtgttcaccgtgcccgccatgcaggaatacctggctgccctctacattgtgctgggtttgcgcaagacgaccctgcaaaaggtgggcaaggaagtggctgagctcgtgggccgtgttggggaggacgtcagcctggtactgggcatcatggccaagctgctgcctctgcgggctctgcctctgctcttcaacctgatcaaggtggttccacgagtgtttgggcgcatggtgggtaaaagccgggaggcggtggctcaggccatggtgctggagatgtttcgagaggaggactactacaacgatgatgttctggaccagatgggcgccagtatcctgggcgtggagggcccccggcgccacccagatgagccccctgaggatgaagtcttcgagctcttccccatgttcatgggggggcttctctctgcccacaaccgagctgtgctagctcagcttggctgccccatcaagaacctggatgccctggagaatgcccaggccatcaagaagaagctgggcaagctgggccggcaggtgctgcccccatcagagctccttgaccacctcttcttccactatgagttccagaaccagcgcttctccgctgaggtgctcagctccctgcgtcagctcaacctggcaggtgtgcgcatgacaccagtcaagtgcacagtggtggcagctgtgctgggcagcggaaggcatgccctggatgaggtgaacttggcctcctgccagctagatcctgctgggctgcgcacactcctgcctgtcttcctgcgtgcccggaagctgggcttgcaactcaacagcctgggccctgaggcctgcaaggacctccgagacctgttgctgcatgaccagtgccaaattaccacactgcggtctgtccaacaacccgctgacggaggcaggtgttgccgtgctaatggaggggctggcaggaaacacctcagtgacgcacctgtccctgctgcacacgggccttggggacgaaggcctggagctgctggctgcccagctggaccgcaaccggcagctgcaggagctgaacgtggcgtacaacggtgctggtgacacagcggccctggccctggccagagctgcccgggagcacccttccctggaactgctacacctctacttcaatgagctgagctcagagggccgccaggtcttgcgagacttggggggtgctgctgaaggtggtgcccgggtggtggtgtcactgacagaggggacggcggtgtcagaatactggtcagtgatcctcagtgaagtccagcggaacctcaatagctgggatcgggcccgggttcagcgacaccttgagctcctactgcgggatctggaagatagccggggtgccacccttaatccttggcgcaaggcccagctgctgcgagtggagggcgaggtcagggccctcctggagcagctgggaagctctggaagctgagacactggcggcaggcacctagctatgtgaccactggccctaaaccttttccctctgtggcctcctggcttgcactgctccctctagaaagattccttcaggtctggaggcagaggaatgggcatagctgagccagttgccctcctagggcatgtttgaccaggactgagtctggaatctccaagttaaagatggtgaatcaatgcttcgggcttggagatggaacatgcctcctctccattcagctagaaggaccaaagcatgtggcatttggatggccagagtgccctgaagcaccactaccaaccttgcctccccctcctctcaaagagcctctgattgtgtcaccaaggggctcacatcttatgtctgccatgccaggggtgtcgccatccagatgtgttggaagcttcccctcctgccttatgctcacctgtggacaccgaggatgccctcacattggtgctctctcctcatcctcatgccccctttgccacaatggtatgatggcttggtagcccctcgaggcagatgcacctgacttgctgctattaaaaagccgtgtgccttctacc

SEQ ID NO: 129344 - DNA, 2293 bp, Homo sapiens
acgtgtctgtaatcccagctactcgggaggctgaggcaggagaatctcttgagcccaggaagtggaggttgcagtgagctgagatcgcgccactgtactccagcctgggtgacagagcgagactctgtctcacaaaaaaaaaaaaagaaaaaagaaagaaacaaagaaacaggctcgggcagcccaccccttctcacacatcacctccgacaggaggtcacagctgctgctgaggccaccccgccttgaggatgtgcctgccggacctgagttgcaacgagaggctgcagtctcccgaggggattcagaaagcccccagttattgaaaacccagcagaattgtcagccctgcacccccaagccctcttggagggagggttgccctggcagagcactgagcccatctgtttattcaccatcctgtggattcagcttcacagggtgacatattctgtcacaggtggttccacgagtgtttgggcgcatggtgggtaaaagccgggaggcggtggctcaggccatggtgctggagatgtttcgagaggaggactactacaacgatgatgttctggaccagatgggcgccagtatcctgggcgtggagggcccccggcgccacccagatgagccccctgaggatgaagtcttcgagctcttccccatgttcatgggggggcttctctctgcccacaaccgagctgtgctagctcagcttggctgccccatcaagaacctggatgccctggagaatgcccaggccatcaagaagaagctgggcaagctgggccggcaggtgctgcccccatcagagctccttgaccacctcttcttccactatgagttccagaaccagcgcttctccgctgaggtgctcagctccctgcgtcagctcaacctggcaggtgtgcgcatgacaccagtcaagtgcacagtggtggcagctgtgctgggcagcggaaggcatgccctggatgaggtgaacttggcctcctgccagctagatcctgctgggctgcgcacactcctgcctgtcttcctgcgtgcccggaagctgggcttgcaactcaacagcctgggccctgaggcctgcaaggacctccgagacctgttgctgcatgaccagtgccaaattaccacactgcggtctgtccaacaacccgctgacggaggcaggtgttgccgtgctaatggaggggctggcaggaaacacctcagtgacgcacctgtccctgctgcacacgggccttggggacgaaggcctggagctgctggctgcccagctggaccgcaaccggcagctgcaggagctgaacgtggcgtacaacggtgctggtgacacagcggccctggccctggccagagctgcccgggagcacccttccctggaactgctacacctctacttcaatgagctgagctcagagggccgccaggtcttgcgagacttggggggtgctgctgaaggtggtgcccgggtggtggtgtcactgacagaggggacggcggtgtcagaatactggtcagtgatcctcagtgaagtccagcggaacctcaatagctgggatcgggcccgggttcagcgacaccttgagctcctactgcgggatctggaagatagccggggtgccacccttaatccttggcgcaaggcccagctgctgcgagtggagggcgaggtcagggccctcctggagcagctgggaagctctggaagctgagacactggcggcaggcacctagctatgtgaccactggccctaaaccttttccctctgtggcctcctggcttgcactgctccctctagaaagattccttcaggtctggaggcagaggaatgggcatagctgagccagttgccctcctagggcatgtttgaccaggactgagtctggaatctccaagttaaagatggtgaatcaatgcttcgggcttggagatggaacatgcctcctctccattcagctagaaggaccaaagcatgtggcatttggatggccagagtgccctgaagcaccactaccaaccttgcctccccctcctctcaaagagcctctgattgtgtcaccaaggggctcacatcttatgtctgccatgccaggggtgtcgccatccagatgtgttggaagcttcccctcctgccttatgctcacctgtggacaccgaggatgccctcacattggtgctctctcctcatcctcatgccccctttgccacaatggtatgatggcttggtagcccctcgaggcagatgcacctgacttgctgctattaaaaagccgtgtgccttctacc

SEQ ID NO: 129345 - DNA, 264 bp, Homo sapiens
agcccatctgtttattcaccatcctgtggattcagcttcacagggtgacatattctgtcacaggttggtgttggagaaggggcactatcacctctatgagagtaacctcacatataaacatgaaaacaagccaggtgcagtggggcacacttgtagtcacagctgtcaggaggccaaggcaggaggatcgcttgagcctaagagttaaaggctacagtgagctatgatcacaccactgcactccagcctaggtgacacagcaag

SEQ ID NO: 129346 - DNA, 185 bp, Homo sapiens
tcttcagcatataaacaaagtattaatacttaccatagtaaaaaaacaaaaactaaaagactactgacttcccctaaaatttattgctcaatcgttatcttttcttctgcaatcccgctttttcaaactatggcttccctcagtgtccccactttctttcaccccctacctcaattttggcattt

SEQ ID NO: 129347 - DNA, 327 bp, Homo sapiens
cacagtggctcacgcctataatcccagcactttgggaggctaaggcgggcgaatcacgagctcaggagttcgagaccagcctggccaacacagtgaaaccccgtctctactaaaaatacaaaaattagctgggcatggtggtgggcacctgtaattccagctactcaggaggctgaagcaggaaatcgcttgaaactggtggtgggggtgggcaggggagaggggcagaggttgtaatgagccgaaatcatgccacttcactccagcagcctaggcaaaagagcgagactctgcctcaaaaaaaaaaaaagaaaaagaaaaagaaat

SEQ ID NO: 129348 - DNA, 613 bp, Homo sapiens
gacgctctctctgtggggcttcacacttgcaccggccttcccaaacccgtgctcactccgtgctcacacttgtgtggggcacttctcctggagctgcacaccccatccacgaactcagtcaatggctcatgatcacacacacgggttgcccaacctcgggcctagggccaggcttccaagcccagcaagtggggaagaaggggggcagagtccaaggaaggactgcccaggaacactgccccctcctagctgttgccatggaaacagagtcttcagggccagtaactgacagcaggtctcccccttgggaacctgggggaggcttagaaagcccctactcccacccaggccagggagcagggtaaccgtagcccccaggcaaccttcaaccccacctggaatccctagccaggagcaggatacttcccagttttctccagatgttggggggacctctgagaccctgccctcatctgggtattctgcattggagagcagacccaaggccagtggacgtgctcacaccgagttcacacactccactcaccggggtgctcaggagccccacaagcccacgcaggctcgctctctgctgagggctttcacacttgca

SEQ ID NO: 129349 - DNA, 512 bp, Homo sapiens
tttagggagctttccgacagctgaacacctgcgggctgctggacagtggtggtgcatccagagagggcatgaaagctctgtgccccttcccctataccttgctctatgcatctcttcatctgtatcctttataataaagcagtaaatgttaagtgtttccctgagttcagcgagctgctctagcaaatgaagcccaaagagagggtcatgggaacctcaacttgaagctggtcagtcagaagttctggaggcccagacttgcaactggtgtctgagggagaggggcagtcttgtgggatggagccctcaatctatgggatctgaggctacccccatatttctttaaaaaaaatgtattttttcaattattttttccctactattccccaactccttccccacttcctacttagacctttagaaatacaatataaccttttacctttcctttactagacactccctacagggcaagttcatctatgtgcttagaagctccagagcagaacttt

SEQ ID NO: 129350 - DNA, 553 bp, Homo sapiens
ttgcatagaattaggtcttgcctgatcaaagccttggagctgctgggtgattggacatggactgtgttctccctaggcatcttgtgcttgtccttccagtgctgattgtcctcggcggtgcccataggtgactctgtcttccgtaccagggctgttctgtggagccacagactgtgtgcctctctgttaccgctgtctccagcaccttgaagggtgcatctgctgctcacagaccttcagtaagttcctgctgagtgaatgaacacacgcttgtttgtaaggattagtgcttctgttggcagtgggatttgagaagcagggcacgaggagagagcaaggaacacccgggaacctaccctccctcagcctccaccttgttagagttcctcctgataggaagtggcagggaaatgcagtgaatctaaggaggggcacgtgtctatctttctgattgaaacacttttcttttctgtaattgaaatagctgtggccgctggcttgagaaaatatcccctaccttgcagtgtctagcatcaatgctgtttaaaatctt

SEQ ID NO: 129351 - DNA, 103 bp, Homo sapiens
gaaaaatgggcaatgcccttgaaatagatctcagagatacctccaagttgaggtgatggctcacttagcctctagaggtttcctaagacccactgcacaatgg

SEQ ID NO: 129352 - DNA, 336 bp, Homo sapiens
ctctcctcctctctacgtctctttctctctctccctacccctcccctcatcagatgcctcattatgactctggttccactctcctagttcagccccaggaggataggagatcccaggtaacggaccatccacaaagtgagaaatctacttactcattcggataatcaggaagccactagctgtattacagtttacttcccatatatctgtcctttgtcaggagaaaggcttctttctctgcccctacaatcttcgtgtgaattttagacccagctccttgaccatacccctaggaaatctaagtcctcaggattcagggcacaagtgggaagataa

SEQ ID NO: 129353 - DNA, 186 bp, Homo sapiens
aacatgaaatagattagcatgagtatttcatttgtttcttgtgaaactggttttttgcatttcaaaatgcatttcatttcatgttgttttatgatgaagagattaataccatctacgcagaagtattttctacactggtcagaatagttttaaagttcaaaaggaaaggatgactttttttttttt

SEQ ID NO: 129354 - DNA, 679 bp, Homo sapiens
gagacctcaggatgcaaaattaatatgtaagaatttcatcactttgttagaagatgcaatcggagttcatccaatatactgtcagagacttggtggatatttgtcaattttgtttgttattcaggaggaatacctggattttctctgagggagtcatccctgcttggtctcggtctacgtggtttatgtggtgctttgccaagtccactccctatccaccttccagtcttaagcagggggaatagctcaagctcagccactcaggctttcccttccgggaagctgaattccgagtggtgagacacaaaagtgggaatatgcttggaacagattcttcctgtgagcagaaccttgaagaggctgtttattcattcctgctacctggagccctgaagctgtctggttcccatctttgttctgtcacgatctgagcgtccagcttttggtttctctgagccgctccatatccttccaatcattttcctcttttcttttgcttcatttagtcagagtttaactgatagtctaagtgatagaataaaaatgtgaacacagaaaaaaatatcactagatgacagctgggattactagacagcattttctcactggacatgtgttttgaaagcacataccagcaccaggcactgttctaggcacttgagtcagtgacaaacaaaac

SEQ ID NO: 129355 - DNA, 457 bp, Homo sapiens
tatcataaaaaaatacattcaataaatagttactgcaggacacagagtattttaattattagtggaaaaattaccagttttcaaagcatgtctgccattctcaacagaaacttggccacaagcacatcccaacgaaaatcctgctgctgttcccccagcagccgccccccgggctatgcacagctctgaactcgccagtgtgtggcaacggctgttcctcttgaccctagcacactgggcccagccgcccaacttctcctgggaattctgactcaggtgaggaataaggcagtgggtgtgctggtttgacaagaccatgggacaggtgggcaaagaccactgagaagtaccatcaccaacgtttccaagaaataaagatattgttttgcacttgttacaccatcacagataaaatggtttttacaatagtcatgcaccgcttaataatgtttcactc

SEQ ID NO: 129356 - DNA, 852 bp, Homo sapiens
  misc_feature (830)..(830): n is a, c, g, or t
cttaatatccttagaaatagtcgatttcagtaacataacataatgggactgggaacacattttattagttaggaggaaattatagtagtagtattaacatcttacatctgtaagtaccctggagtccacaaaccaccgtcacaaagtttctaatttaatccagtcttagccacatggcaccctggaggactacaaaagaaactaaagaccctctgaagcttttaagctacagactaaaaagggtggggggacagaagtaacaagacataagaacaaatacaacatatcaaaataactagaaacattaagatctggtcaaatttataccatttcaccaaacccaaaatacataaatgtctatgatactaaaaaatgatagttagacctggccctatttttgatataaaatttcagtataaaaaaaacagctaagtgtttctaaaagtgaaatttgacgtagcatactaacacagcattttgagtttggggtattgttaatgtgggaaaccattcctaaagaaatgggttattgaacagggtctacacattgacaaatatgaatttaagaacagcattttaactgaggaaaaaaaataagaaaagaggtatcaaaaactgtactgaaatgatcttgcttgtgagtccagctcttccaaaagaagggtgaatttattttctttgtatctccagcactgactagaaattcagaaaaaatttttaaaacggaaataaaacaagttatgtgaaaatacagaaggataccttaaagaacaggtttttttaacaacaattactatggcagctttgtaattctggcagaagaaaaaaanctgggggtcctctagagtcacc

SEQ ID NO: 129357 - DNA, 1037 bp, Homo sapiens
cgctgcgtatctacaactatctgatctttgacaaacctgagaaaaacaagcaatggggaaaggattccctatttaataaatggtgctgggaaaactggctagccatatgtagaaagctgaaactagatcccttccttacaccttatacaaaaattaattcaagatggattaaagatttaaacgttagacctaaaaccataaaaaccctagaagaaaacctaggcaataccattcaggacataggcatgggcaaggacttcatgtctaaaacaccgaaagcaatggcaacaaaagccaaaattgacaaatgggatctaattaaactaaagagcttctgcacagcaaaagagactaccatcagagtgaacaggcaacctacaaaatgggagaaaattttcgcaacctactcatctgacaaagggctaatatccagaatctacaatgaactcaaatttacaagaaaaaaacaaacaaccccatcaaaaagtgggcaaaggacatgaacagacacttctcaaaagaagacatttatgcaccaaaaaacacatgaaaaaatgttctgcttttctttctttcaatttttggttcatgtattttggggctctgttattgggggcatacacatttaggatttttatgtagtttaatcagttgatcccttatcactgtgaaattactttctttatccctagtaactgcccttactcttacatctactttctgtgatattaatatggtcactttttatttcttttgactagcattagcatggtgtagctctatccatccttttacttttaacctgcctatgtttttaaagctgtactttttgtagacagcatatcgtcgtcttgctttttatccagtctaacaatctctgccttttaactgaactgtttataccattcacatttaatatggttattgacacagtaggattaaatttaccattttactattttttaatttgccccagctgtttgtttcccctctatatctatttttatcttttttgaattgggcattttttatgattc

SEQ ID NO: 129358 - DNA, 623 bp, Homo sapiens
ccatgatattctcatctatcagtacaaaaatgctggcttacctttttagcaaaacattggaagtcaattccttcttccttctcttattttttagattttaaaaattcataatttcatcctagggcatatataaaatggattatggaaatttatcaaacattataaatatagccatatttgtgaacattatttatgaggataaacatttatcagcatttggtaaaatgcctcttgattacaataactctttggatgataaaatgttccaatatttatatacaattctgttcccatttggaataaataccaaaatgtgcaaaggatttatgacactcttggtgtcttccaaaataagtctcaaacaaagattttctccagctattccagcatggggagggaatgagaaaatgtttcacaaataactgcattactcatttatgtggtagtatgccagtggcagtgcttttacaaagtcagaaaaatagtgattctccctatgttcccctcttcataattattagaatgggaagatttggaaagtagactgtgtctgcattattaaaaaaagcattaaaattttacatttatacgaaaattttagttttacacattgcattttccta

SEQ ID NO: 129359 - DNA, 552 bp, Homo sapiens
  misc_feature (15)..(15): n is a, c, g, or t
  misc_feature (27)..(27): n is a, c, g, or t
  misc_feature (39)..(39): n is a, c, g, or t
tccagctggccccanggatgtatgggntacagtactttnaaatagatcctttatcagagctggagggagtggacccagaatgggaagcagcagggtgtgatgtggaccctggattgtatgtattccctctcttagggcgtggctgctttttatttgcagctttaccattgccatgctggaaaatcatcacatatttcaagatttgctgaaaatttctcataaaaactcaactttatgggcaattaataaaaacaaacaaaaaacaatgtgagggccattacaataagggccaaacagacatgtctgtgggctagatgaggcctgtgagctaccagcttgcaaagcaggcatggccatcaaggatgtatggtggttacagtactttaaaatagatcctttatcagagctggtattgacatgaaaaagccttaaattattttcattttccaggcagatgaggtggactagtatgtttggcattatggagatagcatgttgaattaagagcaatgggcatctgccgttctagctttgtgggctttggggagtcag

SEQ ID NO: 129360 - DNA, 269 bp, Homo sapiens
catatattaatacatggcgtctatatccatacatgtatgtaaatgtatgcaaacaatttaatctactttttccttaacattaactccttcagatagaatggttggcccaaatgatttaattattttttaggttgttgattcatagaaacaaatcccctgcagaaaggttgtaccaatttacacggttacctttcttcacattttctctaacactgggtattcttgagcttttagtatttctcagttggtggaaaggatctcttagtttg

SEQ ID NO: 129361 - DNA, 538 bp, Homo sapiens
  misc_feature (7)..(7): n is a, c, g, or t
ccacggntggctggcagcttatgccagttcagcttcttcatgttttgtgtgggtgggttcacccgccgatggcgggggacctatgctgagcccaagccatgccccacctgggcatggtggtgcacaccaattgttccagcttactggagagctgaggcaggaggataacttgagccaggagtttgaggctgcagtgagctgtgatagtgccactgctctccaggctgaatgacagagcaagatcctgtctcaaaacaaacaaaccaaacacttttattttgggcaataggttagcttgttctgggaagttggaccctgtatatatgggatataccattgcttctaatttaagagatttataaacccacaaaaaatatgtattatttcttatagtaagttaccagtttggttcttgtaggaggatgtgatgtaggcttgggtgaagaaggtttttcctaaagctaattcaagcaaaaaaaaatttttttcagaaagtctgtgccatgaaaaaaaagttatattagcatcatatagacaa

SEQ ID NO: 129362 - DNA, 401 bp, Homo sapiens
tgagttttatgtatgtgatgagctaataggattagcagtttatcatttgataaaataaatctttttgaacatgtttgcagtttctccaaaacagactcatctttcatcaggtctttggagacagtggtgtcaaagtacatccccccctctttctccctgtctccagggctgagtggatttatatagtaaatatctttggtccggagaagtctgaagttaacctggccattgagtgttaccattctgtagagaataacaatgcctaaacatgacacatttgtgcacaacttaatcagtagcctgaacttttcattcagccttggacaatacatcttggaattcacaataatgcagatcctcagaaccaagtcagtgtcatccgtataggaggctgttactgt

SEQ ID NO: 129363 - DNA, 786 bp, Homo sapiens
ggggtaaagctgtcatttcatataggtcatcagaaaaggcctttgtgatttcatgacatttgaggagacacctgaaggaaatgagggagggaccatagggccacctggtgaaataatgttcccggaaaaaaataacagcaaatgcaaaggtcctggggtggaaatgtgtttgacacatttgggaaacatcaaagggcagcctaaatgagtagaggggtgatatgggaagaaaaataatatcaaaagatgaagtggaggaacatagacctcaaaaggctttgtcagccttagtaaaacttttttaaaaattctaagtaacaagaaaagtcaaaagaaggtgttgagtctacctaatctgatttacgttataaaggaagggtaggcaaacattttctataaaggtccaggtagtaaatattttagatttttcagccacaggtacctgttgcaaccactcaactgtgtccttgtacagggaaacagtcatagacaatacaactgagtgtggatgtgctccaataaaactttatttacaaaagcaagtgcccaaatatatttggcctatgggaaatatgtcctaaaagcttcactctaactccattcatagaagtcatcaaatccaactaataccatccactgatgggaaaattgaatgtcaaaaagattgagttatttgatcaagatcacacagcaaacgatcaggaaggattaaatcagagcccaaggctcatgacttcaagtgcaataccctttccattgcaacatgccaccttaaaaaaaataatg

SEQ ID NO: 129364 - DNA, 481 bp, Homo sapiens
gaaatgacttccataaggttgtgcagctagtttgcaacaggtcccctgacttccaggcccgtggtgtttctgttacctcccagtggttacttgcctgcagctagaagggctttctgcagtgctgctgctggagttggggggaaaaggctgacactcagcacagccttctgcatccacttgagtcatgcaggacacttagctttgttctttctccacagttaatattatgccaaacctacctgtaattagtaattttcaaagaatattataagttccagtaaccaaatgtttgggcataattatatgccaaaagactactttttaattgataatttttaactgctttttatatatttgcagcctgagaaggctgtttggatactgaggttcagcaaagtgggtctgaagatacttgtttatgcaaatgggactttgtaacctgggaaatctacaggatttatacaaattattattgaaatag

SEQ ID NO: 129365 - DNA, 524 bp, Homo sapiens
  misc_feature (463)..(463): n is a, c, g, or t
ctgttttattacttttctgggaattcaaatcagtgtaaccacgcttgatgcgccggtgaaaaatgctatctccctcccccttctccttcaacctaatgaattgccttttttcataacaaagagtaatgagcaccaaaccacataatatttattcaaggaacaaaagacttaagaatggggtggcaggaagaggagcaactcctgggtgtggacagaagaaaagctggacgttataacagagcccctcacactgatctctggtgacagtgggttcaatttatagggaaatccaaaccttttggctctccccactcattcctgggaggggcttccttcaagcaattccctagttcatgtgtagagaccctgctgctgagaggtggcaggagccaaatgtaattcatcccatagccttgactgtgaagtgtctgcacattttatttttcagtgaaattcccctaanaagcctcctcttgcctctctcataagcaataagcccagtatatcccaaaatgttctagata

SEQ ID NO: 129366 - DNA, 486 bp, Homo sapiens
ttattgagcatgaactctgagccaggtactgttctaaatcctcgagagatggcagggaccaaaacacagtcctgctttcatgaagcttagattctagtaggaagaaacaaactataaatagacaaatcacacagctagtgaatgtaagtaaataggtgactggctgtgttgccatatacttctcatttaatccgcttgccattttggtttagcaaagaaacaagaaacttgaaatagtgtgggagtacatatttgccaaggggaaaagcagaacttttaaaagctccttcagaatgttcttttctctttcttaaaatggaaatcactgttcttttagctgcaaaagtaatacatcttgaaaaaaatacagaaatgtaaacaacagaaatctacaaaatagaaaatatctcataatttcatatccactgttaaaaagtctaatcattatagacttccccctgcatatacatgtgtttataatataaa

SEQ ID NO: 129367 - DNA, 395 bp, Homo sapiens
ttgatcacctgttagctgattctccccattagaagagaggctttacacagctgctgagataatggttttgctccctgctgtacccccaccatgagtctggcatatagcagatgtccaataaatatttgtagaacaaaggagcagagtgaagaaagcaggcagagaggagctcctcccatgcccgggccacacagtggaaggctcctcccatgcccaggccacacagcggacggccgtcaagcagagcacttgcaacctctgctatgctgccccccactagcacccagctcccttcctcacaggaacatggaagctcagagatttaaggacttgcccaagggaacaagaccaggcaggggcagagctgggtctggaacacaagttttcagactccc

SEQ ID NO: 129368 - DNA, 558 bp, Homo sapiens
cagtgagggaaggaacaggtcagctgttgcgtgtccagagggccgctctgctggtcaggcacagtccaacagtgcaggagttatgatgcgggcccccagggccccagtctggctgcatctgtttgcagtccagcattgggtgccctgggaaaggccagcagatcaaggaaagctcagatcagaccagccccaggtgatagggaagaccaccctgcagagtttacatctgggctaaagttcccctaggggaacagtctcctatgggagcaagtgcagcctagggggattggcattcctggccatgctccaccacatatgctcctgtaacacaccctttgggctccacactggctgagtgctgctcctaccacttatctaagccgctctccctgtcaatgaagtggctgtggtggttgaggggtctcctcctgctgggattccagaggcctgtggtgaaagcaggttgctccttgccagttcaactcacctgttctccaggagtcgctggggtccatgaatgagtcccgatgtgaagtagcccctgtgcagagttcccag

SEQ ID NO: 129369 - DNA, 727 bp, Homo sapiens
gagtcatcctattctattttataaatgttagaaattctcagtgataaaacatttctaagaagagacagtagaaaaacatcctaaattaagaggtttaagaaatgtctaataaagaggaaagaagattaagaaacattaaaagcagaaacaatattttgtctggaactagccactgatttgaacattttggagtccattaagataatttaaatgtaaattatgtattaaaaagttataattttacagaaatagagaaatgaaaatagatgctggtgaaaaaaaaacaggtcacaagagaatgtaagataagatcagaaaaagaataaaatataaatacttatatataaaaagatctgaaattcaatatactagttatgcttttgattgggaaaatattaattttgttgctgaatttattttctacaatgtatatttattatataataatagtaggaatttattttatttaaaaaaacaaattcagtttttctcaattttttctatactagagtcagtgacatttctcttttacataaatgtaaaacattattataatcataaaattatacccattttctttcattatatttgagaatataaattctttgtattaaacaaaaaacatttaagagaaacagtatcaaattgagtcaaaactgaagtcttattactttataattttaaatatgtaaaatttctcaaactactctttgttgaaaggctgtga

SEQ ID NO: 129370 - DNA, 233 bp, Homo sapiens
agtgtaacagtatgtatgcatgtcttttatgctgaagatggggctgtaattcacactgtttccacagttgagagcatcttccacatgtggtagattaaggtgaaactgcatatgggtggtggtgaatcatttttctgtaggctgcgtggttgattgctagtgttaccgaatgtactttttccacttactgaagggtccatcattatttgaatcatctttctttaactttctag

SEQ ID NO: 129371 - DNA, 295 bp, Homo sapiens
tctgggtgggaaagagagagaggaaccaagggatttacccttgagccctctgggccagagtgagagcccggacatacttccagcctctgcctagaagccccaggcagctggggacaagtccctggccctctgcagcctcaggtttctgctcccggggcctcagtttccccaaacctcctaacatggtgaggatttgcttctccccgggccctgtgggcaaaatctgagaaggttccatactcaaatgccaggcaaggtcttggagcgggtgaagggggacttcccggtggacacc

SEQ ID NO: 129372 - DNA, 96 bp, Homo sapiens
ggtggtagaggtgggagaaaatctgctcataagtagacccctgcagttcaaatccgtgttgttcaaaggctaactatattacatagtgatttgtgt

SEQ ID NO: 129373 - DNA, 366 bp, Homo sapiens
aggcatgatggtgtgcacccacagttccagccacttgggaagcctgaggtgggaggactgctggagtccaggagttcaaagccctcggcaacctagcaagacctcatctcaaaaaagattcacggccgggcgtggtgaggccgtgaatctttgggaggcgaggcgggcagatttcctgagcttaggagtttgagaccagcttgggcaacatggtgaaaccctgtctttactaaaatacaaaaaattaaccgggcatggtggcgtgcgcctatagtcccagctactcagggggctgacacacgagaattgcttgaaccagggaggcagaggttacagtgagccaagatcatgccactgtattccagc

SEQ ID NO: 129374 - DNA, 251 bp, Homo sapiens
attctcctgcctcagcctcccgagtagctgggatgacagatgtgtgctaccacgcctggctaattttttggatttttagtagagatggggtttcactgtgttagccaagctacctgtcttgacctcccaaagtgctgcgattacaggcgtgagccaccgcgcctggccacttttctccttcttgaaagtgggattttctctttatcattgtttgattattgtataagtattatgattggcattttgcaatt

SEQ ID NO: 129375 - DNA, 391 bp, Homo sapiens
gaggtccccagagtcgccaaaaccatagagacaggaaggagagtagagggagccgcgggctgggaagggactgggagtgtgcgtttgatgcagacagagcttcagtttgggaaggcggagagctctgcggacagagggaggtgaccactaaactgtgcccttaaacagggttaagatgatacactttatgccatgtgtatcttaccgcagttaaaaattaaggtcgggcgtggtgactcacccctgtaatcccagaactttgggaggccgaggcaggcagatcacctgaggtcgggagttggagaccagcctgaccaacagggaggaacgccatccctactaaaaatacaaaattagccaggcatggtggcgcatgcctgtaatcccagct

SEQ ID NO: 129376 - DNA, 276 bp, Homo sapiens
ttaatttaaatcctaatttttcaaatttgttgcatataccatgcttaaagtttttcacacttcataattaatttatgtatgttcgtttataaagtggaagcagatatctgttctcagtactaactagcttattctgtcttatgtcaaccctgccagactttgggagagaaagtatttgattagaatagtatgggcatgcatttatctctgtagggaaaggtggaaaggcttctgggaatccacggtgtgccagggcattgtaggtaattgaaatgt

SEQ ID NO: 129377 - DNA, 379 bp, Homo sapiens
cctctgcctccctgacacttctctctcctggcctctttcctctttgcctaccttcttcctttctcaaagaagagtgtttgcacctttctctccccttgactttctctcactggtgacacccttatccggtggcctcagctaccatctgtgtgtaccccacctacttggggccactcctccacagcggctccaccttcccgtgggcagtgccatctgaaggttcccaaatcagggtttcttcaggagcaactttcttcctcattaacccagtggcttagcagacatctccctttggtgccctataaaacttcagactccaagtagagtgtcccactgtgaattcagcctcttcctccacccctgaactgctgtctttcct

SEQ ID NO: 129378 - DNA, 275 bp, Homo sapiens
caaaaaaaaagtaaaataaaattaaatttattcacttatatttttctttagtgaggaaaccaaaggaaaagataatttaggttatattctgaaagaaataaacagtcactggctttctggttcttcatgtaaagaagattcaggacaagatatttcttttgaaaaagataatcttgtaaaaatgagtgtgccaaagaagttgacattttaagtaagttaatattttacacaaaagctcttcttctgttacctcttatgcttactggaagaaagca

SEQ ID NO: 129379 - DNA, 325 bp, Homo sapiens
gtagcctcaatgtgccagactcaagcgatcctcccaccttagcttcccaagtcttagtaaccgggactacaggcatgtgccaccatgcccagctaattttatttttttgtagagacaaggtctcactatgttgcccagccttggcatcccaaagtgctgggattacaggtatgagccactgtgcctggctgaagaggtgtttttgagccctgacagacaggcaaactttgctaatgtcatgacaaaaaaaaaagtgaacagtatacaggcatatgaaggattttaatgccagcccattttttctttttggagtcagggtcttgct

SEQ ID NO: 129380 - DNA, 960 bp, Homo sapiens
tacatgaaggtttttctttttaaatttcctattaaaagaatcagagatggagaatcctatttattttctcattattagcataagggaaaaaaagaagaatagaaaattagatttcttactccttctctttgaaattttttttttgagacaaggtctcattctgtcacccaggctgcagtgtagtggtggaatctcagctcaccgcaacctccatcctgctggattcacgtgattcttgtgcctcagccacccaactagctggacttacaggtgcacaccatcacacccagctaatttttgtatttttagtagagacggggtttcaccatgttggccaggctggtctcgaactcctggcctcaagtgatccgcctgccttggcctcccaaagtgctgggattacatataggcctgagtcactgtgcttgaccctctttgaactttttaacaactttcttgggggaacagacaggagaagtactcaatcttcacaaaaaccactgtattaatgagaaaatgttttttacatttggaggtccataagaacttatcagttagtacaaaagcaaaagtgtggattttgcaatggcaattaatatttctagtatataaaagtgtccaaagcaggaaatagataaatcctataaagggactcttaagaccaaatttaaggccacactgttctcaactacaagatggaatggctggagcccagagcaaatgagggaggtccaacagagtttggcacagatgaactgatgggccaggcaggacaagcccagatgttcagtgggcgaaagaaatcctcaagtcttgtgaaaagcaccttagcaacatcattaaagaacgcagctattttctgcctggtggcctaggctggaaataaggaaatctgatcaagctatagtttggaagacagaagtaccagagagacactgatgattttcacctcagctgctg

SEQ ID NO: 129381 - DNA, 115 bp, Homo sapiens
gtactattttagacaagacagtcagggaaggttttgctatagatttgagtaaacatctgaatgatatataaaagcaagccagcaaaaatctagggtaaaatacttccaggaaaat

SEQ ID NO: 129382 - DNA, 707 bp, Homo sapiens
tatggtgatgtgtacctgtagtcctagtaaattaatcaggaaagctgaggtgggaagttcacttgagccgaggaactcagggttatagtgagccatggttgtgctactgcactccagcgtgggcaacagagtgagaccctgtctctaaagaaaataaaagaaaaaagactatattattgtaccaaagatagaaaactgtcctgggtttaactatgtcgagagatgacagtatgttggtctccagtgtaataccgttctaaggaatgtttgggagtgatttgattatttttgataccttatggattaactttataatctagtacattatcattcatctattaaataatgagcaacttctgtgggctagacctcagaagattcataaataaggaaaacatactatttttcctttgatgagtgacttactggggagatagatgagaaaatacttgtatacactgcagtgacatggttgctctgataatactggttactgtgcatggagagaatgagcactttaatgaacctgaggagcagaggaaaggaaagcaaagggtgccagagtaggaaactcttcttaaaaagtggttgctaggctaagacgtaagaataactatacattatatcactaaggttgggaaggagagcattcctacacaggtaaaatggcatgtgtagagtacacaggagcagacaggttcccccac

SEQ ID NO: 129383 - DNA, 480 bp, Homo sapiens
gggccagggctggggataatgggaggcgtgtttcgtcagcccaagagcatcgttaagtggccatcaggaaatcacagggctggaggggctctcaaatgaagcatcaccggctttattcttttagcaaatgtgtatcctgcaccaggcgctattctaaggaccggaggttggtagctgtgccagtctgggcctgtttgcccttggggtccgttccttgtccttgctctgatctgctgggtgtggtcgggagccaatctctgtaggttcttgtgtcccaggctcccgtgtcactggattcaacccgtgggaggagctgctaggaggttggaaggcaggaggaatggagaagccagtgtttctacctccctcagtctccagaggccactctgatggcacctgcaactcctccgtggctccagctcccactggacggaccctatggcctgtcctctgttggcgcttccagcccctgggcctcag

SEQ ID NO: 129384 - DNA, 634 bp, Homo sapiens
aatttaaagaatatttgttacttaaaattaagtactttcaaaataatgtttggttaagtagaagcttaaatttttgtttttcttcttttcctctccatatctgttatactatttcacttacaaaataaatcttcagccttaagggatgtttgggatagttttacaggattatggattttattcctaaaatagatctgaatgctacaaaaagtgaaactttttaaagataagattgtcatcaagtggtggtattttaaagctttacttataagcggtaataattaacctttgaaaatcctgctgtaataaggtgttgagagtgatctagctttctttggaaggtttttggtgttcctaatcattcccagcctaaattaaccccaaggaaaatgagaacttcaacctgacctctcattgttttgccaattcctacgtttttttcggtttccttttggttcttttatttctgttccttctgttcagtttaggggaaagaataaacttataaagaaattcaccttaagaaattagggccttgtcacatatacaccatggaatactatgcagccataaaaaaggatgaattcatgtcctttctaggaacatggatgaagctggaaaccaacattctcag

SEQ ID NO: 129385 - DNA, 741 bp, Homo sapiens
tttccaggaacatgctcagttttaagacccgattaagatcaggcacagcaggccaggctaagaggggcatgtgtgaaatgcagttctataccagagggaatgagggaaagtccacatgctcaccagcgaggcctctcgctgctcccagcactttttctgcttctgtcacacagtgctggatactagagtcaaattctgctttccctagtcatgaggctagaggagtctttctgcataaacttaagagcccaagagaaaaagcctatagatattgatatttagggtgttccaaacaaaatttacagctgactcacaatcaccctcccgtaagatccaccagttcagaagcactgatcatgcacacagaacatccggtcagtttttagtgtctcacttttcaatttaaaaagacagctaacgatcaccagatatttgagaaaagtttgaaacatgaaaggcagaaattaaaagagacaacaacagcactagaaactcacaagaaatagagaaaatatagggagcagaagaaaacttcacaaaacctgtaattactagtctaagagagataagagaatatgttgcattaataaaataaaagcaatgtgcaacaaagaggagtttcagagactaagaaagaacttttggaaattaaaagtgtgatagaagaataaatcagtagagggtttggaatatagaattgaagaaaacttacagaaccttgcagaaagtcaaagaaagaaa

SEQ ID NO: 129386 - DNA, 666 bp, Homo sapiens
gggaagtaggtgatgttgggagtggagagcaggctctgatgcttcctgggcagagcttgaattccaatctgaatctacgatgcgttcactgtaccacagagagcacagagctgggatatgtgtggaaagggcctgaatagctaggagctaaatcaccctgggcaagctttgaaaccacctcagttttttcattagtaagaaggtaatgacattgcctggcgacatgcctcagcataattccatgacaattgcatgagacaatctgtatgaaaaatcctttgtcctggaaggggctgccttttatggataagaagaaatataatattactaggaaatgctgtgagcccatggcaatgctggactaagaaatcctttgaaccttagccaggggaatgaaaaagctgctcatctctgaaatgtcaaggttttgagatttcccctgtaccttttctaatgaccgcattgaagttgtacagaatgaaacaagaaccagtctgttttgttttttttttttttatagagatggggtcttgctctgtcacctagcctgaagttaagtggcaagatcctaactcactgtagccttgagctcctgggctcaagcgatccttctgcctcagcctcccaagtagctgggactacaggtgcccagctaattctttaaat

SEQ ID NO: 129387 - DNA, 554 bp, Homo sapiens
tgcagtaggctgaggtgggaggattgtttcagcccaggaagtcgaggctgcagtgacctgagattccagcagtgcacgtcagcttgggagacagagcaagaccctgtgtcagaaaaaggaaaaataaaatcagcaaaagcatcaagaacaaaacacagggacacacaagacatacagcagagtgcagggtaagagaaagcccccagggtgtcttgtcttagttatgacagcagtgattctcaagtggcatcccagaggactatggggttcctgaagtgtgtttcagcagatgagtgagatcatttttccaacgacagatctgaatagtgatgaattttcttcataggaacaaactaagacaatacaacatagcacaaagggtgcagaagattttagagaaggtggactctgtctgcaatggagcctcttccacggggagcattaggcattgtgcagtgggttctcaaacatgttggccttgggaccccttcagcacacagctcaaagttattaacaacccgcagaactttcatttctgtgtgttatagttgtct

SEQ ID NO: 129388 - DNA, 394 bp, Homo sapiens
catttccgggaaactgtcatcccccttcgtggacagcctcctggttctttggtcttcctgagatctctttttccattcctaatgagctatcgctctcaaggctacacacattgtcctttatcatcacccataactgctccatctccaaaatcatcaacatctcagcttcactctctcatgggcttgttcaattatttcaactataaatgtgttaataacgtcttagtcttcctgtagtggagtcctcagttcatcattcagtaacacaccttgcaataccttagacttctttttccctctgacttttcataactgtcaaaatgccaactccaataaagccaattattgactttgttcttacctaaacccaagtcgccaaatacatacagaaagt

SEQ ID NO: 129389 - DNA, 287 bp, Homo sapiens
ccaccttaaggcatcctgcatccccaccatcttttctttatagggaagacaacctttacctttaagctgtcttacctttacactgtctcaccacctaaccaagagcgagacctgcttcacttgaaatagttacaagtttgaaacaactgatttagtagtatcattttttctataatcatcacattattcatcattccatttctagtaagttgtacagtgtctgacacctaatagcacataattgttggatgaatacatgtaccctaaattaagaatagcacatttta

SEQ ID NO: 129390 - DNA, 710 bp, Homo sapiens
ccttctttctctccctccacagattccacaccagtgctttccctcgattcggtctccctgaaactttcgtccgttagatcttcatgactgtctacttatttggttgtctcagctgaatatcactttctcaggtagagctccctaaacatacaaactaaagtagatgaatccatttctctctttcaacacacatctgatgtcttttcttcagtgcactatgactctctaacattatcttctttgttaaatgcttattgggttagtgtctgtctcctccactcttgtaacttccttgagagtcgggaccctctctatcttaatcaaatagaatgatttgaacctagaatggaacccagtacacagtagctgctgagaaaaataagtgtggtttacacaaataaaccagggtatgggaactgatcactgtggggatcctggaaagcaagaaggggctcaagttccagcactctttcattttgatgtcacactagaccccttctcctcctggtgagaaatacaggcaaacttctttctccttcttctagttggaagaagaattcatggataaaggaacagtgatttaagaaaaaggaaatctttttattaagagtcatctcttttgcctgggcacactggctcacatctataatcctagcatgttgggaggctaaggcaggaggattgcttgagttcagcagtttaagaccagc

SEQ ID NO: 129391 - DNA, 372 bp, Homo sapiens
tcagtcggtaccacaagctgactcttccacatcgctgacctcttccatgctagaaggagtaggaagttcaatggcaggaaagaggaagaaaaacaaaacagaattggcacacacctgtgatccaagctgtcctcgaggagccccctccccacctgtgcccagtgatcagttctagggctttgccccacatgtccaaacaagggggtcctacaggaaacgcccggtaggtggagacactgggcctcccccccaggttccgcaggggggctgataaaggcgcagagcgggcggcccctgcaggatgggtgggagtccagcccccggggtcactgggagccctgggctaggaacaggtggcctccccgggagcct

SEQ ID NO: 129392 - DNA, 396 bp, Homo sapiens
ggcaaacttcattgttgtctcattttaagaaattaccatagccaccccaaccttcagcacaaccaccctgatcagccagcagccatcaacatccaggcaagatcctttaccagcagaaagattacaactctctgagggctcagatactccatcctgttttccagaatggaaacttacattcctaccagcagtgtgtaagggtttccttttctccacattctccccaacacttacctttcatctttttgacaactgccattccaacaggtgtgaggtgatatctcattgtggttttgatttgcatttccctgatgattataatgttgatcaccttttcttttctttccttccttccttccttccctccctctctccctccttcctttctttcttttt

SEQ ID NO: 129393 - DNA, 270 bp, Homo sapiens
ctgggtctctctttgtctttcacatgagtgacattttgaaatatgaaggccgattattttgtagtttgtccccatttgtgtttgccgggagtgcttcctgaccacaatctgaaaactcctcacgtcctggctggctcaacttcccgtagtgagtgagacgttgcctgttgtgcctgatgctgagaagaggacgaggagatggtggtggggttgccagatcctggggacagtagcctcagatggccagccatgggcagacaaagctgggca

SEQ ID NO: 129394 - DNA, 211 bp, Homo sapiens
tcttagcgtgtttttaatattatagatgcttttcgatcttaccctaaaatagcacataaacattttatacatatgtgggataaccattaaaaataagtataaaccaatcactcttctagagatacatataaaaaaggtcatctcctctcaatggaaacaaagattttctgtattattgagaagcaatttacatagtttaatttcttgtatg

SEQ ID NO: 129395 - DNA, 335 bp, Homo sapiens
agcctgaaggaactttctataggagtaaattacacttgaagacacatatgctgcaggtcccatgggtggtgagtgacaccaattcttcacacctcttccaacggtcaccctcatcacctctgtagctgccaaaatcttgagcaagaaaagatgattaaacttgcttaatagccacaatgtgtgggtgatacctctccatttagtgaaaaatacatgttggtgtcagtagatttggtcataatgataacagagcatttgaaatgtcttcattgactccacataaattaatctgttatttctttcaaacagtgtctgaagtgtatatgcacaaaatt

SEQ ID NO: 129396 - DNA, 446 bp, Homo sapiens
tcagtctgggaatctcgagagagctgacaagcagggcggtggggggtggccaggagctgacatggctttctggtaggcagccccacatcctgcttcctccctgtgctgagtgtaatcacttctgccccttcaggaaagtacttcacacccgtggcatagagccaacagtgaggtggattccgggtcctctggatgcctgggatggtgagatgcttgagaaagttttggcagtttgttcagacttggggactctccagtctgccttcctatcacccagcaggaatgcccttcccttcaaccctgatacctgggcacttggcctccacctgaatacccttggtggtgagcagctcactacccctctgaagacagccagtcccccgtgctccatgttccttgtcacctgctatcttatgactgcatcctgaatccgactctggcttctg

SEQ ID NO: 129397 - DNA, 1163 bp, Homo sapiens
ggttctcttttccaggttctagctcaaccctgtcctgtgctccagcactttcagtgataggcagcccactccattttgaggcaatccatcttattgacttagggttctagttaaaagaaatgtaaaaaaattaaagtcaagtttgtctcttagtcactatcattcaccagcccttttctgaacttgtacaaaataagttcattctctcttctacaggagagacctccactatccaaatatgaggagcttatcatcccaaggctccaggtcttctcattgctaaatatagcaccctgggctaaatattcccagggtgctcagctgtttctcaaatgcagaggaaatgcccgatacaccattctccttcacagcatctttaccaccctgccacttggcctttttgaacccccattagatggtgagcattttccttatctgattgctttcccctgtcactgggctgtcaatgggactcttagaattggacttagaagcacgtgggctccccgacaatgatctggacagccttgctttgaatatagtggatcttttgcttttcttgctttgcttgcagagctcaaggaaacatattttctgatcttgtcatcttttgctaaaacatactgaaagttaattaatagtcatggctgtgaaatcttttctctggtttgtttctgccttatactgatttctaaactatttgcaaatattatttttgattgtaacagtatgaaagggattgagagtcctgcctacactgacttataataaaagatgccatgaatttacctgagaatctgagaaggtctattgctctcattctttaaaaactttttttttgttgttaagtatctgctttatgccagtcatccattctcagcacaagagaaaaagaagcagtgataacaacaaagattcttttaaccagaatagaacttacaattcagttgaaggaaccatacaataaacaagtaaacaaatatatatatgccatagcattaagtagtatttgaaaagttttattcaattctgaggagcagtaactcatgttatggatgaatgattgaagttcaggtattcatttgtggtgaagaaaaataaagataaaaaataaaaaataaagataaaagaataaaaataatatgaagaaaaatacagtcaca

SEQ ID NO: 129398 - DNA, 212 bp, Homo sapiens
atccacccctcttggcctctcaaagtgctgggattataggcatgagccgccgcgccctgcctgtttctgccattctttaagtcccctggcacatagcctcccaccctactcccaattctcctcttcctttcctgaagcttacatgccaccaccctccccatgcttccctttcttgaaccagacttctgaaatactacccagtcagcccccag

SEQ ID NO: 129399 - DNA, 465 bp, Homo sapiens
agtcgtggtgtggttatatggtggcagtggggatggctgtaatggattggtaatgatggaagcaattttggaggtggtgcagctacaatgattttggcaattacaacaatgagtcttcaaatattggcacccatgaagggaggaaattttggaggcagaagctctggcccctgtggcaatggaggcctatactttgcaaaaccatgaaaccaaggtggctatcggcagttccagcagctgcagtgagctatgattgtgccactctactccagcttgagtgacagagggacaccctatctcttaaaaaggtggggagggtggctgtggttacctgccatcatctttaagtttcttgggcattaagcaagctggaagccagtttaatagctatccttatgtcttatgtcttacttttcatccttgtggatccctttggaaggaactaaatgtgttggcaccattttc

SEQ ID NO: 129400 - DNA, 521 bp, Homo sapiens
ttggtttttaaattgaatatctattaagcacaaggtaacaattcttaccacacacatcagttttattatttcccttttacaaataagacacagatgggtagtcagatgtctttgaggtaacacagcaagtagttaaactgggttaagtgattaacccaggttgagtatggttccaaaatctcttacagtgtcaggcaggctacatcagtgcagtatacgtacatcaggtttcacgaaaaattttttccagagaaaacacaaacccaaggaaccttcagtaagtggtgccttatattagtggtttttagcaaaaggaagaaacttaagtgttttcctgctgcctgacaaaagtgaaaaacagtattttggtttttattgaagttagcatgtatgtttgtagcttgcataaaatagtactgaaatccaattgattatgaattcttggactaacagaacctggatgacaaattagaggttctggcctggttgctggcttttttagttgtcttgggtgtaaattt

SEQ ID NO: 129401 - DNA, 748 bp, Homo sapiens
ggtaatgatttctcaaatgttttgagtttttagtatttgtttattatataaagttgaaatatgtactatcatgataattataatcaaatagagaggtcagacttgaattttatatttctaccactgacatgctttctgtcaaattaacaggttttttttaaataaagttttgacattggattcataaggactgatgtctgtatcatactacaaatataaactgtttaatttaatgacaatgcctaaaccaggtaaccggagtgaagacaaatgaaattcttccttttgtactggtcattgtgtgaaggcaatcatagacacaacctgtgtcctgggatgagatatgtgaaatggatgcaagtcctcaaatgttatcattttatgcattcaaatggatagtcagaagacccataaggcccctaatttagaaattcccacagttctcaataaagtggctttccactagtttgagttgtcaccttttccaaagacttgacaccacatcttcctcaatgaagtaattctgcttcaagcaggtagattttcatattcatggcctacaggccagatttcaaatgctctttagtattttctttatgtcatagcacacttggcttttgggtagtttctgcctcattttcatactagctttgtaaagatttctgtagtatgtaagagaactctaaaattgaggcttatgtaattaaatgagatatagtttagacttatgaaagaacggcatgaagta

SEQ ID NO: 129402 - DNA, 438 bp, Homo sapiens
acagagagatgtttatgtgccccactggaaaggcggagaaaactgcttcaggtttcaggtgaccaactcagctctcccagccacaggccctggagatcgccctaagggctaagggagccatagctcacacccctgcaactttccaaccaagttgggaagctctgatctggaagaaatgataaatttggtaatgggttaagtctagaggagggaggcaagggcgtttggatttcaactcttcacctggtgtaccattttatcaaagtgggagtgtattatacttagataaatatagcttctaaaaacctattgggagaggctggctttgactcagactggagggagtaaggagtaagatgggagaagggtattggggagtagaagtagaagtgatgaggtgactatactgttgaaggaatctcactgacgaatagtatt

SEQ ID NO: 129403 - DNA, 702 bp, Homo sapiens
atgttaagtgttattatatcgggtgacatgctttttattttttttcttttaaaccaggaaacataaagctagattaaatatggctgtttataccaaaaatagagtaaaataaaatcaaataactaaaataaaagctactgagtaaagtttccaagtacagagacaattgctttgaagtactttgtttcacagggggacattttttcttctgagggaggcaatataatttatatatatttgggaaaaatatttttttgcatggtcctttacaaagaatgcacttatataatgcttttatctctataatttccctgaaaattcttgattttatactatcgtacttgaataattattctctcattagctaggacgttatcagtgaaaatttttgtattaatatcgatgtgtatcgatgccccgttctaaagctatttaaataagtagtttattccctcatgcagaaaattgctttagtttgaaaaatcttaaataattagtggtgtttgtcaatgtgattgtggtagtttgtggttgtagctagtaatttaaaagatagtgtagtacagaatggagctagccaatttccttattattcatctaaaatgtaatgcattcttttgaattattgccaatcaacacctggaaatatatgagcctgaagtaagcttcgtaaaataagagtaacgtataaaaagtgaacaa

SEQ ID NO: 129404 - DNA, 491 bp, Homo sapiens
aaaggcattccttagctaagctaatactggtccagctgaattacttaactgtgatttgactcagtgtaggaatagcgtttagaaacctagagtgatggaggattcacttggcactctcaagtttcagctgtcttatctgggcttgagcaagggttggacatcagttcattgaaaatgagctttttctggcaaggcctctgcaaacgttttgtcatttcaattaagtgagagttctttgctcccggtaacaaatgtgttgatggcaaagctgacgtttgcttatgaaaatgaaggaactggacttgttgatattgcagaagaggggacagcttgcttctttgggagcattcccttcaattatttgaaattattaatgcatcccctcctcctcctcaggatggtggtgaatcacgatttatgttcctgaactcgttcactttgtggagctcttcaagttaaaggaccctaattgaaaagattataatttctta

SEQ ID NO: 129405 - DNA, 244 bp, Homo sapiens
ccccttaatcccatcaaaaccagccaccgcatcctgcagaatgaacgatctgagtaccccttaatcccatcaaaaccagccaccacatcctgcagaatgaacgatctgagtaccccttaatctactcaaaaccagccacgacatcctgtagaatgaagacgggttatgtcattgacaaagttgtattgtaagtcatcattccttcccttcccttccctccttctttccttccttccttccttcc

SEQ ID NO: 129406 - DNA, 370 bp, Homo sapiens
tgttctgaggatcccctccagtaaggtgtgcccagagtgttccaagcagaagaaagaagaagtacaaagtccctgatacactaacaatcttggtgtgttcaagggacaggaaaaaggccggtgtggctggaatttggtgttcaaagcaagagaggagagataaaggaagatgagtcatgcagagccttttgaaggctgtgggtaaaatgtatgttatacggaacttagttctaaatctagttgcagtggattaacctggagagtgatgcaaactgagttttactctggaaaaacactgtgactgttgtgtggagaatatgctcccaagtgtagaaactagatcaccttgcatgggccaagagagatggtg

SEQ ID NO: 129407 - DNA, 490 bp, Homo sapiens
aagtgggtttctggtagagaacacatatttgcatattatttttatccactcttctagtctatgtcttttaattactgtatatagaccatgcacatttaaagtgattattaatatgtttgaattattagctatattttataactgttaacatatataacatattgtaacatgtaatgaacattttttgccaagtactgtgcatcaatggacaatgtcaagaaagcagagagacaacctacacaatggaacagaaccttcacaaattaaatatttgacaagggaatttatatccgcagtatgtaaagcaccccagaactcaacaataaaaacaagtaaacaacccagttaaaaaatgggcaaagggccaggtgtggtggctcacacctgtaatcccagcactttggaaggccaaagcaggtagatgacgagatcaggagatggagaccatcttggccaacatggtgaaaccccatctctactaaaatacaaa

SEQ ID NO: 129408 - DNA, 250 bp, Homo sapiens
gcagcatttgataattctaaaagtgagtggtaaaatacctcaaagattttaactgtgtttatatctcttaaaatattgttactcttaaaattttgcttgatacttcatttattcagagtgcaaagataatttcagtatacaaaattgaactgattacaaattcataatctatcagaatctaagtcatatgtgatataatcaaatctcaaaaaattagtattctcagtttaaaatattgtgatgttcccaa

SEQ ID NO: 129409 - DNA, 743 bp, Homo sapiens
attctataggtcactatttccaaagtgggtaaaatatattaagtggtacacaatgtttttaatttaatcattatgtatttatgttaatggaaattaagaaaatataggtagcacatcaaattcaggacttaatggctattgcttatcctaactaaatgtatttgagtttaaaaaaatgttaaaaaaagactcgctaacagttattgatggctcattatttatcaggcattgtgaaaatgttttatatatattaactcacttaccctttacatgaacccagtgaactattaaatactgttgttgtattcacctgatatgtgaggctaaaaaggcatagagaggttttcatagctaataagtggtgggtttaactccaggcaagctgaccaggacctgtattctcaactatcgtaccttaagacagagggttaatgtgcaactgcagcaaaaattgtgagagtgataggcaaatggcttgtttgtgaaactaaagcagtagcattagaaaaaagagctgttgaaggttttttggagtaatactataaacatactgtttgatatgtaaattgaagtgatggtagtattcagaatgcattttgagggagtggaattaaatttaggaacaccaattaataattgactatataggtctaatttggagaaaagcatttgaactagggttttacattttaggagaaacggagaaaaaggagctaagactacaagagccattgtgcagagaa

SEQ ID NO: 129410 - DNA, 287 bp, Homo sapiens
tgctgaagtcaggatacctaataatggctaaatgtaactgcaagcacctctgctgcggccagtataatttactgtttttagtagtaagacttttaaccccaaaaccatgtaaactaatggtgccattctcaaaaactcaaattgctcttaaaaaacacacaaaatggaagtcaactgtctacagcatgtaggcgacttcattacaagattgtgatggctatacaattatggctaagtatccacgcatcaatttctattttcactttgcaggcacatggtatttccag

SEQ ID NO: 129411 - DNA, 232 bp, Homo sapiens
aattaccctcccagatcctctttcaaggttaatggactcaccatgcacccagccaggaattctgtaagcaccttcaactgtttctttctcccatctaccacaaataataaagaaggtcgccaggccctatcagttctcactcccaggtgtcttttgagtccatgtgttccagagtaggtgttcaggaggactccatcatctcctacccacactaaccccaagggtttgcatg

SEQ ID NO: 129412 - DNA, 698 bp, Homo sapiens
ttcctttataaaattgtatttagaaatttgttatatgtgtctatgcaaacgttttaaaaaatgtaaaaatgtggaattccataatgctgcttactgatttacagatataaatacatccacgtggacttgcacacatgcaggtgcccctcgccctatacaatttcaccatctgcacttgctatctgaacgcaagaacaagaggttttggagagaaagggatactcgttaacctgtatgtgtacatagcttttgggttatggtttgtcttacaaaagaaggatattatacatatttcctgtatcttggcttaatcaatagcacttcctagaaatcttactgagtcaactggtatattctaattaattctttgtgctggctgcataatattctgtggtgtagaggtgtagcaacaccatattttattcagccattctcctattgatggacacttatgttatttccagttttttgatgctataaacagagctgcaataaatattgttgcacatatgtccactttactaaagattttatttctccaaatagaattttatttctagtctccaaatagaattttattatctacaatttcatttaagctgcccttccacacacatattaaggtcatcgacctggttatatgtagtgcgtgtgtgtgtgtgtgtgtgttgttttgtttttgttttatttttgatgtt

SEQ ID NO: 129413 - DNA, 811 bp, Homo sapiens
acccaagctggagtgcagtggcaccatcatagttcactgtagcctggacctcatgggctcaagcgatcctcctacctcagccttctcagtagctgggactacagccgtgcaccaccatgcccagctaatttttttttttattattttttatagagacagagtcttactatgttgtccaggttgatcttggactcctggcctcaggttatccacctacttcagcctctcaaagtactgggattataggcatgagccacagtgcccaactcccaaattttttattgctatattcagtaacatgaaattactgtcaaataatgtacttttgcctattgttttcattattgtattattaatatacttacagtaacacagtagtgcttttacagccttgtacaattccatagacaacactctgccctactgtgtaatattttaattggaattctcttttgaaagataaaattaagagttggccatcatttccaaacaccatgaaaatatgagttgaagaatctgcttctggccagtgcttaataaatgggaaccatttccctatttggaatgttttttatattgttattaaattagatctttttttgagtctaattcaatgtacagttgaagtacagggtattatgtctctcaacattgggcccatttcacctagaaagcattcaagaagcccgggatatataataatttggtgtgctgctgtgtgtgtgtgtgcattgtatatatatttgtgcttacggtattctccaatcttttctcccaaatctgcttttttttttttaggaaaagaaagcta

SEQ ID NO: 129414 - DNA, 780 bp, Homo sapiens
taaacaatagatagcttaagagagaaaatttccctaaatgtgaaaaacagaacaccgaagaaccaagaatgtttcaaataaaagttataaaaatgttatcttcagatgttatttcatatcatataattaatttttaaattttgtttgatcttaatttgcagttgcaggaacccattaatttctttcttagagttctggaaaatttttattatgttcataaatcttagagttattagaaacttatatttaagtatacttagacttttttccatcaatctgagtgcaaatacttttactgaaaaagaaaaacaataactgtgggtgacagagacttaaaatagcaatggttaaaaatctaatggaagtttaattagcaattgacaggggactttggttattttttatggatacaacataataaccagaattatttctgatgtcatatcagatttttaagattttcatacaagtttggaacatttatatcaataacatacccataaatgtaactgacaataatacttctcatataatttactaaataatatgaatcatttattatctacacaaatgaatacatacatcctttgaagatcttcagggcaccaacaagaaagtttctaagctaactttaggttaaaaagacttaattttgaatttggatattggggaagcctatgaaagatgcactttcaagcactattaagtgcttaaaacacttgatcaaaacaagatcataagtcgcggtgaaacaatagttactcatttaatcagggttat

SEQ ID NO: 129415 - DNA, 317 bp, Homo sapiens
gtagctgggattacaggcatacgccaccacacccggctaattttgtattttttttttttaagtagagatggggtttctctgtattggccaggctggtctaaaactcctgacctcgggtgatccacccacctccacctcccaaagtgctgggattacaggagtgagccaccacgcccggcccgatttttcagttttaatattcatgatggttatgtgattttttttattacttgttggatcagtcagatttgctgcatagttgaatttctgtgatgaaaatttctgtagttgaaaaatttttttcccttaagtaacct

SEQ ID NO: 129416 - DNA, 610 bp, Homo sapiens
gggtatgtcaaaagagcacaggagccaacctgaaagagctctcaatgtccaaagctagaaaaatttgagaaaccaaagaaatgataggttcgcatagcccacagaataatatatgtatatatcccttgaattcaaactggactggagggaaggagggaagaagacaactctccctgatagaagaattccaattaataaatgtagaatgaagaaaatagaaaataactattagcaatattttactaataattgttgtaggcaaaatccactgtggatgctaaaatcagtgaatgaaagtttgagcagaaacagggtatctgcacagtctcaaagtatatccacaccaagatactagattctgttatattctcgccaaaaatacataacctcaatctaataatgagaaatcagagaagcccaaagggagagacattctacaaaacaactaaccagtactcttcaaaagtctcaaggtcatgaaagacaagacaagactgaggaactgttacacactgggaacactggcgagacataatgtacaaaggcaatgtggaagccaggtgtgctggttcatgcctataatccctgcactttggcagactgagacagg

SEQ ID NO: 129417 - DNA, 185 bp, Homo sapiens
gctccgttgacgtctgcacgatagagacttcctaagctctcaccaggagtagacgctagtttctggtataggctgcagaatcatacgccaaaatcaaacctctttcctttataaaagacccagtcttggatatgtccttacagcagtgtgagaacggactaacacagtaaattggtactgcaaag

SEQ ID NO: 129418 - DNA, 357 bp, Homo sapiens
tcacattagtggaatcatacgatatggtctttgggattggcttctttcactcagcattatgttttcaaagttcacctaatattgcagcatgtattattagtttattcctttttatcacaaaaaatattccattgtatggataaatcacattttattcattagctcactgacattttgggttgtttccactttttgactattattagtaatcttgccatgaacatttgtttacaagtttttacatgaaacatgttttcatttctcttcaaatgaattacctaagagtgaaattgctgggtcagctctacgttcaacattttaaggaactgcccaacagttttccaaagtgtctgcacc

SEQ ID NO: 129419 - DNA, 508 bp, Homo sapiens
tttcctggacttggtatggagccaaagggtaccttccccactggccctgcttttatgccctctttagagtgcatagagagatgttggtaggcccatgtctctgctagaggggcctgtgggttgggctgagttactcgccatggacagtggtggggtcctggaacccaccagctgagatggtttgggcggttctagtctgcacctccccagagaggtcatggcagagaggccaggcacagaggaaacccgctgagcctgcttccttagttctggcagatgggtcagcccccacaggactcaggattcaatttagcccggggttctggctccatctcccacagtgccggtgccagtggcctcctaagtactgtttggccaaacctggctctgactgagacaaggagccttaggagtagtagggacaggagacacagcaaactagggctcagagccaccctggaaccccttcttcctccctcttcatgcatgaccaaggtttctgtatttg

SEQ ID NO: 129420 - DNA, 718 bp, Homo sapiens
gctgttttgagagtagtaaatactggggttggggacgtggttgtatggatgcttccagtgggcaggggagtcctttctgtggttctagttgtagatgagattgtagtgtggaaggttgtgtctgtggctgacacagaggagggtgtcactgtcactatgggagtttcccttgcagtggtggtagagggagaagatgtcatggctgacgttcctttctcagtagtggtcatagagtaagtactggtgacggtggtcactggcttctgtgtcacgggagtcgaggtgtaagagctggtgaaggccacctgcgtcgtggtcacacagatggaggtggggtgggagatggtgattataaagctcgttggatacacgcactcagtggtggctgaatagaccaacacggtgggtggagtggtttcaaccttgaaggcaaacttggacgtcggggtggttgaggtgttggaactgactggagagttgagcaatgtttcagagatgagtgtgtcatggggggaggtagtgagtgtcataggtgcattttccctgtggccaggagcaggagaggcgagctgggggacaccaagtggccacccagccaggtctctggagtgtggagaattgctgagcacagcgctggctgcttctgctctggggaaaggcacttgagagatggatgtggccgtggataaagttcctgcattggcggcagagcagagga

SEQ ID NO: 129421 - DNA, 271 bp, Homo sapiens
ttaacaggtatcctgtcaaggaccttataggttgtctcgtatcttttgctatgaccagtagggctgtatgtagtaaacatccctatctgtacatctttgtgctgaagattgcatatatctgtgggataaccacttaaaactggaatttctgggtcagctggtatgggagtatgtcagttgctttgtagaaattgctacattgccccctggagacactcatgctaatttatacccccaccagcatgacacagcagtgtctgttttcctgtta

SEQ ID NO: 129422 - DNA, 274 bp, Homo sapiens
ttgtgaggcacagaaacagcagaaaattcaaaaggagaaatcagagtgtcaccacatcaggagtggcttcaggccaagaagggacctgatctaggctctgaggagctgtaggatttggacaggcagaaaggagaaggaaaaacatcccactgaagtccctgctcaactaactcacaatggttcttgtgacatttccacagatgagtctcctggctgctggtctgtgatggtattactacttttactgtccagtgatataaaaagcaggtttcac

SEQ ID NO: 129423 - DNA, 370 bp, Homo sapiens
cagataaacaatttgctttgttgaagtcagcatgcatgtgactctaaaaagcattagtccagtgaggtaaaaaggagcatttactgagtgtatagagagacctcacagtatcgacggatggaacacaaagagttgctgggtttcacccaaattggccagaaaactggggaattctcagggacagggtggcttgtccctctgtgtcccccttgtctttgcttctcagccagctccagcctctcccacattctgtctgtcttcctcggctccttcatcctgtgtgaggcacaacatggctgctctttctggatctagacaaggaagaccactgagctccagtactcacaatcaactggcaatacacactaaa

SEQ ID NO: 129424 - DNA, 785 bp, Homo sapiens
gaagggtttcccacacttttatgtaagttttgccactgagagccctaccaggttttcaccaaaaagattggagaaaaaatcccttatgcttctggcagagggagaaaaaagcaactgttttgaaatacacctgggacattctgttcttaacaagaattaccctcaaaaccaaatagtttactagagtctaacaaatggtttttaccagagtttaagcaactgagaggaaggaaaatatccaacttcagcctctctctagatttcaatgtggcagggggaagaacaatactcaactgcaacccactccaaacttccacattgtattaaggacatacctagctctagtcccttgtagcatttctgtctcaccaaagcagaggagactgaaaaggatttgttaagtcacaacacagaggcacaagctcactaaaaaacagaactaagcacaggactatagtacacttctccacacacaacttacaaatgcatcactaaagtactgttgaatgcaggttttttcacccagtacatcacatccagcttttaacacacacacacacacagagacacacacacacactacacagtattctaaaaagcaaaagagagtttgaaacaacaagaaaaaataagcataagaaccagaatcaaatatggcaggaatggtgaaattatcagaccagaaatgtaaaataaatatgactatcgtgttaagagctaatggaaaaaacaccagacaatattcaagagtagataggtaatgtaagtagagaaatagcaattct

SEQ ID NO: 129425 - DNA, 232 bp, Homo sapiens
agactgggtaatttataaaggaaagaggtttaattgactcacagtcccacatggctggagaggtctcaggaaacttacaatcacggcagaaggagaaggagaagcaaatccttcacgaagtggcaggagagagaaaagtgaaggaggaacttccgaacacataaaaccatcagatctcgtgagaacttactatcacaagaacaccatgggggaaattaccccgtgatccaat

SEQ ID NO: 129426 - DNA, 467 bp, Homo sapiens
  misc_feature (27)..(27): n is a, c, g, or t
tctagaggatcccagcggcgccttttntgagatggagtgttgctcttcttgcccaggctggagtgcaatggcacgatctcggctcacctcaacctccgcctcctgggttcaagtgattctcctgcctcagcctcctgagtagttgggatgacaggcacgcgccaccacgcccagctaatttttgtatttttagtagagacagggtttctccatggtcaggctggtctccaacccctgacctctggtgatctgcctgcctcggcctcccaaagtgttgggattacaggcgtgagccactgtgcccagccttatctgactattactgtaacagtggccaatcaaaattccttcttttctttttttttttcccttgagcctagaatttccttaatggaggggagaatctagcaagcagttgagtcaaagggtgtagattatactacagtggtaaaaaaagggcggccgtt

SEQ ID NO: 129427 - DNA, 113 bp, Homo sapiens
cacaaaaaggaggaaaaggaaatagagctatataggagtaacatcttcacatctcagtgtgattaagttagcataaatctgaagctggatctgataagatgtatatgggaagc

SEQ ID NO: 129428 - DNA, 225 bp, Homo sapiens
agataaagcagtaatatgtaactatgttaacattagtaagaccaacattttcagtgtaaggaaaagatatatacagatcaaataaaagttggccaggcatggtggctcacacctgtaatcccagcactttgggaaatcgagatgggaggatcacttgaggccaggagttcgagaccagcctgggcaacgcaacgagaccccccatctctacaaaaaatttttaaa

SEQ ID NO: 129429 - DNA, 414 bp, Homo sapiens
ttaatgtgttcatctcttaaatgcagccagggtgtggtggggagagaaaatatcctccccagcggtgagggacctcactcagggtcaacttgggcagtgcgccgggtctccagccctctagtgagcttgctcttctggtctatgtgctctgggcagaaagctttgagaaaagggggggaacgagccttagcagcccccgttccaagcaacaggtctccaacttgcatggggccagagcatcagaaggcatgctgctctttgaggaacgcgtggaacactcatttagcacatttatgtcacaaaatgcataattttgtctgaaatcagcaaatgtcttttcttagcttccaaaaacaaacaagtggttactagttgttcaaatgtcaagaacattcttgaggaaacctttgaact

SEQ ID NO: 129430 - DNA, 269 bp, Homo sapiens
aaagatacaaaatcaataaggtaactgtacaccttgagaaaatagacaagcaaaataaacctaaagttagcagaaggaataaaataatgaagattagagtggagataaaataaaagacaatagaaaaataatagaattaataaaaagctatttctttgaaagtatcaaaattgacaatcctttccctaaattaacgaagaaaaaaaagaaatatgaaaatcagatattaaaatggggacagtaataccaatgattcagaaataaaaagg

SEQ ID NO: 129431 - DNA, 685 bp, Homo sapiens
gacagttgatagctaaatgaggaagcatgttgtcatttactcttatacataatccatgtgtttcagcctgaattgcctaatctcagtccctgaacgtgtatttggcatttcctctagcgcacttctgttcaactctctaaattatttttgcttctcttttctttttaatccaaatatattattgcccatttcatttaagaccatgttgtgaatatatagtaagcatccaacatatttaattagtcgaaaaccttcccctctttcattgtttttactgccaacatcagtctgttgcaacagaaaaagaataaaacggattaacggcctccagaaaatataggcatttaagatctctcataaaagagatatcaaatcttatcacagtgaaggcataaaataattattttctgctagtgtctatgggagacactcaagtaagaactgtggttttaggttgactatccattcaacaagggatcaaaaacaaacaactcaccctcccctcaactcatcatctaaagggactaaattcacattttgagtacaaagctgtcttggggtgacagtttgtagattaagacatgcaaagacctaacattttttcttctattccttctgaagaaacatctataatttaaaaaattataaccttccaaccagaaaaacaaatattaattttacattt

SEQ ID NO: 129432 - DNA, 239 bp, Homo sapiens
cttcatctttctagtgagaacatcctcaaccaaagtgtttggccaaacagcatgtacaaatgggtaatatattgtaatgtacacttgggatatttaatctatggttcacatacatatttaatatgttactttaatttaaatattttatacttattaacatgactttttcctttctcacatttcatgaaacaattttgttaaaactcttcatacgcatctttaacaccaatgtgtatgtt

SEQ ID NO: 129433 - DNA, 624 bp, Homo sapiens
aagccagatcttagatgagttcacattttccagaagccaatgggaagaaatgcattccagcaacagaatggcctacaaagaagaagagtgtgaaggaagaaggcatatgtgggaacacagctgaactgcatggaacaagatgtaaccagactatagctcaagaactcttgagtgaggccaggctcggtggctcatatctgtaatcccagcactttgggaggctaaggtgggcagataacctgaggtcaggaatttgagaccagccttggcaacacagcaaaatcccatctctaccaaaaatataaaaaattaaccaggtgtggtggtgtgcacctgtggtcccagctactcaggaggctgaggtgggaagatcacttgaaccagggaggcagaggttgcagtaagccgagatcgcaccactgcactccagcctgggtgacagagagaaattccgtttcccagcactccccagaaaaacctaaatggtaaatgaggctgaaggtaggctgcagaaagattgtgaagggccttatatcccatggcaaagaatttggaataaacagcacagaaaggattacatgctatatacaaagtacacaaaaggtaaattcagggaagaaagag

SEQ ID NO: 129434 - DNA, 564 bp, Homo sapiens
ctctctgcctcacaaaaatattgccatttttttctgcctctttgttttcttggcctagtgaggttgtcagaaggattgttcagtggggtccctgggaaggaaaaggaggggaaagagaaaggtgatgggggtactctctccaaagcatttacctatcatgtatcactttttatataaaggttttcctaatggcctagtccttggttagcacacttccctcacagattcccacacagaacctaagcccttgattactctattaagggctgtgatttcgggggggccctgagctgaactacaaattcctcaaggggaaggccctgtcctgtggcctcccccagatatttaacatggattgaaaccctgagttatggaagggcagccagagccagggagaggccacaggaaagaggaaggcaccatgggattgtccctgtgccgaggatgtacctccttcccccaccacccctgtcagtagtgctggtggggagtgttatccctgcatgccagaaagggaaaggccatccaggccgtacagccagtaccttcaggagcagagctggt

SEQ ID NO: 129435 - DNA, 686 bp, Homo sapiens
taattagaggcgtgagccaccacacctggccaaacaagctttgttttttttacctgaccttagactaatggaaatgtagcatttccctggtcaaacctttacgttgctgtgaagctaaacaaactaagaaatcccttcttagttggatatgttggtgaatgtctcttgattctcacaacaacccgacatgggtccagtctgatttatgaatgtcatctgtccttactctgtgcacaggagtgcaactctgtgagatgaatgcacacatcgcaaagaagtttctcagaatgcttctgtttagttcttctgtgaagatatttccttttccacaacaggcctcaaagtgctccaaatatccacttgcagattctacaaaaagagtgtttcagaactgctcaatcaaaagaaatgttcaactctgtgagatgaatgcacgtttagttcactggaagacatatccagattcctagacatgtgttaacagtaaaactaaactaaggataatggccattttcagatcagtgcatttgattttgtttacatgtcctttctaaaaggaagcccttctattgctcaaagcatttttgtgaaacactcatatagaggataaatgtcttgttctggcattatactttttcaaaatgtattcactgacttaatctcattggaaggtgtatactgagaaa

SEQ ID NO: 129436 - DNA, 145 bp, Homo sapiens
gttatgttttcattctcattcagttcaatggattttctgattttccttgtgacgtatctgtaacccatgtgttatttagaaatgtgttgaccaggcatggtggctcatgcctgtaatcccagcgctttgggaggccgaggcgggt

SEQ ID NO: 129437 - DNA, 415 bp, Homo sapiens
tatagaaatggtatattttggtggtttctctttctcaccaacagagcttattaatccaaacaggtctctaactgcaaatccagccaatgaaacatgaggttcattttcagggcagattttaggaaaatgttttctcacgcctaagaaaaagccacaggaagaaatggccattcggttttctgaatatctggatgtgacacctgaaattgctgtagccattttactaaagataaagctgaggctggcagagtgaggagatgcaaagaacctgtgtctccttgacacggttgcgtctccaatcaactctaaaagttgcccctcctttggatttcctgttacaggagataatacatttcctcatttcttagccaatttgaatcaggtttttattacttttagctgaaaggctaatggc

SEQ ID NO: 129438 - DNA, 412 bp, Homo sapiens
taaaaatacaaaaattagccgagcatggtggcaggtgcctgtaatcccagctacttgggaggctgaggcaggagaatcccttgaacgtgggaggcagaggttgcagtaagccgagattgcgccgttgcactccagcctgggcaaaaagagtgaaactccatctcaaaaatgaaaaataaaaaataaaagaatattaaggataaactaaaatactgagaataaaaatgtgtgtgtcccattgagaaaacattttctgagtgcccactgagctccacacacaatgggaaagcagaagaaggatggaagtagtagaagcttgcattctaatgagagtgttagacgactcgactgtaatgcacaggaaaaagtaaatgctataaaagaagaagcctaaatcaagggttacaggagg

SEQ ID NO: 129439 - DNA, 334 bp, Homo sapiens
agtctctagtgactttctgatgggagcgcctctgcttcatcaaggattggaggcacttagctctcaacaaacttaggtcgctttttttcctccacagttttgttacctcccttatttgccaggcttggctttgagtgaatcttggcttttttggggttgtggggggctctctgattcattcagcagatcttcactgagtggcagatgtgtgcaaagtgcttgggatgccaaagacaagtgtgtcgtctgtatttagtgttgggacagacagtgattgagacaacagatttaatcttcactgatgacagtgatgatgccacgaaagacatgggcg

SEQ ID NO: 129440 - DNA, 225 bp, Homo sapiens
tgctatttattaattacttagcctatcacctttgtgcatatgcacaaagtacaggtcactcactgcactatgggagcaagagattggaaacaaatctaaccatttgtttcagtcccttcccgctactataacaaaataccttagactatgtaatttacaaacaaggaaatgtattgctcatagttctggaggctgcaaagtccaagatggagacaccaatagatt

SEQ ID NO: 129441 - DNA, 502 bp, Homo sapiens
catcaaatctagaaatcatcttctcttattttatatcgtattacagcattgatatgtatatgatacatatacattgatatgatatgcttctatacccggtctgtcacaccgtgtggatttcctcagaggctcctagaaggccctgctgtccaggctaggaggtttctggcagccccaagctccctggcttctgcgtgaaggtgtgaatagaaccatgctgttaagtgggggtttgcagaaaccagggtttgacctgggagagccctaggcagcaggggatgatcaagtgatcaagataatattttaatgcaaaatttgaaaaatcaaaactaacggatgaaccttgaacagagtgtgctaagtggaaaaagctggtcattaaagaacatgctttgtgtgattccatttttatgaaatgttcagaataggcgaactcatagagacggaaagtagagtagtggtctcctggggctgggaggagaagggggttacagtttgatac

SEQ ID NO: 129442 - DNA, 1257 bp, Homo sapiens
gttcctcctctcccctcatgaagtttttctgccaatttgagaattactctggttaagtggtggctcagaataattaaatgcttaagatttaagtgctgaaatgtgttacctaaagatttggatgggaacttccttgcctttgtgaagggagagtattgaatatacggatgtgtgtcaagggtctctggaagccttcgtgctgaatcatgaccactcaccatgctggaaagagaactggagggggatgacctagagctgaccctggaattctctttcctgaagaaggtctgatgccatttaactttggggtaattcacctgtttctaataacagctacacctgtgtcccgagcattggactggatgctgccatatagcagctcatttaacctttgtcccatctgcagatgaaagaacaggggcccagaatggctactggtggagccaggattcaagtctgggttgattgacttggattttgtactgttaacccctatgctgcctgactttctcctaacatcacatctatgggtgatttaacacagctttcccacccttttgtttttcctgcaaaattaaccattggaccaaaagccaaagcatcttcttctccaatagctacttggccctccagaagactgtggcacagtgtgagatgctccccagcagcttccaggtctcacctgtggccttgatgcctgggtgaacaaaagcctttcttttggtttggtacctttgtatttctgaatctttagtaaaagcgaacattgttttaaaagtatctttttggactagctcatacatttgatatggtttggctctgtgtccccacctaaatctcgtgttgaattgtaattcccagtgttgggggagggacctggtaggaggtgattggatcaagggggtggatttccccccttgcagttctcgtgagggtgcgttctcacaagatccggttgtttaaagtgtgtagcacaaactgggtatggtggctcaagcctgtaatcctagcacttgggaggctgaggtgggcagatcacttgagcccaggagttcaagaccagcctgggcaacatggtgaaaccccgtctctacaaaatatacaaaaattaggcaggcatggtagctcatgcctaaagtcccagctactgtggaggctgaggtgggagaattgcttgagcctggaaagtcagagctgcagtgagctgagattgcaccacttcactccagtctgggcaacagagtgagaccctgtctc

SEQ ID NO: 129443 - DNA, 1209 bp, Homo sapiens
gtgcgcccgccccctctggggcggagagactcagcccctgcccctcagcggataacctgggactgaccgttccctggggatccgacgggccccagaggacccacgcctgagccccgtgcgactcgtggcctttgggctagaagccatggacgccttcacccgcttcaccaaccagacccagggccgggaccgactcttcagagccactcagtacacatgcatgttgcttagatatttgttagagcccaaagctggcaaagagaaggtggtaatgaagctcaagaaactggagtccagtgtgagcactggtcgtaaatggttcagactaggcaatgtggtacatgctatacaggcaactgagcagagcattcatgccactgacctggtacctcgcttatgcttaacattagccaacctgaaccgtgtgatttatttcatctgtgacaccatcctctgggtgaggagcgtaggtctcacctctggcatcaacaaagagaaatggcgaacgagggctgctcaccactactactattctcttctgctgagccttgtcagggatctgtatgaaatctccctgcagatgaaacgagttacatgtgacagggcaaagaaagagaaatcagcatcccaggatcctctttggttcagcgtggctgaggaggaaacagaatggctccaatcctttctacttcttttattccgatctctgaagcagcatcctcccttgctcctggacacagtgaagaacctttgtgatatcctgaaccctttggaccagctggggatctataaatccaatcctggcatcattggacttggaggtcttgtgtcctctatagcaggcatgatcactgtggcatatcctcagatgaagctgaagacccgttagggtgtttttaggcttggaactagtacctactttaaaagatggcctcttggtgggacagacatttgtataagtcacaggccatgtcatactgtgcttaagttcttgttcatgtgagcatttaacaacctgtgatgtgggcagagatgaggccaagaacggagaagggaggagcatgaagagttgtatgtttttggagtgctggagtgacttgtgaatttctgaatattttcccttcatctaacattgattgaacatctcttatgtgcatagtgggagcttagtatttgctgaatgaataaaaattgaaaggaaaaaattta

SEQ ID NO: 129444 - DNA, 723 bp, Homo sapiens
  misc_feature (645)..(645): n is a, c, g, or t
  misc_feature (707)..(707): n is a, c, g, or t
  misc_feature (718)..(718): n is a, c, g, or t
gtgcgcccgccccctctggggcggagagactcagcccctgcccctcagcggataacctgggactgaccgttccctggggatccgacgggccccagaggacccacgcctgagccccgtgcgactcgtggcctttgggctagaagccatggacgccttcacccgcttcaccaaccagacccagggccgggaccgactcttcagagccactcagtacacatgcatgttgcttagatatttgttagagcccaaagctggcaaagagaaggtggtaatgaagctcaagaaactggagtccagtgtgagcactggtcgtaaatggttcagactaggcaatgtggtacatgctatacaggcaactgagcagagcattcatgccactgacctggtacctcgcttatgcttaacattagccaacctgaaccgtgtgatttatttcatctgtgacaccatcctctgggtgaggagcgtaggtctcacctctggcatcaacaaagagaaatggcgaacgagggctgctcaccactactactattctcttctgctgagccttgtcagggatctgtatgaaatctccctgcagatgaaacgagttacatgtgacagggcaaagaaagagaaatcagcatcccaggatccttgttcacntggtgagagaacaaatggtccatcttctctcttttccattctaacactctcctgtctgaccntgaaacttgtnattct

SEQ ID NO: 129445 - DNA, 691 bp, Homo sapiens
  misc_feature (691)..(691): n is a, c, g, or t
gtgcgcccgccccctctggggcggagagactcagcccctgcccctcagcggataacctgggactgaccgttccctggggatccgacgggccccagaggacccacgcctgagccccgtgcgactcgtggcctttgggctagaagccatggacgccttcacccgcttcaccaaccagacccagggccgggaccgactcttcagacaaaattgacttgtgtctgtgagtgtgttctgggaagagagaagagttaaacataaggcaatccatcagataatcctcaatcagcctacacagttggtacagcgagctctgggctagaagatccaggctgaggaggaggatggagaaagattgagatgtagagcctctgggttgagagggacctctgaaatgaactcatctagactgctgccatggagatggtgctctacagtagccctgtcaatcgctggctggcttctgcctagaaaaaaaaagaaaaaaattacccgggctgtggtggtggcgcgcctgtaatcccagttacttgggaggctgaaggcaggagaatccctttgaacccgggaggcggaggtggtagtggagccgagattggtgcaactacactccagccggggcaacagagcaagaatccatctcaaaaacacaacacacagagaacgcaagcacacgcacaacgacaagacactn

SEQ ID NO: 129446 - DNA, 555 bp, Homo sapiens
caggaggctgaggcaggagaatggcatgagcccaggaggcaaagcttgcagtgagccaagatcacgccactgcactccagcctgggcaacagagcgagactccttctaaaaaaaaaataaaaacaggctgcattattgcagaatttgttttcattacctttgtgttaaatttccatgacatgttctaccctttggctctcctgtagaatgactgttgcagaattttgcttttgtaagagttgctacatgagaaatggtcttggaaatgttgtctggaggcatgtgtttctctttcccttacttcctgaattaagttttatttggtttgtaaatcattcttctcaatttttttttttccatttcagagccactcagtacacatgcatgttgcttagatatttgttagagcccaaagctggcaaagagaaggtggtaatgaagctcaagaaactggagtccagtgtgagcactggtcgtaaatgtaagtaccctgtttcttgagggacagtgactcctggtttagaatcctcagcctcagaccctgtaattcacgga

SEQ ID NO: 129447 - DNA, 2725 bp, Homo sapiens
gtgcgcccgccccctctggggcggagagactcagcccctgcccctcagcggataacctgggactgaccgttccctggggatccgacgggccccagaggacccacgcctgagccccgtgcgactcgtggcctttgggctagaagccatggacgccttcacccgcttcaccaaccagacccagggccgggaccgactcttcagagccactcagtacacatgcatgttgcttagatatttgttagagcccaaagctggcaaagagaaggtggtaatgaagctcaagaaactggagtccagtgtgagcactggtcgtaaatggttcagactaggcaatgtggtacatgctatacaggcaactgagcagagcattcatgccactgacctggtacctcgcttatgcttaacattagccaacctgaaccgtgtgatttatttcatctgtgacaccatcctctgggtgaggagcgtaggtctcacctctggcatcaacaaagagaaatggcgaacgagggctgctcaccactactactattctcttctgctgagccttgtcagggatctgtatgaaatctccctgcagatgaaacgagttacatgtgacagggcaaagaaagagaaatcagcatcccaggatcctctttggttcagcgtggctgaggaggaaacagaatggctccaatcctttctacttcttttattccgatctctgaagcagcatcctcccttgctcctggacacagtgaagaacctttgtgatatcctgaaccctttggaccagctggggatctataaatccaatcctggcatcattggacttggaggtcttgtgtcctctatagcaggcatgatcactgtggcatatcctcagatgaagctgaagacccgttagggtgtttttaggcttggaactagtacctactttaaaagatggcctcttggtgggacagacatttgtataagtcacaggccatgtcatactgtgcttaagttcttgttcatgtgagcatttaacaacctgtgatgtgggcagagatgaggccaagaacggagaagggaggagcatgaagagttgtatgtttttggagtgctggagtgacttgtgaatttctgaatattttcccttcatctaacattgattgaacatctcttatgtgcatagtgggagcttagtatttgctgaatgaataaaaattgaaaggaaaaaatttaaaaagacccaatcgcactgatcattgaacaccagtatacaataactttagggtcatatggatcattggtttcacgattacagtaggtctggtgcatggcactctcagatctagtagaggctctgatgtcagtagcaggatggaggagagctgggcttacagcctctcaacttgttggcccttataccatcactgcactcatgtccttgctctgtgcagaagtagaatcagaaaagcatcaggcaccttcatggtataaattgtgtctatgggtgcagtgaataagcaaaaatcagaagcagaccggagggacttataaaaataggtacagggtcacaatgggtgcctatatgtagcctgtgacagataagaagctgacagtgagacaaacaaaaaactgaggctagagcctcattcctctgactcctaatccagtgttctctccatgctctcccactgtcttcagaattgagtagaaatgtgatcccctcctgaatcctgttttttgcctcttactctcccataatttggaaatttccttgtccagtggtttatattcttttctagaaaaactaaaactgggtggagtgtggtggctcacacctataatcccagcactttgggaggctgaagcggaaggattgcttgaggccaggagttcaagaccagcctgggcaatgtagtgagactccttctctacaacaaagtgttaaaaaattagccaggcatggtggagtatgcctgtagtcccagatactctggaggctgaagcaggaggatcacttgagcccaggagttcaaggctgcagtgagcttccaccgcactccagcccgggtgatagagcaagaccctgtgtcttaaaaaaaaattaagacagtatttagacttatcagttagattgttttatttaaatccttctaacaatttaggcaattctacattaattttcatcaaaatttatccagtcaaaaaaatttcatgaatactccagatgtaagagagtcacaattttctacgataaatcagacatcttatttctagggtgattgagggaggtggaaagcgcaggaggaagccagtgaagaggacaatggaatgctgagtcaatgacattgacttgtgttcctatctgccatcttgggtgtgggtctttatatgtggttacagatcctttagtttgagggaggtgaggtagagaaataggatgccagcaggtaggaggccgatgtcagtcctcccagcaaagctgtgtcatttatctgaatggaaatgagaaaataaatatgtactcaataagtcacatttcccagaaatgtgattgagattctcaaaaaatagactcagattcttggctgtctgtttaaccaatcacgatatgggatttgagaaataaaatttagggaattttaagagacatgaaagctactaggtcagggaaaataaaaagcttaaataactatttttattgtccagatcctctactgtaatagattaactatgttcaataaatttctag

SEQ ID NO: 129448 - DNA, 2452 bp, Homo sapiens
gtactaatgaaataactgttcactattgtgggttctacttgcagggttcagactaggcaatgtggtacatgctatacaggcaactgagcagagcattcatgccactgacctggtacctcgcttatgcttaacattagccaacctgaaccgtgtgatttatttcatctgtgacaccatcctctgggtgaggagcgtaggtctcacctctggcatcaacaaagagaaatggcgaacgagggctgctcaccactactactattctcttctgctgagccttgtcagggatctgtatgaaatctccctgcagatgaaacgagttacatgtgacagggcaaagaaagagaaatcagcatcccaggatcctctttggttcagcgtggctgaggaggaaacagaatggctccaatcctttctacttcttttattccgatctctgaagcagcatcctcccttgctcctggacacagtgaagaacctttgtgatatcctgaaccctttggaccagctggggatctataaatccaatcctggcatcattggacttggaggtcttgtgtcctctatagcaggcatgatcactgtggcatatcctcagatgaagctgaagacccgttagggtgtttttaggcttggaactagtacctactttaaaagatggcctcttggtgggacagacatttgtataagtcacaggccatgtcatactgtgcttaagttcttgttcatgtgagcatttaacaacctgtgatgtgggcagagatgaggccaagaacggagaagggaggagcatgaagagttgtatgtttttggagtgctggagtgacttgtgaatttctgaatattttcccttcatctaacattgattgaacatctcttatgtgcatagtgggagcttagtatttgctgaatgaataaaaattgaaaggaaaaaatttaaaaagacccaatcgcactgatcattgaacaccagtatacaataactttagggtcatatggatcattggtttcacgattacagtaggtctggtgcatggcactctcagatctagtagaggctctgatgtcagtagcaggatggaggagagctgggcttacagcctctcaacttgttggcccttataccatcactgcactcatgtccttgctctgtgcagaagtagaatcagaaaagcatcaggcaccttcatggtataaattgtgtctatgggtgcagtgaataagcaaaaatcagaagcagaccggagggacttataaaaataggtacagggtcacaatgggtgcctatatgtagcctgtgacagataagaagctgacagtgagacaaacaaaaaactgaggctagagcctcattcctctgactcctaatccagtgttctctccatgctctcccactgtcttcagaattgagtagaaatgtgatcccctcctgaatcctgttttttgcctcttactctcccataatttggaaatttccttgtccagtggtttatattcttttctagaaaaactaaaactgggtggagtgtggtggctcacacctataatcccagcactttgggaggctgaagcggaaggattgcttgaggccaggagttcaagaccagcctgggcaatgtagtgagactccttctctacaacaaagtgttaaaaaattagccaggcatggtggagtatgcctgtagtcccagatactctggaggctgaagcaggaggatcacttgagcccaggagttcaaggctgcagtgagcttccaccgcactccagcccgggtgatagagcaagaccctgtgtcttaaaaaaaaattaagacagtatttagacttatcagttagattgttttatttaaatccttctaacaatttaggcaattctacattaattttcatcaaaatttatccagtcaaaaaaatttcatgaatactccagatgtaagagagtcacaattttctacgataaatcagacatcttatttctagggtgattgagggaggtggaaagcgcaggaggaagccagtgaagaggacaatggaatgctgagtcaatgacattgacttgtgttcctatctgccatcttgggtgtgggtctttatatgtggttacagatcctttagtttgagggaggtgaggtagagaaataggatgccagcaggtaggaggccgatgtcagtcctcccagcaaagctgtgtcatttatctgaatggaaatgagaaaataaatatgtactcaataagtcacatttcccagaaatgtgattgagattctcaaaaaatagactcagattcttggctgtctgtttaaccaatcacgatatgggatttgagaaataaaatttagggaattttaagagacatgaaagctactaggtcagggaaaataaaaagcttaaataactatttttattgtccagatcctctactgtaatagattaactatgttcaataaatttctag

SEQ ID NO: 129449 - DNA, 1291 bp, Homo sapiens
cctggctcttgtgtttatactcctgggggaactgtcccaagagatccatcctgctcttttcctgccaacccagctagtccccaattcacctgctcttatcaagatcatctggccccccatagcatgctagacaaaaggcagctggaaaggacaggccagacctgagctagccaggcctggcttcctcattcctctgactcctaatccagtgttctctccatgctctcccactgtcttcagaattgagtagaaatgtgatcccctcctgaatcctgttttttgcctcttactctcccataatttggaaatttccttgtccagtggtttatattcttttctagaaaaactaaaactgggtggagtgtggtggctcacacctataatcccagcactttgggaggctgaagcggaaggattgcttgaggccaggagttcaagaccagcctgggcaatgtagtgagactccttctctacaacaaagtgttaaaaaattagccaggcatggtggagtatgcctgtagtcccagatactctggaggctgaagcaggaggatcacttgagcccaggagttcaaggctgcagtgagcttccaccgcactccagcccgggtgatagagcaagaccctgtgtcttaaaaaaaaattaagacagtatttagacttatcagttagattgttttatttaaatccttctaacaatttaggcaattctacattaattttcatcaaaatttatccagtcaaaaaaatttcatgaatactccagatgtaagagagtcacaattttctacgataaatcagacatcttatttctagggtgattgagggaggtggaaagcgcaggaggaagccagtgaagaggacaatggaatgctgagtcaatgacattgacttgtgttcctatctgccatcttgggtgtgggtctttatatgtggttacagatcctttagtttgagggaggtgaggtagagaaataggatgccagcaggtaggaggccgatgtcagtcctcccagcaaagctgtgtcatttatctgaatggaaatgagaaaataaatatgtactcaataagtcacatttcccagaaatgtgattgagattctcaaaaaatagactcagattcttggctgtctgtttaaccaatcacgatatgggatttgagaaataaaatttagggaattttaagagacatgaaagctactaggtcagggaaaataaaaagcttaaataactatttttattgtccagatcctctactgtaatagattaactatgttcaataaatttctag

SEQ ID NO: 129450 - DNA, 936 bp, Homo sapiens
gtactaatgaaataactgttcactattgtgggttctacttgcagggttcagactaggcaatgtggtacatgctatacaggcaactgagcagagcattcatgccactgacctggtacctcgcttatgcttaacattagccaacctgaaccgtgtgatttatttcatctgtgacaccatcctctgggtgaggagcgtaggtctcacctctggcatcaacaaagagaaatggcgaacgagggctgctcaccactactactattctcttctgctgagccttgtcagggatctgtatgaaatctccctgcagatgaaacgagttacatgtgacagggcaaagaaagagaaatcagcatcccaggatcctctttggttcagcgtggctgaggaggaaacagaatggctccaatcctttctacttcttttattccgatctctgaagcagcatcctcccttgctcctggacacagtgaagaacctttgtgatatcctgaaccctttggaccagctggggatctataaatccaatcctggcatcattggacttggaggtcttgtgtcctctatagcaggcatgatcactgtggcatatcctcagatgaagctgaagacccgttagggtgtttttaggcttggaactagtacctactttaaaagatggcctcttggtgggacagacatttgtataagtcacaggccatgtcatactgtgcttaagttcttgttcatgtgagcatttaacaacctgtgatgtgggcagagatgaggccaagaacggagaagggaggagcatgaagagttgtatgtttttggagtgctggagtgacttgtgaatttctgaatattttcccttcatctaacattgattgaacatctcttatgtgcatagtgggagcttagtatttgctgaatgaataaaaattgaaaggaaaaaattta

SEQ ID NO: 129451 - DNA, 2599 bp, Homo sapiens
tgcctagaggacttcaacttcgacggacgcattcacccgcttctcagccagacccagggcgggacgactcttcagagccactcagtacacatgcatgttgcttagatatttgttagagcccaaagctggcaaagagaaggtggtaatgaagctcaagaaactggagtccagtgtgagcactggtcgtaaatggttcagactaggcaatgtggtacatgctatacaggcaactgagcagagcattcatgccactgacctggtacctcgcttatgcttaacattagccaacctgaaccgtgtgatttatttcatctgtgacaccatcctctgggtgaggagcgtaggtctcacctctggcatcaacaaagagaaatggcgaacgagggctgctcaccactactactattctcttctgctgagccttgtcagggatctgtatgaaatctccctgcagatgaaacgagttacatgtgacagggcaaagaaagagaaatcagcatcccaggatcctctttggttcagcgtggctgaggaggaaacagaatggctccaatcctttctacttcttttattccgatctctgaagcagcatcctcccttgctcctggacacagtgaagaacctttgtgatatcctgaaccctttggaccagctggggatctataaatccaatcctggcatcattggacttggaggtcttgtgtcctctatagcaggcatgatcactgtggcatatcctcagatgaagctgaagacccgttagggtgtttttaggcttggaactagtacctactttaaaagatggcctcttggtgggacagacatttgtataagtcacaggccatgtcatactgtgcttaagttcttgttcatgtgagcatttaacaacctgtgatgtgggcagagatgaggccaagaacggagaagggaggagcatgaagagttgtatgtttttggagtgctggagtgacttgtgaatttctgaatattttcccttcatctaacattgattgaacatctcttatgtgcatagtgggagcttagtatttgctgaatgaataaaaattgaaaggaaaaaatttaaaaagacccaatcgcactgatcattgaacaccagtatacaataactttagggtcatatggatcattggtttcacgattacagtaggtctggtgcatggcactctcagatctagtagaggctctgatgtcagtagcaggatggaggagagctgggcttacagcctctcaacttgttggcccttataccatcactgcactcatgtccttgctctgtgcagaagtagaatcagaaaagcatcaggcaccttcatggtataaattgtgtctatgggtgcagtgaataagcaaaaatcagaagcagaccggagggacttataaaaataggtacagggtcacaatgggtgcctatatgtagcctgtgacagataagaagctgacagtgagacaaacaaaaaactgaggctagagcctcattcctctgactcctaatccagtgttctctccatgctctcccactgtcttcagaattgagtagaaatgtgatcccctcctgaatcctgttttttgcctcttactctcccataatttggaaatttccttgtccagtggtttatattcttttctagaaaaactaaaactgggtggagtgtggtggctcacacctataatcccagcactttgggaggctgaagcggaaggattgcttgaggccaggagttcaagaccagcctgggcaatgtagtgagactccttctctacaacaaagtgttaaaaaattagccaggcatggtggagtatgcctgtagtcccagatactctggaggctgaagcaggaggatcacttgagcccaggagttcaaggctgcagtgagcttccaccgcactccagcccgggtgatagagcaagaccctgtgtcttaaaaaaaaattaagacagtatttagacttatcagttagattgttttatttaaatccttctaacaatttaggcaattctacattaattttcatcaaaatttatccagtcaaaaaaatttcatgaatactccagatgtaagagagtcacaattttctacgataaatcagacatcttatttctagggtgattgagggaggtggaaagcgcaggaggaagccagtgaagaggacaatggaatgctgagtcaatgacattgacttgtgttcctatctgccatcttgggtgtgggtctttatatgtggttacagatcctttagtttgagggaggtgaggtagagaaataggatgccagcaggtaggaggccgatgtcagtcctcccagcaaagctgtgtcatttatctgaatggaaatgagaaaataaatatgtactcaataagtcacatttcccagaaatgtgattgagattctcaaaaaatagactcagattcttggctgtctgtttaaccaatcacgatatgggatttgagaaataaaatttagggaattttaagagacatgaaagctactaggtcagggaaaataaaaagcttaaataactatttttattgtccagatcctctactgtaatagattaactatgttcaataaatttctag

SEQ ID NO: 129452 - DNA, 669 bp, Homo sapiens
cattggaaaaactaaaaaattatattctaattttataatattttgatcttcatttctaaatatagagcatggattgtgatgatagtagcgttgatgataaaaatccattgctatcttagctaggtaactaactatgacattttttatctccttcttttagactacatgccacatatttgtagttaatttttttatgtgcctgtctctttccctaaattgtgagctctttgatggcagaatctgtgtcattcatcttatcttcatgcctggcataagcctgacatatagtggacattcactgtacatttgatggattgaattttgttaaatgatggaaggaaagaactttatcgtatcatgattttagtgtttatcaggctcaaaacactacactgaatcttatggttagctaaaacagtttggacataggctctatgctcatgcttcttgtatttggctgacttagagaatgtgagtgtttactgctaacttactgtgaacttctctttcttagagtttggatgtttaagggctgttttctatcaggcacgttcctgaaggctcactcatgattttgagcctgggatagctaactgtaatgtcgtcatcaagtcagctatggtatctagattacatctaaaacacatatcatcttgtatacagtatcat

SEQ ID NO: 129453 - DNA, 291 bp, Homo sapiens
actgctggtcttatcaaattcaaaccccacttccacccccacatctgtgcgcaagaatgttcacacacgcacacacacacacacaaacacacacacatttctgcaatatttcatcttcttaggccaggaacttatcatgacgaaccaaatgcaatacctatttcctgaccaaagctgttattcaatatctctatcatttgagaaatagtttgatttcacgttgacaagggtcacactgaggtcttaagagaagtaacaattacaaagcatcctagtccctgtgaaagggtg

SEQ ID NO: 129454 - DNA, 130 bp, Homo sapiens
gatgttcacagattcttctgtacctaaacttgtagtctggatactctaaaatcccttcttggaataagccagaccacttttaaagctggccctggacttggtcttatgggcactctgtgaaagtcctgtt

SEQ ID NO: 129455 - DNA, 379 bp, Homo sapiens
agaaaataagtgattactggccctaaaataagaagagttattttttgggcatctcatactattttaggtcaattaatttactgcctcagctgtaggaaaaaaggcatttgaagtatatttcaactcagaatcatgaaggggcttatttctccaccccaaagcataattaaagtcaaaatgtaagatttaagtagatcactgcaatctattttaaaatttcagtaacactactgtgaaatattcctttagttctttgttggactttcctctggatcattatcgatactccaaaagtcatcttgaatatatgagaagtacattagaaacttagcagtggcatcttctttctgtcttctatgtctcacaacaaacaaaatcc

SEQ ID NO: 129456 - DNA, 300 bp, Homo sapiens
accagaaaaatgaataggagtgattcaggaactagaaggtaagaaggcatttccggctgctggagcagatgtggaatggcattgtctgatcaggaagactgaagaggttttgtatgcttgcaagggaagcatgtgggggacaattgaaactagacagattggcagcgactggattatcaaggaccgggagtgaattggacttaatgctgcaggcaaaagagagtcttggaagggttttaaatagagaagctcagtggcagctgtgaggagagtggattataagagaagaagaaggtggag

SEQ ID NO: 129457 - DNA, 403 bp, Homo sapiens
ctagctaggcaggatcccactgagctcactgatggtgagttgttgtgggcccaggtgcgtactgaggtaccatccaggagctagggactggagtcgagaaaccttagaagtctttctggtgttctgctgtcctgcagctgtgctggcactcaaaccagaagacacagtacttctcacctttctttcccatttctactggcagaggagcctcagcccatgaccgccactactacaggctcatggagaatactgctgggctaccaccaatattcagttaaggccctagggctcttaagtcagtttgtggtgaatagtgccagcctgggactcacccttcgggacactgggctccccgctggcccagaactggtaaagaaatgctaagagccaaggcctggaattg

SEQ ID NO: 129458 - DNA, 503 bp, Homo sapiens
tgagatcccatctcaaataaataaataaataatcattatttctggcgcctttcataaagattaataaacaaaatctactcagcagaaatgtcaaaaaaagctgagtaacaaggtcacttacagcatgcctctaacacccaatggcctgatgtatgctatgttactaagagaaccacttaagatcacctttgttctccagctcctgcttttaacaaatagaggacttctctctccaaacagggtgatgaaaataaacgcctgtaatcccagcactttgggaggccgaggtgggcagattacgaagtcaggagattgagactatcctggctaacacagtgaaaccatctctatttagtagccgggcatggtgacacgcacctgtaatcccagctactcgggaggctgaggcaggagaatagcttgaacccaggaggcggaggttgcagtgagctgaggtcatgccactgcactccagcctgggcgacaaagtgatactccgtctc

SEQ ID NO: 129459 - DNA, 106 bp, Homo sapiens
gtttaagtgatagagacagagacagatgttaaataacgcagtacatcaagggctgaggaggccttgaagaatagtggatggagggtgcctgcagtgaggtggtggc

SEQ ID NO: 129460 - DNA, 222 bp, Homo sapiens
tgttgacctctgtgcccaagcctacatccagaaatccaccatactgacaatgccatgacagtaagaaaattttgattacatcattaatcaggaaaaaaacagaatatttttataaaacatataattcatcctaaatattttccaatgtaaggattagtattcaaatgattggagagtaattgattaccatctagtccatcttaaatgtgcacattctaaaat

SEQ ID NO: 129461 - DNA, 394 bp, Homo sapiens
tgatctgcctgcctcagcctcccaaagtgctgggattacaggcatgagccaccacacccagcccttttcattcttctaatagtgatttggaagagtcaaattttttaattttgaggaagtctaatttatcaagtttttctttcatcatttgtgttttttgtgtgtgttctgtctgagatatctttgccaaacccaagatcgctaaggttttcttttatgttttgtactagaagtttataaagttttagctgttatgtttaggtctatgattctttttgagttaatttgtatatattgtgtgacatatggatccaggtttatttacttgtggatatccagttgttccagtgccattagttgaaaagactttgtttcttttcttttttcttttttt

SEQ ID NO: 129462 - DNA, 586 bp, Homo sapiens
tgtctcctgctcggggtcagaggctgtagctgtgtggacaggagggggtgacaagtcagagacaaacacactcttgctgatggcaaggaagctggctgggccacgtgctccgaggcccacaatgagttcgtggcaaagaaaatgtccaaaggctccctgagaaacggcctccactagagcaccctccatcccccccttgacctctgtggaagagctgggtgcagggctcagaggaccctgacttgtgcccagcctctggcctggctgccctcccgtccctgaccaggagctgtaggagacgagcagcccccttccctggaacccaggatgggaggcagccttggctggcagctggcagccaggggccatgcttcctgtgcccctcatgtgacagtgatgctaaagctttgccacgccaggacggtgcaagctggcatgaaggctacaggcctggcaggtctggtgcggccactctgggaaccgtcccctgggagatgagcgagcattcaccaaccagtgcagcagggcctgtggctgtggccgaggtgctccctgtggcatttccaggaaaccagacaccaaggtg

SEQ ID NO: 129463 - DNA, 442 bp, Homo sapiens
gtcatacaatttttaaatcacccccaaattgatataataaatattattgttgatgttcttattattatttataatatgaaatattttaagttcataatactggagccattctgagaaagttcctaaaatagactactgcggaagcccattattgccatggacctgatatatttacatctataattttaatgaggatgtcataagattaaaatttgtgatggacatttgtgatctctctcaatgatgatctctattatatctacatacattcatttctttattaatagctcatccatgcagaactcaattatccaacaatctcattttattgataacaaatgctagaaaaagaaagtatcagaaatggctttgaaacaacgtttgcattgaatctacaaacatttttctggggatagcccataaaggcattaagcaaaaaaaa

SEQ ID NO: 129464 - DNA, 367 bp, Homo sapiens
acttggacagcaacagggagactgaactacaagaagcagcaagagagaatctgcttcccccagtactgtgtgctgagctaagctgtcctgggctttagctcctgggaaaaagagtgtacaagagatgagagagagagagctgggtttgttcagacccaggatctcctttcactttggatatattgaggccaaacaacagtgcacactttgtcttttaaggaaggctcagcacctctactctctagcaaatatacatttcaatgacctggagccacatccttccatagcaggcacttatccctttggggaaggaggacagatcatgaaatgggaacaagagaaggaagaaagggaaagaagagtccta

SEQ ID NO: 129465 - DNA, 547 bp, Homo sapiens
ggttgatgtgaagattaagtaaatttataacataaaatatttagtgctgtacctggcacacagcaaacactcaagaaacgctattattattactgctaagactagtaaaacaccgcgggcaggaaagaatggaggattactgaataaagccctaatgcagacagaagttactactatgtcactcccacaaggaaacatcaaacatcaccactcccaggagcctcctcagaagcaacctgccagccctgggctggtcattctctgatagtatcagggccgttttgtcccactttcctccgtggacttgagctcactaagggcagccttactgcaccctcccccaccccatcctcagcacccagtggtgtgcagcagggttgtgggaaatatctgccagacagacatgcttaagatgtggcccgagtcccttcccctttctggagaggcctgcttcactgggaaggcaactctccaatgccatagtacaaacccctagagagcctgcatcccttccagtcccatccctgccagacactgggaacgcaga

SEQ ID NO: 129466 - DNA, 238 bp, Homo sapiens
attcctgaggcagaaccaattgacccggcttgtcttcccaaagcaggccacacgatagaggtcaatggtagctacccatggatgagccatttagtgtagaagggcctcttggcacaaccgaaaaagagcaaagccatctgaagctattcagtgtggaagcaaaagctctccccagattgcaagcgcactgctgtgttacagcagaggccacactgggtatcagtggaagcaggggcat

SEQ ID NO: 129467 - DNA, 457 bp, Homo sapiens
gaactaggtggatggtatggcataaacaaagatatcatatggcataaacaaagataggaaggggaagagatgtttccagtttggaatttcaagtgaaatgctaaattatggagacatgaaagaaaaaaattttaagataaacttgtaaaaagctgacagatattaccctggggtctgaccctataattaataaagaatgtttcctaaataaactattttaacataatattaggttgatgcaatagtaattgcggtttttgccattaaaacctagatcgatatgtagaaaaacaagcctgtataaagtggtaaataaagattcatcttataatttcaaataatgtgaatatagcataaaaggaagagaccaacacactgaatcccaaatatacaaagctaaatgtgttgcctgaggaaggaagaactttggaagagctttgctggtccaggcacagtt

SEQ ID NO: 129468 - DNA, 894 bp, Homo sapiens
aagtcatgtatgcaacatatctggatgatgggtcaactttgtttaatagattagcatcatttacactgaagttcgtggctctgagcttcgttaaagtgagacctttgtccacattcccaggagggctttttctcagggggttctgaattttaccatgacgtaattcctaaacagttgtgattagtgctaaatgttatcataaacacacacacacacacacacacacacacacacacaccccgtgtgctgtgtgagcagctagtatatagtatacttacaacacctttagaaatacttaatgttcttcttactatctgtacatcttactatatatatcatatctatatctgtagaatataagagctttataactacttataatatactatactttcttctaccattcacctctcatagcaactctctcccagtcgttgtttgatcactatatctccacaggcgtggtctcccctcttttgagtctctcatacataactctttcgtgtgtctcgagttaatgtgtagattggggctttctatatttctacaaactattcatttaattacagacatacttttatttcctggaaggtattataccgagatatcacttcgagaagatattgctgggctacacagactccagggacacgtgcatactagagcgaatatatcacatataagagcggagtcacaatatacttttgtgggcttctcaccgatgtgtattataaaaacgttatggtaccacaccctattattggtacgtgtgttaactagacagttgtctctagagaacaacgaagtgatatcattacctttgagctgacgaaaactaactttagtggctacaaagccatcaccgcagaacaatcaaacaacaaacatagttgg

SEQ ID NO: 129469 - DNA, 371 bp, Homo sapiens
cgaggttccaaaagtacaaaagtgaaagctgtcagacctcataagctctaggtatagaagtcacatggcacaatttccaccatattctatcagtcaaaacaacaactagactggcccagattcaagggggagaggaaagagacctcacctactgatgggacttctggcaggtccaaatgtggatgagactcctatagagatctgtgaactaaaaggacaaattgcctgcccaccacacacaacatgcaagggtatgacacgaacactcccttcaaggggatgttgagaagcacaaagcattcgctgattcagagcaatcctgaaatccaggcctatactgtcagctcccttgactccaggatcaatcaaca

SEQ ID NO: 129470 - DNA, 1059 bp, Homo sapiens
gagaatcgcttgaacctgtgaggcggaggttgcagtgagtcaggatcgcgccactgcactccagtctgggtgacggaggcagactccgtctcacagagagagagaaaaaaaaaaggaatgaggtgtggaggaagaaatcccagctgtcgaatcagacagacttgggttcaaattctgtcctgctacccaggagctagatgttcccaggcaagctgctcattttctctggcttctgtttactcatctggaaaatgcagctatgaagtatcctaccaagtgcaaaatatcctaccaagtgagattgccatcagaaataggatttggaagcttccagcacagagcctggtgcatagtaggctcttgaaaactagaggtaatattactgtttcagggagaagtactagggtggagtacccagtgaccttcttatcttggctcatggctctccatgcttaaaatcctcccatggttgcatgggacccaaagtctgaatttaccatgtccttcaaggctcatgcatgggtcttcagaccaccacttccttacttctttgtttcagccccgtgtctcgtgtccttgtgagcacatggagagtgtgtgttggactatttgtaggctccattcttccttgtctattagaaaggcagcagggctgctgtctgtctcactcgtcactgcagcccagcctgtagcccagtgctaggcatctagtgggtgctcagtaagaatgaatgaatgattgaatgaacaattgcgggaagaagcaccagcaatcctgagaagggagaggtctgtgaaggcgggagtcagcagggaaggccctggggctccatcctcctccttctctgggtcacgcttccccttagcattgtatgcacagcattgccaggtgcttctcagtgacagcagctggagaggtggctcaagcccatcccaaacccatttcccactcttggaggctgctccaggcgggtagtttttcagagctcagcagcctcctcaggctgctctcacactggcctggcttcgttcagagtccagccctccatctgagaagcc

SEQ ID NO: 129471 - DNA, 406 bp, Homo sapiens
tgtacttaatcttgcaggtaaagtagctctttaaagtagttaagtagtagctaaatagctcttgaggaactgctaaagaatttctaaaaagtggatgacatcatatttgtattttagaaactcaagtctggtgatattgtcagcaatggattgaggaacacctgagcaagggaccagtcagatgattacagtagtcaaaatgaaaagtgactggggcctaaatgaaggtagaagagatagataggagacagagatagataatcgttttgagaaagacttaagatagaatggaaaagactgctgttggattgggagttaggattgaaggagagggcagaaccaagtaggtcttctagtgttctatttggagtagatgatggtattacatgtaggaatataggaaaag

SEQ ID NO: 129472 - DNA, 309 bp, Homo sapiens
agctggaataacaggcgtgcgccaccacacccagcaaatttttgtagttttagtagcgacggggtttcaccttgatggccaggctggtctcgaactcctggcctcaggtgatctgcccgcctcagccctccaaagtgccgggattacaggcgtgagccaccagccagacatcaaattttatatggattatctcattcattccttagattcatcctgggaggtacacgaggttgttagcccatttacagagggggaaactgaggctcaaggaaggaggggggattttaacccaggcaggcagccctctga

SEQ ID NO: 129473 - DNA, 925 bp, Homo sapiens
ttaaaagaagttaatcacttatgtctttagatgaatgcacatttacatgtagacatatagcttagaaggtctatgaactctggaaaactttgtaattttgagttggtctggcgaaaatttctgggccttttccttataattggttacagagataaaaactctcttcctccccagtacattatcatcttgttattgggccatgagaaatagcagcctgaccctcagttcggtccagatactcagcttggtctctgttgtgcctggatcacagttcaaattcttctcgtatcacattttgttgtctcatcattccccgactctgctttctttccaaggtgttaattcctaaaaacatttattttttaggaataaatgccactttgttttagcatctgcttctgaaaaatccaatctgcgacaatcctcttcagatgggttgaagcagaaggaacaagccatgctcacagggagcagggttctccctctccctgtgagtcacagttactttacaattcactatgcttcatccttgccccagagccttctgaaaataataaactctcattaacccagagaaatgacaatgttgcatcaattatctctgtgaggattccacagagcctgaagccttacattttctaccaagggcatgaaagaattttagctgctgctcaacttcggaaagggaaatgccttgaaagtaaaattgaaggggaggtgggatccattcagacactgaaatatttctcacattctaggttacttaaacctatttttctagtttcttcagtagaatttttagtacactttgaagttgtttttgaagtttgagtgcatacgaaaaaccatacaattacattgttcttttctacacctttcatagattgaacacactcatgtaattgtcatccaggtcaagaaaaaa

SEQ ID NO: 129474 - DNA, 364 bp, Homo sapiens
agcgagctgcagctcaggggcgagctgctaactcaggggcgagctgctaactcaggggcgagctgctaactcaggggcgagctgcccaggaagccttcctggatttcacagcttggagcccactgtgccaactctgacatcacatattagtgtctggtcccttgcaggcaaggcccggctgtcatccccattgttttgcagagcctgccaccctgcctagcactgagtgggtgctcagtcaatatctgctgataggatacaggctcctagtgcctggaacagtgctggatgctgggggcacgtggtaaatgtttgatgaattcattgaagtcagcactgtggattggcagcagctgccacagag

SEQ ID NO: 129475 - DNA, 258 bp, Homo sapiens
tgtgacttgcacgtatacatccagatggcctgaagtaactgaagatccacaaaagaagtaaaaacagccttaactgatgacattccaccattgtgatttgtttctgccccaccctaactgatcaatgtactttgtaatctcccccacccttaagaaggttctttgtaattctccccactcttgagaatgtactttgtgagatgcacccctgcccaccagagaacaaccccctttgaccgtaattttccattaccttcc

SEQ ID NO: 129476 - DNA, 436 bp, Homo sapiens
ttacttcaagagtttagagtagcagtttggggatagcaccaggagatatcagctgtaatggcttggagaaacagtgtaaaccggcagtgtaaacaagagcagggcatgtgtgagtagttgagaatggtgaataggagtatgactagacagaagatagtagggatgacaagttttttttgggggtacagtctaagttggtctggtgtctggaatgagactggggcctaataaaaaggagtgtctatacagcagctcaaatgggctgtaccttgtagcattctgaggacaggtctgacttctgagaagggaaagtggtaaagtattgtcagtcctttttaagttggtggctgagcttggtgaggtgtgtttttaatagaccattagtctgtcactgaatactaagaacctgagaaaatgcttggctgatttgactaat

SEQ ID NO: 129477 - DNA, 705 bp, Homo sapiens
gttctttgaaggtgccttttatctggttaagaaatttcttttttctagtttgctgagagttttatcataaataaaggttagattttatcaaatatttttctgcattatttgatacatgtggttttgtttttagcctgtaaatatggtgcattacgttaatacatgagtgtggacctagctttgcatccctggaataagcccctcttggtcatgaggaattgttttcttttttatattgctggattcaatttgctactttgttgagtattttttctttttctctcagtgaaagattgatatgtctaaaaaaaatgtttttgtctagttttgaaagtgtcagggtgattctggctgcataaaatgaattggaaagtgcttcctcctattttgttttctggaaaagattgtttcaaatttgtgttatttcttctttaaaagtttgataacattcctccagtgaaagtgtctaggcttgggattttctcctttggaaaattttttttttactacgtattcagtgtattttgatataggcctattcaagttaattatttcttcttaggtgatttttggtagcttgtggctttcatggaattggtcctttttatctaggttgttgaattatgtgcacagtgtgtcttgtagtattctcttaccttttaatgtctcagtgggctgtagtaataacctctctttcattcccga

SEQ ID NO: 129478 - DNA, 198 bp, Homo sapiens
cacctaggcggactcctaccccttggtccctctgacctccagccttggaaagcaagaaaccaagccaggggggcttcagaggcagcctggcagaggcctgaaagttctttcaagaactcctaggaatgaatattctcaacacatagaagaccctccaaggcaccctacacactaacccacaaagcagccaactcccta

SEQ ID NO: 129479 - DNA, 390 bp, Homo sapiens
ggtctcaggcgggtggatcacgaggtcaggagatcaagaccatcctggctaacatggtgaaaccccgtctctacgaaaaatacaaatattagccagccgtggtggccagcacctgtaatcccagctagctgggaggccaaggcacgagaatcgctgaaccaagggggaggaggttgcagtaagccaagatcgcgccatggcactctagcctgggcgacagagcaagactccaataaataaaagaaaaagagtaaaagaaaataaagtgggagggggatatgcatgctctaagatctatctaccacagattacaggcttttcacccttttgtggaaatgacaaaacctagtatgttcctacctaacagaggagggctgagggaaggtgagg

SEQ ID NO: 129480 - DNA, 360 bp, Homo sapiens
ctagcacagtgaaaccccatctctactaaaaatacaaaaattagctgggcgtggtggcaggcgcctgttatcccagctactcgggaggcagaggttgcagtgagcccagatagcaccattgcactccagcttgggcgacaagagcgaaactctgtctcaaaaaaaaaaaaaaccatttaaagatatgaaagcaagctgggtgtgttggcttatgcctgtaatcccagcactttgggaggccgaggtgggaggtcaggagtgcaagaccagtctggccaacatggggaaaccccgtctccactaaaaaataaaaaaaaacattagctggggatggtggcgggtgcctgtaatcccagctac

SEQ ID NO: 129481 - DNA, 557 bp, Homo sapiens
gtttaaatgaatgtgggaagtaccgtaagatagcattgcctttctttatcagctatacccaccacctgccaccctcctgatcatcatgactcattgtcttgcttttcttcatagtgttagcatatatgtttccctaattaatccatggtttcattttttaactgtacctcagtgggatcatatatattcttaagcactagcttttttgctcactattattatataattgttaagatagctcttgcattgagataaaggacttgagtgaaggatcatggagatttcttcggtgaatatttattttttgtattctggtcaaattgacaataatgcctatataccctacaacatttacatagattagttttgctagaacaatttgtagagttagtactgctgttctcaaagtgagaaaaaggttggattcattcagttcaattaaatccttagcttcatatggaaagtaacttttcacatagccacattgagatacttgctggatagatttcacttagctgactattgtagaaaagtcattattcaaaataaaatggttt

SEQ ID NO: 129482 - DNA, 310 bp, Homo sapiens
aatcccactcacatctataaatctctatatctgtatctttatctacctatctctatcttcaaaagaatggaaagcagttactcagatacttgtacacctgtgttctctccccacccccccttttttttttaataaatgggctctcactgtgtttcccaggccggagtgcaggggctgtttataggcacgaccccctgctgcggggctgtccaccggcatgaacccctgctgcgaggctgtttataggcatgatccccctgctgcggagctgtccacaggcacggacccctgctgcagggctgtccacagg

SEQ ID NO: 129483 - DNA, 346 bp, Homo sapiens
gtagaatgtagatttttacttttttctgtataattttctatagtatgttatttttttttaccatgacagcccgttattttaattaccaggaaaagagttattcccattttgaaaataagtttgacataaaaattaaactgtaagaaactagggaaaatttttttggcaataaaatagaactcttacaaattcataagaaaaacattaaaaccccaatatatagtagacaatttataaaattggatattcaaataattaataaataggttttcgaaagtcagacttaccagacaaaaagaaaggttcattaaatcaatgaaataccatttctgttttcattttcatc

SEQ ID NO: 129484 - DNA, 111 bp, Homo sapiens
ttgtttatccctgcagcacaaggtagcattacagcccctcctgactgatctcagaccccttttctgcctctttgcctgacccccttggggttggcatcttcctgtgggtgg

SEQ ID NO: 129485 - DNA, 313 bp, Homo sapiens
ctcaggtgacctgcccgccttggcctctcaaagtgctgggattacaggcgtgagccaccgcgcctggcccctagaattttttgtagaccttttccccttgatggaggcacccctaccctctggacctttcatcacagcctctctttgctcacatgggtttcagacccttctcctttcctttgggaagtctgctctggcttccctgtttccaaatccttcgttttccacctggagctctacaaaggggccaggggcttcccctcactccagcctttctagtccacacccagaactcttcagatccttgacccca

SEQ ID NO: 129486 - DNA, 273 bp, Homo sapiens
gtagcttctgtgattgtcacggggactgccttctctttttggtttctttgtgaaaggcaccttgtgcaccatcagcagagtggctgctgaggtggtcacacttctcctctgggacgtgaggatcagcgcactgtttgcttaaacgggctgttttgtctttgatattttggtgagttttttttttcccctttgacaaagtgtgatcatccgctcaggaacgaggtgcccagtctgtgcacggtgactggaagagggaaggtggcccttgaccga

SEQ ID NO: 129487 - DNA, 326 bp, Homo sapiens
atacatacacataccacattcacaacacaccacacacaaaaccccacaccatacccagaaacatctccccatacacccagcccatcaagcagagctggctgactgcgtacacactatgtgatgggggatactgatgcactacagagggcctccaaaacacatgaaaacctcataggggctggatgcggtggctcacgcctgtaatcccagcactttgggaggccaaggcaggaggataacgagggcaggagttcgagacaagcctggccaacatagtgaaaccctggctctactaaaaatacaaaaaattagccaggcgtggtggc

SEQ ID NO: 129488 - DNA, 391 bp, Homo sapiens
ggcaacagggtctcattccatcacccaggctggagtgcagtggtgtgataacagatcactgcagccttgacctcctaggctcacatgatccacctgcctcagcctccggagtagctgggacgttctgagccatcacaactggctaattttttattttttgtagagacagggtctcgccatcttgcccaggttagaacctgccttttactaagactcggtttccctatctgtaaaatgggagttatgaggagtaaaagaaatcatttatagaaagataaatgattatctttaaaatgttattaagatgttatcttaataacagagttctgtgctcaagcagaggagcaggcattaacatgaccaacagaaaaaaagggcgggcgcaggcaga

SEQ ID NO: 129489 - DNA, 721 bp, Homo sapiens
  misc_feature (714)..(715): n is a, c, g, or t
  misc_feature (718)..(718): n is a, c, g, or t
gtaaatttcagtaaatttgagggatctaattatggggtttcagtagatcctggggatttattgcattattcgaaggaaataaatgaaagaatcagcaaaacatacagacacacatataaataattaaagatgaagaggataaagctggattaattgaggaaaatgctatcagacaggaatttttggttctgtaattctgaaacactgcaatgcattaagaaacctgtacatcaagggtgtcacctgtctagggtagggtaatatagagtagttgttctcaaatgcgagcattggagtgacctggagggcttgtaaaatacagaaggtcacctacattctcaggatttctgattcagtaggtttggtgtggggtctgagaatctaaatttctaataacttaatttctgtaggttccaatagtttcccaaatcatgctgatgctgcctcctgagaaatattttcagaatcactgagaaaaatgtatgaaatagttaatgtccttgctctgtgtcagtggtaagttccagtttgtttattttattgagaaaaagaaggtaattaattaattaagcaattaatatttatttatttatatttgagatggagtctcactctgtttgttgcccaggcggaggttgcagtgagctgagattgcgccattgcactccagcctgggcaacaagagtgaaactccatctcaaaagaaaaaactanntanaac

SEQ ID NO: 129490 - DNA, 671 bp, Homo sapiens
  misc_feature (664)..(665): n is a, c, g, or t
  misc_feature (668)..(668): n is a, c, g, or t
gtaaatttcagtaaatttgagggatctaattatggggtttcagtagatcctggggatttattgcattattcgaaggaaataaatgaaagaatcagcaaaacatacagacacacatataaataattaaagatgaagaggataaagctggattaattgaggaaaatgctatcagacaggaatttttggttctgtaattctgaaacactgcaatgcattaagaaacctgtacatcaagggtgtcacctgtctagggtagggtaatatagagtagttgttctcaaatgcgagcattggagtgacctggagggcttgtaaaatacagaaggtcacctacattctcaggatttctgattcagtaggtttggtgtggggtctgagaatctaaatttctaataacttaatttctgtaggttccaatagtttcccaaatcatgctgatgctgcctcctgagaaatattttcagaatcactgagaaaaatgtatgaaatagttaatgtccttgctctgtgtcagtggtaagttccagtttgtttattttattgagaaaaagaaggtaattaattaattaagcaattaatatttatttatttatatttgagattgcgccattgcactccagcctgggcaacaagagtgaaactccatctcaaaagaaaaaactanntanaac

SEQ ID NO: 129491 - DNA, 270 bp, Homo sapiens
cgccctgtcctttgatgggcacagctgcagttggcaatgttggcttgtcctactaccagaagtgagtctcttttttggaagtcactttccccagctattgccaaagccacaaatacagcacatgagaaagactgaggaaaagtgaaccgtgctgagggcagcgctagccttcatgggggctgtacagggcacaaaatggcattggtatcgatcacacagagattttgttggctcagttagcctggaaactgggggagggtttcgtttgct

SEQ ID NO: 129492 - DNA, 260 bp, Homo sapiens
gtagctgggattacaggcacctgccaccacgcctggctaatttttgtatttttagtagagacggagttttgccatgttggtcaggctggtgtcaaactcctgaccttaggtgatctgcccacctcggcctcccaaagtgctgggattacaggcgtgagccactgtgcccagccgcatttgcttttgaggtctcatcccattgtatagattgttccctgtcaatggcatttccagcactggtgagaagagaggcaaggcag

SEQ ID NO: 129493 - DNA, 474 bp, Homo sapiens
agcacagatgttgccgtggcagttacttccatctgtgttactcagattggttttaatccttgagacttcccttggggcaccttgggaggctgaggcaggaggatcacttgaggctaggagttggagaccagactgggcaaaatagcaagactgtctctacaaaaaaattttaaaataggccaggcgtggtggctcatgcctgtaatcccagcactttgggaggctgaggtgggaggatcacctgaggtcaggagttcaagaccagcctggtcaacatggtgaaaccccgtctctactaaaaatacagaaattagccgggcatggtggtgcatgcctgtaatcccagctactagggaggctgagacaggagaactgcttgaacccgagaggtagaggttgcagcgagctgagatcgcgccactgcactccaacctggaagacagagtgagactctgtcacaaaacagaaaaaaaa

SEQ ID NO: 129494 - DNA, 176 bp, Homo sapiens
cctgcctccaccccggcccctagcacacacctgagcatcctccacccaatggccaaagtgattccttacaatagaaagcagactggggccctcctcttcttggaagcctcactgtcttcccttccctgggagtgagatccaaagtctttgcttgacccacagggtcctgtacctgg

SEQ ID NO: 129495 - DNA, 395 bp, Homo sapiens
tggatggacgacatttggcccaatttcgtgtctctcatttgcttccaccttctgcccttccatcctgggacagccctttgccagatactgcatgaggttcttgcactttccagcccctaaaactgtgaagctctgagcaaaataaactttgcttcttttgttttgttttaagacagagtctcactgtcacccaggttggagtgcaacggcatgatctcggctcactgcaacctctgcctcccaggttcaagtgattctcctgcttcagcctcctgagtagctgggattacaggcacccaccaccacgcccagctaatttttctatttttagtagagacaggctttcaccaggttggccaggctggtcttgaactcctgacctcaggtgatccacc

SEQ ID NO: 129496 - DNA, 152 bp, Homo sapiens
actttctacataaagctcacacatcactgtgggtcaaacacaaatgcttctcattcttagtttagatacactgttctgacactttttctaagaaggcagaaagagaagacatttatcacttcccatagttagaaactagttcccccacattc

SEQ ID NO: 129497 - DNA, 644 bp, Homo sapiens
tcccctctgtatttggatagctggttgctcaagttccaacccttacatgaggtttttctgtatgattttctcctttatgttttggaggcacactcgggaacgttctcgtttttttttgtttgttttgcaatgtggctatttttgactttacaaagcattggaactggcatcctcccattcttgtgaactttctctggatctgtaaatacttggtatttgttttcttccttgtacatttcaggggtggtttttatatttaactttgactaagatacactcacatgctactctgagagtacatgcttcggtgtctcttttttctttgccttcagtaaaaaggataagattcagggaaggtttatgaactcactttatgggtcagacatgtgctggctgtggagagcatacagcaataagaaaggactgtctctaccctcagatacctttctagaggttaaagaaatgcaccttgatcattatcattgtctctaatggagtaaatggaaagggtagtggtagaatggttaggagtttagcctcaagtcagatctgggttgaatccacaaggatttgtattccttatctgtatagcagcctatttccttatctgtgcattagggacattcaaaggattaaatgagata

SEQ ID NO: 129498 - DNA, 558 bp, Homo sapiens
ggcagcatccatattcctacaaaacacaattagtatcatcatagtatttttcttcatataatcactcgctccctctgtctgagtactccttccctcctatttatccctgaagcagtgtaaatagctttcccacacctttaataatccaaagcttttctttactttcctctcacacctccctccagccttacatattaaataaaatcttgccataaaaatagcagctggtaagccaatatgggatgtttccttaacattctacacagtttaccatatgtactataataaagttgctgggctgaaagatatatttttccagcctttggttattcttctgtaagctctggacataccactaagcaaaatcttattttggacatcaaccaccagaaactgagtttaaatatgataattcacaaaacaacggacagatttttttattataatttaagttctaggatacatgtgcagaacatgcagatttgttacataggtatacacgtgccatggtggtttgttgcaccatcaacccgtcatctacattaggtatttctccta

SEQ ID NO: 129499 - DNA, 2755 bp, Homo sapiens
aagaaaggagcttagctaagaggtctttgtttccagaggacccaagactaccagactcctgtgcagtctgcctgtctgcagagcctccaatcacggtttaaagtggtcttggcctcccagcccccactgctgcagccttcagagccagcctctggactcagcgccaggagcctcctctcctgctgccctggtacctgtcatcctagtgtcacctatttgttttgcacagcattctggagaacatgtgcctcacaaagtgatcctgtttttctcaccctccaaagctgaggtggctaagggaggcaggggtgagagagctcactctctaaaccacaggcagggcaaggtgcttctaggccgtgtcccctccctggggaatggtcactactcctcagcatggccacaggcccctgtggttttgggagtttgctgagtgactggaatgggctgaccccagccgtttccctgctgtggaagcagcaaggtaggggcactgctcggtggtttgtcaagctcagaggcagccacggatggttaggaacaggaagccacactgctaaggtgtgatgagctagaagggagacatcctggacttcaagtgagacaagtgcagaggaggccactccacttaggaccttcctcttagacctgcatgagcacgtgtttcacttaagcacattgggtccgaattgtggcgcatgaacccagctgttaaaccaggtaccctgggactgccctctgcctctcagagccctacctgtcctggacttgaaggcgagcatcaggcaggccttctcagcccatcttccaccaggagtgcagagccagggtgctgagaggagcagggactgtaactacagtaggaggcaactttgctggtgtcattcctgctcggattgactttgtgctccctcccatccacagctatggtagccagtatttccccagcagctctctagtggggaagagtggctagaaccaggccattctcagtcgaatttaggaagaccaagactcatgttcctgacaggacggtcattccctcatggcatcactgactcagttctaattcctcccctcctgtttcattttggtttgaacaacctgtgcctgcagctgtttcttccaccttcctggagctcacaattggagcttcatgttcagtcttgagctcctaatgtttccagacagggcaggggataggacagccataatctatgaaagctgtgaaacaaaccctgggttatatagacctcagatggtctcatctgaaggctttgcccacttcccagtgagcagagggtttggggaacaaagaggtagctgaagagtggtggtttttccctgtatcctgattttcagaaagggctttagtctctgagctgtggctagtagctggctggctgaccaggggacgggggtctaatagggtgtctgaccataggacacctctcgtgtttggccttccctttcttgtgtgtttgtgtgtgtgtgtgcatgtacacacacaaatctgtatccccaggagtgcctcctgcagtcactgggggctcttccgtggtgcaccatcccatgagagcagatcagagggctgtggtcaggacttcctcccgagctgccctccctccctgggatgagtttcctctccacctgctccaaggtgccttacgaggtgcagctcttcacctggccacatggcatccatcaccgtgttgagaaatggtgggacgttggctggatattgtgtgctatgaatctgatttgtccaaatctggacctcagccaagccacctgtggtggaaccttgcaagtcaaggtcatgaacaaatttcttgtaactattggaaataaactaatgaggtagaactgtcatatccaaatggaagaggtggttggtactgttacttccttttgctgtcagagggttgttgacaatggcaaggggggatgttagtgagatccaggtggtggtggcttcttggtccactcagcttgcacacatgcaagaggagggtctgtggcccctcagccgtgctggtggcctccttcctcaagctttaacttgtgccctccctggcaacagggagtcatgggttaatgtcacctgtcatgcctctttcttcagggaaaatattaaaaggctcaaatccaagctgtgacttcccttagacagtgtaagcctgtagggtgcagccccaagtttatgtccaaaggctgcctcagaaccctggagggagcagcgcccagctggcagctcactctccccttgcagttcactggccttttcgcagccaggctaagataggcagtgcaaggagcttcccactggccagagcagctgccttgtagaatgtggggctggcttttagaagtttcacacgcttgcagctaagagtgcagagctctctgttttacttcgtgaaacattagcagctctgaggggcttggcttttggtaagggacttatagtctgacttgccacaagcaccttgagctcctgggttggttggtggttggttggttgggttgttttaaatttgatttttcttttcctgaagtttgttagaagtcagacctatgcaaggaaaaccatggcccacttcagcagccatccagtgggggtgcttaatcggtggtggtaggattcatggaaacgtttttttgaaatgaaagagaagatgatgtacttacattgtaaaatggtttacaataaagtttggcatcttattacagttttttttaaaaagaaaaaaaa

SEQ ID NO: 129500 - DNA, 216 bp, Homo sapiens
tgtggagagagcaaaccatttcattcagtcatctaacattgattgagcacttccatattccaggcactatgctaatgctgaagctcctaggatagataagatggaatcccttaagcacctcacaatctactgggggaagatcagatgttgatgacttatagtgccataacagaagcttatactgagcactgtgggagtccagggaagggactgatt

SEQ ID NO: 129501 - DNA, 428 bp, Homo sapiens
ctatgaaagagacaggtgagaggttcctatcagctgttaatcagttaaccaacagtgggtgagcatttagccagtgccagggacagtgacaggcactgaagataccaatactaaaggtgtggttcttgcccttaaggagttctccaacctagtgggggtgagatataactaagcaacacaatgtgttaggtgatgtgatagaggtaagtatattccttatatttccttaggtaacatttcagaaccggcgaatcctgggtgacaagcctccggtttctctctaaggtactgctgtccagtagaactttctgtgatgatggaaatgttctatgtctgctctgtccaggacatggtagccacatgtggttactgagcacttggaatgtggctactatgattgaaaaactaaaattttaatttaatttaaa

SEQ ID NO: 129502 - DNA, 179 bp, Homo sapiens
ttctctttttttgaggcagggtctcagtctatcatccaagctggagtgcagtggcatgatgtttgttcactacagcctcgacctcctgggttcaaacgatccccccactcatcctcccaaaatgccaggattacagcattttgagccactgtggccggcccagtttttttttttttttt

SEQ ID NO: 129503 - DNA, 420 bp, Homo sapiens
ttttttggccaaggttgactatagttgctaatctaattagtttgaatttatgactgtgctataaactatggagtttccttgaaccagattaaaattagaagaataagttttcctttttattctttctgccacaagattcttttttaaaataatgactgtttttataaaaggcagtttaactctagcatatactggatgatttgttaaggtgatgatagcccaaaatccttccgaatgctcatttttatcagcataatctcttttagcaggttgggcatggtggctcatgcctgtaatcccagcagtttgggaggccttgcttgagctcaggagttcgagaccagcctgggcaacatgacaaaaccccatgtctgcaaaacatacaaaaaaattagccagttacaatgatgtgtcccagct

SEQ ID NO: 129504 - DNA, 123 bp, Homo sapiens
gacaaaaagcaaaaaccttatgctaggctctgtgctaaatgcctatctattaattcattcaatctcaccataggaaagatagagtctattattattaccattttacctaagaggcaaatgagg

SEQ ID NO: 129505 - DNA, 279 bp, Homo sapiens
agtggcacctatgttcagtgttacccataaagacacaggctagcaaaagcatttggggcaggattaaaacttattctgtgtagcctggcaagaaccaagctttgcacaacaggaagagctttcttaaacagaggcatttatggaaattataattgctctaattttgaaacatatttatctaattttctctttaccatgttacacaaggaaatatctggtgcctactatgttccaggctctagcaagtgatgcaatggatacagaggtggggaagcaaca

SEQ ID NO: 129506 - DNA, 389 bp, Homo sapiens
gtaaaaggcccagcagaggcctctgaactgctctcttagcaaaccattcagtatgtggcagctatggtgaacttttgaaaacacagaactgatcatgtctcttccctgcttaatattcttcaatgatttcctattgcttttaagatcaaattcaaaagacctgaaacaccctctgtgatatagctcatagaactatatgtcattgagcagacaattttaacccatgggattagggaaggtcttcttcggaaaagtttcccatgctgaaacaagaagcagagaagaaagaagaaccatttctgccttggagcccaaatgtctaaagaagcaagaggttaccttgacaaggctcagtgaatgacaattaaccaattagctttgctactccc

SEQ ID NO: 129507 - DNA, 315 bp, Homo sapiens
ggctgaggcaggagaaatggcacgaacccgagaggtggagcttgcaatgagccgagatagcgccactgcactccagcctgggcgacagagcgagattccgtctcaaaaaaaaaaaaaaaagtaaaagcatatgtatcatgataaaatggacactttacccatcgcctgactttgtgttgaattgggcaagagcctcctcccgtccacgtgggatggccttcctgatgtggctctccaagaccatccctggagggcataaaacctcacaaatgcatcaggccgtgtgctggggatggggcatcgtcacgccaggtc

SEQ ID NO: 129508 - DNA, 275 bp, Homo sapiens
tctgcctccatttttgttttccatcttgatgaaaaatcccatttacacagtcacaggtgaaagagaacaatgatttctgtgatatttgcaatgctgtttccatgggcctatggatagttcctgtgtgttctttatagaaaagctttccttacaacaatggggagcgacatattagggtgccacagtagaggctggggcggggctcaagcctataatcctagcacttcgggaggcttaggtgggtggatcacttgaggtcgggagttctagaccag

SEQ ID NO: 129509 - DNA, 854 bp, Homo sapiens
atcttgaatcccatgaggtcgccattaccatgttcattttatatggaggaaattggactcagaagtttatgtggcttggcctgaggttacacactcacacatagtgctttccatgatcttctactatattctctttagcttgtattattttaatagaaaatgaattaagaatttatgaactagtttggacacataaagagataagctttcattttctgcattcactcatatgagtatctcactccccagaaatgaggaataaatgagatgctcttacatttaaattgaaagtggtaggaataaaaatttaataagaataatgtagtgcccttttgttccaagtaccagaagaggcctacaagttttatgccatgtgtttttctgttatgaagagcttgttatgctgctcttgctatgctgctgaaagcaacctaaagggaagtttgacactttttagattttttttattttatattattattaccatgttcaaaatgtgacatatccccaaagatattttggtggtaattcatccaacatactgtaaatgttaaagtgcttcctatatcattcatcccctaaatggaaacagatggccctaggagcttttgttaaactttaattatttatgaagcttgcttttcttcttaatattttatgaaatgctttgtatatgtaactgaagcagatgttgtcataggtattttctctaggatagtaactctgaaggtagctctactggcctttataatttgtttgtgtgtgcttgctttttgtctccataaggaaatgccttccaattaataacaaagttcatttaagaattcagaaaaataaatttaaaaaaagaattc

SEQ ID NO: 129510 - DNA, 225 bp, Homo sapiens
  misc_feature (220)..(220): n is a, c, g, or t
atgggccgacaggcagcacatgagatagttgctcagtcactggcccagagcggaccttctggcttttcttctctgcctgattgctggctggccatgtgccgtacccctggctgatgtctggggtggtgagcaccagaggcccctgaggaagaccaccccatccttcctctgccccttgctgtcgggctagtcggggctgtcgggctactgtcgggctagncgggg

SEQ ID NO: 129511 - DNA, 578 bp, Homo sapiens
ccaggatcacacacattagcaaccagtacctcacttttctccaaacactccacagaacgaaggtttttgtctacaaaacaaagcatcttttcctccttggagaactcccatacaggcttctcaacttggccaaaatgctacctcctccaagaagccttctcagattgcctctcccacccctcacttccaggaagtgaattgctcccttctgtcgtcttctcgagaagacgacagaaggaaaaggaagtttttcaagattgtggggtgaagtggagggagagagggaggggagagggtagacagggaggagcagaaggctgggaatagtgcagaaagttgacatctctcctttaaagatattctacagatcaactctgtctaagcccaggcctgatttagtcaggagcttttcttcttctttctgctttgtggtctgagaagcattgccctgttaaagcaccataagtttaggtcaccaaatgactataagtaggagcctccagaacggagataccattttaacaggaagccgtgcttttatagatgcaatggttctattaaagccgccttggagttct

SEQ ID NO: 129512 - DNA, 694 bp, Homo sapiens
ggaatcaatttgttacaaagttaactaagttgtattcatactcaagcttttcattttccacactggaaaatgctctcaagcaagaagatttattggtaaaataattcaactgaaatttccaaaatgaaatctgtctattgttattgcttatattcttgtaaatatactgcttccttactgtagtagcaggtacaaagttgttgaaagggccttgctacaaataaatgactaaagtgcctgtggtacttaataactagtttatacgttaaccactaatccattttgtctaccagacagctgaaagccttccaacttcagttagaaaagtccaaattgaatgttaaagggacatttattcatgtaaaatgtattacctggactgttttatgttcttaaattttgtaagggaagaaaaaaattcttcatttaatatgttgcttggtcattaaagttaggtcccatattccaaatgaaagttcataaaatgaactctatatatatatttcttagaaatcttgctgaaacttgatcgtgctgaagcttgctatgtttagcttttaatttatcaaaatgacatgaaataattgtgaggaaaagataaaaacattaaaaaaaaacatagcatagtgattttgccacttaaagggacctgggtgttgaagtaataattaacaagggttttctctatggaatt

SEQ ID NO: 129513 - DNA, 538 bp, Homo sapiens
aaccccacccccaggaatgtaccccagggcacactcctgggtccctatgaagtagcatgtcagtggccatgcagcacgacacagatgtaagtaagggcagagatgcccagactatccctcgggagggactggtcaacaacttaggctgctgccactaaggaatgacacgcagttatatgccttggggcagatctaaagacgtgaatgtgggctgggcatggtggctcacacctgtaatcctagcacttcgggaggctgagggcagatcgtttgaggtcaggagttcaagaccagcctgggcaacatggtgaaacccccatctctactaaaaatacaaaaaaactagcagggcgtgatggcacatgtctgtaatcccagctgctcaggtggctgaggcaggagaatcacttagacctgggaggcagaggctgcagtgagccaagatcacgccactgcactccagcctgggcaacagagtgaggctatctcaaacaaaaataaaaacaaaaagacatgctgctaaaatctggctgggcgt

SEQ ID NO: 129514 - DNA, 230 bp, Homo sapiens
cctctttctctatcttgtggaatagtgtcaacaggattggtaccaatttttctttgaaagtctggtagaattcatctgtgaatctgtctgatcctggacttttttttgtagctaactttttcttaccatttcaatcctgttgcttgttattggtcgttcagggtgttagtaacaaatgcttgttcctcgatgctgcaaagaaatgcacttgaacataaatttaattttct

SEQ ID NO: 129515 - DNA, 122 bp, Homo sapiens
ccactgcttagtcctgttaacttcatatctttccaaatgtcagaaggaacacagaacagaaccttcagagtacctggtacatcgcatagctcccttaaccacttaaaagcttgtttttaaaa

SEQ ID NO: 129516 - DNA, 256 bp, Homo sapiens
tttccccctgcctttggactcaaactgaaaggccttaggccaactggcatttgcactagaactacgccattggctttccctggttctcaggcctttggactcagactggaactgcaccattgctgctcctgggcctccaccttgccagtcgcagatcttggtaattgtcagtttccataattgcataagccattgttttatttctcttactaatgttttatattcttcagtaaaatgtcttgcctatctttaatta

SEQ ID NO: 129517 - DNA, 282 bp, Homo sapiens
tgcttaccagcggctggggtggtttgaggaaatgacaggatggaagaatgttagtcaaaggatatatagttaggaggagtaagttcaaggaatctgttgtacagcatagtggctatggttaatgatgatatgttcttgaaaaatacaaagagtagtaagtgttcttaccacaaaaatgacaactattcaggaggctgaggcaagggaatcgcttggacctgggaggttgagccaagatcgcaccactgcactcccgcctggaggcagagcagactccatcgc

SEQ ID NO: 129518 - DNA, 291 bp, Homo sapiens
cggcaacctccacctcccggtttcaaaccattctcctgtctcacaccaccactgcgcccggcctggaattatcttcttacacccctctcagctcaaacctaaccaactggaattttaaacattgtaggatccactcagaaaaggaactagaaaaaaaatactttttctgtattcccctggtcatctctgaagaaactatgtttgtaaaatttactaatatcagccgggcaaaatggctcacacctgtaatcccagcactttgggatgccaaggtgggtggatcacttgagg

SEQ ID NO: 129519 - DNA, 486 bp, Homo sapiens
cgcggcgaggtactttccacagggtactttccacaggttagataaatgtttagtgcttatttctcatatttttaatgctatacaacttagaatcttaaacttttttgtgtgtatcacaacatagaacagagatatacttagtgtgtatcatatgacatatgacatgattttgaaataaagacaacaaactgatttcaaacctaaaactttaataagtattgagtaattaccagaggacaattagtccagaactgtctacattgctcactcatgggatttaatccagtggacaattttgttgttgttttgagactggatcttgccctgttgcccaggctggagtgcagtggtgcaatcacagctcactgctgcctcaactgcccaggctcaagtgattctcctatctcaaccaccccagtagctgggactataggtgtgtgccaccacactgcgtttttttttttttttttaattatttgtagagat

SEQ ID NO: 129520 - DNA, 692 bp, Homo sapiens
ggtcaggctggtcttgaactcctgatctcgtgatccacccaccttggcctcccaaagtgctgggattacaggtgtgagccaccctgcctggccgattaaacttttcaatagctatatctactgtatggactctattaatgtacataattatgcccagaagagaactatatgtcattattaaatttatggttagaatagttgatctatacttttttctccttagcattcctttagctgtgcttccagagctgctcagaaacatgagttttgcttaataatccatagcagagctgaagtcaagaggggaaggacccacaggacttcagctggatctggttgggaaaagctcaagattgggaaatggaactttggtaggcacatgtcagtatgaaacatttgcctcacagccccatacatgattaacctttactttgcaggggaaaggctcacagtcttactgcagaatgagaataaacctcatttcagtggtttataaactcttaaatgtaacagaatataggcctaaaattagacattgtattcagtctgagctctgccacttaagaattctgggactttgggcaggctgcttattatccactaacctcaatttcttcagctcctaaaagggcagttgtcatacctatattatggcactgttttgaagaagaaatgaggtaatgcctaaaagt

SEQ ID NO: 129521 - DNA, 527 bp, Homo sapiens
atgatctttcttatttgataaagtttgtgactatatacttactctgatatattgtaaaaattattttatagcgtgatggataaaagactttagtgagtttgttgtaaatttaaatgtaaagaatgtattttgagatttttttctgcccatcctttatgttcaggaaattctatgccaatctgatatttatgttttagtataatgtttacttggacttcatagttgaatataatgatgaaatacaaattgcagctgtccattttttaagtgtttttgtgtctggaaatgtatttttaagtgtgtgtataccatctttttattgtggctcccaaaacactccgaactcaagagcagctcacagaggtttaaagtatttatagtgaatagtgacccatttcataggtaggattcagatggttttatatcttttgaatatttgctttgggtttggtaactcaatgtcagtaatttcagtggtattatatggttaatgatgcatgtagtttttctattagtagaaagtagaa

SEQ ID NO: 129522 - DNA, 366 bp, Homo sapiens
cacaaagcagtaaacatcctgttcccaccgaagatccccaagtgtgtgggtggatgggtgtgggaagggatgaggtaaagagagaaaggcagtgaagtgatcattaccttatcactgatttaaaatacttattaatggaggaagccaaaggtgaccatttaaaatccttttctatagtcaatgaataatacattcgtataaatcatgtttacttactttttcattcatctaacaaggattttttttttttaagacagggtcttgctctgtcacctaggctggagtgcagtggcacaacctctacctcctgggctcaagcgatcctcccacctcagtctcccgtgtagcagggactacaggtgcaca

SEQ ID NO: 129523 - DNA, 473 bp, Homo sapiens
gtagctacgactacagacatgcagcactatgcctggctaatttttaaaacaattttgtagagacagggtctcactctcttgcccaggctggtctcaaactcctggcctcaagcaatcctctggcctctgcctcccaaaatgttgggattataggcgtgagctactgtgcctggcaccatgtagactttcatcctgagcttcctgttctgcttctgagtgaccccctccatcctcccaggatagtcacagtaatgccatttcacagaggagcctgtatggtggacgaggctttcacctacatcacctcgtttaattctgtgagagtatttatcatcatagtccccattttaagaagcagaaaccaagtcccagagaggcaaagtgacttgccaagcatcacacagcttgtgcctctgagtccactgagctccaagctcctcaggagcaaggctgtgtatacccagcctactgga

SEQ ID NO: 129524 - DNA, 443 bp, Homo sapiens
cgcattgcatgtatacacgagcaggaaactgtcatgagctattataaaactaccaaaccataaaccattagaaccacaaatcagccaaggcgggatgtggtggctcacgccggtaatttcagtacttggggaggctgaggcaggtggatcacctgaggtcaggagtttgaaaccagccgggccaacatgatgaaactccgtctctactaaaaatacaaaattagcgggatgtggtggcacacgcctgtagtcccagctactcgggaggctgagacaggagaatcgcttgaacccggcaggcggaggttgcagtgagccgagatcacccctttgcactccagcctgggcgacagaacgagactctgtctcaaaaaaaaaaaatggtggaaaatcattactctagggaagaagatctcaaacggtagggatgctcgtgccgggta

SEQ ID NO: 129525 - DNA, 1105 bp, Homo sapiens
gcctggaggcaatggagcctcctccgacacacccaggcctgaggttcatccggtgactaagcccactctccctcaaggccgtggtcaccggtcagtcaggccaggtccctccctggggggtggcttcctgatgggtcacctgaggcagatgccacagagcagcaggtgcctgggcttccagggtggccccaacctgcggtggcctggcctggactcatcgacctgtgaggagtctggccttgtgtgccacgtggagacgaccctttccacccctctgccagcttccccaactcttccatctcctcccatgtccatccagtcctagtcccaggaggcctgtctcaactccccacctgcagcatcagacctgggagacctgccttggtttctgcctgcagtgtgatgccttgttcatgccaccttacgatttgtaggtctctccacgtgcccctttgaccctgagatggggaactgcttggcacctcagccatcactggtagcagttgggctttccttggttattgcctggtgtgagcgttggcctgatccatcctccctccatttggagttattcctgttttccggatcactggctcagcaccattcttgcctctccaactcctcacacagatggaagcaaatacagatctgcattttcaaggctgagcatccacataggtggacactgtcaggatgcgtgtgtgtttctgtttctcgccaggcaagttctgagtttgatactacactgcacctctctccatatcctcctccatacccaactcattactgggcagagcaggcacatgggaagtaagaaaggagtcgtcttgttgaactagaaacgttgtaactgatctgttttctaagcctgtgtttggatattagatgcagcgttaatctgcatttgtatatttgagatttggcaacaggaatctaactggctttcaaacaaacaaacagtactgaactgctttgtgtctgcttaaagaatacttatgagtttttattaacatatgcagttttaattgtaactattattgcttttcttattacaaatgcagcccatgataattacataaaaattaagcacaagtaagccaagaga

SEQ ID NO: 129526 - DNA, 214 bp, Homo sapiens
cagggatttcactgagtcaagccagagaactaagaccctgagatacttgacagtcaagtgagacttcaggtaaaacctcaaactgtcactcatcagactggagctgtacttctttaagccattgatgctaggataattaattaccttcctgccctgatgtttcttaagttggagaaagagaattaaagagaatgaaaatcagaatcacattaac

SEQ ID NO: 129527 - DNA, 423 bp, Homo sapiens
ctcccctgatgcttcattcttatggaaaggactggcactgctccaactgagggctaccactggtttggaggactgctaagcatgctgagagtgctgcttcttctccagggctgtcagcatgccccccaagtccaactgcactggaagctggctcttctttacattatttttaaaattatcttcaatccttggaggctcttgaactgtcaggacttcatattttgatgtagatttttctttctttatggtgcctatgcccttctcttctccatttttttcttttcttcctcttctttttctccttcccccttttccttttcttctcctgcttctcttcccgattttttcttttcttcctcttctttttctcttttcccctttcgctcttctccccattctcttccccattttttccttctcttc

SEQ ID NO: 129528 - DNA, 319 bp, Homo sapiens
tgaagtacccaggatcagagcagagctgaaggagagagagacactaaaaacccttgggaaaaaaaaaaacctaagcggggagctccttttttaaaaaaattaataaaatagctagaccgccagctggtttaataaggaggaaaggagagaggattcaaatggattcaataaaaagggataagggggacatcaccactgaccccacagaaatacaaacaaccactagagaatatatgaacaactttatgcatgtaaactaggaaatctagaagaaagggataaattcctggacacatacaccctcccaagactgaaccag

SEQ ID NO: 129529 - DNA, 223 bp, Homo sapiens
ggcacggtgctgagcatgttatattttacatcattatctcatatccttgtaagatatttctccatttttacaatggaagctcatggtggcagaatccctcctttaggatcacaggctacagctgcaagggtaggaaggtgaaccccattcttgtagctatcacatgttaatgcaggagattttatcctttggggttaaaggatttatgtggggagggacaaaa

SEQ ID NO: 129530 - DNA, 1163 bp, Homo sapiens
cagctccagttttgttggttgatttgtttaaattcagagatttaaaaacatcccagacaagacagtttgattatggagactgtccccaagcagattggtgtgctggtggctgctgtgcataacagattccctccagattggcttacaacagctacttcattctgtgggtcaggaatttggatagggctcagctgggtggtggttctcctggggtattctttggttgtggtcagatgtcttccagggcatcattcctatgaaggcttaatgaattaggcaagctgtccaagatggctcactcgtgtaatgacagttgacgttggctgtaggctgggaactcagctgggttgatgactggaggagcttatgtgtgtcgtctccggaatggcagcttcagaggagttgaacttaagtggtgattggcttcccccagagaaccaggcagaagctgtgttacctttttgagctcttagctcaggagtcacatagagtcacttctgtgacactgtgttgcatcaaagtagtcacaaacccactcagattcaagagaagggagcatggccctctccctgcaaccccctccccccccgccttgatgaaaggagtgacaaggtcacattggagaagagcttgtggggtgggagatattatagccatttttgggaaatatctgcataaaatgagtttatgcatacatgaaggactttattttcattggctttaagttgagggtttttgtttttgtttttgtattggagatgggttcttactatgttgcccaggctggtctcaaacccctgggctcaagtgatcctgttgcctcagcctcccaagtagctgggactacagctatgtgccagtgcacccagcttgttttttttaaattttaggatagataatggtacttctggctttatttaaataatttttttagggaaaccattgtatttatacatgcatatatttttatatatacaaatatgtatataaaagtatatgttttacattttcaatatatatataatatatacatatatgttatatacgtatatatattgcaccctactttaaaattgactgataacaaaattggtaattttgtataaaatgcccaactgtgcattattaataaaagtatgtgaatgactctaaataaacagaag

SEQ ID NO: 129531 - DNA, 732 bp, Homo sapiens
aggttttataaaagaaactcagattttgcctatatcttctttagaacatttgatctttggtggaagaaagcaggtcatgaaagtatgacatgaaatgtgccatcacctagaatggatattgattaaatggtttgaaggtagatcctcctcttgtgctctttaggagaaatctattctaaaaatgaaagttatttttcagtattaatttcttccttcaatatctatgtaataggtaagatatgtccattttatagttcaagtataataagaaaccagtctttgcctaggaacagttgagcacagtataggggatcataatagaagcaaacatcaattgaatactttccatgcactaagtgctggagaggtaaaggagtaagaatgagccccttgtgttcaaggagctctattataaccaagtagacagtcagatggtgagtaaatgagccatggttgttggtggtaggttcttagcaccatctttttcctatacaatacgtgacttttttttttttgtctcatgcacttttttattctagctgaaatagaagcttaagaaatgatttaagtgggaaattaaatgagataattgatttagagatgagttaaatgtttgtgttgtattctaacagtttaagggttgctagtattactgactctattacactgcttattatcagttgtttaaagaaacttttgaccaggcatggtgactcacgcctgtactcccag

SEQ ID NO: 129532 - DNA, 508 bp, Homo sapiens
atgtgtagggcagtgtctgtcatggtgtgatagtcactgtgtctaggtgacaccattggtgatactgagcgtgtctcagtctatgcgtgacattcactgtaggtatccacgtgtggtatccactgtatgaattcaacaatgtgtgacgctgaatgcattctagtgtgatacgtgtgacacaacgtgggtttatcttgtgtgatacaatttgagcatttgtgtgtctatgtgacacagtgtgaaatgccacttgtccataacaatgtgtgctgtaacacaggcaggttgtattattattattttttttcttttaaatcaatgtctcgctctgtcgcccggctggagtgcagtgtgcagtggctcactgcagcctcaaactcctgggctcaagcaatcctcccgcctcacctcaccctcctgagtagctgggactacaggtgcctgccaccatgcctggccaggatgcatgatcccccctacatgtatctatgtctttgtgtggcattct

SEQ ID NO: 129533 - DNA, 427 bp, Homo sapiens
ctgcatcgcgcttgtcctgcctcgctgcttgtcctgcctctgctgcttagtctgcctctgcggtctttttctccttcttcctcttctcttctttcgctgcttgtcctgcctctgctgcttgtcctgccctgtaaaaatgaagcccattattattcatgccgtggagtgaatcaacgtaatccatccacttcccatccagccagctgctagccaagacccgctggctgtgaggtaacaggaactttatctgggactgaggaaaagtgggtaattttggctgcaggacccaaccggggcttcggcggaaagttgtggaaaggatacagatagcagaggcctggaaagggtatgtggaaggaagtggcagataaagcagatggattacgtgttacattagagaaaaagtgtcaaaacaacattatagcaa

SEQ ID NO: 129534 - DNA, 302 bp, Homo sapiens
tctaattttccttaggttatttaatctttcctaatatcaatcaactgtagttccatggttcataatatggtatttatggctaaacaatgaaaagttcctgaaccagacctgatgtcttacaggtactgcaaacttaacaagtatgtattagacacttggatggctaatccaatacccactcccaatcctcctctctctcctatctatcttcaccataaagttaaatactcacttctccaatgccccttgcagttactggtaaccattccactagttatggccaacaagatgtaagctaaaat

SEQ ID NO: 129535 - DNA, 353 bp, Homo sapiens
attctgtaagtgaattgcgggctcatgggctggatgatatcaggaagaaaatagtaagaatcgggatgaagcccatgtaaaggaaagttagagaaaaagggtttacatacccaaagacagaagcactgagagacttcattatagtctgcaacttgccaattagcaagtcaagaagaatttgttgacttttgatgtgtgctgggagctgagctacttctcagctctggccacacggcagaatcaccaggcccggccacaggccaattaaattagaatctctgcgggtggggcctcagcattaatattttttaaaggctcacaaggtcttttgaattgcagctgggatcgagact

SEQ ID NO: 129536 - DNA, 660 bp, Homo sapiens
tgggaagctgacaattcatcagcatgtccggaaggaaaataaggaggaggagcagaaatagatgaggctggatatagaagcagggctgaagctgtgttgatcgtggtaaagagttgtgattctatccagaaggcaataggtagcattctaaacagagatctcttaaaacaagagtcagcaaatattttctgcaaagggctaaatgttaaatattttaagttttccaagccatatggtctctctcttaatgactcaggtcttccattataccatgaaagtaaccagagacgttttttaacacatgtattggctgtgtcccattacaactttacttacaaacgcagactgtgtcagacctggtccatgcatggtagtttgccacaccctgttttagaaagctcaggtttatgatgtgatggagaatgcctacaagagctcttgttttaaatggtagagtgaatatacactggaattctatactgcttgacccaagcttttgatagcaaaaggtagaaaagacagatagtaaacagatagatagatgataggaaggtagatagatagatgatagataaagaaagtacatagctgttccagaaaacagaaactgataatttcatgaaccaaaagcagagtaatatactttagaaaggaagcagg

SEQ ID NO: 129537 - DNA, 419 bp, Homo sapiens
gtcttgaactcctggcctctagtgatcctcctgcttcagcctcctaacatgctgggattacaggcgtgagcacagaaaaaccaacattgtattgttgagcttttaaggtatataggtgtaaaatatgacagaagtaacgcagtggatgggaagacattacatggaactgtagtaagtcttaaccttgtcagtaggttcttggaaattccaactttaagcaaaacatcattcaaataatgtcatttcattcaacgtcttttcattacagcattgaggagacaaaattatactttgtttcagttaaagttggagtttccaagaacctatcagtgagttaagtgaggacttactgtagggtcttgcaagcttctcctgttttacatgaagtaattcagtattaactccaaatatattatgct

SEQ ID NO: 129538 - DNA, 420 bp, Homo sapiens
aggctcgtcctcctaaccctaagtcctgtgcacagagccctgtagccgcccctacccagagcaggcactgacaagcccacccatttctagtgctgcccaaggtggactcagcccacaaaggccccagccccagcctttgcggataggtttcctccgtggtgccaacaactcttgtggatttgaaagaggcaacctttttcctcgcgtttctaaaggcctatgaaaagggcacgtcgggaagtgcacataagacgttgaacatcgttgcatgagatgttgaagaagtacaagatttcgttcttccttccattaaagtacaatctccctggggagagacacacaaagtacacaattagagaccagtaattctcttccagatcgctcccggtgccttttcctagctaagcagcctctccctgc

SEQ ID NO: 129539 - DNA, 740 bp, Homo sapiens
cattctgcatgctattttgctctttagtagcataattgtaaaatgaggcaataaaaccagaaaagatataatatttatacctgtgtaggcacttcacatgataaaatgtcacacgagactgtttactccatgctggttatttggataacgccccacctgcctagtaacaggcggtgctgagtcttgcataaatcttggaaagaaggttagggttaatatagtgagttcttcagtaggaaaaaaaatacagcatatgtgataataataatggcgactctttgattactatttttgtaccggcactgtgctaggcccttggggacagagtgtgacaaagagggagataatataagtgagtacctttcatgtgtcagctattctgctatacattttacttacaatatttgtaaaacttataataactctgccaggtaggtggtgttatctccatgtatatatgactgattcttgtttatctcataaaaaattctaacgacctcattggagttctgttataattatcatgtttaaactttggtgcttttttttaagtttaaatagtcttttttttttgagacaaaaaaaattaatgagaagagacaaagaaacatcaaagagctttttcctctgattgctgtgttagaacttttgcctgaaaataggttacattccttctgttttcagctgaatcctcattaactttacattttaatgatgtccagggcaaattacaccattta

SEQ ID NO: 129540 - DNA, 198 bp, Homo sapiens
gagctccgcctagggacctgagtgtcctcttcaacactctctctcccaatggggattcgtgcagcagaggagagagaaatgcagtcctttcccttcttagtcaccaagatattccaggggccaggagcgcgtgggggtgcgaggtttccctttggccaggtgggctctcaagccagacccagggagggtggggcctct

SEQ ID NO: 129541 - DNA, 887 bp, Homo sapiens
acttgggttccagcagatgcacgactccttggaccctgcaggtctccagggcagcagcctggagtgtgggccccacagtccaaggaccttccagtcaagtgccaccgcgtcctttctgtgtgaccctgagctagtgtctgaaccctcctgtgcctcagtttcctcttgggtatgatgggaattagtgcccacctcctagggttgcacagagatggaggtgaggtgagatccacaaagcccagtacctggagggcacctggtttaactacgctgctttccctcccacagggactggcggactaagatggagtgtacagcgcggctgccagcccagtgcaccactgcccatgacgctctgctgaccctgcacaggaacctcacaagcactacgcctgatgttaggcgcctccatgactgaccctcaactccagcctttcacctctaaataccctgcacccgccacaaggaagtgagcaaagcccatacaagcccctgcctgcaaggacctgacgctgaaacagggaaacatagaccgtcagttagaaaacaagtgagcagggatggcgacctcagacactggtgaacgccataaagcaatgctgctcagtatgagccccagagagcagcaggcaggacttggaaagtgttcaaaaggcagagtccaggacccactcccaaccttctgaatcagaactggggtggggccagagattccgacgcacattcaagtttgaggaccacagagataagggatgggacaactaggggggcagagatgctttttaaattttttttagagacacggtcacactctgtcacccaggctgcagtacagtggcaaaatcatggttaacggcagctccgaactcctgggctcaaggaattct

SEQ ID NO: 129542 - DNA, 252 bp, Homo sapiens
caaacttgcacgtcctgcacacgtatcccggaacttaaaaaaaaatcccatttattatctgaccagatacacagtactcattcaaagccaaagttaattaacataactagtattgatcttcttacctacgttattaccctgttcctttctatggtctacttcttcatttccttaatctagcctggtctaactactggatggcagataaaggcatcatccttcaagtgcagtaagggagtaggaaaaacttgt

SEQ ID NO: 129543 - DNA, 427 bp, Homo sapiens
tcaccccaaggcctgacaaagcaagagatggaatgttaccagagcccagagaggctggagctttggagaagggtgtctagaagaagctgtagtgatggaggacataaccagtcccagaattctgctgaaatgggacaatgggaaggaacaaggaagaaattccctgatttcactcaacacacaccctccaatcttttttcacatctcttgtttgacctgaccagaagccataaggcaaagaagctcaccatctgacatcattctgatcaataagatgtagggagaagtctgttataggcatttccgggaaattttggctttcctgttgaaagctgtcaggtatggatgaacagttccctttattcctcctttccttccgtccatgaatgaggatgtgatgacctgaacagcaactatattgcaatca

SEQ ID NO: 129544 - DNA, 792 bp, Homo sapiens
caactcaacaactatctgtttaaggccaaaggcctgagaacctggcgggggctggtggtgcaattcccagagttgaggggccagaaaatctggagttctgatgtccaacgacagaaggaaaagggtgtcccagcttcaatagagagagaagtctcctctgctctgcctttttattctatctgggccctcagtcaattggatgatgcctgcacacaatagggtctcactctctcgcccagcctacaacagtggcgcgatctcggctcactacaacctccacatcccaggctcaagtgattctcctgcctcagcttcctgagtaagtgggattacagtgcctgttgttacttcattcagaagtctgaaatttgatatgctttcctaagaaatagtcccaactaatgtcctacggaaactagcgaaaactccattcatctaagaaagcagtggaaatagataagaaacttacacattgcaagtcagatatctgcactgatacccaagagcaaaatgtacagagctcagtggggaagagggtacagaagaaggaagatcaatctatctggcagaagaggatgagaaaagcttcctggaagatgtgacccttcacacagaacaaaggctacacctatgtatcctctgcaagctccaatttttataaattcatccattctgtaaataggctatatttcatctgaagagcctatagaataactttggcctgtaaatcagttaagattccaaatccatgtgattccaaattgaagaaaggactcaggaaccaccaattgg

SEQ ID NO: 129545 - DNA, 274 bp, Homo sapiens
tagatattccctttcttcttgtagaaaattgcttaacatgattctcctttatcacaaataagtaatatctcaacatatttagtacaatttgattttccttcacttaaattcccctaccagattgatgttccttacaacaaaatacttaatatccataatccatgtaatggaaactgttaataacaatattggattgacagattccctgacatgcttgatgactacaatttagggaaaggatagaaaacatattcgtcatggaaaaacaccacca

SEQ ID NO: 129546 - DNA, 959 bp, Homo sapiens
gaacttgaattttatgacaagaagatagataagtcaatcatgtggatcccatgactggaggggaccgtggaaagataacgctgttcagaggaagtgaatctaattgaagggactcaacaatagcatgtatgccaaaaaggaaaccacagaactgaaggtggaaatgtttggatggggataaaaggagaaacaaacagaaatagatactaagataattggaggacacagatgctgctttcttagttcagactgccaaacatcaaaagcaagttacagtagtgccagaggtctccaagaatcaggacactaacatgagtctctttctgccagaagcagagcacctagtaaattcttgctctactcacaattgcgtttactagaatattgaaaaaagattgtcagatgtaatttttatagatttcaggaagtcagatttcagaatgttccaaggaaaattatctatagtgcttaaaagggacagggcattctcaaacatgaagtttcaattgtatctcaaagggtcctgctgaggaagaatgaagcggcttcagcaatcagaaagcggctgcacaggttgttttctgatatgatcaaagtgtgggcagagatgaatgtcaagtctttcacatgagaaaaatgaacctcggccgagtgtggtggctcacgcctgtaatcccagcactttaggggactgaggcaggaggatcgcttgagcccaggagttcaagaccagcctgggcaatatggcaagactccatagctaaaagtaaaaataaaaataaaaaatttaattagctgggcatggtggcatgtgactgtagtcctagctactcgggaggctgaggcagaaggattgcttgagcccagaagttcaaggctgcagtgagctatgaagctatggagtgccactgcaccacagcctgggcaacacagtcagaccatgtctccaaaaaaaaaaa

SEQ ID NO: 129547 - DNA, 678 bp, Homo sapiens
agcgatttcctttcccctgggtgtttgaacctttgctctgctccttgcttctctgggtattaaggggactcctgaaagcccccattgtcttcagcctctttccacccccttccttggggctccccaagaagattgttgcctgaactctgtagggcaagaatgagaagcagtgcccccaagacagtgcctacccttgtcatttacccaccatcctcatctcatttatccttaagtcccaagaccaaagcaaagaacacatgggctgttgaaggcttccacaggactgccctggtcagtgggaaagcagtaatgctttctagctgggtaaccccttggctgagttccatctgcactgtggccagggtgcgtggtgagacatgcttttgccatttgccctttgaactgccaacaatcccaatgtagcaaatggatttaaagctgattgagttttagatttctttcctttaaccagaatattctagcagcttatttttatagttctgcttgtatgattctctttttaacagatggaatcacagccttttctgcagtatatatctgatgaatttaaaaactgatacatcaagaatattcttttgtatatgtctttcttgctgtgaaaatttatggcctttcttccccctatcttcgctctgtaattattaggtgcttactata

SEQ ID NO: 129548 - DNA, 361 bp, Homo sapiens
taatacctaaaattccaccattagagattaaccagacctattcctggaggaggtaatctttctgctgcttttgatccagacagtttcaatgttctatgaaagcactttgaatacaagactctacagaggtgtaaggtggtgttagatcatttgccatttgctcctctgtgcaagcttaggttttattaggacagaaggaagagggcataggaaactggttgtctaagagagtgggaaagttgtggccccaaagacagagaattgagagactggcctgaggccagagatactctttacccataagacagacttgcccagtgccagcactgggcaggttctgttctctacactgcattcggct

SEQ ID NO: 129549 - DNA, 581 bp, Homo sapiens
ggccccaccagtggggcgcaaggagcctcagctgtttgagtcgggtgattcagggcccatggggtcaaggctggccctggggggcggcctctggaggcagcggagctggtaacaactccctcagcctccctcaaaccaggacgagggccgccttgggctgctccaagccctgtggggtgtggaggcccctgtggccagggtccaccctccaggccacgccctgcccctcggtctccagacctcacatgaggattagtcaaactacgagaggcttcaggggcagaggaggtccagcaaggtgaggaccctgggcaggtttgtcccctcagccagggaaggcgtgaaaggaagcagaggcaacgtcaggccccgggggtcccagtccggagctcccagggattcccactgggaccctggatcagggcctgcccgggggctgtcacctgtggactgaggctggctcccttcccacacctctggggatagagggcagacaggccctgatgatgagcaggtggctccaatacccatgtcctcccctgggggagagggagcttcaggcaagagtgactctcccctcc

SEQ ID NO: 129550 - DNA, 568 bp, Homo sapiens
ggtgcagtggctcatgcctgtaatcccagcagtttgggaggctgagacaggtggattgcttgaggtcaggagtttgagaccagcctggcaacatggtgaaactctgtctctactaaaaatacaaaaattagccaggcgtggtgctgggtgcctgtaatcccagctactcaggaggctgaggcaggaaaattgtttgaatctgggatgtggaggttgtagtgagccgagatcatgctactgcactccagcctgggcaacaaagctggggactcactctgtcccttgaaagttgtgtggaactccagcaaaagaaactaaatttataagaaaaaaacagacaaccccataaaaagtgggcaaaggatatgaacagacacttctgaaaagaagacatttatgcagccaacagacatatgaaaaaatgctcatcatcactggtcatcagagaaatgcaaatcaaaaccacaatgagataccatctcacaccagttagaatggtgatcattaaaaagtcaggaaacaacagatgctggagagaatgtggagaaataggaatgcttttacactg

SEQ ID NO: 129551 - DNA, 349 bp, Homo sapiens
gggagtgttggctgggaaggggcaggaagcaactttccaggacactgaagatgttccatatcttgatctgggtgttagttacacaagcagacatatggaaatattcaccaagctctatgcttaagactggtgcacttgaaaagcttttttttgttttttgatttttgttctttgttttttttagagacagagtctcgctctgttgcccaggctggagtgcagtggcacaaacatagctcattgcagcctcaaactcctgggctcagatgatccccctgcctcagcctcccaagtagctgagaccacaggcatgcacaaccatgcctggctgattcgaaaaagtttttgt

SEQ ID NO: 129552 - DNA, 289 bp, Homo sapiens
aggtgcacgccaccatgcccagctaatctttgtatttttagtagagacgggttttctccatgttggccaggctggtcttgaactcctgacctcaggtgatccacttgcttcagcctcccaaagtgtgggattacaggtgtgagtcactgcacccagcccagttagttaattttaattaggatttttctttctgataactgtcagtattcttggaactcttttatgcacccgagttaaagaattttttgaactgaagcccaaacttcagtgttattttttgcttttgtcc

SEQ ID NO: 129553 - DNA, 608 bp, Homo sapiens
ctggagtgcagtggtgcaatcatagctcactgtagcctcgacctcctggactcaagcaatccctctccctcagcctcctaagtagctgggactacaagtgtgtaccaccagacctggtgaacttttcagttatttttctttaagagacagagtcttgctatgttgcccagctggtcctgaatccatggcctcaagcgatcctcctgccttggcctcccaaagtgcttggatcatagatgtgagccacctgcctggcctccctaaaatgttaccaggcattccaaccaagaggagagccatcctttagatagaagatatagaatttttgaccaggcacagtggctcacacctgtaatcccagcactttgggaggctgaggcgggtgaatcacttgaggactggagttcgagaccagcctggccaacatagcaagaccccatctctactaccagtacagaaattagccgggcattggccgggcacggtggctcacgcctgtaatcccagcactttgggaggccgaggcaggcggatcacgaggtcaggagatcgtagaccatcctggctaacacagtgaaaccctgtctctactaaaaaaaatacaaaaa

SEQ ID NO: 129554 - DNA, 181 bp, Homo sapiens
ggtggcttaaacgtgatggagtaacacaggagagaggctgccagtcaagggtgagccctcaccctggattaggtttgtggaatgtatcaccccgacacagaggcagcaatgtcagctcacatctgtttccagactgcgcagctcagatgtttcgctgaaggatggatttcaccgaagctgc

SEQ ID NO: 129555 - DNA, 186 bp, Homo sapiens
ttaccccaagtctccaaggccccatttctcttcccttctgatctggctctggcctctcttgtggctttagtccagagaactgagaacactctcttccctctcttcctccctcctcttttcttcttccctcccctcttctctggtatcttgcaactctcaatttcctgcttcctctcaaattccaac

SEQ ID NO: 129556 - DNA, 303 bp, Homo sapiens
tgcctgccttggcctcccaaagtgctgagaccacaggcatgagccactgcacttggctagacatcacttttagatcatgatgtacaccacctgtctcctttccctggcccatggcagacattagtaatcaaacacaatgcttttttcccccacggagctctttgctcaccttacccgtcacctgtccagacctcatggctcccctggccaagtgctagaagaaacagatccttgtaactccatcttccctccaagtaaaacaggacctttatatctcctctctcttaccaccagccatggcag

SEQ ID NO: 129557 - DNA, 476 bp, Homo sapiens
tgggattacagacgtgagccactgtgccctgccagcactaagtattgactgtcttgttttcagatcagagagaaaacttttagaaaacatggttctagccctagttgtttcttaattagagtttcttcagctttagtatggcatctgaaggtgattgcatcatatttcataatcacccagctgaactatttgctgtttagtccagcactgggcactgaggctaaaagatctttaatccaaacagcctcagcattcacccaacctgagcctatgggaccccaagcagatctggattcactgtcacttaccatctacccatctgaccctgtcttcctatgacagacagaaataaaccctgtagctatttcaccccacctacataccctgcacccctcctactccccgtccgactttcctggctgagaagttggcactgccctctggagcaggccctgtcaccagtgcacccctcactc

SEQ ID NO: 129558 - DNA, 354 bp, Homo sapiens
gttctgagcacatcagagatcttccctgagattttttagcttgaacccaaagagtgctagagtcactcactggtttagaaactataagaaagggagcttaggattcagtggtagctgtgtttgccaccatgtaaaagggtctgatcagtagggagagaaaaataaagcaaacaaacactccaggagatagagtgagtgtcctgattgcatttgaatcttctattctagttcttcatgtggtttagctgcatgtggcctatctcatttggttgttctacagttcctcagatttgatgagattttctagtatccttgcaataaaattccttttctttatggtagtacagggctgcc

SEQ ID NO: 129559 - DNA, 546 bp, Homo sapiens
gctgagagaggaatcttacatattctcactgcacacattgaaaaaggtagctgtgtgaggtgatggatgtcttcattagcttgattgtggtaagcattccacgatgtacatacctgtatcaaatcatcacactgtgcaccttaaatatgcacaattttcctgctcttgatgtgtgtgtgtgtgtgtgtgtatatatatatacacacacacacaatttttacttgtcaatatacctcaaaaatatacctattaagtactcataaaaattaaaaattatatttcaataaagctaggagaaaaaagccccactggcccagacgagcgcctcaaggcgcaggtgtggcagagggagagagacgacctcttctgaagccaaaagcacatcttcagggcacccactctgttggtctatgtggctagcacagctgaccaaatgaggctgtggaaccagtgaaagcacacaggtagccgaggtcaggaatcggcaccatcactcctggagagagggcgtcttacccggcaagagtgacccagcaggttggaagc

SEQ ID NO: 129560 - DNA, 344 bp, Homo sapiens
accagctccgggaacagggaatgtgggttatgcagtgcttccagctcagtatgttactcagctacagcagtcttcatatgtatcaatagcaagcaactctacctttactggaacatctggtatccagacccaggcacggcttccattcaatggcataatcccatcagagtcggccagtcggccccgaaagccctgtaattgtacaaaatcactgtgtttgaaattgtattgtgattgctttgcaaatggtgaattttgcaacaactgcaattgtactaattgttacaacaatttggaacatgaaaatgaaaggcaaaaagcaataaaggtgattattttttatt

SEQ ID NO: 129561 - DNA, 542 bp, Homo sapiens
tccttgaggactcagtctcaccacaccagtgctgaataacctttcttccatgataagaagaaagactaaagctagcttggggtaacagctctggatgtttttttttcctctccccaggtggggatgggtgttggacacaataagcattttatttctgttttttcttggaggcacaaattaacattttttcctacccaggggccatcataccctaagctgtgctgatttttaaattggtctatagagacaactcgtttcccatgttcggctgatgctctccatagctacccaaaagtccatttatttgtaactctaaagcaatgactcccagccacagcaatttcacacacacccccactcccgctggggacacttggcgctctctggagacactttggttcccacagctggtgtgggggtgctattgatatccagtgggtaacagccgggggtgctgataaagaccctacagttcacaggacagccccccaaaacaaagaatgatttgacccagaacatctcagtgccaaggctgagaaact

SEQ ID NO: 129562 - DNA, 521 bp, Homo sapiens
ctgggatcaaagcaaattaaggcagcagaggtgggaagaaaaatgtgagagacagtttcagaggtgaaatcaactgaattcagtgactggctgcagatgtctaactgatatagggcaggcaggcttagcctgggagggttcttggcttcacccaggaaagaattcaagggtgagccagaggtgagcggcagtgtgcagcagaggtactgttccttgtagagcagggctaactcataggcagtgtgtccagagcagcagcatatgggctgttggctagctgtatttatatctacttttagttgcatgcaaattaagaggtgggttatttagaccttttagaaaaggggtggggcgtttctagatgcatagaagataactttcaggtcattcccatggcatgttgccacggcatttgtaaactgccatggcactgctgggagtgcctttatgttaatgagcagtgagggcaactggaggtcactttcatcaccatttgctggtttcagctggcttcttcactg

SEQ ID NO: 129563 - DNA, 301 bp, Homo sapiens
agcactttgggaggctgaggcgggcggatcatgaggtcagaagtttgagaccagcctgaccaacatggtgaaaccccgtctgtactaaaaatacaaaaattagccaggcgtggtggtgtgcacttgtaatcccagctactcaggaggctgaggcagaagaatcgcttgaacccaggaggcagaggttgcagtgagtcgagatggtgcctctgcactccagcctgggcgacagagcgagactctgtctcaaaaacaataataattttgtattctataacataaacagcatttggaaccgcat

SEQ ID NO: 129564 - DNA, 842 bp, Homo sapiens
ccgaacattttctgtttaaagtgttaacctttttctcagtttgccatttatttcctttcggctcttttttcttcatttggctgccaggtcctctggcagtgacattatttcctaaatacttcttcatctttccatttctaggccttgggagggcccatggcccccacctcctctgattgcatcccatgtctgtatcagtgcagcaacaatctcagcccttcctgaagtatcactagcctgccccacacattcagtccacgaaattatacagatgcgtattgggcaacagtccaggccttccactttccatctgtattttccatgactcccctatttgcacaggggtgtctataagtgccctggatgcctgctgatggctgtggctctgctccaagtcaagacattgctctctatctggctcctttcctactgtgtccctgcacagagctcacagtgcattttacattgtaaacatctgtttagttttatggcttccttattagttcctaagccctgtgaggaccgagaccatgcctgaggtattatccactctatccttaatagctgctttttaattaatttattttttgagacagagtcccactctgtcaccaaagctggagtgcaatggcacaatctcggctcaccgcaacctccacctgccaagttcaagtgattcttctgcctcagcctcccaagtagctgggattacaggtgcctgccaccacacctggctaattttatttttgtatttttagtagtgatggggtttcatgatgttggccaggctggtctcaaactcctgacctcaggtgatccacctgcctcggcctcccaaagtg

SEQ ID NO: 129565 - DNA, 437 bp, Homo sapiens
tagccatatgaaaaaagtaaattttgattgtttcaacataacatacaaaattgattcattcttgaaagacggtagatctaaatataaaatttaaaacaactacattttcagaactgggctgttcagtatgacagccactaggcacatgtgagatttaaattcaaattaattgaataatttatttcctctgccatactagccacatctcaagtgttcaatagcacaagtggctagtggtcactgttttgtacaatgtagctatggaacagttccatcactgcagaaaatcctattggacaaaatttttctggaaaataatgtaagagaataccttcatagtaaaaagaggtcgttaaagaatataacaggccaggcatggtggctcacacctgcaatcccagcactttgggaggccaaggcaggtgaatcacctgagg

SEQ ID NO: 129566 - DNA, 302 bp, Homo sapiens
tgctgggattacaggcctgagccaccgtgcctggccaatactgtattattttaatcattttaaaatttttattgtttgtctccacttaacattcataacctccacaaggatggggagttttgtctcttgtattcagtgtcggtgcttggcgtgtaataggaacttagtaaatgtttgttgaaggaatgcatctagaatgatcctcatctctaatttgggtgattcactggctggtgacactcatccaaggagggaaaatgggagaaggatgagattatgagtttgtttttggacatgttaaa

SEQ ID NO: 129567 - DNA, 469 bp, Homo sapiens
gaaaaccaagattcaaaactttcgattgccttttttacgcaaaccaacagtaacaggcaggctacaccaagaaggcaataaggctgccaaaggtaaaggagtagggaggaaggagggaaatagagagagagagaagttaacttagaatatttagctgctgggggctgccattacagcttggcccaggataaagaggaagatttcattcttaggtctcaataaagttgttgacacaggcaccaagggatgcatgatcagctataacaggatgctgggagcaggctactgggagtagctctctcctatggttttgtcctgagggtgacgaaggtggagccacacaggttgctgaaggccttctcctagagaggctggggtgctggccatgtgttctgagggctgacctggctggtgaacccattgctatgactgaatacaaagccaggaagttgagtcactcagctctaaa

SEQ ID NO: 129568 - DNA, 301 bp, Homo sapiens
tggacccatgtattctgactctggggagacagtaccatggaaggctttatgactcaaagcgtacaccttgacctgtgagtcagaattcctttctaagggttgtcccccatttggccctataactgagttttcagtatgcgattccacttttcatgtagatccactgcttctgagtgatggggtgtgtgatggaaccagttgatttcaaggacatgcttccattgttgcacttcctctgcagtgaaatgctttgcttgtttagaaactctgttgtgtggaggccatgactactgataaagca

SEQ ID NO: 129569 - DNA, 586 bp, Homo sapiens
gaggttgcagagtatcttaccctcaagtgagataacatgtgcctgtgcttgtcatttccacaataggcatgcagctgctttcttgagatggtttacttcattacacaatttctttctaatattagaccataggtttttctttattgtggtaaaacattatatagcattaaatttaccatattagccatttttaagtatatagttcaatagcattaagtacattcacatcattgtgcaacacagttctagaactttttgtcttgcaaaactgaaactctataccaactaaacattaatttttgcctctccaaccccctagcccttggcaaccacatttctactttctgtttctatggttttgacgcttaagatacttcatatggttagactcctacaatatttatccttctgcaactggcttatttcacttggcataacttgaagttcacccatgatgaggcatgggatagaatttccttatttttaaaggctgagtaatattccattgtgaatatactccacattttctttactcattaatctgttgatgaacatttgggtggcttccacctcttggctctgtgaa

SEQ ID NO: 129570 - DNA, 717 bp, Homo sapiens
gaaaaaccaagggatttttcccaaggttatacagcaggacacttgtagagctgataatggagcacttgtttgcttccagtattgtttggtagcatttttaacatacaaaaaaagtgaaaagtacatctagctaagatactgaaatgttcaccaagttgggaagcctattaatttgaaaaattattattattttaatcctggaggagaaagaatttgcgttttcctgatcagaacagaaaatgcaagatccatgccatgtgcttgacattttgccttgatagatgacttttgtcacaggcctgttgtggcagagcagatggtcatgctacttggagtttttccactcatttgatatttccatgaagaaacaatttgccagaagccagccgtagttagagttgtgctggagatgacgggaaacctggattagcacagacttttgcttacaggagctggaggatatcggttcagccctttctgctgggccagtcaagagttccctggattggtaaactgaggaacagtttagtcttgtgatagttggagtggagctataattataccactgcactctagcccgcatgacagagaccctgtctctaaaaaaggaaaaagaaagaaatatagatatcttgggacaaacgacaaataatttgacaataatctaaagaaaaattgaaggaaaatagctaagacattattaggataactgataaa

SEQ ID NO: 129571 - DNA, 717 bp, Homo sapiens
agcagtgctgagcgctgcggggctgcagcagcagccggcgatgcggagaccctgcaccactgctccgggcggcgctcgcgtcccgacggccacctcctggcggctgcgcgcagccggcgccgagatccagacggacgcacggtgctgattggtgcagtgagtgagtctccggctttatttagaccaccgtttcttgacgactgtacttcattggagttgagggctcggagcagcaggcagccttccccgtgggaaggatgacaaatggggagtgctgcttctaggtgctcgtaccaactggcttcgtgcgtcctgggatgggcggtgttcacaggcgcttcggggctgagcgcccaccaagtgtggcgcgcgcttttgggaaactccgtggaagaccaggacggacccctggagggttaggaagactttgagaccagccaggggaagccgtgtcccgggccctgactgtggatctcctactctgaaccacggactccagtttggaaggccaggctgcctttcggattggggggtaaggaagggatccccagctcaggcagccttttgggctagggcaaggggacctctggaaccacatttttgaatgctcccacccatgatttctgggacagctactggagacaaatagaggctcgaaggtgtcgggagaaaggctgtgttcctgatgtcatgtagttgaacttggatgtggaggaa

SEQ ID NO: 129572 - DNA, 431 bp, Homo sapiens
ggagtactgtcactatttttataaccagtgttctactttattttaggtgtatcttttcttatttaaatgtcagctaaactttctttttaagatattgaatgaaagatgcccatccttcaggtttcgtttaagcaagaatccccattctcaaataatataatataaactttccaaattcttaagtagatcatctgagattgaaagctaagtttaactttctcaaagatattttagccgccatgacacctagacaaagtggtatattaaattctgattaatttggtcctaaagcacctaagaatcattcttactttcttatccacaggggttattaagttttcacattaaaaaaaatccaacagtgaataatactgcattggggttactgtaattgttaagtaaaataagaaatacaaatctttagttagatc

SEQ ID NO: 129573 - DNA, 419 bp, Homo sapiens
caggatccctgtgtctgtgtggtctgtgctggcgtgtggtctgtgcagggctgtgactagtgattatcatatgttgggctggaattgaaaaccactccattttccttttctgggtgataggagatggaaacagcttcaacttggggacgggtttcactcctgcaacctccctggccgctagaaagacctagggactttctgtagggctggtctcactgccttcctcttcactggctcctacctttaattttgtcctatccttcccttgtcatctgcgtctctgtcactggctcttctcctgtctctacattcaagttttcccgggaatcagtccttgatccttgatttttcccttcgtatgtcatatcctgtcctttctcctaatcaacagtcccaaatctttaactgtctgccagaca

SEQ ID NO: 129574 - DNA, 166 bp, Homo sapiens
caagagtacaggggctaaccccagaattctactgtgtttatcagtgattacgcataaatatgtacaaacagtatacagcattcaatctgttgactgatttccattttagcaactcgcatttttagtttccctgatgttcaagttttgaggtattactaaatactat

SEQ ID NO: 129575 - DNA, 1693 bp, Homo sapiens
tcccagtcgcaatgcagcaaagcagaagcagacaactaggcacaaagcaacagagttttaaagttttcttctcctgctactacttagcatgtcttacatgaggagtatttacctttgtttagccaggagcagagatgcatcctgaatgtacacgatggcttctaacttggcagcgtgaattttcagctgagcaggtactgctcggagacttgtaaccaaaccgcctctgatggagcacggctggtctcccaccatgtgtgtgaatagtttgggggcttcttatgccacgctgctctacctgcaggaataaaggctaggacaaaggagaggatgcttgctatggtttgtctggctggggcctgtgcgagcgactcaccgcactgatgctgtgtgactccccagctcacatttaaggctggtcacggggctggcgcagatccccactcctcagttagcgcacggtttaaaggagaaaccagactccctgacctaaatcactcccagtcctctctggatgcgggacagctgtcgactagcagtgacacaaccagccatcaagtggagaatcgttgcgactgcagtctgtgtgcaggtggagcccgggagaatgacagtctaatttcggtcatccaacggcttttccttattttcctaaataatcgtgctcgctaagtatacagttgtctggattagcctgcctgccatgcagtcctcatcaactctggctggaaatcagggtgccaggcaagccgcctttagccctggctcctttctgcgtgatgctatgcagctaggatgggtcatgctgacaacaaagaaggaagcagaaagcatcactttctcttctcttgtgatgttagcggaacataactcttcttcgcagtgatgcccttgtgtgtggtgtatgtgtgtgtgtgtgtgtgtgtgttttaattcatctaatcgaagagcccaacaaatatcatcatggatgtgatttttaataatttggaaaaaacaaaaaaagacagcctgtggagacagcgattcgaaacagcggcacatttaggttattgccaatttgaaatacttggtttgtgaagctgagccctaagggacaagctcggtaactgaggaagagatcgtagataaagaaataaaaatgacaagcgtaatggaggctctgcgaagggactgtcagagcatcagttcatggatggcaatttcaccaggctgagattgaataattcatagattgaaattaccctgctttcacctttcccatttaagccggcatgatctgaatctctcataaattttcaagataaagtaaaatgccaatttgaatctgaagagcttttaaaaccagatgctgcatccctgaatctttcggtatctttcacaattatcctatgagaacagcacttcatcacgaagcaccattaccagggaaaattacggtgattacaatagcaacaatagaataccatcaaatgatctctaatttacctaatttgctaagactgactgtacggttttgatatccattgtatgtcaccatgcccggcacccgtgaagctatctcgcactggaacaaaagtggcatcgtgtgtgtgtgtgtgtatgtgtgtatgtgcacgcacaccctgctaccttaactgtgaatgcctagcaaagaacattctcctaggttacaatatttctttcctttggt

SEQ ID NO: 129576 - DNA, 386 bp, Homo sapiens
  misc_feature (48)..(49): n is a, c, g, or t
gaggcgactctaagatcccccacggcaggtgtactcaaccggcagttnnactccaccggcagttgtactccaccgccaggttgtactcttctggtggctgctagcaatccttggctttctttggcttatggaggagtcactctaatgcctgcctctgtcttcatacaacattctcctttcttttatgtgtgtctgtgtccaagtttccctcttcttaaaaggacaccagtcatattggatttagggcccattctaatctggtatgacctcgtttaacttgattatatctgcacagactccatatgcagaaaaggtcacattcacaggctccaggtggacacgaatgttggggggccactgttcaacccagtacaacctgccggtgg

SEQ ID NO: 129577 - DNA, 486 bp, Homo sapiens
gcatgaaaccaaaaatcgtcaactatgtatcaattgaaaacaatcatcctctgtggcccttctgaacagaagacggttggtttgatccccaccacccaagcccttcaagccttttaagaactgatgagtaaatccctatcttactggaaaaataccatgggaggggaaaatagcacctccaaagacaaacaaaaccatggcctgagttcaacaccccagcagcggcacgccttggctgtgtgactctgagtaaatcaccagcactcactggctgtgggtttaggcaagttgttcagcctctgtgtacctcgattttctcatttataaaatgcggataatattggtatctctttcaaagggttgtactgaggatttactgaaatagtgcaggacaggcaattagagtaataactggacccacagtacatgctcagtaaagcatcatctattggagggtcccctgcttccctggggattggcattacg

SEQ ID NO: 129578 - DNA, 872 bp, Homo sapiens
aacatatcaactctttcataaaaacagcttaaaacataaacatgttgtataactgtgcaacaatattttctttctttttttattttctaatttagagacagagtttgtctctgtcacccaggctgaaatgcagtggtgtgatcatagcttactataaccttgaactcctggactcaagcgatcttcctgcccctgcctcctgagcagctcgggctacaggactgggccacctcacccagctaatttttaaaatttttttatagagataggggtcttactttgttgccaggctgttctggaactcctgaactcaagtgatcctacgaccttggcctcccaaagtgttgtgattacaggtgtgagtcactgcacctggcatattttatgtctttttttctagctaatttatttatttttattttttacttttttaatttctttgttaagaacgaagacacaaacacattagcctaggcctaaggcaaggtcaggatcatcaagacatcagtaggcaataggaatttttcagctccattggaaccactgttatatgtgcagtctgtgattgaccaaaatgtcattatgtagtgtgtaagtcttatctgtgtgatgatggctgtcaaattcatattgctagctcaaaactttgctttcaacttcagacatgtatatctaattgcttaatcagcagctccaataattgacacctcaaatgtagcatatcctaaactgagtttttaatcagcacttctcccatgtttgccaaatctgtttcttttaccatctttctcacctcagtaactggcaacgtaataattcacttctctctgacagtccatatacatgctgttaagaaattctgttggctccat

SEQ ID NO: 129579 - DNA, 912 bp, Homo sapiens
ggggccgggcggggccagcggcgcattagcgccttgtcaattcggctgctcagacttgctccggcctccgcgtccgcgcccagcgacgtgcgggcggcctggcccgcgccctcccgcgcccggcctgcgtcccgcgccctgcgccaccgccgccgagccgcagcccgccgcgcgcccccggcagcgccggccccatgcccgccggccgccggggccccgccgcccaatccgcgcggcggccgccgccgttgctgcccctgctgctgctgctctgcgtcctcggggcgccgcgagccggatcaggagcccacacagctgtgatcagtccccaggatcccacgcttctcatcggctcctccctgctggccacctgctcagtgcacggagacccaccaggagccaccgccgagggcctctactggaccctcaacgggcgccgcctgccccctgagctctcccgtgtactcaacgcctccaccttggctctggccctggccaacctcaatgggtccaggcagcggtcgggggacaacctcgtgtgccacgcccgtgacggcaggtcctgccagataagctgtaggggctcaggccaccctccctgccacgtggagacgcagaggccgaacccaaactggggccacctctgtaccctcacttcagggcacctgagccaccctcagcaggagctggggtggcccctgagctccaacggccataacagctctgactcccacgtgaggccacctttgggtgcaccccagtgggtgtgtgtgtgtgtgtgagggttggttgagttgcctagaacccctgccagggctgggggtgagaaggggagtcattactccccattacctagggcccctccaaaagagtccttttaaataaatgagctatttaggtgcaaaaagtgaa

SEQ ID NO: 129580 - DNA, 1802 bp, Homo sapiens
ggggccgggcggggccagcggcgcattagcgccttgtcaattcggctgctcagacttgctccggcctccgcgtccgcgcccagcgacgtgcgggcggcctggcccgcgccctcccgcgcccggcctgcgtcccgcgccctgcgccaccgccgccgagccgcagcccgccgcgcgcccccggcagcgccggccccatgcccgccggccgccggggccccgccgcccaatccgcgcggcggccgccgccgttgctgcccctgctgctgctgctctgcgtcctcggggcgccgcgagccggatcaggagcccacacagctgtgatcagtccccaggatcccacgcttctcatcggctcctccctgctggccacctgctcagtgcacggagacccaccaggagccaccgccgagggcctctactggaccctcaacgggcgccgcctgccccctgagctctcccgtgtactcaacgcctccaccttggctctggccctggccaacctcaatgggtccaggcagcggtcgggggacaacctcgtgtgccacgcccgtgacggcagcatcctggctggctcctgcctctatgttggcctgcccccagagaaacccgtcaacatcagctgctggtccaagaacatgaaggacttgacctgccgctggacgccaggggcccacggggagaccttcctccacaccaactactccctcaagtacaagcttaggtggtatggccaggacaacacatgtgaggagtaccacacagtggggccccactcctgccacatccccaaggacctggctctctttacgccctatgagatctgggtggaggccaccaaccgcctgggctctgcccgctccgatgtactcacgctggatatcctggatgtggtgaccacggaccccccgcccgacgtgcacgtgagccgcgtcgggggcctggaggaccagctgagcgtgcgctgggtgtcgccacccgccctcaaggatttcctctttcaagccaaataccagatccgctaccgagtggaggacagtgtggactggaaggtggtggacgatgtgagcaaccagacctcctgccgcctggccggcctgaaacccggcaccgtgtacttcgtgcaagtgcgctgcaacccctttggcatctatggctccaagaaagccgggatctggagtgagtggagccaccccacagccgcctccactccccgcagtgagcgcccgggcccgggcggcggggcgtgcgaaccgcggggcggagagccgagctcggggccggtgcggcgcgagctcaagcagttcctgggctggctcaagaagcacgcgtactgctccaacctcagcttccgcctctacgaccagtggcgagcctggatgcagaagtcgcacaagacccgcaaccaggacgaggggatcctgccctcgggcagacggggcacggcgagaggtcctgccagataagctgtaggggctcaggccaccctccctgccacgtggagacgcagaggccgaacccaaactggggccacctctgtaccctcacttcagggcacctgagccaccctcagcaggagctggggtggcccctgagctccaacggccataacagctctgactcccacgtgaggccacctttgggtgcaccccagtgggtgtgtgtgtgtgtgtgagggttggttgagttgcctagaacccctgccagggctgggggtgagaaggggagtcattactccccattacctagggcccctccaaaagagtccttttaaataaatgagctatttaggtgcaaaaagtgaa

SEQ ID NO: 129581 - DNA, 442 bp, Homo sapiens
acaggacacgaatgaagcctccttcagtggctctgtggtgcggccctctcctggactccctgcttagcttggcttcccctctgcctgcagtcctgccagataagctgtaggggctcaggccaccctccctgccacgtggagacgcagaggccgaacccaaactggggccacctctgtaccctcacttcagggcacctgagccaccctcagcaggagctggggtggcccctgagctccaacggccataacagctctgactcccacgtgaggccacctttgggtgcaccccagtgggtgtgtgtgtgtgtgtgagggttggttgagttgcctagaacccctgccagggctgggggtgagaaggggagtcattactccccattacctagggcccctccaaaagagtccttttaaataaatgagctatttaggtgcaaaaagtgaa

SEQ ID NO: 129582 - DNA, 1760 bp, Homo sapiens
ggggccgggcggggccagcggcgcattagcgccttgtcaattcggctgctcagacttgctccggcctccgcgtccgcgcccagcgacgtgcgggcggcctggcccgcgccctcccgcgcccggcctgcgtcccgcgccctgcgccaccgccgccgagccgcagcccgccgcgcgcccccggcagcgccggccccatgcccgccggccgccggggccccgccgcccaatccgcgcggcggccgccgccgttgctgcccctgctgctgctgctctgcgtcctcggggcgccgcgagccggatcaggagcccacacagctgtgatcagtccccaggatcccacgcttctcatcggctcctccctgctggccacctgctcagtgcacggagacccaccaggagccaccgccgagggcctctactggaccctcaacgggcgccgcctgccccctgagctctcccgtgtactcaacgcctccaccttggctctggccctggccaacctcaatgggtccaggcagcggtcgggggacaacctcgtgtgccacgcccgtgacggcagcatcctggctggctcctgcctctatgttggcctgcccccagagaaacccgtcaacatcagctgctggtccaagaacatgaaggacttgacctgccgctggacgccaggggcccacggggagaccttcctccacaccaactactccctcaagtacaagcttaggtggtatggccaggacaacacatgtgaggagtaccacacagtggggccccactcctgccacatccccaaggacctggctctctttacgccctatgagatctgggtggaggccaccaaccgcctgggctctgcccgctccgatgtactcacgctggatatcctggatgtggtgaccacggaccccccgcccgacgtgcacgtgagccgcgtcgggggcctggaggaccagctgagcgtgcgctgggtgtcgccacccgccctcaaggatttcctctttcaagccaaataccagatccgctaccgagtggaggacagtgtggactggaaggtggtggacgatgtgagcaaccagacctcctgccgcctggccggcctgaaacccggcaccgtgtacttcgtgcaagtgcgctgcaacccctttggcatctatggctccaagaaagccgggatctggaagcgcccgggcccgggcggcggggcgtgcgaaccgcggggcggagagccgagctcggggccggtgcggcgcgagctcaagcagttcctgggctggctcaagaagcacgcgtactgctccaacctcagcttccgcctctacgaccagtggcgagcctggatgcagaagtcgcacaagacccgcaaccaggacgaggggatcctgccctcgggcagacggggcacggcgagaggtcctgccagataagctgtaggggctcaggccaccctccctgccacgtggagacgcagaggccgaacccaaactggggccacctctgtaccctcacttcagggcacctgagccaccctcagcaggagctggggtggcccctgagctccaacggccataacagctctgactcccacgtgaggccacctttgggtgcaccccagtgggtgtgtgtgtgtgtgtgagggttggttgagttgcctagaacccctgccagggctgggggtgagaaggggagtcattactccccattacctagggcccctccaaaagagtccttttaaataaatgagctatttaggtgcaaaaagtgaa

SEQ ID NO: 129583 - DNA, 958 bp, Homo sapiens
ggggccgggcggggccagcggcgcattagcgccttgtcaattcggctgctcagacttgctccggcctccgcgtccgcgcccagcgacgtgcgggcggcctggcccgcgccctcccgcgcccggcctgcgtcccgcgccctgcgccaccgccgccgagccgcagcccgccgcgcgcccccggcagcgccggccccatgcccgccggccgccggggccccgccgcccaatccgcgcggcggccgccgccgttgctgcccctgctgctgctgctctgcgtcctcggggcgccgcgagccggatcaggagcccacacagctgtgatcagtccccaggatcccacgcttctcatcggctcctccctgctggccacctgctcagtgcacggagacccaccaggagccaccgccgagggcctctactggaccctcaacgggcgccgcggcgcgagctcaagcagttcctgggctggctcaagaagcacgcgtactgctccaacctcagcttccgcctctacgaccagtggcgagcctggatgcagaagtcgcacaagacccgcaaccaggacgaggggatcctgccctcgggcagacggggcacggcgagaggtcctgccagataagctgtaggggctcaggccaccctccctgccacgtggagacgcagaggccgaacccaaactggggccacctctgtaccctcacttcagggcacctgagccaccctcagcaggagctggggtggcccctgagctccaacggccataacagctctgactcccacgtgaggccacctttgggtgcaccccagtgggtgtgtgtgtgtgtgtgagggttggttgagttgcctagaacccctgccagggctgggggtgagaaggggagtcattactccccattacctagggcccctccaaaagagtccttttaaataaatgagctatttaggtgcaaaaagtgaa

SEQ ID NO: 129584 - DNA, 312 bp, Homo sapiens
tggaggtcattggcagaggtggtgggggagcatcttggagactgtccatcacaggagacaaggaccagaatggagagcttcaaggtccagtgttttatctggttatctgtgtctgctgtaacaattcactacaaattttgtggcttaaaacatttgttcttaggttctggaggtcagaagtctgaaatcggttttctggtctggaatcaaggtatgagcagagctaccctccctaccaaggttctagggtagaatgtttcctcgtcttttccagctgtgagaggtacagaccttctattccttgcctcatgg

SEQ ID NO: 129585 - DNA, 416 bp, Homo sapiens
tggcaggagagtgggctaaagaggtaaaatgaggctacactgtgaagaaccaaggaaaatactggggtctgtttgttttagaaaattcacaatttggggcggagtgcaatggctccccaaaacacttacccaccagctgcacgtgagaagccaaaggtagtttatgtgaaagggctttggaaataatcacgcaccaagtgaaggcagaggacacaccttgtcagcttagttctcagcagcaaatcatctcttttccaggataaccctccctgattcttattgaaatctctttgctgaccacactaagctcttctctctcaggggcagtgggagccgtggagagtggaatagaccagctgtctgtgacctgcgagggagtccaatgtcggaatcactccccagccattgcactccgg

SEQ ID NO: 129586 - DNA, 603 bp, Homo sapiens
aggcgggcagatcacttgaggtcaggagttcgggaccagcctggacaacatggtgaaaccctatctctaccaaaaaatacaaaaattagctgggcatggtggcctgtagtcctggctacttgggaggctgaggcacaagaatcgcttgaacctggcaggcagaagctgcagtgagccgagattgcgccactgcactctatcctgggcaatagagcaagattctgtctcaaaaaaaaagttgtaataattagaaatttgaggaaaaatgtatacaccctcaaccaaatctaaactaaatgactacagagtattttattaggaggaaggggacagtgaaggggaatatggaataagataatacgaaaggaattatctctaaaatttacagtaataagttgccataaagctagttagaaaaagtacacattttactgctgatctgtacaatcatctttatacctacatttcctcatttcatcaagacttctctgaagcatatctgaaaataaacaacactgtaactgctttcttttcccacctaacctggaagttccccaaaggcataatctaagtgttattctctccatattatgcttaaagtat

SEQ ID NO: 129587 - DNA, 466 bp, Homo sapiens
aaaccaccagaagctaggaagaggcaagggaggattcccctgcagccttcagaggaggaatggccctgctgacacctcaagtttggacttccagcctccagaagtgtgagaaaatacaattctgtttcttcaagccacccagtgcacggtactttgttacacagccctgggaaaccatgtagccaaccatggtagtcccatcctgttggcccagtccttgccaaggaaccataagaggaagactgctgggctggatttggagaaaggtttctgatctttccccacctgtgcctagatgtgactctagtagttgctgcagtcatcttatgagagcctaagggacaaagcccctgccaaaaaggacagagagtggatggaaagaacctggtggcagaagaccttgctgagtggccatttcagctgagctgcttgtcctgcctctgcactccctgttatgtgaaacaat

SEQ ID NO: 129588 - DNA, 399 bp, Homo sapiens
cctgtggtattactagtgaacacaaagatgaatctgggcaaacgaaggtgtttccccttaatttggaatttggagtagatattccaccacagactaaacatgacttggaaatatgtacactgctgaacactttatgtaaatagtttattccgtggtttagtaattttctctgtggaagctttgctggatttggtttttaatctgcatactataaaaacatttcattttatctgagttttaaagctcacttgatctttaaggtacaagacaaatgccaagtgtccaaatcagatattaaagcaatcttttccaggccacttgggcttttgtgtttctgttgttgtacctcttacctgataaaggagagctattcaacctcctcatcttctgttgctttta

SEQ ID NO: 129589 - DNA, 440 bp, Homo sapiens
ggccttcccttctgtcggacatgaggctcgggtggaccctgggctgtgcccgcgctgcccacacaaccgctggggatgtggagtgaatgagaccgggtgctcctcgtcctgggagcctgggaatggcaccttctgccacatcgtgtttgcgttgtgattaaagggtttccagatgagcggcccctcccgcgctatctacgggtccccagatgccaccagggtacttcgaagaggcagcggccttgagcccatggaggcagagcctggggcgacgtggtcatgagagggggaagcctggacccccaggtctgtggaggcaagagggattcttgtctggagctgaaggcgcacagccctgctcgccttgactcaagctcctgacccccagaggcgtgggaataaacgcctgtggtctcagagccccagtgtgtggaggtttg

SEQ ID NO: 129590 - DNA, 364 bp, Homo sapiens
cagcccgtgcccatctaagcctcatacacagcaggtggccggagcctgcacaaggccctctccccagtgacatgatggctgctgctgtcaccaggtggcctccaatcctgcccacccccaggctctcaggtggggatagaacattcgtgtggccacttcacctccagatccacaaaggccgctgacgtgctggtccaggaacccacacagaagggcagtgcaggaggagggaaggtacctgcagtgtggctcctggggacatgctgccttaagaagggcgtccttctgacagaagccagctcagatgaaggaggagagctccagaagatgtgagcgggagcctggcccccaggccggacacctt

SEQ ID NO: 129591 - DNA, 251 bp, Homo sapiens
tgcaggtaccaggagtgttctggcacagagattatgatcctttgggggtctaccctatgtgctgggttgaggaagcagatgcttgggaaggagagatgcctggcttgatttagctgcttctggccaggcacagggcatttgtctaggggctggcaggaaggggagcctggcagctagtggagtgcacatgggtgcactgagttgcaaagtggggcccttcgtaatgcaagggtctagatcttccatgaaag

SEQ ID NO: 129592 - DNA, 401 bp, Homo sapiens
gaagttatcaccctttttctacaaatctctgcataatctgccccttaatttgcatgtgtttaaaagtgggtgcaaatatgagtgtggaagctactgagctgcagctctcagcacactggggtagccctgctctgcaggagcagtcacagggctgtgacactgccacctctagaaagctgctttcttctatcaccgcttgcccttgaattattccctgaatgaagccaagaaccctcccaggctaagccccaatttggggctcgcctgccctgcatcagggagacatgtcagctgaggagtaattgaccagatttctgctttagaaatatggcagtggaggcaggagatggcatctgaggcccaggctggggagaagggtgctgggatgagaacctggagtt

SEQ ID NO: 129593 - DNA, 519 bp, Homo sapiens
aatccagctgtctctctgaaaactaaatatgaaagactgagatttagtcaactttgctgagatttaatttacatataataaaatgaatcattttaactgtgcagttcagtaagttttgaaaaatgtctatacagattcatgtaactgccaccaaaattgagaaaggacacttccaccatctcaaaagattctgtgtgttcctttgtagtaagtctcttctaccccatccctagacaacagctgatgtgctgtcattgtacacatatattagctttgcctgtcctagaacttcatgttaatgggaagcatcctgtatgtactgttttgtgtctggcttcttcagtgtatttttgaaatttatccacattgttgtgtgtatccaaagtgtgttctttttcattgccaaataatgttctgctatatgaatatattacaaaatatttgtctgtttatctattggtggatttttgcattcgttccagtttggggctattatgaataaagcttctgtgaaaattc

SEQ ID NO: 129594 - DNA, 120 bp, Homo sapiens
gtagctgggactataggcgagcaccaccgcatccagctcattttattttttgtagagacgaggtgggaggtggggtgtggggagtgtcttactttgttgtccaggctgctctcctactcc

SEQ ID NO: 129595 - DNA, 463 bp, Homo sapiens
atggagatcaccagctggatatggcaagaaagttgccccagtgcagtggtggtgacgtaatggaggtaccttgacagatgggaacagcctctgtgaactgcaagtctggtttccagaacctgttctcatcccttcaggcctaatggtgatgacactctgctcccacctcattctcgtattactgaagttcagtgtgcctgctactttccactagtccttgactcactcattgctgctcagtttctaagaagcctgcccagttttaacttcagtggctatctgatttctggcctggtgcttttagcattcctataagtaatacattgcacttttactgtgaacacagagacaaagcatatcatggggacaccactgaaaggtgcatgacatgttagccaagaaccggatttgaaatcaggcgaacctgtggtcaaatctgtacatcttaaattttgtgtttttt

SEQ ID NO: 129596 - DNA, 538 bp, Homo sapiens
tctcactctgttgcccagtttagagtgcagtggtacgatgttggcttgctgtaacctctgccttccagctcattcaatcctcccacctcagcctcccgagtagctgggattataggcgtgcatcaccacacccagctaatttttgatttttttgtagagatagggtttcgctatgttgcccaggctggtctggaactcctgggctcaagcaatcctcctgcctcgggcttccaaagtgctgggattacaggctggagccacagcacctggccaaaatactgtttcagtgtgattggaaaccagcaactcagtacatggccaaagctgataaaaatgaagaacttggatcctggaatattgactcagggtaactttattataacaaagctaagactcttgtatgtccttgctgtgtttaagaccctgtatgttgattcttgcttattaaattgaagaacgagtttagatttttagttggtgcctatgtgggaaacctcacaaacagcaagacaggaataaagtagacccagcccatttg

SEQ ID NO: 129597 - DNA, 626 bp, Homo sapiens
tctgagtttggagttaaagtcttaaagtttgaaaaagatcaagaaaattgatctgttagtatagttatattttccccatgattaggaatctcaagagacaaatgaacttcaggaaacagtgatgatggctaaataagttgcccaggattcatcataaagattcaaactgaaaagattgatagttaaataatctgctactttataataattcgacttcacattttataaccttttattgtgttaaaggatgagaccaccactgaataacataaacaaaaatcacaaagctgaatgtattgcttacttaagtaagtgagtgttcccggtccagtacattctcttctagctgatcatatgtagggtttttgagatggttggagctcaagggttggtggactttctgaggcaagtgagagtcgacatccactgtagatgtgtggttactaaggtgagactgttgctgactggttggcgtgtagaagggtgttcactggtgtgagtctttatcaggcagctttcagaggtgaagaactgtcactggttgactggcaggagttcattgtggcaaactttgttcatttttttttttactgaaatatttttcatttattcatttatgatgtggc

SEQ ID NO: 129598 - DNA, 387 bp, Homo sapiens
ttttttttaagtctatatcctttcttataatctctaaaactaactcactcttattttagaatagagttgttcttataaaaatgacgtgttattttttaaaattaagagagagagccgggtgtggtaccttacacctgtaatcccagctactctggaggctgaggtgggaggactgctggagaccaccaccaggagtctgagactagcctaggcaacatagtgagacccagtcttcaaaaaactgtttaaagaaatggttttggggtcgggcatggtggctgaagcctgtaatcccagcactttgggaggccaaggcaggtggatcacctgagggcctccaaaagtgctaggattacaggtgtgaaccaccaggcctgggggtaccga

SEQ ID NO: 129599 - DNA, 340 bp, Homo sapiens
gaagtgtagttttgggcggcaggaaaacaggtggatgtccatactgttactccctagacccagggcttataccacagggaaagggtccgcgtgccccagcaggacaattacgggcaccttccaggagaggcaagaaagctgtatgtttcatcacctgtaatttgtgcgataacatcaaggttgacatgttcttatgtgaaggacggtgaattaagtaggaatcgggggtgttcatgggactgggctaatcagaagtcagcatggcgcatttgcacctgagatgcagtcactttttttttaagatggagtttcgctcttgttgcccaggttggagagcaat

SEQ ID NO: 129600 - DNA, 684 bp, Homo sapiens
gcatggaaataagggattggggtgcaaagataagaggtcagggcatggaattaagggatcggggcacagagataagaggttggggcatggaaataagggatcagggggttcttgccccctagaaaagtggtacttgccactaagggtgaaaggtgctcagtaggggagcttttgagccaggatgagccaggagaaggaatttcacaagataatgtcatcagttaaggcaagaacaggccattttcatttcttttgtggtggaatgtcatcagttaaggcaggaaccagccatctggatgtgtacgtgcaggtcacaggagatatgatggcttagcttgggctcagaggcctgacactttgtgtctggctttttttcacttaggataatgtttttgaggttcatccaagctgtcacatgtatcagtacttcattcatttttatggttgaataatattttcttttataaaaccagtgacactatatttaattattaaattttttaaatgagtctagagtttaaaagacagtttgttaggtgaaattaagtgatttagaaaggaaagagaaaataacagaggtagtatattagaataagcttctagttgacaatatatagctaacatatggatgaataatattttctgttgtgtgtatataccgcaatttatttattccttcatcca

SEQ ID NO: 129601 - DNA, 729 bp, Homo sapiens
acagatacataaaaatgcatatattacaactaatgttcaagaaggaattgaataatttataacaaaagaaaaggtctagtatctgttataagcagaatatatttatcaaacaaaagagttttaccactcttcactgatttcataaatgtccccatacgtttggtattagctatcatttaataataataggtaccatttataaagtaactataatgtatcaggcttatactaattatttcacagctttatcctcatttacctccaatcctttacaaagtaggttatttgtaataacttagcccaagtcacacaactgataaatattaaagccagaatttgaaattagcttccaagcccttactcccctttgacctataaatttcacttacaggaatatattcaaatcattcatatgacatgcaaacctctggatgatctaatctcaaactattctagctgatttacagcattcttttcttctgtgactactccatccacactggccctctttgatttttggggatacaccaaactctttcccacctcagggtttttataatcgtgctgtcccctcccatcttcactctgttgagataacttcttactgtaagaactgcataagcagtgaattaaatatcacttcctcagagagagtggggaatggagacaagtattccacagaaagtagacagcgtatagcgtttttctaagccctagaggagagaaagt

SEQ ID NO: 129602 - DNA, 769 bp, Homo sapiens
ggttgattctgaaggtgaaattgtggcccagtggccacagtggtggtctgtgagtatctgtaacagtgacatttttattactttctggtaataaaaatgcccacatcattgtagtgttaggaataatagatgctaacaatataatgctgttgtgtttttcagttttttcccccaagtgtttattataggaatttcaaacatacagaaaaattgaaagaataatatgttttctaccctagattcaacaggtgttactattttaccatatttgcattatcaatctacctacctacctacagtgcacatacatgtactatttgaaattaaatggtagattttatgacactacttctaaatacttcagcatgcaagattgctgtttaaaaattttttttaatcagttattacttgtgttatcttgacaaatgcattttcacttaaatttataatctgtactaacaagtaggttatttggttctagtaatccctcccatgtaccaaaatcagtttgagggtcaccacttatactgtggtatatttcacgaagatttagaatagcaggttttttttcagagcctagcttctttggcaaaaacttaaagagacttcggagacacatttctaaacagcattgagcataattcttaaaacatttcaatgaggttagaaaaatcttttatctttttatatggcttataattgatgaaaagttagaaacctttctgtacataaagtaacaactatatcagtggtttacaatatgggataa

SEQ ID NO: 129603 - DNA, 740 bp, Homo sapiens
gtctttcctcagttgtgttttccccatgtgggtttgttttgggaaagcagtggaggggaattcctcttaggttgaaataacttttagagcgatggtgccacagtttacaaatatttttagaaaaatcctgtcagattcttgggaacttcagactaacttcacatctaaagttctcttttcttttcttttcttttttccttccttccttccttccttccttccttccttccttccttccttccttttttttggtttttgagacagagtcttgctctgtcacccaggctggagtgcagtggcacgatctcagctcactgcaacctctgcctcccaggttcaagtgattctcatgcttcagcctccctgagtagctgggactacaggtaccctccactacgcctggctaatttttgtatttttagtcgagatggggtttcgccacattggccaggctggtctcggactcttggcctcaagtgatccgcctgcttggcctcccaaagtgctgggactacaggcgtgacccaccacgcctggcctaaagttcttatttaaaaatttttcttctgatttgttagtttaagaaggtaggtttgaagcagtgaccaggaattttcgggaaatccattaaggaataaattattcagtaaaacagtctcaaagtgagggccagagtgcaggacagaggcagagagagatggtagcagtttataaagagaagatacttgattagagaaatc

SEQ ID NO: 129604 - DNA, 168 bp, Homo sapiens
ttacacctccctatttgggtcatgaaacataatatgtttcgaatgagaaacatactagaaacttgcatggcacacctggtcatggagtgttcaggaggtgttgtcctcatcccacacggagcaggtgcaccggctgctgctatacttctgctgtgacatccttcaggg

SEQ ID NO: 129605 - DNA, 371 bp, Homo sapiens
gcagactaaaacccaacaaatgggagagggatgaagggaggggaaagctaggagatggcttatggattgccccaatactattgatttattttgactgcctttgggttcttgtgagatggctttacactcttattttgtgatggaagatccttatatgatctcttaaccttttagctagagtccaacatagtttagttgggtttcatctgcatctatattgtatccaccatcttattaatatccaaactgtatctttgataccaaattgcagtattatttatatgatattcaaaaattaattggacttttctgtttagatgtgtttttgctaatagtttcatatgccatgtgcttatgtattatcggctttt

SEQ ID NO: 129606 - DNA, 794 bp, Homo sapiens
gtggtcacgtgttagagcagctgaggcaattcccaggaaaaaggcagccaggaggagtgaaggattcatgtttcaaaaatctaggaagggaaaagaaatgaggatctgattagaccgatcctaaaaagccattttactaccccctgagaaactagggccaccatggtagaataaaaatatttaaattattcttccaagcatttacctaaggactgtggaagaggccaaggatgtggctggagaaaaacagggcaagtggaggtattggagggacccaccaaaatgaaaagcagcctgtccagagctgtaggagttgaaacagttttctgggatgatgatgacaggctatgaaaaggacaggaaggtacctgatgggcgagaagcttaaggcaacaaccgggaaactaggaaaccgttggcccaggttttgtaccaattgtgctgaggtcatccaggcaaaacctcaagaatgaagacatctaatttcaagaagggacaaagggatccccaataattgggaagtcacatcacaccttgttcttggctaatacacaacagaaggtgaagtatgttttccaaatgccccttgtaatgaaacagttattgaatgtcttcccaggacaaactgggaaggagagcacccatctaccgccgttcccgcagtcctgcagtcctgcaggtgggccagtcctgccaacactccagctcccctcacagagcataaactgaatcaggtggccgaaccaccggaagccagagtccccagtgtccgcgcccacacaggggtgggtagg

SEQ ID NO: 129607 - DNA, 158 bp, Homo sapiens
gttacctactggttgcatttttggttttggttttgcatttttttcttcccacaaacactggctactctttgtcctaccccctccaccatgatgaaccatgtggaaactatttaaatcaattaatgtctttctcatttttcgaacatgtatgtgccacc

SEQ ID NO: 129608 - DNA, 324 bp, Homo sapiens
agtgacacgagagagagagagagagagatagcgagcgtgcatgccacatgcatgtcctctctcttgctctctctttttcttagctgggcctgatggtgtacacctgtagtcccagctatccaggaggctaaggtgggaggattgcttgaacccaggagttcgaggctgcagtgacctgattgtacgactgcactccagccctgtctctattaaaaaaaaacaagtccttctccaagctgatctgggcacttgatttctacccttgtggttctggcttagtaaaggtcttcagaaatgacacaatgttagtttcctgtggctgct

SEQ ID NO: 129609 - DNA, 651 bp, Homo sapiens
cagaagcctattctgcgtctattaagatgatcatgtgaattttatttttagttctgttcgtatgataaatcacatttataaatctgcatatgttgaagtaatcttacatcctagggataaaacttaatttatcatggtggattagctttttgttgtgcttcttaattcagtttgctaggattttgttgaggatttttgcattgaagttcatcaaggagattggcctgaagttttctttttttgttgtgtctgccagcttttggtatcaggataatgccggcttcatagagtgaattagggaagagtccctcctcccccaccttttttttttttttggagtaatttcagtagaaatggtaccagatcttctttatacacctggtagaattcagctgttaatccatctggtcctgggtttttttctggttggtagatttttattaatgattcaatttcagaactcattattggtctgttcagggattcagtttcttcctcattcaatgttaggaggttctttgtttcaagaaatttatcaatttcttctaggttttctagttatgtgcatagagatattcatagtagtatctgagagtttttgaatttctgtggagttggtggtaatgtcctctgtgtcatttctgattgtgt

SEQ ID NO: 129610 - DNA, 562 bp, Homo sapiens
gctgctgtaaccaaatatcacagactgggtggcttaaaaacagaaatttattttctcatggtttccgagattaaaagtctaagagtaagtgtcagcagatttggtttatcttggggcctctctctttggcttgcacatggtcatcttcacactgtgtcctccctctcatggcctcctgtgtataggtatccttggtgtttccttttgtattcagatttctttataagagcaccagttagattcagggccactccagaggccttattttaaattaatcgtcacatatttaaaggccctgcctccaagtacagtaatgttttaaggtattatcacatatataaaggccctgtctccaactgcagtcatattttatggtattgggagttaggggacacaattcagcccataagaagtaataatgggccaggcatggtggttcatgcctataatcccagcactttgggaggctgaggtgggaggatcacttgagcccaggagttcaaaactagcctgggcaacatggtaagacactttctaaaaaaaaaaaaaaaaagaaaaaaaa

SEQ ID NO: 129611 - DNA, 496 bp, Homo sapiens
cctccactattagggtaaaatctaccttggatagagaacctgtttgggaagaggaaggaaggaagcaagatgggtgggtgaccctgatcttctctgaggtatcagttgcatcatctcaggcctcctctgcctgatccttctgtcatctgctccattagctcctaggcttttgcaaaactggaaacccttcatctggagccctcaagagcagtactacttaatatgccaatcttcaatgagataagaagcatatgtaccagaatgtaagactgatctcttcatcaagaaaatcttgtatgaaaaaatgttagaactagacagtgtgtttactctgacataattgatttacattcaggcttcatataagttttctatatagtgaccagccagtaacacagtttgcaaattggcagctaatctgcagaccatacttggagtagcagtgctctagagctgcctttcattcagaagcagttgttgaggtcatggagttgtt

SEQ ID NO: 129612 - DNA, 802 bp, Homo sapiens
gtcatatgtgaagtaagggatgttgcctcatgctacaaaaggaatttattcaaaaaatgatgctgacgtttcaacacttgatgtattatgtcctaaattcatagttgtaattattacctaaattttgttataagatgaggtaaacttatttttataatttttccttttttaactttaatttttgaaagtaaatgcttaatcagatcttttaaggtgagaagtgtctaagtaacattgtaggaccaatgtatgggatgggagatattttgtggccatttttcaaaatatactctacctcaataagtatcctaaacacctattaaacttataaattattttcagtaaacttgcaaaaaaaaaaaaaaaaaaaaaaaaaaaaaggtgtgtggggccgcgcccttgggcccccggagaaagactttttgtgagacccatgcggtgtggggcggcgcggggcccccagagtgggttcagcgtgaacccggcggccccaaaaaagcgcggtccccccagaggaaagaatccccggggcaccagagagacacaaagcggcggcgtggggagctctcctccacgcgcaaaataaaaaaaaaagcgcgccccgggggggggcaacaaccacgagcgcgggcggcccctctgggaagccaaaaactccgccagaggatggggagagctctcacgagagggagggccaacactataggcgggggggactctcaatctaccaaccagcaggggaaggcggccacccagaggggaggaagcgctgcggagagaataactagaaagatataagccc

SEQ ID NO: 129613 - DNA, 518 bp, Homo sapiens
agaatctgaacccttccttgctcagtaatataaagcattaaaagttgtagaaacttccttggtaattttatatggtgctgtatcccagactttatgcaactcaaatccttagtgtactgaatcagatcaatttgatgtagcattccagaacagtgtttgcatgcaggaaagcgtgagatccttgggacaagtgctattttaaactctcttatgagactgaggattccttttccattgcattgtttgcatttgttatttctctggttcttagcacctgcaccagagtaaacaaaagaaagggggaggagtgcatcaaattagtgccgctgttgcatataagcttttggaagacttaatcttagatgaagttaaatttttaaatttcttcagtctatggagttaattaatgttttcacttctggtagcataatgaattaagaattgtatatacttatggccgggtgtggtggttcatggcctgtaatcccagcactttgggaggccaaggcgggcagacc

SEQ ID NO: 129614 - DNA, 424 bp, Homo sapiens
agtggtgggaatacagacatgcgtcaccacacccagcctaaaatttcttaattacatataatttccagcacaataataagtaccaaacacatgacagacaagacaatatgaatgagaataaggagaaacacaaaaatcaaaacagatcagtattttggaattatcagataaagattttaaaataagtatgcttactatgatcaagtacacacaagacaaaattctaaattgatgcaaagaaccaaaaactataataataaattaaaattccagaagtaaagcggaaatttagaaatcagtcaggcacagtggctcatgcctgtaagcccagtactttggaaggctgaggcagatcgcttgagaccaggagttcaagaccaccctaggtaacaaagtgagaccccatctctacaaaaaaaaataa

SEQ ID NO: 129615 - DNA, 218 bp, Homo sapiens
aatgggagatagagtttctgtttgaggataggacaaaaggtttgtgaagagttatagagtcaaggacagaagccaaagagagcatttgctgtgtaacatgtttgcttgttaaccagatcagcaaagcattttaactaatggaccattatttatgatctagaaacaattttgtgaaagcgatttcttagtgatgctgtttactgtgatcacatttgccc

SEQ ID NO: 129616 - DNA, 356 bp, Homo sapiens
ccccaagtgatccacccacctcagcctcccaaagtgctggattacaggcatgagccaccgtacctggctggctttgggttcttgaagggaaaagaaaaagccccatggcagaccggacctgactgacgggcaggaaatcttaattccagacctgctttcacctcctcactgccggacctggagccagggctggctgtctcagggcctctgcctaccattgccaggaactctctgttgccagtctgtatttggagaggctgaagggatgaaggtcctacctcactctggagccctccccacagggccccagcttgcacctcgtgcaccagctccttagggggcagtgtgcacccctg

SEQ ID NO: 129617 - DNA, 772 bp, Homo sapiens
tcatttgtctcttgatcttgcctttggtggttgcatccttagctggaccccatgagacacttaccttgctttcacagaaatcactcactctgtgaaagaaatgagagtaaaggaagggaaagaaaattaaggaaggcagaagtgaacatggaagagaaaaacaataagaaagaggaaatagaagggccatggttttgaaatacaacgcctggaaaacagaaaatgaaaacagaataaaggaatgaaattgtaaaagctatgaaacaaagtaatgagagaaataaaatcttaactctgaaaaaaatagatgtgatttatgacaaatatcaggaaagtgactcaagagcatcctgaaatctccttgatagtaccgaagggagacctgggcttcttatgatcactgacatctgtaaaataagaatggtagctgtaaattttgaaacgatgaaaaataaccttgtagcaggaatcaaagggagagtttgatctaatgttggccagaatgagtcaaatacattcacttcgctaaagtgctctgcgttggtcagccgatttttctttttttttttttttaaagtaaaatctttttttattattattatactttaagttttagggtacatgtgcacaatgtgcaggtgagttacatatgtatacatgtgccatgctggtgtgctgcacccattaactcgtcatttagcatttttcagattctacgagaccattcaaattccagctctgcttgatattctctctctttgtagtgttgaga

SEQ ID NO: 129618 - DNA, 216 bp, Homo sapiens
atttgtaacattcttttcagaagttactccaattataaaattaccagacaattcaagaacactaaattttgcattttgtgttgagatgggttttgaactgatagagctgagcaggaaaagtgctgcagctgagcagagaggtcagccacgtgctttggaaggaaaggaaacagtggcataaatgaatgggctctgcgatgacaagtctgttaagca

SEQ ID NO: 129619 - DNA, 126 bp, Homo sapiens
tgctgggattacaggcgtgagccaccacacccagccggagagggacttcttgagggctgctcttgtgacctccataatgcagagaatgatcagttcacaccaaacttcctgggccaggctagaggc

SEQ ID NO: 129620 - DNA, 149 bp, Homo sapiens
agaactgccttattctcaaggccaacgcttcatccttcagggtcaccaaccctaaaaggcatggatttgaagttcattgaatggttgccaatggactttgactttaccaagactttagtcatttccccttgcatttcaattaaagtcca

SEQ ID NO: 129621 - DNA, 331 bp, Homo sapiens
catgtgtcctgtcctgcttcactcttgtggtgagcctgcaaaataggctcatttcacggttggagaaacaggcacaaaaaagggccaaggtcagacagccaggacagagtgcagctggactttcctcttgaatctgtctgactccaaagcccatatcttccccatccaccatgctgttgtagtttgtgatgatgatggatgacaaaattacttgaaatttcctcctggtacattctgaatcttacacagtactgtgtagaccctgaagaccagcactcaccatctattacgagctctgatattccagtgttcctcttaaattctttattcc

SEQ ID NO: 129622 - DNA, 116 bp, Homo sapiens
tgtagatgccaaagaggtactgaatttcttagaacccaagtgcacacaagtgaacttcaggaagttttgcaactttttttccagaaagtggtgggcagccacaggaccgaaggaaa

SEQ ID NO: 129623 - DNA, 345 bp, Homo sapiens
gaggtagatcttattaaaatactgctggcttcacattgcatctctgctcaagagcctgcaatggtttcttattgttcttaagaactaagatttagtcagtgctgagtaagtgccaggcagtatgctaaatacatctcagtacttcatcagttcaaagaaacagatgctatcatcactcccattttacagatgagaaaatgggagctcataaaaattaagtagtttggaccaaattcacagtgctacataggcggtgaaattgaggtatgaaatcaggccaacattaattctttctcttaaagtagaagttttcaatccttttgtgtttgttttaaacattagcag

SEQ ID NO: 129624 - DNA, 473 bp, Homo sapiens
gggccgctgggcttacctggatccctagtgcgtgtgaaggtgtaacacgcctgatataaacagaagagacatttagccacaggttttcagaagggcacgctgctccaggggacatgaagcagcatgctagaaccagccaagaataaaggtgtcctccgcgtccctatcgccccttcgtgctcgttagaaagagcaaaaaggcgaggccaaaactgaggccaagccttctatctggtaacccaaaaactagaaaggcagaaaagcaaccagaggcgggaaaagcccaaccaggccagaggaaatacagccgctgccgagagccgagaagttcagaagctccgcttgttacctaaaaccagatggggacagagacgccacacctgggcccaggcgtgtctcgccctcggtccctgcagaactgaggccaggaatgacaggaattctcccttgcagctcccagcttaggacagtca

SEQ ID NO: 129625 - DNA, 689 bp, Homo sapiens
taccagcatctcttatttttttactttttaatataggaaggcttaactcttaatatctaaacaccgtacttacaaaacaaattaggattaaaataactacatcaaaattattactaaatctcagatctcagcctaaatgtcacctgcgccttctcagagaggtgattactcctgattactcttctttataaaattagcactttccctcttcccaacctctagaaccttctatcaaatcacctgcttatcttctgtgcagcccactatgttttcttgtttataattcctctccctcctttagaatggcattctttgaattagaggatctctgtgcctattttattagaatatctgcaatattttttatagatcatcagaaatttaacagagtggaaaactgaaaggtgaagtgttccaagtcattaaagattaaaaagtaaccagaattcacgagaaagcaaagttaagttataatgattttttaaatggacataaggatcaatgggaaatcaagataaagcaaagctgaaattatggtattttgatggacttagtgtctagttttaaatgttttgttttgactgacagaactgaaatgctagactgtctgtttctatataggatacctggcaactgaagtaagacatatgatattaaaatatagccttttaccctgaaggatataacag

SEQ ID NO: 129626 - DNA, 346 bp, Homo sapiens
accaaggtagcccgtcaggttcaagaatgctggcagaatacaggagagtcctgggtcagagacaaaggacttgatcgctgtgcagcaaacagcatgagcaccagcatatttccgttagttccttttgaccctaagtcccatgggggtgatgctgatgggctcaggcaagtgtgggcacacagagcgaattacattgtgggagaggaccctaagcttaggaaactcaaagccagtaagcatggctgtcctttgctctggagggagacactatctccatcttccatagctgttccctagataaacatctttgaagctggcgcggtggctcaggcctgtaatcctacca

SEQ ID NO: 129627 - DNA, 327 bp, Homo sapiens
tgttttaagatttgaggctagggaagaattgatacagaaagtaaatccattggaagtgttaatttggctacattaatataaagaaaattctgtatgacaaattacactgaatacaaatgtctcaaactgggagaagatatttgcagtgtatataatctacaaagaattggcatcctctataataaattctctataaaaagtcttgtataataagaaaaatataaataccacaatttaaaaaaactgtcgaaggatttaacacgtagttctcagagaaagaacacaattgaagaaaagcaaatgaaaagatattcaggaaaatgtata

SEQ ID NO: 129628 - DNA, 390 bp, Homo sapiens
tatcaattggtgaacaggtaacaaatgtggtacaaccatagcctaaaattcagcaataaaaaggaacaaagaaccacactgctacatggtcgaacctcaaaaacattaaacacaggcgaccatacattgtaggattccatttaaatgaaatgttcaaaaaaggcaaattaatactggcagattattggttgcctggggctctgggttggaacagggattaactgtaaatcactacgaggaatctaactggcatgatcaaagtgttccaatattgatttgtggtgatggttgtgccactcagtaaatttactaaatatcactgaaatgtaagcttgaattgggttaatttcataatacagaaaacatacttcaataaagctgctttaaaaa

SEQ ID NO: 129629 - DNA, 391 bp, Homo sapiens
gcactttcccctccccgggcgcccaaggtctcctctgtgtccccagcctggcgcaccctcctcaaacacaatgagtgcattgtccacgggcagctcaaggtcaagttctcctggcgggcaccacccttcccacctgccgagtccacttaagcttgggtccctcccagactctgctctttgttccctgtgggcccaggctgtacttacagggcaggtgggccagccccacccaaagcgtttccccagctgccaagagtagcatgggtctagcattgttatatggccccgggctggaaatcccaggtgggggtaggaggagtgagaggggggtgttctcctgggtcttaagagattcccttctgcggggaaagatggagtccctgctagttta

SEQ ID NO: 129630 - DNA, 520 bp, Homo sapiens
agctctagaggacccctccataatgtgtgcccaggaaataaatgtttcagggcatggaaatctgagtacgtctagggacatgaggaatgaggagtacagaggggccatttccttttgaggacagtaagggaaacaggtagggcctggcacctgtgcacaaagctgaacagagcaggcctttaacacctcacagttcttcccgtgcaagggatggattttattttcataagggagacgctgacctctgggctgggcttgaagcaagaatgaagggtggagagagagcaggagagagggagaaggagacagagagagagagagagagagaggagaggagagagagagagagagaatgggagaaatgtacccagtctttactccctggagagagagagagagagagagagagaatgggagaaatgtacctagtctttactccctgcagagagagagagagagagagagagagagagagagagaatgggagaaatgtacccagtctttactccctgggtctggt

SEQ ID NO: 129631 - DNA, 257 bp, Homo sapiens
aaaatgctgggattgattataggagtgagctaccgtgccggcctaccttgcatttttattttacggagataatttctttccttaaacctgatgaagcaacctctactagcttccaacttttcttcttcagctttctcacctctctcagcctttgtagagttaaagagagttagggccatcctctagattagactttgttttacgggaatgttgtcgctgatttgattttctatccagaccattaaagctttcttcac

SEQ ID NO: 129632 - DNA, 334 bp, Homo sapiens
acaaagaggaatttcacacagggtcatagaaaagttggtttgagttttcctaccatttatcttacccattctgctcagtgagtcagacttacataatacatttctttctctgattttcttcagaaatccagaggcagcactttctcccacggaagtgcatggctgctgtgtaacaaccaagcactattccgcctctgtttccccttctccagcctgaacttagactgggcaagtaaaaaaagagtcacgagtattctaatgtgataccgaaatacagatgatgagattctctcttaaaaggaagaaaggatgcaaaggacaagatccatactaa

SEQ ID NO: 129633 - DNA, 380 bp, Homo sapiens
tgaaaagaacaccctattcaaaaaatagtgctgagaaaactcgctactcacatgcagaagaatgaaactggacatctgtcccactctatatataaatattaactcaagatagattaaagacttaattgtaagacctgaaattataaaaatcctaaaagaagacctaggaaaaactcttctgaacagtggcctagggtaataatttattaccaagacctcataagcaaatgcaacaaaaacaaaagtagacaaaatggacttaagaaaacaaaatcaacattctacacagacaacttacagaatgagaaaaaaatttttgcacactatgcatctgagaaaggactgatatccaaaatctccaaggaactcaacaaaccaac

SEQ ID NO: 129634 - DNA, 385 bp, Homo sapiens
aacattgtttccaggaccttgaggtgggaaccctgctgaagtaaatgagagccactgtagctggggtctagggaacagggggcacatggagtaagctgatgatggggcagatgatagaaggcctggaaagacttcatcaagattttaaaaacccaagtgcagtgaggagcctttgatgtgttttcaacacgttatcatcagggtctaaattacgtttctaaactgctactgtgactaatatttggaacacatgttatagagaagcaagagtgcaaacagggagaaggaagtactcagcaagagatggctatggcttggtccaggttcatggcagaagagatgatggaggtgaactgctttgagttatatgttggagttccatgtt

SEQ ID NO: 129635 - DNA, 371 bp, Homo sapiens
tgcgggttctcggaccaatatggagaaaccctatctccactaaaaatacaaaagactagcagtgcatggtggctcatgcctgtaatcccagcactttgggaggcagaggcgggcggatcacctgagatcaggagttggagaccagcctgaccaacgtggagaaacctcatctctactaaaaacacaaaattgccgggtgtgatgacgcatgcctgtaatcccagctacacagctaaggcaggagaatcgcttgaacccagaggcagaggttgtggtgagctgagatcacgccattgcactcaagcctgggcaatgagcaaaaagagcaaaactccatctcaaaagaaaggaaagcaaacaaaacctcacag

SEQ ID NO: 129636 - DNA, 139 bp, Homo sapiens
gaggtgaagagtgacctgctcagaaacccactgtgaaaaagcatcagtggcaatccatcaagtttaatctttcaactttttttaagatgaaaataaagataaatagcagttctggtttaaagcccctttatttctgcct

SEQ ID NO: 129637 - DNA, 102 bp, Homo sapiens
cagtgtgcagtggggtgattttagggatgatgacaccaagcactgtttcactgattccctgcagcactgtgaagcagctcctgctaatgtctgcactttaga

SEQ ID NO: 129638 - DNA, 276 bp, Homo sapiens
tgtgtcttacacaaagtttatctctcaacaaataaagcaatgtggtgttgtttagaaagttcacaaggatattaaaagaacgtttgttctacatctccaggaaatcacgtatttagcatttattgtcacaatactgaccctatcaaaaatgtaatgcattatttggctttgcttctttttagagagctcatgacaactcccagagatcttctatcaaagctcaccatctgtttaataatgtaccccccctttttttttttggagacaaagtctcac

SEQ ID NO: 129639 - DNA, 409 bp, Homo sapiens
ggaggaggatctaggagaaatctctgtaccttcccctcagataacgctgtgaatcagaaatgcactagaaaactaaaatctttaaaaggaaaatctcttcattcaaaatattcaaatcctctgtggaaacaaggactgataaagtgcgcagcctctccttccacaaacttctgaatacagaggttgaggcactctctggctggttccctcaggaccttgaggacgtcctcaagacctgcatcagactgcctttgtcatttccctgttcattaagatttccattaggagctgggcttctcaataaaacacaaatgtaagcctgaccctgtgctatctcttagcagcgctaataaaaggattagtgcaacaattttttttttttttttttttttttggaaagggaattcga

SEQ ID NO: 129640 - DNA, 459 bp, Homo sapiens
cctccacctcccaggttcaagcagttctcctgcctaagcttcccaagtagctgggattacaggtgcccgccaccaccggccggctaattttttgcatttttagtagaaatggagtttcgccttgttgggcaggctggtcttgaactcctgaggtgatccgcctgcctcggcctcccgaagtttatctttgtctcactgggttatttccagagacctgacttcacattctgaaattctttcatcagctgtttttagtcctttgttgatgcttttgaatgtgttttgtattccatttaatgaattcttcagttccagaatttctgtttggttctttcttataattatgtttctttggtaaatttcttatattccaaattgtttttctaaattatttgtattgcttttctgttttttcttatatttgagctgagcatctttaatatcactatttcaaattta

SEQ ID NO: 129641 - DNA, 737 bp, Homo sapiens
atatttaacattttcagtagagacagttctcattatgttgtccaggctggtctcaaaccaggcatgagccactgtgcccagctgagatttatactttaaatttacacattccactatagagaaatacaccaacaccatagagagcttggggaaaataaataaaaatagaagaaagaggacaaaatcgcaccactgcactccagcctgggcgacagagcgagactctgtctcaaaaaaaccaacaaaaaaaagaaattctaacagaaaaatattaaagttctccatcatagaatctttggattccaaagtcctggcccctcagcaatttgaaatagcacagcctagcatttctgcaatcacaacatattggaaacttgaaataactgaggcgggagaatggcttgaacctgggggatggacgggtgcagtgagctgagatcacaccactgcactgcactccagcctgggtgacagagcgaagactccatcccaaaaaaaaaagcgaagaaaacaacaaaccaaacaaacattgttggggccggcttggccttggaagaagttttcatacaacattcgctgtggcgcccgggccccagtaggttaggtgacgttggccatgcgtggtcccaaggaaactctgccccatgatagtggtgggttcccaccaataaaaaacgcgcggggacacgggggttctgaccaaatccagtgtgtcggagcatctgcccatcaccggc

SEQ ID NO: 129642 - DNA, 787 bp, Homo sapiens
cggtaattcatacagggccttaaagtcccatattagaaaataccaaatcagtagttaattcgaggattttgaaacatggatcagtgttttccagttttggggtattgtgacactcctagtagtgctaatggtgcatacattttaaagtaaacattgtttgctttgattcccttcccttaaaattatttaaatagattaagtcagggccaagaacctggatgaattaatgatttattgaatgagcattttttcatttagtcaacatgtattgagtcccagctaggtgtgtatgtttttttaagtcaaaggcaataccagcttcgtggccagatgtcttcacaagcactgaagccagtatccagaaatgagctcattattttgctccagcccctaaatttcatctcctatgttccctgtctctgcatgacataccatccacagggatagccaagacagaaacctgggtgtaagggcacaagttttattaaattaatactattaacaatagcagctgatgtttattggacatctacaacactgcagatgctttacatgcacttaatttaattctaagaaccacaaaaggaaggtcctattataatccatatttagtctcagtactgtgcactgaatctataaaagattctaaaagagctcagtctcaaaggaaataaacatgaaaacaagtaattgcagcacattatgatgtcttagcaggatactatagtagtgcccaagaggaaagcctgacttcctgctggggaaagaagcccttcagaggtaaatg

SEQ ID NO: 129643 - DNA, 386 bp, Homo sapiens
cattctgtattagtcctccttgatggggggacacatgccagccaggttacctgattcatctagttgtgattttattgacagtcatttctaccttgttggtatccgcagaggttgtcttgaagggggctgatgccttctttcactagctttatgtggctggcagttctgtcctgccactcttttcctcatcatctcagcctccctgcccatggcactcaagagtccaccttggcagaacctgcaactcttcagcgcctccctaatgaactccttgcaagggccccttggttaagttacagtagagaagtggttgcttaagcaagtagtttccggtaaaggcataaagatagcccataattgggtgataaaatacctggattgcatct

SEQ ID NO: 129644 - DNA, 164 bp, Homo sapiens
cctgtgatttgacccaagtgacaatttattgaaccaccagttttctcatcttaacatgaggtcaacaatgccaacaagatacagaattaaagcatggatatagagtaccagcacagaccttagcacgtagtagtctggttccttcctttctctcctgtgggaaa

SEQ ID NO: 129645 - DNA, 124 bp, Homo sapiens
agccaagagaaatctagaaagatgagcaggtaggaaaaagtatagatgatcttataataagagactctttggaagtgctaccaactgggatgtatccaggtatatgcacagagaagcgacgtgt

SEQ ID NO: 129646 - DNA, 312 bp, Homo sapiens
tttaactccttcttagactgtgagtgactgcaaaacagaaatcatggctttttcaccttcaatcacacaacatagtgatttagggtcagaaagacttgtgtccagattctaactctgatttactttctggtgaccttgagtaagtgacaacctctctgagcctctacttcctcatgatacatgggtgtgaaaattaagtgagatagtgcatgcaaagtgtttggaatccagccaggcacacagtatgagcccaatacatagaggttatattggtaatgccagaggacccccaggtatgattaacgctcagtc

SEQ ID NO: 129647 - DNA, 415 bp, Homo sapiens
cttgatatcttgatgattctgactttaggctcatgtttatactcctgagaagaggagaggagttaggaatgggggcttagtccttctatcttctcagaatttagaaattaacttaaaccatttctactagttgttcaaagtttttgtagcctctgcctgcaaaacaggttcttttttattttcatttctttcattatgatataaaataatacaggctgggtgcagtgactcatgcccataatcccaacacttcgggaggccggggcaggcgggtcacctgaggtcaggagttagagaccagcctggccaacatggcaaaaccctgtcgctactaagaatacaaaaattagttgggcctggtggcgagcacctgtaatcccaactacttgggagggtaaggcagggagaactgctt

SEQ ID NO: 129648 - DNA, 383 bp, Homo sapiens
tctgaccccatcccaccctttcatactcattttgtaccacgcctctcagatttatttccccaaaactttattggggcataagagacaaatagaaattatatgtatttaaggcatgcaatgtgatgttttgatatatgtatacattgtgaaatgattaccacaatcaagctaattaacatatccatcaccaaacatcatgtagttaccattatgtacattaagtctccagaacgtattcatcttataaccaacagtttgcaccctttgaccaacacatccccatttctccccctgcaacctacctttggtaattacccttctattctatttctatgagttcaactttcccttctattctatttctatgagttcaacttctaaag

SEQ ID NO: 129649 - DNA, 380 bp, Homo sapiens
ccagcactttgggaggccgaggtgggtggatcgcctgaggtcaggagtttgagagcaacctggccaacatagtgaaaccccgtctttaataaaaatacaaaaaattagctgggcatggtggcagagtcctgtaatcccagctacttgggaggctgaggcaggagagtcgcttgaacctgggaggcagaggttgcagtgaggcgagatcacaccattacactccagcctgggcaacaagagtgaaactctgcctcaaaaaaaaaaaaaaaaaaaaaagagagatggtatcaggtactgcaaattcttagagtagcttctgactttgctcagccttatttataagatttatctactgggaggctcattcaataggcacttga

SEQ ID NO: 129650 - DNA, 645 bp, Homo sapiens
ctttaccctgactcttgattttatgccttggtactttgagtagaatagggcaggtacagataatagtatgtcacagtggtctagaatctacacctttcctgcttgcagtatggtattagctagggtccattccatcacgaaagtggcagctcatcattttgggcagtcagaaaaataggcagttgttataatagctacattgttttttaaaaaacttatgcaagcaggtaagggttttttcacttttagaccagcatcttttctttaccgtagaatctaattattgtctctaatctaaaaggagatagaaaaatgtagtaacctaaaggaaacaaagaataagaaaaatatctactttttgtaagaatgggattttgcatataatttgatttactaggtgacctaagttaacagggaactgatttatatttttactggtattaatacattaaattcaggggtttctgtgttgttaaaggaattctgtgtcatttgaaacttctatgaatttagaaatgagaagacatcagtgatctaggtggctacttgtgatgattcctaattttgtaaggaaaataaaaaggagatggaaaaaggatttggaacaaccctgatgtgtttgttacaacatttcaaaatatgtct

SEQ ID NO: 129651 - DNA, 336 bp, Homo sapiens
tgaagctgtcagatggtaaacacctgaagtgtcatagtcgatggctgtccagtattctatcacatggatggactgttgttatatagtctattatattgcatttactggacatttaggttatttctgattttgggccaatctaagcactggtgagatgagtgtcttaatttgggtcactaatctttacacatttgccttagtgttgtcttaggataagtttttagaacaggactagctaacattttcaagcatttaccacgtgccactctgctaagggctttaagtatattatcagtcaggcatggtggctcacgcctgtaataccaacactttagg

SEQ ID NO: 129652 - DNA, 742 bp, Homo sapiens
caaaagggtaaacacatttgaaatattcaccaatactgaaaaccactaaccaaaatggttacactaattcacatcaacccttagatcatgggaaagggaccgctttcccatatctttgctatcactgaattttatcaattaaaaaaggtttttgaccccatgctaggtgaatgatactatctcctccacccatggtggagttcagtggcaccattatagctcactgcagactagatctccccagctcaggcgatcctctcacctcagcctcctgagtagctgggaccacaggcatgtgccaccatgcctgggtaatttttagaaattttgtagagatgaggtctcactatgtcatctaggctcaaactcctgggctcaagcaatcctcctgcctcagtctcccacagtgctgcaatcacaagtgtgaccactgtgcctggccactttttttttttttttataattgcaatgacatatcatttcatgttttgttggctattttttccttatgtcatgctatttgcaccttttgcccatttttctattggtgcattcaccatttcatatcaatttacacaatttcttcatgtaaactggcaatcagtcatgggcacaaacatttttcatactttgatttcttttgagtttgtttttgatacagaaattttcattgtaagagaggtacactagtcttttccctttgagacttctggattatttttcatgcttagaatcttcctgg

SEQ ID NO: 129653 - DNA, 276 bp, Homo sapiens
gacaattgttaacattttggcgtattttcctggtctgtatagatagggtgcatttttatacctttttgctcaccatttaaaaggaactcacagatgtcacgacatttcacccctaagtacttcagtatacatctcctaaaaataaggacattttccaatataagcacaataccccgatcacatctttaaaagttaacaataattctctaatgttatcaggcacccactttaaattcagatttcctccaaatgtctcttatcgctgttgaggggctc

SEQ ID NO: 129654 - DNA, 377 bp, Homo sapiens
ggtcattcatgctacagcaatacttgtctattaggtctgaggctagatgctttatacacaatatctcatttaattcttaatgaaataccctaagagggccaggcacagtggctcatgcctgtaatcccagcactttgggaggtggaggtgggcagatcacgaggtcaggaaatcaagaccatcctggctaacatggagaaaccccgtgtctactaaaaatacaaaaaattagccgggcgtggtggtgggcacctgtagtcccagctactagggaggctgaggcaggagaatggcttgaacctgggaggcagagcttgcagcgagccgagattgcactaccacactccacccttggcaacagagcgagactctgtctc

SEQ ID NO: 129655 - DNA, 667 bp, Homo sapiens
gggaggcgcccctcaacatgcgggcgcccttcagggattgccgctggggcttctgtgctccttactgaaaatgttaccctccattcacactaaagagttcttttttctggcccagcatagtagctcacacctataatcccagcactttgggaggccgaggcaggcagatctcttgaggtcaggtgtttgagactagcctggccaacatggtgaaaccctgtcgctactaaaaatacaaaaattagctggatgtggtggcgcacacctgcagtcccagctactcgggaagctgagatggaaaaattgcttgaacccaggaggtggagattgtagtgagctgagattgcaccactgcactccaacctgggcgacagagggagacttcatttcaaaaaaaaaaaaaaaaaaaaaaaaaaaaattgggggggcgccgggcccttgaaaaactttccaaagacccattccgggtggggcgcggcggagccccagagaggtaagggagcacaggggccaacaggcgggtacccacagaggaaaactccgtggcgacctagaacaaaatgggtcgtgggatcttcctccccccaaatacaacaccggccggcgggggaacacggacgtgttcggtaacaaactccaaaggggagctcgtgaagcaccacacagg

SEQ ID NO: 129656 - DNA, 415 bp, Homo sapiens
gcgcagcgcaggcaacggaacctgtgatctcctccaagccttttccatagagggggaaacggaggcacaggcagtcacacacttgtcccaggtcatacagccagcatgtagcaaggatttgaacccaggcctggctgagctcagaagaagctgagcaggaccggctgcaaaagccctccactcaaccaggtctgaacccatcggggccctgaagggggcatggctggatgccgtctgaggcagttcaggcctcttgtccatccttcctgggccagggacctggacgaccttgaaagtggctctgattggctactgatgacatcatcggagatgagggccaaaatgactgggcctcactcaattggtcttggtgcccacagctgggtctgtcggcatccccctgtgtgtctatgca

SEQ ID NO: 129657 - DNA, 333 bp, Homo sapiens
tgggctggggaggcatccttgctttcctggtgcctcctcaaagtgctgacacttgggggacgggaaggggtagaagtagggctgctcctttgggagctggagggaatagacctggagacagagttgaggcagtcgggctgtccaggttctaagcatcacagcttctgcactgggctctgaggagattctcagccagaggatcccagcctcctcctccctcttccccagcccaggaagagggctggctgacccctatatgtatatatagcacatagtaaaggaaaataggaacacagtaatataatttggatccttgtcccctctaaacctcag

SEQ ID NO: 129658 - DNA, 403 bp, Homo sapiens
ttgatgtcatcaatcatcatcttatgacagcctcttggtcctctaagtttcttgtaccagcacctgtgccaatgaagtagtggttttcactgtggtgggtattaatagtacagtatccagtctttgcttctcttactttcatttaacttgctcaaggcaaactaaaacctttcagcacctgcagctttcacgtcaatgccatttctgttttctttgagtcagtggcattcatgtatctcaaatatttttctccagggtctatgaaccaggagatgttgctttctgttttctgttacaatttgaggtctgtgctgaactccctgtttaaagcctgaggaacaagaagaatgctggttaaaaatccaggaaagtggtgataatgtagggagatctgtgatggtta

SEQ ID NO: 129659 - DNA, 519 bp, Homo sapiens
gcgcgcgcgcgcgcacacacacacacacacacacacacacacacacacacacacggcagaggaggcatcaaagagaggtggcagcatctgcaaggcatcactctggctttaggtagagatcagttgtcaaggagcaagatcagattccaggagaccagtggagttgttttagtgtcactttgtgaagaactgacagtggccaggaccaagggtgcacagtggggatggtgagaagaaatggaaaatctgggagctttctggagggcggagtcagctccactccataatggattggatccacagggaggggcatcaaggatgatatgaatcttgtaggtatggactagctactttctctcaggccacactgccatggggtgagaagtagattgaggtgtggacttggagacaaaaggagtagggaatgggtaaaagaagtctgaccagctggacgtggtggctcacgcctgtaatcccaacactttgggatgcagaagcgggcagatcacctgaggtcag

SEQ ID NO: 129660 - DNA, 385 bp, Homo sapiens
aacagatcacttgaggtcaggagttcaagatgagcctggccaacatggggaaaccccgcttctaccaaaaatacaaaaattagccaggcatggtggtgtgcctgtaatctcagctacttggaggctgaggtgggagaatcacttgaacttgggaggcagaggttgcagtgagccaagattgcgccattgcactccagcctgggtgacagagcgagacgctgtctcaaaaaaaaaaaaaaaaaaaactataaaacactgatgagaaaaattaaatagcacttaaatgaagctagagaaataccgtgttcatgaattggaagttgcaatattgttaagatgttaactttcctcaattttatccttaaattcaataaaatcccaatca

SEQ ID NO: 129661 - DNA, 342 bp, Homo sapiens
tggggtctcacagccaggaagcgggagagcggggattagatcccacattatcaggctccgaaatttagatgaattactctccatgcaggagtcaaaaaatatttgtttaaaattaatgtttatgaaatttgttccttggaaattacatttaggaagtttcagatttcattatccactcagagaagagagacattggaaaaatgccagaggccaggcatggtggctaaggcctgtaatcccaacactttggaaggctgaggtgggaggactgcttgagcccaggagttcgagaccagcctgggaaacatagcaacactccttctctactaaaaatacaaaaaa

SEQ ID NO: 129662 - DNA, 112 bp, Homo sapiens
cttatagaacataacctcaaatgaagatctgagccctacggcaattcagacacagaacctcaaatgaagatctgagccctacggcaattcagacacagaacgagattttaca

SEQ ID NO: 129663 - DNA, 1066 bp, Homo sapiens
aaaaatgctttatggcccagtgcagtggctcacacctataatcctagcactttgggaggctaaggcaggaggttcgcttgaggccaagagttcaaaacaagcctgggcaacactgcaagaccccaactctacaaaaaacgaaaaattagccgggagcggtgatgtgtgcctgtagtcccagctactcaggagactgaggtggaagaatcacttgagcccgggaggttgaggctgcagtgagctgtgtttataccactgcactccagcctgctgggtaacagagcaagactccatctcaaaaagaaaagaaaaaatgctttgctacataatgaggccaggcaaaaaaaaaaagtcctgtggaaatcatatagacaaacatttgcaaagctgctactgccattgtaccagtgttaaaatgtgttctaccttgcatcttttactgatttttatgacagattttatattgtaaccatttgagaactctgtaagtgctatggcttccttaaactacgatttatcatatgctcccagtgtttactttgagactgaatggcaaccagagaatgtaaacaaccaaggtgcatctggttatgttttaaaataaagattagcaacaagtcgatcgtagagaggagcccaggtgggaacccttcttaccaattaggcacatttgggcaacaggacacaggactggatccagtgatgaggcaggcctaaggggaaagtttcaggtggtcaccctaagaagccaatccagatctcgccactttttacaaagcgcgtctgtggacaccactgtggggcacttggcgtccatcacgaggaaggagaccccccaatagggccccaaaaggggggaaaaaacgggggagcacaccacggggagaggaccacacatactttaataaccagcggggcgagaacaaacaggcgcgggcggggccaacaccccaagcacaccaggaatgagcgagcggcacatttgtcaatagtacaccgccagcgaggacctcctacaaaaaaggagcgaggtcacgctggaggagcaacgagggcacaaacaact

SEQ ID NO: 129664 - DNA, 490 bp, Homo sapiens
tagccgggagcggtgatgtgtgcctgtagtcccagctactcaggagactgaggtggaagaatcacttgagcccgggaggttgaggctgcagtgagctgtgtttataccactgcactccagcctgctgggtaacagagcaagactccatctcaaaaagaaaagaaaaaatgctttgctacataatgaggccaggcaaaaaaaaaaagtcctgtggaaatcatatagacaaacatttgcaaagctgctactgccattgtaccagtgttaaaatgtgttctaccttgcatcttttactgatttttatgacagattttatattgtaaccatttgagaactctgtaagtgctatggcttccttaaactacgatttatcatatgctcccagtgtttactttgagactgaatggcaaccagagaatgtaaacaaccaaggtgcatctggttatgttttaaaataaagattaataaaagttttggtttttctctttct

SEQ ID NO: 129665 - DNA, 550 bp, Homo sapiens
tacatagcagctctccttggcagaaagtcagtttcatccctgggtgcagcaggagcagagctaacctgagaaatccaatattacacggaggaaagcccacaccacgagaggcagcggtgtgtatctggttttaataagatgcctgcttctaagaacctcaacttccaaaggcaagacatttgctacctgcaagatgtgagctataattcgaaaatctcctaattatggtcagtgtctgcttttgtagcacaggtgtttccagagcgtgggcatctagtcctcatggcaatcctgaagaggaagatagggatgtttcccagagggaaactcaggtgcagagaggtaggaaactgcccacacaggcatctttgattgagctatctatcatcctactcactttcccctcagtccacaaaaagtgggaggcagcttaccgaaatcccttgaattctaaaaaataaatgaacccttgaggcagctgatatgaggggaatgggcaggtgaatggtacagaaatatcagagggagatgagcaggaggcccccagagg

SEQ ID NO: 129666 - DNA, 918 bp, Homo sapiens
gaatagtcaagagtgtaagttccagtttttctgcctgctggctgtgtgaccttgagcatgccatttaggctcatttttcttatctgtaaaatgtgaaaaggatggtgttcagaaagttgtgttagcattgtaaaacttccctttgtttagagggacacctgtggtagagtagtcaagagtgtaagttccagcttttctgcctgctggctgtgtgaccttcagcatgccatttagggtcatttttctcatctgtaaaatgtgaaataacatcaagtacctcacaggattattgtgaggatcaattgagataatgtgttaacggttacttggacatggctgggcgcagtggctcacgcctgtaatcccagcactttgggaggctgaggcgggcggctcatgacatcaggagatcgagaccatcctggctaacaaggtgaaaccctgtctctactaaaaaaaatacaaaaaattagccaggcttagtggcgggtgcctgtagtcccagctactcaggaggctgaggcaggagaatggtgtgaacccgggaggcggagcttgcagtgagctgagatcgcaccactgcactccagcctgtgtgacagagcgagactccgtctcaaaaagaaaaaaaaatattaaaaaaaaagtacttggacattacaaagtactatacaatcaggtggttttaacgagttctaattttgagaaggagtcaatagtagttctctaatatggatcttcgctcggttgttgggtacataggcgcgtgcctggggttaaatgttgccccgcctcatgaggtgagggagttgtctgggccgggttttgggttttgcccacgttgggtcgggagacaaaaggtgtggggcgagcacatggagggttgtggaacgtgtctaaatgtggtcgtgtgtgtct

SEQ ID NO: 129667 - DNA, 295 bp, Homo sapiens
tgggtctggttacccatacgtttactttacaggagaaggcaggtacatgccatctcctcgacacccctgaattcagccatcatggaccacgtagagccagccttctggtctggtcctctctcagacatctgctaccagtgctgctcccaccgtcaccagtcgtgaccataggaatgtgcagtgggagtagggtcaagtggctgaaggacccccgcagaccggaggatgctgctgagggcacatgatactcaatccaaactcacaaaatgacgcctatttctcctgcccacgttgc

SEQ ID NO: 129668 - DNA, 603 bp, Homo sapiens
ttttctctccattactcacaggctgaggcaaagacttaacttttcctgaatacaaagtaaggtatttagaattatcatagacgtatattcagtgtgaaatgcatttgaaacactgccaccacctgcaaatatgtgccatccttcagttcctcccctgacgctgttcaaggcatctgggatatatcaatgagcaacaacaaagagctctgatctcacagcggtggaaagaggtagtgatggggagacagataataaacataaacaccagcgaatattatatttatgtcacaaggagatgaatgctatgaggaaaagtcccacctcctaaaaaaaagccaaaaaaaaaaaaaaaaacaaaaacacacttgggtggggcggggccctgggccctgcggaaaaaaggcacttcctgaagcaaccattccggtggggcgcgggcgggcgccccagggagagggtagcggtgaccagggcgccaaacagcgggctgcccaacgggaagaactccggggccagagaactttagggcgtgggctttctttgcaccaatttaaaaaaacgccggggggggcaacccggagcggctttgtgaaaaaccctgag

SEQ ID NO: 129669 - DNA, 188 bp, Homo sapiens
gatctgtggtgaaacagtttcatcccgaaaccactcccccactgcctcccccactgccccgcccatggaaaaattgtctttcacaaaaccggttcctttttggtgccaaaaaggttagggaccgccacattaaacaacaactcctcactcctctctcctcctagcccttggcaaccaccattttactt

SEQ ID NO: 129670 - DNA, 573 bp, Homo sapiens
ctgatggaagaaagtgacagagatcagtggtaataatgccatgttaatttactagccatattgatcaagattttgattatggaaaacagaatctacttgctggtagtaataggtttcttacaggatcttgtgtagtttatagaatatctggaagaggcaagcaaaccaagctttccttagccaggagaaacaaacacagtggaagagtgttccagagaaaacaactatgtcccctagtcaggtgcttggtgcccatgaaactagggactagatactagaacattccatcatcgaagaaataaatgcctccaccaccttagtaaccacaagagctacagagtttccactttgcagtgcttacttccaccaaacaagtgtatgtttgtttggtggaagggtagaatcatgaaatcctagctgcaagagagtctgggagatggagtctttagaattttcagcttctagtagaaggagatagcatgatgatgtgagcctatgtgttcacaaacccaaatgttgaataagcaaatatcatatattctaaagtgaagaattacatagaacattttatat

SEQ ID NO: 129671 - DNA, 221 bp, Homo sapiens
gccctcctctccctggggctagcacctacagtgctggctgagctggcctggcatgttcgtcctccagcagtggggacttaagttgtcctcggttacttcaggcagacccggcatcacctaaggcgagttccagagtggaatgcggttaagcaagagtttgacaagagtggggttgtgttggaagacactgccttttccttggtcagtgtctccaggtcctg

SEQ ID NO: 129672 - DNA, 446 bp, Homo sapiens
tcccagtaaatgtgcacagaattaaaaaagggaaagagccaaggctagactcccaggggatactaacatttaagaggcaattaaggaaagaaatctgagaaaaaggctgaggagtaaccagaggggtagagaaagaacactgtgaaaggggccatggaatgtgtaaggtagtgggaatgagtggtcagtaagtgtcaaaagccacaaagaaatgtagggaatggtgcaaagcaagttaaggaagctagaatgcatgtgcaagatatagtgagacctctctgaagcagttttcttatggaccaatggaaacaggagggttagagtcagataatgcagaactctgaccagcaggcagaggaattttagacagcaaagggaggaaatgagcttaaaaaaaaatgcccatactggacttaatgagtactaactatgtataaagtactctg

SEQ ID NO: 129673 - DNA, 1285 bp, Homo sapiens
cacgcgagaggagcctggacgggctgtcaggattctgtttatgctggggcctgagcacactgcacctttcccttgcggccagcggtggctgcatccatcacgcggggcaggcttccttcttgatcccttgtctccttgcatcccgtagccctgagtctacatattcaggcttcaagatacaatctccccagcgtgattgtttaataacagattttgtcaatgtgaaatcgaaggcaattttggagatgaatccctttcaatcaaaaagctggaaactttgcctagttgtcattctgggcatgtctttagatcagttttcctgtaacttccttctgatgaaaactcatgctggggaatccctttggcacgtctgcctctgccactccttcatctctgttttctgggtgagaccccggaggacacggatgggcagtctctgccacagagggtttggaggtgatggctcatgtggaaagagagtcagctgccaacctcaaaacaaacgtgggaagaagagggcgcagcacaggcccaaggcttagggcaagacctgctttttcaataggggaaatagtggacactctctgagttgcctgctgcgtcagcaccggtgtgggatgctgcttgggttagcaggttagcatgagtggctccacatgctagagggagtgagaagaggggtcccgatgtgccgtggactttctccacgccctctgctgggccatgtgcccgcactgtctgtgaaggagtccttgacccggctctgctgtgaggagggagcctcagaaccctggggcctcggtgtcaggactggagcagggccagtgctttgaggtaggagatcttttccactttgtggaccagagggtctctcaatagaactgccgaacggagttgctgaatcacacaagcagctgtggacagcacacctgtgaatggctgtggctgtgtcccagaggcgttatttacagaagagctgggtgccgggtctggaaagcccaggggaaccttgggctttacctgctggctttggcgaacagaaggtccccaaacctgtgtgcgctgatgggggctgacgacattaatgatgctgaaatgagctggcatgggagccggcagctggctcctgcctgaacagggtgctgctcagcggaaatccagtgtgagcctgtgtcttgcagactatttttgtttatagtctattagaacaaaatagtttgctggcagactattttttgtgccgattctttggtcatgtgattcacagaggtcccacttcagtaga

SEQ ID NO: 129674 - DNA, 541 bp, Homo sapiens
tgctgagccttatttttctggttaatatgttttgatacgatttctattctatttggcaagtctttcaacactacccttaagaaaaccttttaggccagggatgtggtggctcacgcctgtaatcccagcattttgggaggctaaggtgcgtggatcacctgaggtcaggagttcaagaccggcttgaccaacacggggaaacctcgtctctactaaaaaaacacaaaaattagccgggcatggaggtgggtgcctgtaatcccagctattcaggaggtagaagttgcagcgagccaagatcacaccactgcacttcagcctgggtaacacagtgagactccatctcaaaaacaaaaacaaaacaaaacctttttattacgcaaaatatcaaatgtatacaaaagccgagagaataacatctccattcagagagaataaacctccatgtatcaattaccagctacagcaatcatttatggcctgcattatttcagtcatactcccaactactgccccactccatccccagactattttgaag

SEQ ID NO: 129675 - DNA, 908 bp, Homo sapiens
cacctaactttctggcaacattcctgttttccaaaaaagcagctatcataaatcacaacacaattttctattgttccaggaaaataaataaatatatttttagaattttaatttgtgtatttaagtaatgccaacaacaaaaaagccaaattattctgttgattaatttcagtttattaatctatatatttggtgggaaaatttatacataacttcagtagataaactcacgaggtatgtaaagtaattagctcttagtattagctgtgaatttctagccattgtgaaggccaagtcaatttgttatgttgtttagttatattagttaacaatattaggaagaaaaaattatcctctcaaaaagtaggatttccaagaaaacatattacttctaatacagtgctttttataaataatgaaatgcttaactataatgtttagtcaaaatcaccaaattctacaattgatttgaaatctttattgttctcccaaatttcctgcactaaattgaattttctgtaggaaagaattaactttattttttatttgcccattaaaaacgcttatcattgtctaaatttgcatgttctactgaaagtgggaaatagtagcaaatatttgtcagcaagtatggacagaacatgtagttccaacaattaaattgatactgcaaagaacgagatttttcctagaactgtagggctgtaaagtggcgtcaggtcctgcatgcctttgaaattttctgagtccacaattcattatccaacccacttcaccctgctttaatccagttaattgagtcaactctagcaaaatttataattttatttgtatctgatacaaaaccacaaacatagtttcaagtcaggctattattatactggttcctaccacacaaccctcccagc

SEQ ID NO: 129676 - DNA, 701 bp, Homo sapiens
ggtttgcaggaaggaaaataagaagagggcaccaagacagtggcaggagcatggttaaaatgatagaccatggaacttaagctggataggaaaagaggtgaagatggtatagctgattaggagaaaatgaggagctaagggactacattgtctcatggtgggtccaagaacagagtagaagtaaatgagggggctagaaggatagaaagttgtggcccaagttgggggtttgaatttaatacttcaaaaggaagtccagagatggggccagaagtgggatggctagaaaggtctctggaaataaggggatcaagggaccaaaaagtctgggtgatgaatagatcattcatgtggatcctaaggtcacccaagatgatggcaggactaagccagatgtcagtcttcaatgaatgaaggaaatgtcaggagataagtagaaaacactgaggaagagaaggtaaggagcacacagcaagactgctgcagccttaaagaaataggggcttcttacacaagatgagggaatctggaggcaacagtagagataaagaattagccaggtgcagtggctcacacctgtaatcccagcactttgggaggccaaggtgggtggatcacttgaggtcaggagtttgagaccagcctggccaacatggtgaaaccccatctctactaaaaatacaaaaattagctgggtgtgg

SEQ ID NO: 129677 - DNA, 743 bp, Homo sapiens
caggagagtttaaaaaccttttctgctgcttgccctgtgaggtgtttaaacagaagaaccgtatttggggtactgtattttacatcctagccaactgaaaataatctataggctgggtgcagtggctcacacctgtaatcccggcactttgggaggtcaaggtgggcggattacctgaggtcaggatttcaagaccagccttgtcaacatggtgaaactccatctctactaaaaatacaaaaattagctgggcatggtggcacgcacctgtaatccaagctactcaggaggctgagacaggagaattgcttgagcctgggagacggaggttgcagtgagccgagatcgcaccactgcactccagactggctgacagtgcgagactctgtctcaaaaaaaaaaaaaaaaaaaaaaaaaaaaatttttgggccccccgcggccccggcgaagaagagtttctgagaacacacatcgcgtgtggagggccgcgcgaggcccacagaagaggcatagggtgaacacggggcccaaagggtgttaccccagaggaaaacccgggggccgcagcacaaagggcgcgggaattctcccccaagattataaaaaacgcccgcgggggaaaaccgcagaagcgttctcgtgaaaaattcccaaggtgggagctcgggaaggcatccaatacaggggggatcacaagcacaacaggaagccacaggacacccgcagattcaaatttagcccgt

SEQ ID NO: 129678 - DNA, 721 bp, Homo sapiens
attctttagttggaatatggattttcacagattcaggtttctgaaaacaaaatttaactgctgtcaattatataatttcattttgaaagcctatagtcagtattaattagattttcatttatttggtcatatttttatataaaaaactttataattaaagttttttttatagaacatcgtagatagctttatcagcataacattatgttattcctgcttttaatttttcttattctttggatagtatttccataaagtcatagttttacatgtaagtgtgccagagaaagtacatttgtttctagtatatgtttatgtttgttaaaagacattcacacagagtttggcatgattttatagtctgtgctcaaaagagcaagagagaaattgcaagatagtgcaggtcagaattgaaataatttggcagagtttggtgagaaagcttgcttagcagctgcctaggttaactttgcaccatccattcaaagcatagttcagttctgagatataaaaatatataaccaattaaatttagtttcccagaggtaaattttaaaatgtaaaatataactttgatttaccttgtaagtacattgaaacatcttgttattaagtacaaggatagttttatatttatgaggcagtggcttttatatacttccttttttccttcctttcttaattttacgtttttgaaatcttaatttgcattgacgtttat

SEQ ID NO: 129679 - DNA, 653 bp, Homo sapiens
  misc_feature (622)..(622): n is a, c, g, or t
agaatgaataaaaaggaagagagcttcagagaaacgtggaacaccattaactgctccaacatacacttagtatcggaaggagaggagagagagagaagggagaaaaaaattatttgttgaaataatggctgaaacttcttaaatttattgtaaaacattaatccacacatccgggaacttcagtgaactttagaataaatgcaaagagatccgcaggcaaatacatcatagtaaaaatgtggaaatccaaagaccaggagaaaaccttgaaagcaccaagtaaaaactacttgtacattttaaggaaagtcatataaaattctgatttgtcatcagaagcaatggaggccagaagcatggaatgacatattcaaagtgccccctaaagaaaaccccaaaacagaaaggttaaccaaggaccctatatctagcaaagtgatctttcaaaaatgaaagcaaaataaagaaattcccagataaacaaaaacagaatttgttgctaccagacccaccttacaagaaatactagagttcttcaggctgaaagtaagtgaccacagacaataattcaaattcacacacaaaaacaaagagcaccaataaaggtaactgtgtaattatnaaaaacaataaaaaggcatatttcttctctt

SEQ ID NO: 129680 - DNA, 1024 bp, Homo sapiens
  misc_feature (622)..(622): n is a, c, g, or t
agaatgaataaaaaggaagagagcttcagagaaacgtggaacaccattaactgctccaacatacacttagtatcggaaggagaggagagagagagaagggagaaaaaaattatttgttgaaataatggctgaaacttcttaaatttattgtaaaacattaatccacacatccgggaacttcagtgaactttagaataaatgcaaagagatccgcaggcaaatacatcatagtaaaaatgtggaaatccaaagaccaggagaaaaccttgaaagcaccaagtaaaaactacttgtacattttaaggaaagtcatataaaattctgatttgtcatcagaagcaatggaggccagaagcatggaatgacatattcaaagtgccccctaaagaaaaccccaaaacagaaaggttaaccaaggaccctatatctagcaaagtgatctttcaaaaatgaaagcaaaataaagaaattcccagataaacaaaaacagaatttgttgctaccagacccaccttacaagaaatactagagttcttcaggctgaaagtaagtgaccacagacaataattcaaattcacacacaaaaacaaagagcaccaataaaggtaactgtgtaattatnaaaaacaataaaaaggcatatttcttctcttaactcatttgaaaagcaattctataaaacaatatgtattcatgtattgttgggtctataacatataggaatgtaatttgctaataattgcacaaaggaaggcagtaggggcaaagctgtactggataaaggaaatgaatccagataattcatttctggattcttgaatctacaggaagaaagagaaatagcatttttttttaaggttaacataaggctgggcgcagtggttcacacctgtaatcccagcactttgggaggccgcggcaggcggatcacctgaagtcaggagtttgagaccagcctggccaacatggtgaaaccttgtctctactaaaactacaaaaaaaattagctgggtgtggtggtggg

SEQ ID NO: 129681 - DNA, 606 bp, Homo sapiens
ggagccactggacaaaagaatggttcatgtcctgggtgggatggagcatgatggagccaggacagcatgagatttcatcagactattcagaatagtgtgtaatttaaaacttatgaattatttctggaattttccatgtgatattttctgactgcagttgaccacaggtaactgcaatcacagaacgcaaaatcttggataagggggaatctactgtaaaatattaaggttgctagaattaccttagtatcaggacttctgcaaccaaggccatattacaaaatttaaacttccctcctttactcttcttccctctccatagctattgcttttgcagacatttctgtcaattatatttgagcaagttagaaccagtacattcatgacttcccttctctccgaaggcccttttagtggaatacaattctctcctcctgttactagttttcttctctaggtttatgaagttaattttgacctatgatttattttttttctccccttagtgaggtctttattttaagcacaatgcttatcctgttggtgaaagtttatgttactgaaacaattgataattggctcggtataattttgccacttgaaatt

SEQ ID NO: 129682 - DNA, 298 bp, Homo sapiens
ctgtatcctaccattattgttttctgagcattagcaacatgtttatcaacattctctactccacataatctctcaatatgctatctatatagtgccatatttattaatgtaaaaggggaagggcattttcttatacatggtacttctgatgaactacaagtaactcagtaaggaaataccatggaaatgattacctttgagaaaaaaggcagacagattaaaggcaaaggaggacagggccagattataaacattttctatgtggagatgaaattgtctctaggaaatcagtggggaa

SEQ ID NO: 129683 - DNA, 692 bp, Homo sapiens
cattttgtccattcaatggacatttgggttgattctaccgcttggctattatgaagagtgctgctatgaacatgagtgtgcaaatagcatgctcgttttgagaaaacattctggcagcaatatagttggaggatagaatgaagggtttgtatctctttgatgtatcagatgatgtaggttttttatgcaaacagtggtagctgtggggatggacatgctgtgatagatttgaaaaagaggcttatagagttgaaaataattccagattcacaattgtatgttgtgagggaggaggaaatgaggaaaaaggaggggttacagttggtttataggtagagaatgaataaagacatttgtattgaagactatgttttcctagggaaggatttgtgaggagacgctgtgcttgaatggacaggaagaggaaaacactgggaagaaacaaggggatgcacaaatatttcaacatccagacctaatttatatgcagggaaaaaattcagtcatggaaactgagggatttctttgtgaccaattttgtgtgttgtgtgttgtgtgtgtgtgaacttgcagcatgaaagagcgctaacagaagaaatgtcataagaggcttccttactttatgaagcaatttttagatagctagggtttaagtaccattattataggatcaaagattatatgtaatgcca

SEQ ID NO: 129684 - DNA, 693 bp, Homo sapiens
gaatatgatacaagtggcatcaggaaatgaggaaataatggaactattttttttaagtggaggtagtttgttctccaagggggaaaaatagaccatgaactatacacaaaagtgaatccagagattaaaaacagaaatatggaaaagctatgtactaaaatgcatatgaccttgggaatagggaaacattccttggaacaatttgagaaatacttagcggttctacttatgagtatgaatgctcaggaaatacgcactaggatatttactgtggcttgatttgtagtagccaaaaattagaaacaactgagaaagcccatcacgaacaatatgggaaattcttatgtaatactatatatctgtaaaatgcaacaaatgaaatccacatgtattaacagaaagatcccagaattgttgaggggggatcaagttgcagaatgatacagatagtacaatgacttttttgtaaatttgaattaaaagtttcctcataaaactcagtactatctattggtaatggatgcatatatgtatgtacatgtttttgaaacggattggaaggatacagaacaaactcttgatagtggtcacctgtgaagagtggagaagggaaaataatgagtgtgggaggtgggatgggtattggttaaaggggacttcagctttttatataaacatccacttctctttcaa

SEQ ID NO: 129685 - DNA, 380 bp, Homo sapiens
gctgagctggcactcaaactacacaagtccttccctcgaaaggcagaggaacctcaccccatagccaccgccccaagccacaaggagttctgtcagagtactgctactgctcatgttcccttagggctaaaggtctcttaagtcagcttgtcatgaatgctgcctcttcagggcagtgggctcccctctagcccaggacaggtccagaaatgctatcgaagaatcaagttctagaatcaggggccccaagaacctgcttggtgctctgcccctctgtggccatgctggtgcctaaggtgcaagacaaggtccccttacttttccctctgcttttctcaagcagaaggagttttcctctgtagccaccacaactggttatg

SEQ ID NO: 129686 - DNA, 517 bp, Homo sapiens
atctgcaagctagccaatgaaaaaagctggtaccacatccaagttggaaagcctcaaagccaggaaagctgacagtctgaggccaaaggcctgagacccccagggaggctgctagcctgagtcctggagtccagagaccaaagaacctggagtttgatgcctgagggcaaaagcaaaatatccctcactagaaggggatggggaactcagcacgctggctctgtttctcttactgcctgctttgttctggcagccgactgcattggatggtgcccacccagagtgggtcttactctcctcattcactgactcacatgccagtctcttctgtaaacaccctcaggaaatgggaagtacttacctggggcgatcacaagccctgatgaacacattctgacacctgatagctccttctccaagagtcctgagtctttgccaggccctgccttggaggacattgccataaagtgggaagataaagttccagggttgaaagacagaacctcagaacagaaga

SEQ ID NO: 129687 - DNA, 633 bp, Homo sapiens
ttaccaacattgaagcaaaaaagacagatgtcattcacaacaatgaatgatacaatagtaaacttcctgcctttatgtgtgtttctttcttgttaaattcaaactttagctctttgctatgtcagaaaatttttgcttttacatggctttgatgatttaaatgaagtgaatgagcatgaacgaaaataattcttaagtgaatgaaagtctgaggcttttgcaatagaaagtatataattagcattatttttggtaatgagctttattttgaagctgaaaccactgctaacaatgtttaaaattttttaatttccttgtttctttaaatgatttatttgggatactaacacagagttaaataactttgaattccattgtaagattcttttaaagtattttgtttgaaagtctttcatttcttctaattaggtagacaatctccatttgctgctaaggcaactctaccacttctctttttttttttctttttttaagacaggatcttgctttgttgtccaggctggaacatagtggcacaatctcagctcactgcaacctcagcctcctgagtagatgggactacaggcgagcaccactacactcagctaatgtaaaaaaaaaaagttttaaggc

SEQ ID NO: 129688 - DNA, 743 bp, Homo sapiens
gtactagaagttacagccagagcagtaaaacaagataaaaaatataaagggcatctaaattggaaaggaaaaagtcaaactgtccttatttgcagatgatataatctcctatttagaaaaacctattgactccaccaaaaaaactgtaagaactgataaaaatttcaataaattgcagtataaaaatcaacatacaaaaatcagtagcatatctatatgcaaacagtgaacaatctgaaaaagaaaccaaaaaagtaatctcatttgcaatagccacaaaaaattaaaatacctaagaataaacttaaccaaagatgtgaaagagctctacaactaaaactatgaaacattgatgaaagaaattgaacactatacacaaaaaaggagatattccatgttcatggattggaaaaatcattattgttaaaatgtccatactacccaaagcaaaatttatacggaactatgaaagattcagaatgaccgaaacaatcctcagctaaaagaacaaaactggaagtatcacattacctgacttcaaattatactacaaagctatagtaaccaaaacataatggtactggcataaaaacagacacatagaccgatggaacagaatatagaacccagaaacaaatctatgcatttatagtcaatttgtttttcataaaaggaccaatgacatacaatggggaaaggacagtgtcttcaatacatggtgttgggaaaattagatatccata

SEQ ID NO: 129689 - DNA, 195 bp, Homo sapiens
acctgtctcattcacaggcttctcccaaactaaaacaaacactcccttagagagctgtggcttcccactgctgcctatcatgggaggagcacaccacaggtgcacccagaacacgtctaatgacggacaactgggtacccaccttcaaaagcatgaggcatggctgggcgcactggctcatgcctgtaatcccaa

SEQ ID NO: 129690 - DNA, 590 bp, Homo sapiens
gggtctaagataaataagcattgcttatttgctgtaatgtttaccttatttaagtaagaaaaataaaaataaacattgcttcaaaatggataaagtgaaaactatcagaatactgcatatttatctatgcaaggaaatatgactgttgtcatggatatgcagtttggtatctcaagcaagaaggtatcagagaatgtgaatatggcatagtttataagatctgtgacctaataatcatacttctaagaaatgcgagggaataattttatagtcttgaagtgggaaaatgacccagaagccataaaggagatatattttactacttaaaactaaaaaacaaacagccaacaacaacaaaaaaaccccacaatatttatctaatatgtctaagaaattcagacatagtgaatttttttttttttatttgagatggagtctcgctctgcagtggtgcaatctcggctcactgcaacctccacctcccagattcaaccaattctcctgcctcagcctcccgaatagctgggattacaggtgcctgccaccacacctggctaatgtttgtatttttgctagagacagggtttcac

SEQ ID NO: 129691 - DNA, 157 bp, Homo sapiens
acagggtttctttctttcctttttttaatccatagatgaagaggggtgtgagtgtgtatgtatgtacatgcatatacacaggcaaacttcagagatactgtgggttcagtttcagatcactataataaaacaagtatcgcatttaaagcaaggcaca

SEQ ID NO: 129692 - DNA, 521 bp, Homo sapiens
  misc_feature (30)..(30): n is a, c, g, or t
ggtggcgttcagaggatcccctccagtaangtgtgccaagctggtcttcaaacagtcatttccccttggcctccaaaagtgctgggattacaggcatgagctatcacacccagcccaggtcttaaaaatattttcatattcttaaatttagattccacagttctgcttacgcaaacaatgaatagaatacacttaaataaagactgatttgcatttgagctgagctgaacatcggcctagtatggatacctagtgattctaattttgttaagctctattttctcaatatttcattgacatttcttatagatgagtagttgaaagaaaggtagacggtctagaagctacttgaattttgcctagtacctatgtataattgaagaatagttgtttgcattttaggcatatactgttgtctgcctaattttgatcatgaagcctgcaagagtgatatagggactctaacagcctcatctcagtgaaatagcataaccatttcatttcccctgccatagaagata

SEQ ID NO: 129693 - DNA, 588 bp, Homo sapiens
gtaattttacacacacacaatataaatgtatacacacacatatatgtggttttacatatatatgtaattttacacacaatgtaaaaaacgcaccccttctcccatataataaacctttccctggccaggtgcggtgagtcactcctgtaatcccagcactttgggaggctgagaccagtggatcacttgaggtcaggagttcaagaccagcctggccaacatagtgaaaccctgtctctactaaaaatacaaaattagccatgtgcagtggcacgcacctgtaatcccagctactcaggaggctgaggcaagagcatcacttgaacccgggaggcagagattgcagtgagccgagatctcaccattgcactccagcctgggcaaaaaaaaaaaagggaaactccgtctcaaaaacaaaagaaaaacctttcccctggatatcacttaaatggatgtattgtgatgtattgttttctgaaggatttatcctgtgtattggatcactcattcaacaaatatgttgagtaattttgtatgccaggtatagaatatgcaatataggttcataatttgcttttatggcctaat

SEQ ID NO: 129694 - DNA, 600 bp, Homo sapiens
aaaaaaataaaaataaaaaaagaaggaaaaaagggcagacattttcacaaaaatgaagtaaacctgtcatacctcaaagaaaataactgacagtgtttgctacctataaaacagttcaaaggttgggcacagtggctcacacatgaaatcccatgagttcaagattggcctgggcaacaaagtgagaccttgtttctaccaaaaaaaaaagaaaaaaaaatcagccaggtatggtggtgcaaacctgcgttcctagctacttgggaggctgaggtaggaggatcacttgagcccagcaggtagaggatgcagtgagccatgattgtgccaccgcacttcagccagggtgacagagtgagaccccatctcaaaataaataaaaattcaagctattaagcaaaaatggaattttgtaaaacttgtatctgccactacaagctctatagcttacaaataaatgcttacctgatgtcagtggcaaaagtaacaaatctgactttttaaaaaaatgtaataaaatgtgtcaacatttggaagatctttataactcagagaaccaatatttttttagaaatcacacatggccaggcgcagtggctc

SEQ ID NO: 129695 - DNA, 415 bp, Homo sapiens
ttataattccacaaacttttatagaatgccactatgtatcacacactggcctaattatctccataaataggcattttattcattttggcctgttcattaaattgcaggagttattttggagtcttgagcctattatctaaaatattagatatttttatcaactgtttgtcacctaaaaatttgacaaacatgttatttatgtaattatagaagtcattgagggaagatgttgaaagggactggaccaaattaaaagatagtagaaaccactggaatatggcttctcggctgtcaaattcttattctcatccagttggggctggatgtggaacaattatgacaaggtggaatttcagatatccaatatgacttaaggatagtgtggttcctcttggtaatgtttaagaggctatcc

SEQ ID NO: 129696 - DNA, 294 bp, Homo sapiens
gacctctatgggaagatgacatgcgaagagccgctaaaggtgtcaggacacaagagctctttgtgcaggcacagtgggcatcctgtggtgccgttttgtggcaggtctcactgtttattggcaggaacaaataaaaatagcaaaagtctcactctttaacgggagaggcaaaacaagcgtatgttccaagcataaagttgtgttttgtgctttgatgaaaatcgacaataatcgtagctaagatttattgggtgctgactatattgcattgttgcaaggcatgtttgtaagcgt

SEQ ID NO: 129697 - DNA, 551 bp, Homo sapiens
tttttttaatgaggcaaaattcacataacatacaagtccctgtatgaaaccatacacttcagtatcattaaatacattcacaatattaagcaatcatcatctctgtctagttccaaaacattttcattaacacccccgccccccaaaaaaataaccctgtatccatcaagcattctccatcccctcccctttcccccagctcctggcaaccacttacctgctttctgcctctatagatttgcctattctgggcctttcacataaatggaatcatgcaatatatataataaccaaaaggtagcaacaaccaagatggccatttggttgacgaatgaacaaacaatatgtgcggtatccatacaatggaaatattggtgcctactacatgtggatggaccctggaaacatcatgctaagtgagagagagccttggtattgtctcttctccccaggagattccaagatgcagccaaggttgagacccactgacaagcaatggatacgatcgggtgcagatgaaataaggcagccaggggcaggagggacgtctc

SEQ ID NO: 129698 - DNA, 806 bp, Homo sapiens
aaaacttatttatagaagacttcagaaagaataacaacactaggaaaacataatttgggctggccgtgctggctcacgcctataatccaagcactttgggagaccgagacagacggatcacccgagattgagagttcgagaccagcctgaccaacgtggagaaaccctgtctctactaaacaaacaaacaaacaaacaaaaatacataaaactagccgggcgtggtggcgcatgcctgtaatcccagctactcgggaggctgaggcaggagaatcgcttgaacctgggagatggaggttgtggtgagccaacatcgcaccattgcactccaggctgggcaacaagagcaaaactcccatctcaaaagaaacaaggagacagattttactctgtcatccaggccgaatatagttgacataatcataatgcagctttgaattcatgggctcaattgatgctcctgcctcgttcccccaaagtgctggaattataggcttgtgccacctcactgagctaattttattctttatattatatgcatttgttaacctgtttcacaataaataatactgtggtaacatcctgatgaatatattttatgtacattctagtttcacagcagtaaagattcctagtggtatattgccaggtcaaaggggtgtgtgcattctaatttaatagagcctgtgtacttgccctccaaaacattctagtctttaaatctagccatccttaaaattgtaaattcttgggacctgccaccagatagaagacttttaatatataatggcattaaaaattaataa

SEQ ID NO: 129699 - DNA, 830 bp, Homo sapiens
cttaacaacgtgccttaaaaattattgttcattggttaaaactgagtggtgtagatgtgcgtatttaactctgcccactgttgatggacatttaaattgtgtccatgtttcactaaaaaaaattgctgcatttgtgctatgaaaaaaaaccctatagagcactcaaatgtccattagaggtatcatagataaattgtggtgcattaccagcctggccaacatggtgagaccccgtctctaccaaaactgcaaaataggctgggcgtggcggctacttgggagactgaggcaggagaatcgcttgaacctgggagatggaggttgtggtgagccaacatcgcaccattgcactccaggctgggcaacaagagcaaaactcccatctcaaaagaaacaaggagacagattttactctgtcatccaggccgaatatagttgacataatcataatgcagctttgaattcatgggctcaattgatgctcctgcctcgttcccccaaagtgctggaattataggcttgtgccacctcactgagctaattttattctttatattatatgcatttgttaacctgtttcacaataaataatactgtggtaacatcctgatgaatatattttatgtacattctagtttcacagcagtaaagattcctagtggtatattgccaggtcaaaggggtgtgtgcattctaatttaatagagcctgtgtacttgccctccaaaacattctagtctttaaatctagccatccttaaaattgtaaattcttgggacctgccaccagatagaagacttttaatatataatggcattaaaaattaataa

SEQ ID NO: 129700 - DNA, 705 bp, Homo sapiens
cacatgtacagctgtcccctgtccccacacttgtacagcttcacccattatcaacataccccaccagagtggcacagttgttgcaactgatgaacctacattgatacatcgctatcacccaaagtccatagtttacattcgggttcactcttggtggtgtgcattctgtaggtttggacaaatgtacaataccatgatatctactgttatagtatcatacagagtagtttcactgccctaaaaatcctctgtgctccacatattcatcttttcttcgtaactccctttaaaaaatactagtttaggcctatatagagtcaattaaattgaaaccttttttcgagttcgatttctgcagggctaaatgaacattttatagaagacagaagaagtactaaatatggcctaacttcttctttcttttatattggagataggtttactaatatctggtgaataagaaccctaccccaatagaatgcattttatttcagatgtttcaactctcttttgattatcttcaaagggacaatttctcttaaaaaatcttattataattcttctttgtgcaatagtagatatatcagacatgttgtacccttccccccaatttacctgttgaaaaaatttgatagttcacctgggttcatgaagagaccaattacatgctattgaatattacctccagtttgtcttgtctttgtc

SEQ ID NO: 129701 - DNA, 439 bp, Homo sapiens
gtagctaggactgtaggcacgcaccaccacgcccagctaattttttgtatttttagtatagtcgaggtttcaccatgttggccaggatggtctccatctcttgagctcgtaatccgcctgcctcggccttctacagtgctgggattacaggcgtcagccaccacacccggccctatatgcattcatttttatgtaaaacatatgcatcaattcttttgtatgaaaacgtttggtcattactgtggtacaacagaagaccaggtcagtaccatatttttttttcatatgtacacggatttttattttgttttagacattgtcttacacacaatagacattcagtatttgttgaaattaatgaaagaaaagagaaacatgaaaacggtctgagaagacaataatctgctttttaatttatagacagcaattaggtcaaaca

SEQ ID NO: 129702 - DNA, 313 bp, Homo sapiens
tagttttctctgtctggacatctgcttttagcccttcttccaagcagggaggggcaggaggacaccatttttaaacttccataaccaattaatgcacaggctactttcagcaaatatgtccatcctttgcaagagaccaactcctacacaacccattgaaaacctctctttaatattaacagtggaaaagaaacatattacatagaaccccttcgaacacattattaagtagttggaatggttggtgtgattttaaagttactgaaaagatgaatcgaacattctcctctgcaatccaacaactctacaatct

SEQ ID NO: 129703 - DNA, 766 bp, Homo sapiens
cagaaagtttaattcattcattcaatcagtgtcttcttgggtgattacagggcactgaggatccaatcataataatacttagagtctagtgtggcaacagaggagtaagcagttacattacaaaaagtgtggtgtctggggatggttccagatgcagcaggtacacagggttcttagtagcaaacagcaaaagtcaatttgggcttaccatatgcagaaaggaaatttattacaatggtatgtgatagctgatgaaactccagaagggccagagaacaaggcttagaagttgggaacaatgcctttaaaagtcgtggcgaggccgggcgcggtggctcacgcctgtaatcccagcactttgggaggccgaggcgggcggatcacgaggtcaggagatcgagacaatcctggctaacacggtgaaaccccgtctctgctacgaacacaaccacacaacacatccagacacacgaccaccagctgtattgcgcagccacagacaccagcggcagacagacttatcacaaaacaccaacctgatgtgcgacgaccggcaggcaccagacgactgcagaagcgaggacagggcgccataaggtggtccctcaaaggaaactcccggcggctccgaacaaggaggaggggattcacaaccacacaaaaaacgaacacgcggcgaaccaccgagccttggcaacaacatcacaaggggagtaggaaggacaagggcgcatcacacaaaggaccacccgaccccagatataca

SEQ ID NO: 129704 - DNA, 347 bp, Homo sapiens
aacaactgtccttctctatctgggaatctagtggaaaacagcatattgagtttctgactaagagcaactgtacacctcaccctagaactgccagtattagtgatagacagtgctggtgtgcgcctgagagggatgaagttaagtgcttgtaaacaaagaaatgcaattaggttgccctaaagactgctaaccgcttcctgagagataacccaaatccagctatcaagaaaaacaaaaactgcttttgagaactgtgggtctctaaccccatcatgggcaaattacaactataaaggtgctgaaggggaaactgtccatccctgctgactctatcaatccgtggaccc

SEQ ID NO: 129705 - DNA, 409 bp, Homo sapiens
cggaccctgtctcaaggaaaaaaaaagtgatttaatttcgaaagctgcataacattttctgccctttgacaaacactgtagaatttttaccaaccaagttgtaggatttttgcaaaatgagattatactataatatatatatttcttcaacttttttcacttttttaaatgtacactcattcccaactttttttttccacttttcaggttttttttctcttacatattggacagccttgcatgtcagtttcattatttttaacacttcggtatggatgcccatagtaagaatataccttaccatctccttttcagcgtgatttagtattagggatgcatagtagggccatttcaatgctgaatagggctattttctgtgtcttaattgggggcttcactcttgaggctg

SEQ ID NO: 129706 - DNA, 725 bp, Homo sapiens
cagttcgttgaatccacagacgtggaaaccatgaataaggagggccaactgtgctcagttttttactatcagagaatttttagtgtgtggcattcatttttttcttgcatttcctattttcataagtcttaagtttgaaataccagcttgctcaattaaagcaggcttttgcttcagcagcattattttgtcttcactagaattatatgaagataaaaacaagctgggaaaaacttaggtggagttggaaaaataagattgaggaaaatacagatagtgatctttgtagtcattctcataaatgaagcttttaaatacatgaatttaactttagggtcagccctgctacacagttccttgctgtgaaaagttagccctgcgagtagaattctccaaattgggtcttcggaataatacaatgagtaattgagcattatccagctttggatataactcttgtacttaaaagactttagagcttatcattttatgtatttcatttatttcatttagatctatgagagattacatgcatttctgtgatttattagtcactaattttgttttaccatatctgtcattgacactatagataatcagaatttatgtatatttaataacttaacttttctgaccaccccaccccaactccattccctttgttttatgtgtctgttgacttacagtgccacttgaacagcatatcagtgcttcaactcttgatc

SEQ ID NO: 129707 - DNA, 455 bp, Homo sapiens
cctggctctgaacttaggggagggaggtatatggggcaggttggttactgacctggccacggttttcacaggcacagcagatcagagtatctgtaaaaacccctgaatctgcacacagtccaccatgggagcagaatttctactagctctggtcttcaaccatcaatgtttgcaccacagggtaccgactcctcaacccccatttctgactggttccctggtccctctggcagccatcctggaagcctgagttccccaacaggagtgacatctgctacgcaggccagggttatgggaactccagtgggcatacttgggccagaggtgcctgggggtcagaataggagcactgaagttcagaaggctcatggaagccccaggcgccaggcagtaatgccagttcttgatcacaagtgacatcagagttgggagacgggcctaagttcagagccagg

SEQ ID NO: 129708 - DNA, 469 bp, Homo sapiens
ctcgtgaacatcaggaagatgaaatgaaatggttcaagactggaacaataccattatctgcatcttgactcctgggagataatgatatctcctgctttcctctacagacctaccagttttctctgctttaagggaaaatccaaatgcatgagacctgtgcattcttctacataatcaagagtctggtttcttccatcggagtgtatggagttaaagtggtatactgtacatggcatggtgtgataggtgggaatatgagctactgggggaaaaagttcttacttctagccacttatacaaagagaggccatctcagtgtaatctgaaaaaatgctcactttataatgctgtatccaaggcccatcaaaaactaaatggatgtatttgtactaaaagttggggaaagttgaatatctaaacctctgagcaaatctttcttaatttagaaaataaaatagagcatcattgt

SEQ ID NO: 129709 - DNA, 510 bp, Homo sapiens
gcctcacagggtggctgtgacagttagctggactataacctccatcacctggcacgcatagtgtctcattgacctcagacacttggcgcccggcctgggtgcgggagttctccctgggagaagtctgagctcacagcttagcaagctcttgctgtactgcggaatttctctccctagaacgtgcgcggtgatctcctacttttgtgtgtatacttactctttcgtggacagtgtatatatatatgtatatatacatatatatatacacattttttttcccaaccccttttttttttccttttttttgtgtgtgtgtgtttgagatggggtctcgctgtttcgctctgtcccctaggccggagtgcagtggcactatctcggctcgttgcaacctccgcctcccgggttcaagacattctccctgcctcagccttccgagtagctgggattataggcgcccgccaccacgcccggttagtttttgtatttttagtagagatgaggtttcac

SEQ ID NO: 129710 - DNA, 358 bp, Homo sapiens
gcgagctcggcaccccgcccggtgttgcgccctctaaatttgaactaacagctgtgtagtgaggtaaatcagtattccataaacaggtattaatttaagtgctctgagtttattataccaaaagtatttattctacaacactggattaaagaacaaactactactggagctataattatactaaaacattgaaaataaatcacgaagatgactcaagcttgaaaaatacctaaataatagttgttataaatagcttttcactgcagactacacctccaactacttgtttgctttctttttgcttgaatttttttaaatacaacataaaaattccatgaagaatgcatagtctgtgcac

SEQ ID NO: 129711 - DNA, 129 bp, Homo sapiens
cctctttatatgtaacacatcatttctgtatctttattcccaaggaggggttttcctcctcctattccaacattatttcatctttggtaagtttgctcatcagtcagaattactacttgaaaatataag

SEQ ID NO: 129712 - DNA, 562 bp, Homo sapiens
ctgcccaaaagagttccacttttctttggaagcaaaagctaaaaccactacactggtccctatgagctgattctttggcctttgtgatcccctgactgactcttctattctttatttgatttgagttcctctctagccacaccagcttcacctgtgggttttagcactagtttttccccagggttagaatactaatccctagaatgccacctaactagcttcctgcttccttctagtccccgctcacacatcacattctcactgagtcctacactgaaaacaccattaagaacataattcctaaaacccaatctctctttacattctctaggcttctcttttttccataatgtttattgttttctaatatatcatttaccttgtcttcttttctattgcttttaatgctaactgtttatggcctgtcttttgctaaagtggaagctctgtgaagccagggtctgctttatttattcatgtatctcaagactgtgagacaatgtctgacatatgataagtactcaatacatagttgttgaataaatataataggtgtgtgaga

SEQ ID NO: 129713 - DNA, 784 bp, Homo sapiens
atgccgaggtgggtagatcacctgaggtcaggagtttgagaccagccaggacgacatggtgaaacccagtctctactaaaaatacaaaaattagccgggcgtggtggcatgcgcctgtaatcccagctacttgggaggctgaagcaggagaatcttgaacctgggaggcagaggttgcagtgagctgagatcatgccattgcactccagcctgggcaacaaagcaagactctgtttcaaaaaaataaataaataaaattaaataaataaaataaaatagtttttagccaggtttttttcttaattcatttttgataaattatatttttaaggacagtatatccaatttatctaagttttcatactttttggtataaattcatcagagcactgtctcttaaattttttttctgaagttatgtacccttttttgtttctaataatcttgatatctgtgtcttttctgtctctctctctccctcctcccacacccccccccactttctttctcttgccaggtgtttgttttattttcaaagaactaatctttggcttcatttattccatttttaattgtttctatagtgagttctggtctgttactatatccttcattctgcttcctttttcttttttcttcctggtctttctagtccaccttttttgctggcggttccagctttttgcagggaaactcagttcagtgtcgtgaccgagggtcttgcttcctttcctttttcagcctttcagtcagcacatttccaagggcattgactcaccatctt

SEQ ID NO: 129714 - DNA, 183 bp, Homo sapiens
tatacttgctatcctgttgttcatatgcatgctgtattcttcataaatcaagtcataatatgtacatgtgcacattttaagtgtaagaacaattgcttttccagactatcatggcaataaatagatttcaattagttgtaattgagagatcaagggaaagcgtcatctctttatttgaaaaag

SEQ ID NO: 129715 - DNA, 285 bp, Homo sapiens
cagcacttgagtagaaagcaacttattttagtatttttaagaactcaaaacatcaaacaccagattatttgcttttaaaattgagaatgagaaaaatgaacctatattcaaaagatatagcaaagcctgaaagtattgataatatcagtgtttataaggactggggcaatatgagaagactcatgcactgcaggagtgagatttaattggtataagcattttagagggcaatttgacaataggtatagaaagctttaaaaatgtgtgaatgccttttggccatta

SEQ ID NO: 129716 - DNA, 528 bp, Homo sapiens
ctagccggggcgacagagtgagactctatcttaataaataaataaagtttaaggtgcttatttggatgctgctagtccttggggcttttcctagagcctattggtttggactcagcccacataactctccaaccttaaagattttggaaggaaacttgatggctggtaatagccctgagtgattttcatcctgaagtttgaagtaagggcatggatgacaaccattggaagagtggaaagtgtgtttgttctagaggtctcatccaggtaagggaaatgttaaaacttctgcctaggcgtgcttgggtagatagaaggttgtatctgaaaataagtgcagagcaattgagctgagactggtctcctttccatctcgctgttgtcgtgaccagggttgtcatggtgcttgagtgaccttgtccctgatctgttgggcttgtgaaacatacttggcttgtcactgattttggatttcctcttctgtaccctgatgaatatcagataacatcttttggactggcacgtggt

SEQ ID NO: 129717 - DNA, 722 bp, Homo sapiens
cagcatcaacataatgcggtcaccagtggggagtgttttgcccctggcccactcagccccatagatggccgtgatgaagccactcccaaggatgccagtgatgcactctattccggagaccaccaaagtgaaggtgaccttgaacttggatatgtctttatctgtggcatctgtgttcaccgttgccattctctttgatcctgactttcaggtttctgcgccaagaatgggtaactgctctgcaatcttctgacccttgctcaatgttataatttctgccgccctcattaatggttatttccaatttttctccatttgtttatcacatgactacaagttagaggcttcacatgcaaataatgagaggatctggttactgggtctgtctcaatttttcataaagatacatttgtcttgggctttcagaagctcactggaaataatttgagacatgtttctagctcaacaccttcttaccttatttactttaagtccacatttacctgataagcaatgaatacaaggcctttttacttgtctcacaagatctctgttacctgctaaattatttgtaaaagctcatacagcttttaaaatctgttttccccacttcttttcttgtctctcttattttgggagagagttttattttgatagttaccatgtttgtgaataagaaattcccataagctcatatatgaacatcttttacttagaattga

SEQ ID NO: 129718 - DNA, 409 bp, Homo sapiens
tacaagcccccatgcaactattgcttttgcagatgagaagcaccttagagcaaaccagaggttgagagattcttgctaagtaatttttatgcatcagtcaattgttaatctggactacatgtagaatttcattgttaaactgcatatagatttttctttgcactcctctgacttcttgcctctttcctacattctcttgcttcttatcttctcattcctcagttcctgtccaggctgtcctcatcccactcaccatgacgtgtcccacaggcatctccacagccatactccattcatgtatttctattaaagtgctgtcaaatcaactcccagttttctttgatattaccccagaatctctttcaaataaaagttatgtggccgggcacggtggctcacccctataatc

SEQ ID NO: 129719 - DNA, 520 bp, Homo sapiens
gctgttctagaggatcccagcggcgccctttcatttgtaattgacatagaaatatatttaaattggcttaaacaacaagaagcagttactgctcgtgttactgaaaatgaatgtggttgaattcaggtgggaaacgatgcagctttcaaccaggcttcaggatctgctccctttaaatctcagctctgctcttctccatgctagcttcattcccaggctctttctctaactaaaatgtaagcttaggccaggcatggtggctcatgcgggaggatcgcttgaagtcaggagttcaaaaccagcctgggaaacatagtgagaccctgtcgctataaaataaaatgtaaatgtattgctatttttattttatttttttaatatggaacacttcatgaatttgcacatcatctttgtgctggggccgtgctaatcttctctgtattgttccagttttagcatatgtgctgtgaaccaagcactgtgaatgtaaataaaataaaataaaatatcactatcatga

SEQ ID NO: 129720 - DNA, 211 bp, Homo sapiens
tcatttccttttccttgcttatgaacaacgagtcagagcagcccagctgctcagagtgtggcttcaggatcagagcccagctcaagtcctagagccctttctgcacaagtcacccagcctttctttttccttttctttttctttttttttttttttttaatttggatggtgggggttttaaaaggaccaaaaaaaaacgagaaatagggga

SEQ ID NO: 129721 - DNA, 246 bp, Homo sapiens
tttttagtttcccaaactaagaaccttttatgtaaaccataaagaacagctctggatagatccagatttctttacggcttaaaaaaaaaaacttgaaaaactcttttttttttttggagatggagtctcactgtgatgcccaggctggagtgcagtggcgtgatctcagctcactgtaacctctgcttcctgggttcaagcgattctcctgcctcagcctctcgagtagctgggactacaggcgtg

SEQ ID NO: 129722 - DNA, 637 bp, Homo sapiens
gaccaaaaagaatccgttttacactgtgtccaaaaggccagcagatggcgcccagcaagcccaataggcaaaatgagaacatttgatgtaacattccctgcatccaagttattttaggcctaattttgcaggaagcaattaaaaaaacttgatggctttaactaatactatgctagatagaataatctgatggctagatccagctgtttgggaagttctaggaagcttgcttgcctttttgcccttaaccttactttgtgtgtgtgtgtgtgtgtgtgtgtgtgtgtgtgtgtgtcgagtgttgttctttctcttggcctttaagctactctaaaagattacagtatttataatgaggtagaagcatagcaagttctccctcttctgttcattaatctcttgctgtcattctatactgagaactaaattaaagaaaactgaactaacccagctaatctcaaccattagtaggtcacggatgtgtttttggaggatatagactcttttgccctctaatttttttgtttttcttacctccagaactgtaagatgccctctaattttggacaagtgaaatgacagctgttaaccttttatatacctgacatgaaaatcagccaaggacatgccacggggc

SEQ ID NO: 129723 - DNA, 762 bp, Homo sapiens
gctgagcagccaaacagtggcaatccttgcttaatcagcaggaagagatacaaactaataaatgcaggacagaagaaaatgctggaacaaagaaaaatcttttagagaaaagattaaagaactaagatccagaagagaaagtttatttcatgaatactgcaaaagaataaggcacaggggaataaaaggtagattaaagttcacaccacatactagtggtgctcttaaccaaaatagcattaaccagagtcagacacaaccctgaagaccatttggttcaactccttttgtttgttaactactgagaaaacaggaccagagaaagtaagtgatgtgcttagaagtggtattaaaagctgagtttgctccctgactattggttcaacactcttttcactaatataggaccaaagagcacctacatcatgcactgaaacatacatatatcacataagtcttctatttggtgtcagtggtgagggacacaaatgaattagatgagggtgatctttaactgttgttcttacttaattctgatcaaaaagtaaagtagcacctttgggaacctataactaaaacactgtggtaccggtatatgactaaacaaacagatcaatggaacagaagaaaaagtccagaaataaatatcaaatcagtggaaacaagcattggaacaattggatagacatctggaaaaaagaaaaaatttgatccatacttcacactatattggaacaccaaggaccagagttctaaatataa

SEQ ID NO: 129724 - DNA, 367 bp, Homo sapiens
gccgggagagtatgcggctgttgggattctggggtgtatttccgtggagtatgtctccccaggattaaagttaagaagctgccggaaaggttgttgccgctgacttcactttgtgtgcccaccagcacaggcacaagtcatagcagatggatggcaaactctgccatatactctgaggagtttcttaaattaatacgctaggagagaagtcataattaatgcttttagactttcgagccctctgcagcgtgctttgaaatactacaccggtggacactatgtcccttcctcctgggtttgaacacagtgtctgtttatacacagagggtgtttagtacctaagtattctataccagcacaagagagc

SEQ ID NO: 129725 - DNA, 839 bp, Homo sapiens
ggatgtgttgatatttggaaatacggttttggctgtgctttatctcactaaaaaattaactgacaacacccaccatacaacactagcctaatgaggtgtggaaaccaatactgattctgttctctttctcttgattgagagaaggaaccatgtaaagaaacccatcttattttccctctgccttgaaatttttctctatgtccaactgaatgtcttctctctgccttagtcatcattgttagaacttaaaggtacgacttaccctaccatcagctcccaggtcattagaggacaaacatttgggggattttttgtgtatttttgttgttgttgttattcttgttgggggatagtggttgttgggcaggaaaggggatttctagagcaaagtatggcacagacatttttgtggcttcctgttgcttttgcatccaaggatggcctgccctcattattttagtaaatgtgaaattccaaagaaacagtttcttgttttctagtatatatttgcactagctctctaatgcagccataacaaatgtcctttcttgagattttagctgagagtccatttccttgccttatcagcttctacagggcacctacatgccttggctcatggtccccttaaatccgtctcaaaaaaaacaagaattagcaggcatggtggcacacactgtagtcccagtatcaggaaggttgaggctgagaatggttgaaccaggagtgtgtggcgtgaaccaaatgtacaatggctcagcctgggtaaaatcgactgctggaaacaaaaaaaaaaaatttggggcgcccgaaatttacactcttgggcgccattaaag

SEQ ID NO: 129726 - DNA, 279 bp, Homo sapiens
ggtgccacagccatggcagactttggagcccgggcctgcagacccagtagccaagctctcaacccaggagcgatgggttctccaatcacaccttacagaaagcccccaccccacgaggattctggagtttcccttaacccctcgggaacacaaggggtgagggggttcattcctgctctacagatgggaacatgaggtcccgggaaggcatgggacatcctcccggctgcatggctattaagagtcagaactggatcagagcccacgtccctgtcactg

SEQ ID NO: 129727 - DNA, 309 bp, Homo sapiens
acctccaacattggggatcaaatttcaacacgaggtttaggaggacaaacatcccaacaatagcagtagcctttctgcaacctagctctgtctaatccatctcggctccgagagcaccacagtcaagcacaagctcctgaaggagtgaggccggggcagagcacactcagcaggatagaggcagtgcagccacagctcccccggccttcagggctccccagccggtggggctggcttcctgggctttgggggactcggcctcagcgtcaccctgagattccccccacagaggagcgtcgggtaccgagc

SEQ ID NO: 129728 - DNA, 349 bp, Homo sapiens
atggctgagatagagccttctaggcacagaaaacacgtgtgcgttggcccagaaacaacaagaactgagatgctcagttctgcagcagcacaagtgtggggagagaagaaagagaataaagccagacagcagcactggcctgaataacaatgaccttgaaagcttcagggaggaatctagattttattctgagggtaatgcggagcaattaaaggtatttaaacaggagtgacacaatcagatgttcacttttgatattacttgagttgggaaggaatgtttagtatatattaaaatttgacccaagagaaggatattaagagaaggaagtgcctttgcctataaaact

SEQ ID NO: 129729 - DNA, 239 bp, Homo sapiens
aaggggtgagaacatgttatacaaaagcagaagagaagaggtcacagtcaaagcctatagggagattctatcatcaacaaggatggttccaaccctagggcactaacgcaaagtaaagaagggattaaaaataagattatcccacataaaaccctagatctttaaattttacaactaaaatttgaatttccctttaaaaataatttgattcttgatgaaagttaacaataaggatagtt

SEQ ID NO: 129730 - DNA, 401 bp, Homo sapiens
cagctctcccctctcagtcctatgagccattgtctcccacaaggtctcttattggtcatccctgaccacagcatcacatactcttctccccacctcagctgaagggtcttcgactcccttcccttcttctcatctctgataagcaggaggactaacaccactgggtccctgggtccccagcactgtttcaagaagtttacataaaatatcccaattaattttccacaactgctctaaggaagttagagggagatgctgtcaccagcatgcccattttacagattaggaagttgagactagagagattaagtaccttgcctactgttacagcaagcaagtgatggatctaggaatggacacagaatgaacaggaaggaaaggagactcagtgtctctcccct

SEQ ID NO: 129731 - DNA, 389 bp, Homo sapiens
gaaccctattgtgaactggacttgcaagagatctaggttgcgcgctcctaatgagaatctaatgcctgctgatgtgaggtaaaagagtttcataccaaaaccacccccacctccgtggaagacaagaaaaattgtcttccacgaaaccaattcctggtgccaaaaaggctggggaccactggtctagaagactacaaccaattcagttgcagtggtcaccaggagtaaccatgtggcccaagaaggtatgtccagcttcctccttgcatcttgcggcacaacacctttgcggtatggtgcctgggcagtcccgggttgttaagggtgagagttctaaagccaggctgcccgtattcagagactggctttgctaaggaaccttgggcaag

SEQ ID NO: 129732 - DNA, 262 bp, Homo sapiens
aaagaagccagtttgaggttagccaggctgtcacaatttgaacattagaaagagaataataattacagctaagtggaataaattaagtctgtgataagccatgaattcataatgagatgcaaaagggaaagctaagatacataaaaagatagttgtaaaaaagggtgaaaataatagggtatccaatgtcttattatattaataactaggttggtgttaatacttaggtgttttgtttctcctgttaagtatatgtctattt

SEQ ID NO: 129733 - DNA, 308 bp, Homo sapiens
catttattaataattttattaccacctttctgcgtaactatctcctgagacgaaatgtctttgttagttaaattttcacttatatcaaattaatacctgcacagagctttaaagtgaaatcattttttcaggcctataacataagacagcagtgtcctgcttcatccctactcccgattttcacaggccagagctcactgctccaacgctttcaggtgtttcatctgtattcatacttcaaaaatatctaaataacatgcttactgtgctatgttttgatttctcagctttattttatttattttttt

SEQ ID NO: 129734 - DNA, 306 bp, Homo sapiens
gtagctgggattacaggcgcccgccaccacgtccggctaatttttttttttgtatttttaatagagatggggtttcaccatgttggctgcaaagctatcttgcttttctttgttgtgcaggtcacacctgggtcctgagctggcgccatcaccggagacgccaggtgatgtccattcatcagaaataatgagcaaagcagctgtggcttctaatcagcccatccctccagggtgtcagatggaggccaattagcggacgcactagacaaccaaattctgcctttccaagcaaaacatcagaaaatg

SEQ ID NO: 129735 - DNA, 318 bp, Homo sapiens
ccacccatggttacagcagcccaaacaaatgaaagcacttgtgatagaggaatgtggaagaaaactgataaaaagcaggagggtgttggttccgtgaaatgtggcctatttacccagtccaataatttgtgcccattaaaaacctgtcccagaaaggtatctactaacaaggaagcgaatcatgaacttcgaagtgaaaagagcaagtgatatcaggtttgcagtacagatccattcattacacagttactgagtgccaactgttcgcctagctctgtaaacaaaacaaaacaaacccctgccttcacaaagctggtg

SEQ ID NO: 129736 - DNA, 407 bp, Homo sapiens
caaaatataacttggacaaaagctaggcatagaatacaatttattgtgtttaataccagaaacccagtacagtttttcaagtcaagttttttccatattagaataccagttaaaattagtgtgaggctgtgttattattaggatatgtatataactatatgttaggtatgttattagaatatattatatatattattattatgatatataatgtcccttgtatgtaaccaatctcacattgttgctgttccttcccccttgtgggcacctttccccacttggtcatgctctgatatcccatgcaaggtagctcctccttcccaatgtcctccttcaccttctcaggctctgacacctttctgacactttcactgtgtagttccacccactggataacactttctcag

SEQ ID NO: 129737 - DNA, 683 bp, Homo sapiens
tacgttgaggtataatttacataacataaaattctcccattttaagtgtacaattcagtgatgtttagttaatttggaaaactatgtagccaacactacctaatttcagaatacttctatcaccccccaaagaagaaaatctgtgcccatttgtagtcatttctcattttctaatcttagggtactactaatctattttctgtctctatagatatgcttttttgggacatttcataaaattggaatcatttatatgctcttatgtttggcttttatttagcaatgtttttgaggataatccatgttaaggcatgtttcaatactttcttgtattttgaagagttcttcattttattaatttgtttacttcatggacatttgagtttcaaacatttggctgttgtgaataatgctgtgaacattcatttacaagtcttggtgtagacatatgtttcattcctctttggcagatacctaggattggaattgctcggtcatgtagtaaatttatgtttaatattttaagaaaccgctaaattgttttccagaatggttgtactgttttgccccctccctgcctgccttttttttatttgaggtagagccctgctctgtcacccaggatggagtgcagtggcgtgatcttggctcaccgcaacctccgtctcccaggttcaagtgat

SEQ ID NO: 129738 - DNA, 276 bp, Homo sapiens
tgcgaaaggtatgtttggaaacagtaagaagatcggaatggttgcagttgagtcatgcaggggagagtgaaaggtagatagattgtaaatttcttcaggtcagagaccagttctttatcttcttgaaccaccgaaaacgtagtgaataaaaactgcaattgaattttatagggttgtagagagctttgaattctaaaactaaagtgatcaaatccgtaaaggattttgaatagagagagaggtgatgtgggctaagtggtgattaggaagatttgt

SEQ ID NO: 129739 - DNA, 859 bp, Homo sapiens
ctgaataacatcatacttccttttgtttctccaaaaattgaatcaagatgccagggcaactaagattttcttcaatttgctaagttaaaggtcagtgtattcattagccaatggttctgtattttattcattttagtttttattcgttttcaaataatttgttcatattgttcaatattcaaaaggtaagaaatatgtactgtggtaattttccattccaccctagttcctcttttgacaaccaactattgtcacttaattcttaggcatccttccagatacagtgtatgcatttacaggcaaatacctatataagattttacccctttgtgtacataaatactaacatactatatatagtgttctgttccttgcttttttcattaacagtatattttggtggtaatttcctatcaatacataaagaacttccttattcccttcagaggcatttgaaccagagcaattccttcttgaatagaagctgggtaaaataaggctgagacctactgggctgcattcccagatggttaaggcattctaagtcacaggatgagataggaggtcaacacaagataccggtcataaagaccttgctgataaaacagtttgcagtaaagaagctggccaaaacccaccaaatccaagatggcaatgaaagtgacctctgcctctggccatcctcaccgctacgctcccaccggcaccatgacagtttacaaatgccatggcaacatcaggaagttatcctatatggtctaaaaaggggaggcatgaataatacaccccttgtttagcatatcatcaagaaataaccgttaaaatgggcaaccagcagccctcggggctgctctgccta

SEQ ID NO: 129740 - DNA, 247 bp, Homo sapiens
gggtagagcctggatcacgtgggaggacaggtcatgaagccctgagggtagagcctggatcatgtgggaggacaggtcatgaagccctgagggtagagcctggatcacgtgggaggacaggtcatgaagccctgagggtagagcctggatcacgtgggaggacaggtcatgaagccctgagggtagagcctggatcacgtgggaggacaggtcatgaagccctgagggtagagcctggatcacgtgg

SEQ ID NO: 129741 - DNA, 495 bp, Homo sapiens
gagtgattaatgaaggaatgaataatccagtgaattggtatcaattgatgagtgattaatgaaggaatgaataatccagtgaattggtatcagcctaattcttctccggcttattaaaatcaaagggggaaataatatatattaaaaatggaatactgcacaagcaaagagatgcccccaaagaagctgggcgcggtggctcatatctgtaatcccagcactttgggaggccgaggcgtgcgggtcacctgaggtcaggagttcgagaccagcctggccaacatggtgaaaccccatctgtactaaaaatacaaaaattagctgggtttatagtgagcgcctataaccccagctactcaggaggctgaggcaggagaatcgcttgaaccctggaggctgaggttgcagtgagccgagatcatgccactgcactccatcctgggtgagagagtgagacttagtctccaaaaaaaaacaaaacaaaacaaaacaaaa

SEQ ID NO: 129742 - DNA, 675 bp, Homo sapiens
ttgtctgcttatgtgttttatctgtttagtaccatgtctgacatgatgtgggtgtgcagtaaatatttgtttttgaaataaaaccctggttgacctcttctaattgttatatataaccttgcttgcctgaccagatttgttttgccaacatcagtccttcgcaagcttcagtggagacagagtaagaaccaaatgtctttaagatgatgacagcctacccctttacacttcttgttagggcctcatctaacccaacaccaatactggttgctctgtttccattgacaagccccttgcgggctgtgcgaaacaaaagttttgagacatagagagtctaaggtccaagatagagtgtaccttgatactttgctggggagtaggatcagaccagaaagaaagaagagttagccacaagagtgagaaaactcaatgacactccctctgaggtttgcaaagctaagggccaccagtttacctttaagccaaattttcgtttctctgtgactatgggtcttacagctgtattcaaaacctcagagaagccaacacattagagtccttactttgagacccccaactagctgaatgccaagaaaggcatttagtaactgaagggtatactcccgaggggctggatctaaagaaatgccacctttgatctagcctgtaacttag

SEQ ID NO: 129743 - DNA, 139 bp, Homo sapiens
ttcccttaaggggttatcgggtctccaatcctgttaactaaactcacagaacactgatgtattagccaggaagtcaatgcatacataatcttgaatagaaacctttcaccaacaataagacagggaaagtcaggttagg

SEQ ID NO: 129744 - DNA, 392 bp, Homo sapiens
tgttcactgaagagcagcctaggtgattcacgggtaatacttggagctacaacaaatacagcggtttctcaaatcacctaaagggatctttcaaaataaggatgtgttactctccaaagactcctgtcctggatgttgccaaaacaaaggatgctcagactctgacgcctggagctacagagcacccttggccctcggggtcggagaagacccagcaccaagacgtgcccaagcttccagcttcgcgctcagctgtgatgtcgccacggggacaggacacagcccatggtggcggcactgccaagagctgctgcttcagcccagtaaacacagagttgcttcacagccctctcctggtctctgtgcctgcaacgcagcttgtggacagggac

SEQ ID NO: 129745 - DNA, 503 bp, Homo sapiens
aggccctaatatgcaagaaattttcctattaaatctatctacattaacaaattattgatgaaacattaagaataaaaacatttctcagagtagttaatttgagtattgtttcctctctcaaatgcaaactcatcctaatgccaaatatactttcataaaaccacttacctaacttggcaaacagatctacattttgttagctttagtcatcaaagaaccaaagcctaagaactactcaacgtataaaggttgggtgtgtttgtgaatgaacatgaaaaaaaaatgagtcagaatgagtgaagacactcaaatcttttgagtaataacaaaattagcagctattccctattatctgagggacagtggcaaaaatggccagattagaagccataactgttagcataaacatgcaaccaaagctacgtctgttgattactcttataatcaaattcactataaatcccattccaaccatctacccatcccctgtggaaaatgagtag

SEQ ID NO: 129746 - DNA, 741 bp, Homo sapiens
ctgaaattcatgacattctctgttttttagtattgctaaaggcatggtttcacatatggctttctttgtgcttcttgctggactttggttttgggggagtaatgtatgggaagattcatatcctagtagttactattatcctccagacctagaaagtccccactacaacattttttgaactttagtgagacctccctgccatccattgatcttcactgtgttcctgttttcacttctttctacatctttttccgtgacctattgctgtagtcattttctcgcaggttccgtaaactcccctattgttctcatcattcttatttatctggaaaaactctaattgaaaatgacctcttcctctgtgttcaatctgcacatgaatatagctggagaaaatcatgtaggctgatttcactttaaatttatcatcacaggcctcacatgggcacttatatctgccctggaatttaactgtgcttctctaatacagctataagattctctaccaccacagcctggaaattgcttacatcttcctgaatccaaatctataaacctaatttgcatccataattttgtccttagagcagaggaggtactccttttcttgacattgaattcttccatctgagctctggattccatttatttcctctacttaatgagttttgctccttcagttatgccttctttttcttgttttgtcagctttaccttctctcctacatggttctcaccaca

SEQ ID NO: 129747 - DNA, 373 bp, Homo sapiens
cctgggagcgtctgagctgcagctaccaaccatatggttcccgttacaaaggccaggttctaaggcactctcttccccaccccgccctcaattctttgattttattctgcattctttcagtacgtgcacttctcttcccctttccagaggcatagatttaacggacgtagttgattcattcatttctctgtcactatttatgtgtggaacgggtcccaccgagtttgctctttgctcaacgaagttgcacaatgaagaaagtcacatcctttggtaaataattacctgttaggttgtctcttgctaagtcaggtttgatcttgggcaaaccttagaaaataggcactaaagaggcaatatgcatccagagcag

SEQ ID NO: 129748 - DNA, 297 bp, Homo sapiens
ccaggaggcggaggttgcagtgagccgagatcacatcattgcactccctagcctagacgacaaagcaagactctgtctcaaacaaaaaaaaaagaattaggattttgatttgttcattaatcgctcatttttctcttctctacttcatctatttctgcctttaactttattttttcttctttgtgcttttcttagtttactttgtttttcctttccagttttttgagttgggaatttaattcattattttccttctttcattttcactgacaaatatgtttgatgcaatgaattttc

SEQ ID NO: 129749 - DNA, 201 bp, Homo sapiens
attttgaccacaggggatcctggagccaatccccaacagatattgagggacagctgtttactactatcatctctgagttatacagatatgaaaactgagggaaagtgatagggaaactcatctaaagttaatagtggcagttgcgcaagtacttactgagcatcatgaaatggtgcaaatcccttccacatttttgtgttt

SEQ ID NO: 129750 - DNA, 358 bp, Homo sapiens
gctgtgtgcaggcttccagggttaggttgggctgcagccggttccccttgaaactacctcgatctgggggcaagtctgggctgacctggaggccgggcagggaaagggtctcccagaggaaggtcccagagcccaggagcacaaagcggggccctggggaaggaagaagagtttgccagagggggaagaaggcatgggggaaagagggccgggtcaccaggcagaggacaaaggctgagcacaaggacaaaggcttggaggagcagaatatcctggtgtgagacacggagacagatagcggcagagacagaggacagaggacagagaaggcaggggccagacggggcctgggcgtggg

SEQ ID NO: 129751 - DNA, 208 bp, Homo sapiens
tcccagcggccccctcagcctcagctgcctggatcaccagggcaggcccagcaggcaacgtcaggcggcctgccagactctccctcccagcctcgggatcacgtgtcgtgaccatggccatgcacctcgatctagggttgcagaatgtgggctgagcagccggggaacacctcctggccttgcgtgacccttgggctggccgcgggag

SEQ ID NO: 129752 - DNA, 394 bp, Homo sapiens
agtggtactagccaaatgctatagtcgaattagctaaccatctgttgtactgcctagagactttcacatatattatttccaaaagtcatattcaaaacatctagcaaccagcatagtgtgcacctaggccaatcagactaggcttcagccagctgtaagcagccagcacagctgggcaacctaggtgaattccagccctgttagttcatgtaaggtccccattggtgctaaacctgttttaccaatggatttaagaaggaacccaaagtgtgaaaattcaggcttcaggaagtgaaggggtggcctggatcaatcagctggtaaatgatagagaggagattcaaagtcagatttcccaacccttgctctctcctcctcccactacacaggtgcc

SEQ ID NO: 129753 - DNA, 243 bp, Homo sapiens
tttgtatttttagtaaagatgggttttcgccatattggcctggctggtgtcaaattcctggcctcaagtgatctgcctgcctcagccttgcaaattgctgggactacaggtgtgaaccactgctcccagacactgtctcatattttgtgaaacactcaacctccttgatctgttttgatagttgatagacacaggtacacataactgtttttctactgtaaggaaattggcacacacatgatg

SEQ ID NO: 129754 - DNA, 782 bp, Homo sapiens
tggggctggggaggaaaggagcttcaatgtgccattctggttggggagaggataggacatttctgggtccttggctgctgccggtagaggtatggggaggaaaaactctagagtgggagatgtggaagtggaaaaggaaggccctgtccaggcctggcctggtttctggagacagaaaactccccaggggacagagaggttacccccttgtgcttagcttctgccacccttcccttctctggaggagaaggctgccctctcctcagcaaccctggcctttattctatgcataaccactgcaagggcacccctggccaggctgaatgggtgggggtcccagggcacctgcaataatctcagaatggagggtatcctgggacaaagagggggtacagaaggtgccaggggggaaaaggtgattcctccatctctctctcacccaaatccccccagatcgaatctgacccttttccctggtctccattgtgctaaaccaccgaacttggaggagcctcatataaacatagcccccagccccactggctttccgaacccatcatgaaatagctggaaggtatctgaaccgttcccatagctccctcattattttcttccctgaggatcctgtggtttaggagatttttctcccaaaccagcctcatttcttgaagaagaattcattttcccatattaaattaactcaagctgagcttctgattgcagataaatgtttctaaggcctcaagtcaacttctagggcttgaaggtgggggaatatatgt

SEQ ID NO: 129755 - DNA, 762 bp, Homo sapiens
ggtgtgagccaccacgcctggccgtgtctttctttgtttatgaatagtacataaaataatagtgcatcttcaaattaatgacatttggatttcatataaatgatatttcatataacatttggcaagctataagcagtttcttgtcccacatagtactcttctacttttgttggcatggggaagaaaaaagtgttgaataggagataaattcatagcagtaaggtccatggtttgctaaatggtttaggcactttaaatgtcgttgtaggcatataaatttgtgaaaagtttcagtggaaaattcagcaacatctaccaagttataaattgaatatagattttgcataattctaattttagaagtatgtcctctggaagcacctgaaccagtgtacatgggtgttcatgagccactgtctggtactgaaaaaaataaattataataatccatatgtccatttgactaaatatactgtagtcaactcataaaatgaaatactgtacctacattaaaaagagtgaggcctatataaaaatgtggagacacagccacaaaatattatcaagtatagtaatatagaatattatattaatacatttgaatatgcaaacaatttggagatatgtaaaccattggtagtggttaaagggcaagaatcaaattatggataaattttgttttacatttgttatacttttatattatttcaaagttttacaaagataatttgcagtaaataatttatatttctctttactaca

SEQ ID NO: 129756 - DNA, 117 bp, Homo sapiens
ttgtgacatccaacaagtcagttagcatttttgtgcctcagtttcttatccataaattaggatatgatgattcaagtggatgacttacttcctaaggttcaggatgcgttctaattg

SEQ ID NO: 129757 - DNA, 473 bp, Homo sapiens
aaaaataaaaaataaataataaataataataataataaaataaaaataactgcaacaagcccctagattgacttgaagcctctgtctgaactgctggcgggatccccagcttccccccatgtgcctgttcatggcatgcagaggtcagccccttgctccaggcctcggaccagagtggccatctcgttagcataggacacaggacagaagcattgccctcaagtttcctgagacatgtttgcccctggaagcggtgattttggccatcattgctgcaagactgtcatcggggcagcatcttagcatcagcattgctgtcgcggggtgaggctgcctactgtgccctgccgcccggccttctgtgcttcctcaggagaaagaccagcagggattccagggggaggcctttgttagcagttgtagaagaaaatgtttcccaaagagctgagctgtttccctttctcttctctcct

SEQ ID NO: 129758 - DNA, 269 bp, Homo sapiens
tgctgggattacaggcgtgagccaccgatggccagccaagtctggggccttgagcagtgaaaggattgagttgctattaactgagatgagagagtggcaatagcattcatttgttcattcattcaataaaatgtttattgtatatctactgtgtctactactacttgagtctagcatatacagccatgataaacaaaatacaggatctctctccttcatggagcttaattctaatggaaggagcagacagtaaacaaatagggaaaata

SEQ ID NO: 129759 - DNA, 450 bp, Homo sapiens
cagttacttgtgattgactagaatttagggaaatggccttacctaaatttcatttttattacaacttagagaatttctcttttattagttatggcatcttttctttttttgttttttagaaacacagtgttgctctgttgcccaggctggagcacagtgggaccatgtcggctcactgcaacctctgctttctgggttcaagtgattctcctgcctcagcctcctgagtagctgggattacaggcacctgccatcatgcccggctaatttttgtatttctggtatagatggggtttcaccatgttggccaggctggtctcaaactcctgacctcaaatgatcctcccgccccggcctcccaaagtgctgggattataggcatgagccaccatgcccagccttagttatggcatcttaaacagcaatcaataacatttttttgtttgtttg

SEQ ID NO: 129760 - DNA, 180 bp, Homo sapiens
aaaaaactgacagggctgagggtttcatgagctgtggggaatgagagagaaaaaggagtgaggcatgattccaaggcatgcttggttgagttttataagacttccatggagaaagaaagggggaaatgagctccattttacattgaatttggttgcctaggaagagatttccaatccaaa

SEQ ID NO: 129761 - DNA, 180 bp, Homo sapiens
ctgactcatctgggaagtgagactgatgcgaggcttcaaggtgaagtgaataggaaggcccagcatgacggagcactgcatggcttcactattccctgctggcagacttcattcttggtgggttcaggccagatccaggggtggaagctgagattggagcaggggtgtgattagatgtcc

SEQ ID NO: 129762 - DNA, 555 bp, Homo sapiens
aaacctgcgagtcctgcacatgtatcccggaacttaaaataaaaaagcaacatgtatcccatgaaaaaaaatatggttctattttatcttcctcctgcctacccctgctctcctctccctccagcttggcatacaacaggtgctcaataaaggcttgagaaattgataagaatggaattcaaccttatatttgttctttctctgaaaagaatcttggtattagcttgactaatccttttgctccatgcaattggctagtgccaccttcatatttttctgatatcattaagccccagctgcctcttccctggagctcagggatactgcaggaaaaggggtctgctctctccacttcttctctcctccaaggtttgttttgaaaaaccctgctgccagggcaggctcccgtgttacgctgctcacaaaagcacacatcttccctgccagcctttgctcagttattttattccctctctaacaagtacttgtggagccttactatgtcttcagcacagttctaggttatcaggataagattggtacatataccaggtc

SEQ ID NO: 129763 - DNA, 350 bp, Homo sapiens
  misc_feature (93)..(93): n is a, c, g, or t
ctcgaccagctcgctgagcaccaggcgcgtaagatgagagctggaatagataggtcaggctacactcagtgatcgttttacgactgcgctttnttccttgcgcctgtaataactaatctttgaagaggaacctctactttactttttacatcctcaaaacaaccctgtgtagtaagtaataatattattgtgctgggtagagtggcccatgcctgtaatcccagctactcagaggctgagatggaaggctctcttgagctcaggaggtcaagaccagccggggcaatacaatgagaccttgcctctaagaataatatgccaggcaagatggttcacgcctataatcccac

SEQ ID NO: 129764 - DNA, 403 bp, Homo sapiens
ccgggctcggtggctcacgcctgtaatcctagcactttgggaggccaagacacaaatgtttacaatattaacctcatctgactcctataagctaggctgagccagtcaaagacttggcttttccacaagatctagttagtgttagagtccggcgagaggattctgccacagttcttcctgccaggtcactccacaattacctacatgtcgtcagtagaccttgttaggaagaagccttaaaggtccaccacaggccaggcgcagtggctcatgcctgtaatcccagcctggccaacatggtgaaactctgtctctactaaaaatacaaaaaattagctgggtgcagtggcacgtgcctgtaatcccagctactcgggaggctgaggaaggagaatcacttgaa

SEQ ID NO: 129765 - DNA, 1442 bp, Homo sapiens
acaaagaggggaccttcttccagatgccttcccagttgtaaccggtaaaactgttaccagatagtgtttgtacaaaaaaaaaaaaaaaaaaaaaaaaaaaaattacctttacagttgagggttgttgaggaaaatgattttctttgtaaatatatagcatcgtgtttggtttgggatgtagagtctatacctggctgctgattgcgtcgtttactacagctttttttaaataagatttttgctttaccatttatcataatgtagtaatgaagcaaaatggtcaaaactgggtgtgtgtgaacagagatacacccatattcgtgtatatacacatccacctacatgttttggtctgtggtttaagagactatttcaaggttccatttttataagctaaaacattctaagttaagatggaagaaagccctaaacacagtagattctgagtttttatgtgtattttaaccagagtttctgatagtactgtatctggctacctatatttccagatctaaagcaagaactactctaagtactgcatttggaatcctcctccattaggaatggccaggacaagtggagctagccattttcattacacggccatcccaatggacactggatccctggtccaactgtctaaaaggccagttgttcctttctgtggatgtggatgtctggccttcacctgaggtagagcggggactataaacacacatcaactttctttctgtttgctttcttttccttcttttcaaactcttaaactcaggcctttatgctgtgagtgactagtccaagaagcacacattttgtagtagtcctgcaccagccctgctcttgaataaaaaggaaaattactggctgcacccaaatcttctagtacttgagtaataagcatcaggcattggaagaggttttaaatttgcttttttgaggaaaagaactgggggtggattttggcatcgtagcatatcgattaaagaataatcaggacatcagatacattttaatacatagctggggccttatgttgtagatgaagcttgctgtttttagcaagttcctgggtttcacattcatttctgctgcatctagtagctccacacatttcataacctgatctctttatttgtatgcaaaaaatactgtctttaatacagagcagcatttttgtaacaaagagactcgctggagctatttggtgcttgaatgtgaccatcctttttacttttgctaagccttatttaaattttgtataccgtggaatatgtagaatttgtcaaatcattttagtgctgaaggtttttgatttcttgtatttgtatctgtagttgcagtttctttggtggctggtttgtattgtaagatggcacttgctgatataaatactaaggcactaagagaaaatacagataagtatttataagttgcttgggaac

SEQ ID NO: 129766 - DNA, 178 bp, Homo sapiens
atcaaggctgtttttttctatatgaatatccagttattccagctcaatttgatgaaaagactaatctggatttttcccttcgaatctccatttttcccattacttaggtccaaaagttgagagtcctttttatttttattttttattttttgtagagacgaggtctccacccaccttg

SEQ ID NO: 129767 - DNA, 354 bp, Homo sapiens
cctgtccagcctgtgctgtgagggacggtgggagcagtggccgcacgttccacttccccctgccatgtgagggaggtggggagatggccagggagtgagtgggcgccaggagaccagacctgccgagcccacactcgagcaccacgaccagcacagcaagggacctgctcctggtttttcagatgtcatcacactttcccacaggcttcccctcgatggcactgggcaccccctcagccccggccccaaacagcccattcaggggcctggccctgtgacagctccctgcccagctcctgggaaaagctccacgccagcacaagaaaggatggctaccccacattttgggatcct

SEQ ID NO: 129768 - DNA, 733 bp, Homo sapiens
tattttgagtttctttgttttatattgttgttctttgtagtcagtgtctattattttgtgctttttgaaagtctagtctctgctaggtgccatgagactgaaagttattaaatgtaacttcattgccagatgtaattacggtaagccttttatttgcattgcagtgacttcaacaaaaatggaagctcattctgctttataatattttattcttgggattgtaagcttgggaagctggggaaaaaagtaaaaatatattcttggggaagtataggactgtttgtagtcatgttatttgaaaattcaggaagtctttgttaagcataaatataattttacctgttacatttcttgctgtatctagaattcatgagcaggcaggactgaaagaattgccagttcctttcagctacctgctgtcagatgctgtaatactcatcctactttctgccaggtgcacgtaaaatctagtattacaacagattcacatgctggttctattgaaagccaggtgatggctgagctagatggtagagagatacacagtcttggaatcatactgaagctaccccaaatcctattttggctgaaatttaggaagggcagatgattgaatttcaagtgaattataataaatggtgtacaatgagaaatgccttacatgactaagaatttccatcatttataactttgtcattggaaaatataggcttttttcttcattaatcaaagg

SEQ ID NO: 129769 - DNA, 706 bp, Homo sapiens
gacatataacctaactatgctgagtctcagtttatacatctgtgataaaaagagggtgttttgaggattaaatttagaattataactggcatatcatgagcacttaatcattaatttttcttttctttttactttactttgtttttactgaacccttatagtcactttttgtaataccttttaatggcttacagtacatttctacattgcgaagtaattaaattgaatatattttatctttcctaccatactaaaagattcttttgtgcaagtgaccctatacattgggtgtattgtatatgtgcatattcattcagatgtggtgatataggatgggagagtaggggttgtatctcacaatacattcatgaaattatatatcccttcccttaaagtcctagaggagattaaaatacaacttttcaaaatatcatagaacatgactctattaagatactctttctatccaatgggacattatctaacttggacagattgcagaactaaatgcatattgaggtaaactttcaggatttacactatgctagacccattagttaaaatgtacatacctttttagcaaacccactaaagctagtaatcaggagttagtttcaaatgactagtattatatatttccaagcatcatatacctagaagaactgatactcactggaggaacccgaattccaaaagtcttcgcctg

SEQ ID NO: 129770 - DNA, 481 bp, Homo sapiens
  misc_feature (2)..(2): n is a, c, g, or t
antaattccctagagtctttttccaaacggaattgaacaatgccacaaaaactttctttactaaagaatatttgaaaataaaacaaagctttcagaaatccaactctgcaaaatggcccctaccaagctgcagaaaagcatttcatctttttggaggtttccgcagacatgcagctccagttacaagaaggcagttcccacacggtgcacacaggatggattacctgcactttgaggatgatagccgtggatggtggtttgacatggatatggtgatcatatatatttattcagtgaactgggtcattggattcattgttttctgctttctttgctattttttctttccgttttaggaatttcataccttactacaattgaccaatcataaatgatgtaaataacaattgcttaaacatttttaaatgtgctttgaagtttttttaatgttgcattatacaaattgttgatgtttatagaa

SEQ ID NO: 129771 - DNA, 363 bp, Homo sapiens
ggcaggggctggtgggagctggcggggatgtctcctttcccttcggagaaaagcgctcattcaaggttgcataggaaggaaagccaggttggggaccagccctgtgcagcttggggtccccgtgccttttggctgaaggaggaggttaaaagggcccagactgaaccccgacccctctgtcttagccccagactgttttctgattttagcactagatttggctgcccctaaagcccttagccctaactgaccttcctgcccagcccagcccagcccagcccagccaggccccagacccagtggcttcttgaatgttttggctgtgcagctggctccttgtcacctgcccccttcccaaccttc

SEQ ID NO: 129772 - DNA, 161 bp, Homo sapiens
tttataaatttctttctcccaaacaaatcacatattcctcaatggtataaattatctattagtgtttcttaactttgtccatcatattcatctgggatgttaaaaaacaaaaacaaaaaaacactagttcttgggccaattgccaaaaacccattccaaat

SEQ ID NO: 129773 - DNA, 489 bp, Homo sapiens
ggctggtctcgaactcctgacctcaggtgatccacctgccttggcctcccaaagtgctgagattacaggcatgagccaccgcacccagcccagaatccttcttaacacagtactccaagtgcccacagtccatactaactgctggagttgatgtgtgagactaagcctgtttactgtccttggcttagggaattgaggctcggagtttactgttaagagaaggcatattgttactgattgcagagtacttactatgagccaaatatgttagttgagaacgtttttttaaaaagtctattgtgagtgtttattacctatgatacggagttaggtgcctagtaaaagttcagtaaatatacacatgaagaagtacagtaatcataggaataaagataaaggtagtttgtgttggaaaagagttgggttacttctttctggtgatttttgtagagttgtcagcagtggcttgggattgactttctgcaggaa

SEQ ID NO: 129774 - DNA, 893 bp, Homo sapiens
gttaaataatacactacaaaattttgaaaaatttctagtcatatttaagcagcctcaatagggttatgattcttaaattttgcaaacacatcagatactttagctattttataatgaaaacagttataactgacctctttataaagaaaatgaattaataactgtagctgagctaggtattttattccagtgttggttgcagtatataattcattgcagtgcttactatatttcaccaaacagtggaatactgatgttttaactttagtttcagtccttggaatttgcattcaggtttgtgtattcatattccaaaatgctgctcattaaagagtaattataaatgtctataattaggaataggtcactattgttattactggaaacacacacacacatatatatgtatcacatcatatatatagtccaatttaccttttctcctcataaaaaaatattttagaactgtgtaatttctacatcataattaaatcaacatattctttcaacaattcacaaagtgattatgccacgttgtcaaatcttttgtgattcctgaaagttaaacaaatgtcatctttaacattttattgaattcaagagaaagcttaaaagaataaaaatgtattacccaaacctcttatttggcttaaaacataaaatccaaaatctctaatcatttggattcagaaccctcaacatctatactgaatgtctgaaaaacaaaaacacatcctgtctcgtactccagatataaaggctatcgatattccactaccaacctagcatttcatataacatgacccattaccaaaaagattgaaatttgagcaaatagagaaaggttttatcaaccatggaaataatcccaagaaattcagaatacacagtgc

SEQ ID NO: 129775 - DNA, 612 bp, Homo sapiens
tcattctttctatcctaactaaatattttgagtattaattacaccatccagcaaatgaattatctagtgccactttaagtatgttaatatattttccatatctcctttcaactttaagcacataaacggttaggaacaagtagcatgccattagagacttctattcaagttgatattcaggttgatatcaagtattttctaggtatgattgttcaagtagctaaaaaaaaagccattaatctaattaattgtttaatcctgcttacaagattatcttgaaaaaatgtgctggggagtatggtataatgaattacaggtccaagaatttgggttcagataccaccttcagtctttactaagctgcgtgactttagcaaagtgcttagtctctctaagcttcggtttcctaatctatgaggagggcctaagatatcaccacccatcatattcccccctctgtaccgcttattttagattctactatcattgtatatcacagaggacatttatcttgttcatctttacaatcaacacttagcaagacagatggtacttagaaggccccccaggtatctgttaaactagacaacctcagttcttgtgttaaaagta

SEQ ID NO: 129776 - DNA, 532 bp, Homo sapiens
ctacctcctttctagcactctcggcctcccaacaaattgcttatggttctctgcagaccccacactgtgtcctacctttgtgcctttcctcttcctggaagatcctccacacctcacagcccccctctactggctggcttccactcaacagtgagtctcagcttagctgctgtagcctcaggaggccttgactctctcagactgggttaagaggcagtgaggagtagtgaaaggagcctgagactgggcaccaggagacctgggtcttggttcatgctctgttccacctgacctctcaccttcaattcactttagtccgtgatgagaacccttgggtcaaatgggcctccccaagatgtcacatctttttctgagcgtaaggtgacttatgtccttccccaagcatctcctggccaataaactgcccttccttaagatccagctcagcttctacctcctgagtgaaacctcttcatcttcctcaccaggtgtaggctgagggcttctcttccctcctctgaactcccataga

SEQ ID NO: 129777 - DNA, 521 bp, Homo sapiens
attctcaagtcactgttgaatctgctttaatatctgtccaatctaatccccataatccagatcttcaaccgctcttttggcaagcagtctcaacctcttggggctccgtttttctgcaacctcaatattataagcttccaactatagattagtccaaccatccaccttctcctggactaactcaggccgatgaactcttctgcagaaaaaaaaaccacacacctgggacgattgaagccaccatagtatattgcctcaaacaagtttgttttatctttagtaatcctgtgcagtcccggtccctttcctccatcattctccttactgtatattctgaatgatcacccattcttcagcagatagcccgttttctccctttactgagaaaattgatggcaacaattatgttaaaaaaaagttcacgcctgtaatcccagcactttggggggccgaggcggatggatcatgaggtcaggagatcgagaccatcctggctaacagggtgaaaccctgtctctgct

SEQ ID NO: 129778 - DNA, 444 bp, Homo sapiens
gagtaggctgccgggaagccaagcgggcagccagtgccaggccaaacaggcaattagcacccacagaaaccccactgcccagcaattgctcaaggccatgaaactctgggcctgctgattcctgaggcagagggcaggtgaatcaggagcttgtgttgacagagagaccccaagtccttgagtaagagtcccacacaagcgcctggacttgaattcactgtgcccccaaggcgaggagagcactccggtttagacaacaaccaagccgacctcagcatcctcctctggacttgatttgtgctttcctcatttgatggttagagccctgccatagccacctccagtctagaccgctagacagaagatctgttttggctgccttctttcaggctattctctctctctctctccaatacatgccaaatgctaatttctcatgattcc

SEQ ID NO: 129779 - DNA, 676 bp, Homo sapiens
gggctgtaatgtagttatgggagatggttgtcatcattactgttatttattgagcctccagtatgaatcttttctagttggttacttgatagggctgtttgtttcctaaggctgacacaagcattttttcttccttcttgcactgtaggtgtaaattatacatagttttttcttcttaatattaaaatatgtgaatcattttatgctctgcatttagacatttaatctacagtaaacccaacattttgagcctgcttataataattaaaactttaatttacctttaattctttttttgaaagaatagtttacacagctattagataaaattgctgttgctaaatattgtgtaatttgcatatttaggaaaataggcatatagataagaaaaattgacccttagaatagcaaaaaaaaaaaaaaaaaaaaaaaaaaaaactgttgttgggcgcgctttgggccttggaaaaagattttcataaacaatttgcgttgtggggcgcgggggggccccagtagtggttaggttgacactgtggtcctaagccgtggtcctaggagaagaatgcgtggtcgttgacattagttgttggatttttctacccatataaaaaagcgcggggggacagcgcgtgttttttggaaaatcgaggggagtttcggaggcaatagggac

SEQ ID NO: 129780 - DNA, 535 bp, Homo sapiens
cctcccacctcagtctcccaaagtgctgggattacaagtgtgatccatgacacccaaggatatttcatcatatttctatttactgaaatttggtaactggcaaattgtgcatttgtcaaatttcagtccactagattattaccctagccctaatttccaaagaaagcattacagtttttctggaagaaaaacgattttggattaagggaattgactacaatacattggaccaattacaactaacaacttctaacacattcatcttttacacttgaaataaaattatcatttaaacttttaacacttaataggaatgttagtcaaagtgaagaaaactgaaagtgagatgttaactactgaaagaaataaagtaacaccttttataacaatgttccataagtctaaaaagtcagacaaaaaaaaaaaaacaactttaggaagcttaatataaaatgtatctgaaaattagctaacaggccaagctgctcacacctgtaatcctggaactttgggagctcacgcctgtaatcccagc

SEQ ID NO: 129781 - DNA, 395 bp, Homo sapiens
gtgactaccggtggaacttacggcaatctgttataaggaggcctgggacagaggctgagcagtaattatgtaagccaaggttctcttctcctgtaggttactgcaggaagtagttctcaaaggatgatccctgaccaccctgcagcagaatcacccggaggcctatcccagcatggaccaaaacaatcagaatatctggaggcagggcccaggaaggtacacatttaagaaactgcaattgatgcctttgcacagtgaagactcactactgtgaagcctctctgtgaagtctgggggcaagggttctcaaacctggagaccacacagggtagggaagagtgtgaaccgcctaaaatcctgtgtacttttataagaagagggtccagaatttaaca

SEQ ID NO: 129782 - DNA, 716 bp, Homo sapiens
atgttatggtataaattgttctattttacctctctgcctttggaagggatgttaaaatttcaacaagggacataaaaacttactggtttaaaaaaatcctgaatatgtcctgaatggtattgcctaggttttcttctaaggtttttatggttttaggtctaacgtttaagtctttaatccatcttgaattaatttttgtgtaaggtgtaaggaagggatccagtttcagctttctacatatggctagccagttttcccagcaccatttattaaataggaaatcctttccccatttcttgtttttgtcaggtttgtcaaagatcagatagttgtagatatgcggcattatttctgagggctctgttctgttccattggtctatatctcttcaggacataggcatgggcaaggacttcatgtctaaaacaccaaaagcaatggcaacaaaagccaaaattgacaaatgggatctaattaaactaaagagcttctgcacagcaaaagatactaccatcagagtgaacaggcaacctacagaatgggagaaaatttttgcaatctactcatctgacaaagggctaatatccagaatctacaatgaactcaaacaaatttgcaagaaaaaacaaacaaccccatcaacaagtgggcaaaggatatgaacagacacttctcaaaagaagacatatatgcagacaaaagacacatgaaaaaat

SEQ ID NO: 129783 - DNA, 554 bp, Homo sapiens
ctagggggaagaggaaactggggagtgactgctaatgagtccagggtttccttttgggacaatgaaaatgttctggaactaagcagaggtgatgactgtacagctttgtgaaggtacttaaatgccactaaattgtacacttttaaatggttaattttgtgttttgtgagttttacctcaatttaaaagaaaacaccagtactttgcacactgcagggtgcctctgctccacagtgcagattcctgacatcaccagacagaggctgagctccaggcccaggagacccaccctccatcccaggccatctcctgcatggcgggctgtatcccctccatgggaaaaagatgtgccttgcctcacaccccagacatccatggtgtgagaaaaagcaagcaggccttctttgggttcgtttctgaagggctagccacaagagtgctggcgagataacaggcagctgctacgggacgctgaccatgtgtcaacgcaccttccggggcattctgtgtcatccacattgcaaaggaggctgttactgtgccccattctacag

SEQ ID NO: 129784 - DNA, 240 bp, Homo sapiens
ccaaacagtgccaatggggatctcatatggttatggtgaagattaaatgagtttgtgtatgaaacggcatgtagtgagtacatcaatgttaagtgccagtggcaggaggaatagcagtattgttatagctggaatagtttgtatacatatttctttagactagatttctgcaagtgaaattgttgggtcatgtgactttcatagttcattcaacaattatcaaacacctactttgtactg

SEQ ID NO: 129785 - DNA, 479 bp, Homo sapiens
gcctatgagcttctacatgatcattcccttcaccctcattagctctctgactgtatctccgaccattttttctttcactagtctgctccaaccacactatcctttctttctgttcctcaaacacaccaagcttttcttcaggtagggccttagcttctaccctaagattgtcagagccagctcccttgcttccatcaggtctttgcttaaaagccaccttctgctttctttcatcactctccttcccagaacttcctattcactatctcctgctttatcattttatatggcacctataataatctgacatatatctgacacatacatatatgtcagattattacaggtgccatataacatgatatatatatatatattcttgtttattgactcttccaaccagaatataagttcaacaaaagcatggatttttatttgtcttatttcctgcacattgattgttaacctagaatagtacc

SEQ ID NO: 129786 - DNA, 262 bp, Homo sapiens
ggacaaagtagtacgtttatagtacttaaactatttgctgtcctttagtgtgaaattctgaggtatatatgcttaaagatatttgtaattcttttgtggaaaataatggctttatttatagcaacccattctgttcttgtgcatactgaagtatattgactttccacctagggaaaaaaaaaacaataactcagacttgtaaatgctttcaacggtgttactacttaatttccctcatttctgtaacatataagtgtataac

SEQ ID NO: 129787 - DNA, 347 bp, Homo sapiens
agcagttgtgactaattcatcttactatttattattttattcggatgaaaaatttacaattgtaacattatggcataaaaacagaactctgacgtgttagacaacatatttgacatcttcaggaatggctagctccaggtgctcagcaagggcaacaagaaatctatctttctcttggatttgctttttatctctgttgtccttactctccagcagactctactcatgcagtggtaaagatggcttacatcccctcagctttgcaaccccagtggagaaagggtgcctctttcagcagaagtcctaatgctgactctcatcggctcactctggacaaagggattact

SEQ ID NO: 129788 - DNA, 251 bp, Homo sapiens
cggggcaaatacctcaaaacctacttgtctcaaagaaagccttaagaaggtggcagcaccaccagtcagctagataacatttctacttcaaagtacctgtcaatccaagagcgactgacaggccaagagcgctgacaggccaagagcgactgacaggccaagagcgactgacaggacgccaagaacccaagagcgactgacaggccaagagcgactgacaggacgccaagaacccaagagcgactgacagg

SEQ ID NO: 129789 - DNA, 491 bp, Homo sapiens
tcaccacagtattctttccttccagaggatgcagccctcactagacaccaaatgccagtgccttgatgttggacttccaacctccagaattgtgacaaaaaattcatatttttaataaattacccagtctgtggtatgctgttatagcagcacaaaatggactaagacaagtggtattgtcttaaaaatcataaaattgcatgaggtcaataagtggctataaatgtaagaatatataggataagttataagacagtctaacatttaaaggtctggtacagttgcaatcttcaggaaagatgaagacaaatggacaagagaggtaaggaaaaacccaaattgggaaagtgagattgcagaatacaaaaaaagaaagtgattcaaaataggagaaggtggttacttgtttaatgcttctgaggtttggcagaggggtgggtgtaggtaatttagcaagagcagtttcagagtgggttgaagccatgtgggaa

SEQ ID NO: 129790 - DNA, 332 bp, Homo sapiens
atcagtatccgggatttaaggcattgttttctccaatttattcacttagttacaaatatttattgatatatcaggcattgttctagacactagggttaaatccatgagtaaaaaatatagaaattaacatcttcgtgagggacatggcagtgactaatattaggttggtacaaaagtaattgtggttttttgccattgaaagtaatggtgaaaaccacaattactgttgcaacaacctaatataaaggatcaaatgcgttatattaggtggttagaaagcactaaggttaaaaactaagcaggaaagtggtaaagaatgctaggagatgaga

SEQ ID NO: 129791 - DNA, 287 bp, Homo sapiens
gacagcctggggacttcccccgtgtcccgggggttcctgccgggcctcaggaagggtcctgatcagatggagaactcggtgacctgctcgtcttcaggagtttattttccagggtcctccattcgaggaaacaaggcaagggggactctgcggaggccatccgtcctggaagcagggcgtcaaactctgggcattctcagcccagctgtgtttctgggcccccattggatgaccctgagcaaactccttccgagactgacgttttcctctgtggagtggaggtgaca

SEQ ID NO: 129792 - DNA, 421 bp, Homo sapiens
tttttctttcactcctgtatcccttttccatggccaagtccagtcaatttcaccttgtaagtactgtctctgttccaatctgtttccacccttcactgcctcctcacaggccttcctgctgtcagacttgtccctttgaaatccatccttcacagagctgcccgtggagttgactcaaaacaaaactcaaaccattttcctcctctccttaaaatctttcaggtccacagatcttctattcccctttccaaagggtccacagaagccttagaactccagcaaatacaatctctcaatcactgacctgaaacatcaagtccaagtgccttaccaggcattgtggtctttcatgagccagtccctgaattccagccttctgacagtccccctcacacttatgcagtatattatcaacagacct

SEQ ID NO: 129793 - DNA, 574 bp, Homo sapiens
ctactcaaatagaatagaatttgatttcccatccaccagttggaatatctgtaccacttactttatctcccttacctcgcttctgcttttgtttcctggttataagaataatctctgttttttcaagtaagtttccctctcatagcttgtttagtagttaccagactgtgagactatgaagcctggggaagggcgtggagaggcacagaattcttccaaggtgctgtgttatatgctcgccaggaattgtctgtgtattgaatgaatgtaactagtggtggacgtatttgacgttggagagagggctatgcattctctaaactgtggtttctggagtgagatgacacaccacagacagtgtccaagacaatttattggaggtcaggaagaaatataccttttgtttatatcttacacttaaaaatataaaataatgtgaaaacttgatttttccgatctagaaagacacaggtgcctccagtcactgaacattcagctggtctcaggtctcctgtaagaagggacggccttcacatgtgaaaaggttaatagtgtcttcttcacagattggttg

SEQ ID NO: 129794 - DNA, 485 bp, Homo sapiens
tgttcaggaggctgaggctggaggattgcttgagcccaggaggcagaggttgcagtgagccactatcatgctactgcactccattctgagcaacagtgcgaaactctatctcaataaacaagcaagcaagcaagcaagaaaggaaaagaaaccagaaaagaaagaaaagaaaagaaaagaaaagaaactcttgtccagatgcttactgttgtgcaagtgatataatcatggaaagctcctggaagaggatgggatcacatctactgtaataaggtacctgcaccaaattgatcctggtgccagtccccaaagccttctaataaatccctgttttgctcaagataaccaatttctgttgtttaccgttacaaatgctgtctgatagatatgcttgttaaaaaatggggatagccactggtcatattgaaaatctatcctcttaacagtgacaggggagcacagttccactgcttcctcctagagca

SEQ ID NO: 129795 - DNA, 182 bp, Homo sapiens
ccaaagacaaatagccacagttgaaaagaaaaaaatcagaaatctaaaaacataatggaggctcaggcctgtaatcccagcactttcggatgcccaggcgggaagatcacatgaggccacgagtttgaaaccagcctgggcaacatggtgaaacaccgtcactaaaaaaatacaaaaaaata

SEQ ID NO: 129796 - DNA, 479 bp, Homo sapiens
gcctgttaaatttgtctccctcctctcttccttgccttcctatattctgttttctgcaatgcatccagagtgatcttttaaaaatattcagttagggcccggcgcggtggctcacgcctgtaatcccagcactttgaggctgaggcaggagaatagcgtgaacctgggaggcggagcttgcagtgagctgagattatgccactggactccagcctgggcgacagagtgagactccttctcaaaaaaaaaaaaaagacaaggactggaggaagggatccatctcaaggatccccaagcgggccacctcacagggggtccaggggggtaaccctatcccacagggcgtatcctagggacagacggggggctgaggtgcaagtgacaaggcgcttcagaaaaacgactagggaggtgaaaaatgattacaagagggtatactggattatgacagagggaaagctataccggtcagagattct

SEQ ID NO: 129797 - DNA, 339 bp, Homo sapiens
tagtggtgggaatttcgtaaacatgtgcatgggttaaaactcctagcactggagctgggtgcagcagctcacatctggaatcccaactctgggaaaataaggagggaggattgcttgaggccaggagttcaagaccagcctggggaacatagtgagatctcatcactccaaaaaattaaaaagcttagctaaggccgggcgcggtggtgagctcctgtagtcccacttactcgggaggctgaggcaggagaattgcttgaacccagtaggtggaggttgcagtgagccaagatcatgtcactgcactccagcctgggcgacagagcgagactccgtctc

SEQ ID NO: 129798 - DNA, 203 bp, Homo sapiens
cgtacctctgacagacatctttaagttctctttcttgatctctgcagtatctatttactgctgactccttcctctttaagactcccttcaatctggcatcatgctatgctgctcatttcccaactatctctctggctattcaatgacaaacttcacaggctcctcatcctctacctgcctttttacatgcaccatctttagag

SEQ ID NO: 129799 - DNA, 451 bp, Homo sapiens
atccacttttttgagttcccacacaggagtgagaatatgcactgtcttccagtggctggcttacttcacttaacatcatgacctccagtttcatctatgtttgaacagttttaatcaacatgaaattcacaagaaagcaaaagagtggaaacaggactgcagtcaattgccttgatcagaacctgatcaagaactagtcaccactttggaaaacaccatctatggaaatcctcctgctgctatttgagttgccaacacaacacaccagtgttggcagttctggtatctatctcaatgattacatctagagcaaacctgtgggtcttttgttccatccctaccttatcatttacctattaaaatgccatggtgttttaaaataagagttgctttcctgttacatttctgttttacattgcagttacagcctcaaatacatgttggaaaatta

SEQ ID NO: 129800 - DNA, 459 bp, Homo sapiens
atcatgtggtgctatcatgacatttaaccactttctcattctctgaaccatattttctaaccatctttaaatattgtgtaaccatctttaaaaagctccagaatcaattgcaagccaatacattctgaaatcatcagccacaaatttgcttttaaaataaataaacttttgacttagtcatgttgtataatgatgtaacacattaaaaaacacatggggctgggcgcggtggctcacgcctgtaatcccaacactttgggaggctgaggcaggcggatcacaaggtcaagagatggagaccatcctggccaacatggtgaaaccctgtctctaataaaaatacaaaaattagctgggcgtggtgagccaagattgcgccatcgcactccagcctgggcaacaagagcgacactccgactcaaaaaacaaagaagaactataaggcagaggcaatgtgga

SEQ ID NO: 129801 - DNA, 473 bp, Homo sapiens
gaagagattcaggagactcagagctgatcgtgggcaagggtaactttctagtgaggggtgaaggcaattgacaatgagcaatgttgatattttgaggtctcagagcacgtggaatggatgcacttcttgaaattaaaaaaacagttccctaaacaaaggaagacgacggaaatttggggtgattcttagcagcatgtctggccggcagccttgcaagtgatttatggggcccgtccccttccccctcctgcgctggctgaagtcaaagccatatgccctgtttctgtgcagaggcctgagctctacgaagcaggagcttcacccagacggggctggcggggagggaaccaagctgggccaccgggctgtcatgccagctcctaaaagtgggcatttgtttcctgctttctagaatcaagtcagtccaaaccttatggctgtatttccattaaaactgtcattggaatatcgca

SEQ ID NO: 129802 - DNA, 137 bp, Homo sapiens
aattttgccgtgagccaaaaactgctctaaaaaataaagaccactgaatgagtgaatgacataaccatgtacagacatgcaagaaacatggacaggcagatctaacctttctttcaatgtcccactactatcattta

SEQ ID NO: 129803 - DNA, 807 bp, Homo sapiens
tttactctttttgtggcagatgtgactgggattgcatttctgatttggctctcatcttggctgttgttggtatatagggatgctagtgatttttgtacagtgattttgtatcctgaaattttactgaagttgtttatcagctgaaggagcttttgggctgagactgtgaggttttccaggtctagaatcatgttgtctgccaacagggttacttttgtttcctttcttcctatttgaatgccctttatttttttctccctgattcttctggccaggactccccatactattttgaataggagtgagaggaggcattcttatcttgtgccacttttcaaggggagtgcttccagctacagtcttttttttttttttttaatgataaatacagtgatggattttgtggagtaatttcttataacattctttgggcagctgtaggtgaaatgttgaaataagattcagaaaataggattctgtaagggaagaactgtcacaagggagcaaaactcaaagcatgacaaaactgtcacgctttctaatggattatattggttgaatgattggtagaagaatagatgaacgtggaattctttagaaatttatttagtttataaaggccttttgataaggtttggttatgagaagttttaaaattatgttgcctagagtttattattttatcctgcagattaaacatagatcataggcttttgcattcaagtaaacagtaatggccttgacatccctagtcagaacttgtgatggaatagatggtcacctgtctttctcatggaagtgaaccaa

SEQ ID NO: 129804 - DNA, 815 bp, Homo sapiens
gaaaatctggagaagggtgagtggaggctggggatataactcttaggtgcaatgacttgttttctgctggtggtttcttttgcttgtgtgctgatgtttcccaggtctctgtccttggccttctttgcttctctctctgcccttttccctggagagtttatgcaagtccatggtttcaagttcactcagatgcttatgatttcttcctgcactcttctgttcccagtaatgatccactgtgcatctccatctttgtacataggcacctctatgcttcatctcaccagtggccttaatccttctgcaatcaattgtttcccctaaaaaaccctcttcctatcatggtatatcctctactttctttccagccttaccttcttctacttactcacatcttcctttctagcatgtagatcttttcttcattacctgcaaaatctcatatcttcatgtctttgtacatgctgcaccctcttccagaaatgccttccaccacttcctatttcctttgtcttcctagcaaacttccactcagcctcaaaccttaaatacccaagaaaaaagtcatgtaagtgttggtaaagtcctcccccacatcccaggatgaactagtcgttccccactttggattttcacagtccttcctgcatacctcaaatatggttcttatgacctgtatggccttgttttctgcatagtggtatccctctctggacttcaagctgtttatggcaaggaccgttgtcagccatttctgaatcctagctcagtgctcgggacattgcagatgttcaatacatttgcattaataattt

SEQ ID NO: 129805 - DNA, 451 bp, Homo sapiens
gggattacaggtgtgtgccattactgcccagctaatttttgtactttttagtggaagcagagtttcaccatgttggccaggctggtcttgaactcctgaccacaaatgatccacctgcctcagcctcccaaagtgctgggattataggcctgagccaccgctgggctgaggtagtcttgatttatattttttcagttttctgaatttgaactgaattcatttcaactttatatgaaactctaaacagcatgatgaacatgaaataaaggtgagctaatggcatattaatttctgaagtattcccattttgtcaaactaattagctcttagataggccatcttcaccaatatactaagtagtttcccctcccacctggtacaggaagtttaaaaatttgtgtatctccaaatgtcggtattcatattcaatccactaaactaggaaaaaatt

SEQ ID NO: 129806 - DNA, 221 bp, Homo sapiens
gccagtccctcaccctacttctttgtaactccatcataattatacctggtgtgattctctgacatgtgtgttctaagatgatctttgataaacgcctacttgagtttaagattcagcacaaatatttctcccttcattaaagccttgactacaagcagctaacttataatctcctctcctgcttcaaattcaacatagttctatttagtaattatttcttt

SEQ ID NO: 129807 - DNA, 202 bp, Homo sapiens
ccgcctcagccccagagtagctagggctataagcgtgtgccctcgatggcacctggctcaaaatctaatattaagaatgatgacaatgacaataattaaatggctaatttttaatgagtgaaaactcttctactactcaaccttctccctgaaaagttcctcttctgtccctaactaaagtctgtccgtgaaacactctcat

SEQ ID NO: 129808 - DNA, 437 bp, Homo sapiens
ccaagatcatgccactgcactccagcctcggcgacagagcgagacttcatctcaaaaacaaacaaacaacaacaaaaagccacataaatatcactggcacttcatataattaactgtacaaagtatttcctgttgtttgtcttgacaaacactttcataacacttaccatgtgcagatactgttctaaggactacaaatactaactctgcaatccctaatacaacctatgagtcaagtactattattatcccccttttacagatgagacaactgaggctcagggaaaggttaagtaatttgcccaaggtcacagaattggaattccaacagagagcagctgcctatggtgttctcaaagggagggcaatgccaaacgaaaacaagcaacaagactctactcagtggttgcgactggagagcggggatactctaggag

SEQ ID NO: 129809 - DNA, 425 bp, Homo sapiens
ccaagatcatgccactgcactccagcctcggcgacagagcgagacttcatctcaaaaacaaacaaacaacaacaaaaagccacataaatatcactggcacttcatataattaactgtacaaagtatttcctgttgtttgtcttgacaaacactttcataacacttaccatgtgcagatactgttctaaggactacaaatactaactctgcaatccctaatacaacctatgagtcaagtactattattatcccccttttacagatgagacaactgaggctcagggaaaggttaagtaatttgcccaaggtcacagaattggaattccaacagagagcagctgcctatggtgttctcaaagggagggcaatgccaaacgaaaacaagcaacaagactctactcattgcaagtgagcaaaggttctga

SEQ ID NO: 129810 - DNA, 306 bp, Homo sapiens
caggccaagaagagcagagaaacagagtcactgccattcaacagttcatgacaacttcaacaatagggccaccataatgagccaaaaattaggagcaattctcctgtgttttaaggaaccacaaagtctctgagagactgaagaagagagaacacccaaatgacaaattaaatttacctccagcaaggtgggattaaggctcacagaaatatccagcacactctcctcacatctactggggtccaaggcctcaacagcacagtctcctcaacctgctgctccagacatttcgcttttcttcctctg

SEQ ID NO: 129811 - DNA, 462 bp, Homo sapiens
agtacaattatcaaaatcaggaaatttgatgttggtgcaaaactgtgatctaatccttaaaccatattcagatttcatcaattgcctcaatgatagtctttatagctatttttcttatgctagtgtccagttcacaatcatgcctttcctttgcttgttgtgtctatttactctcttttaactttgaacagttcctcagcctttctttggtctcttttgccattgacagttttgaggaggccagttattttgttgaatgtccttcattctgggtttgtcttctgttttctcatgaccatatgcgggttaggcacttttggcaagcatattaccagaaatgatgatgcactttattggcatgtcatatcagggaatgacattgatgtgtctcattattggtgatcttgactgtgatcaattggtgatgacaaaggtgatggcttccaggttttccagtgtaaa

SEQ ID NO: 129812 - DNA, 282 bp, Homo sapiens
tttctttaatctctcccctgacatacagtctcgaatcagtaagtcctatttgttctactatcaaaatatatatagaatatgctaactctttttatattccctgccatgatcctaacagcaactactgtcattgctgtgttccactgcaactacatattaacccttctccttcctattattcatgccctcctaagacacattcttcctactgtagccataatgccttcttcaaaaaaatgtaactcaggctgggtgcgttggcccatgcctgtaaccccagaa

SEQ ID NO: 129813 - DNA, 568 bp, Homo sapiens
cacaactaatgaaccagtatcaatccgttaccattaactaaactccacatttattctgatttcaccagatactggtcatgtgttttgtagaaggccgctccgctggggttcgccttgtgtttttatcatggtgagactggggttatgggtttgggggggaaggccacagaagggaagtgcctttctcattgcctcattgcaagggtgcgtgtcaacatgacacatcacggatggtgccagccttgaccacctggctccgggagtgcttgtcaggctgctcccctgtaaagtcaccccctgcttccatactgcactcttggagtcaagcttccatactgcactcttggagaagaaggtatgatgcccgcctcctggaaggggagacacacaccactggggtagagttcttctgtgggaaatgtgcctcttctccccatttatttatttatttgtttatttctatcaatatgggctcatagaaatgtattttgtactttagttataatccgatagcacatgatgtattttgttactcaggttgttctagctttagccatttggggctctt

SEQ ID NO: 129814 - DNA, 701 bp, Homo sapiens
ctatacacatcagtttgtctgaaattgtatatttctcaacaatattgatctatttgtatttcaatatgttgtatgctctcatatgtctgtatctttgcaaatgatattttcttctctttaacgatttttgtcttaccctgctggtaaggaagtcaccttccctctcccttctgtatatccttgtcaaggaactatggaaattgaatggcataggtcttgatacaagaacctctcttttctctttataaaaaagtcagtaaatagtggtggaacattcaggagaaagttggggacatagagactaagaaggcaatgcagtattattaggacagggggtaaactaaggcatagaggacagatttgatgaacatattatcttttttatatacattataagaagtagaaggctagaaaagtgaacatgcttgctattgcacgtctcactttccaatttcatgaagaaagcaaaaactacttctactttattacttctttttgatgttaattggtaccacatagcaagtttgcattatagtactgagctttaaaatgcaaggatatactcatgtatatacacagacaataaataataggttcttttccacattcaggaagtgaaactcagctgtccgtacgacacttactgtccatatataggcatccctcagtatctgcaggggattggttccaggaccctcaca

SEQ ID NO: 129815 - DNA, 352 bp, Homo sapiens
tttgttcttttcttaaatgccctatgcccattttgtcattgggatattcatttctcctgatttagctactgaaaatattaactacactgggttacaaatattttccccagcttgtcatgtgtcttccccctcccccaccccacctgagcttattaaggggtaaatggtatacaaaaaaactgcacgtaattcatgcatacaactgggtgagtttggatgtatgtatacactcacgttgccatcaccacaatccaggtaataaacatatccatcacctccaagtttccttgtgtccctacgtgtgtgtgcatgattgtgtgtggtaagaatacttaacgtgagatctaccctc

SEQ ID NO: 129816 - DNA, 598 bp, Homo sapiens
gctgcaaacaaactattccagaaagtgatgtcttgaaacacaaccattctattttgcagtctgtgctgggctcagccgggcagtcctgctggtcttacccatggtccccaatatggctgcagtcactccagtagactggaggctgggcttagctgagatgacctgctttctttctttcttcatgtagtctcatggcttttctctctctccatgtggattcctcatgtgaactctccagcaaggtagtcagaatttcttccctggcaactcagggctgccaagaacacaaaagccaggctttcttaatgtttaagcccagaactggcatgtggccaattttttgtgttctgttggttaaagcaaaccgagtcaagaagagcctacacaagtagtaatattacaagtatgatgaaatatcattctcttcttagaccaaacagcatattcctccctccactcttaccctctataatgttttgcttttgggagttcctttatatgaaatgcctcccctctacttctccttctactgaaatcctactcatcctgaatccagctcagagctaactcagtgatttccttcatacatctctattat

SEQ ID NO: 129817 - DNA, 760 bp, Homo sapiens
gtccattcctaacaattagatttttttgtttttttgcttcccttcgaagtgagattatttagataactaacttctgctgagtacatatacatattgttcctgagggtaagaattaatttaagagccagataggagattttttttaaagataagtagacagtagaatataatttctagaagactcaagatgtacatcttcataaaattttacgttatcttaatttcatttatgttttaaagtaaaagatgttgcattgacataatgtcttagttataaaggtaaacatttttatttttaaaattatgatactactttatgcagtatttagaaccattttactaaagaaagccatttaccaccatagcagagagtattaaaatgttagtaagtccaaatggttgttttgttttgtttttctggagaaacttacttcgaatagtggtaactataggcacacaatttacttgtaataaagaacactaatggggagggtaggagtaaattaactagaaccttaataatgggcttttctagctcaaggaatcttataattgtccctgaaggtagttgtgaaggaagttgcaagatgaaatatctagatttgtgtagtagtcattccaggaaaaatgttgccttctggcaaactttggcatctttattatgtaaaatgcctttttaatgatagcatttgatgtcacctaattgggatagaactgaggcccgttaccagataattgctaaagagcctccgcgcagtgg

SEQ ID NO: 129818 - DNA, 625 bp, Homo sapiens
ccagaatgcacttggtctaagagtaaagagtgctacataaagattgatgtcagggcattgctgtggatttagtgaggtactctgaagagagtggtccagtgacagtctcgttttaaaagattggatgtaggtataggaagatgagttcttgaaatgaggactcagtatacgttgaatataacaaaggagtttgcattgaagaaagatcactatttaagcaaaacagatgttttgtccacagtccaaataatgtggtttagtaatagcacagcttatctctattcattttctcttttggtattctctcctgttgattcttatgtagtttttatatgaagtcaacttgaaagttgtttaaagacaattcgaggcttgctagggatgtgtgagggagatactttgagggcattattgaaaggaaatatttgatactggacagaaagaatattgtgaatcctgtagattattttaaggaaggagccttaaggttacaaagagtaggcttattgattggggtttgtagtggcgggtgataaaagctataacagtttctactaatagtgttgcactgtaatgatggaataaaaaatctttgggtccttagcaactggagatggggtagtga

SEQ ID NO: 129819 - DNA, 421 bp, Homo sapiens
acacaaggtgccagacacaaagagagtgagtcacgatcgtggtatgtctgacaggtagagcaacagtctgatgatccagtagacaagccacgatgcagagtccatcaaaaagtcagaaacacacatgcatgcttgtttgaacagctcaaggtttgttggatgcctgaaagtatgcctgtggactgatttggctgcacagccaaagaaagactgaaatagaaacgaaatcatccagctggccacactgttggaaccaagctctgagaaaaggtgggatctgtacagatattggaggaaggtgaccaggcaagacagtcagttaagacagaatcagctgaacaactgctcatgcattcaaaacaacttgattgaatgcctatgttctagacattcacatggtctctttctatctcatatacag

SEQ ID NO: 129820 - DNA, 371 bp, Homo sapiens
gaccttacctcttgtctgacagccctctgtgtacccatgtttaggatgtatgaatttgttacctattatcttccactaagattttctactaagcagactttcattatttcaaaataaacatatcttaaaatttatcttccaaattccttagacgttactaagcaaattctcttttaagtagtttttaaagcattagttatacaatgatagagtaatagtccatttggagttttataataacatagctacaaaaatgttgagtaataggtacgaattagataaatttagatctatgtgctcattcaaaatgtaaagtagtaatgatactggaaaatgctcctgatacagtaagtacaaaaaagtgtgacagt

SEQ ID NO: 129821 - DNA, 586 bp, Homo sapiens
tgctgggttcaagcaattcttgtgcctcagcctcctgagtagctgggactacaggcacccaccactacgcccagctaagttttgtattttcagtagagacggggtttcaccatgttggccaggctgatcgcgaactcctgacctcaagggatctgcccaccttggcctcccaaagtgctgggattacaggcatgagccaccgcatctggctatgatagtgctttttgataatgagctttaaaaggatactgagggatagaagctagagaataaggggaaaccaggcaagtgatatcttgctgatgacaagagaataaattgttgaaaatacatattcctttgtataaatcttagggtacatactgactcttttttattgatacatactagctatacatattttctgctgggggaacccgcccccagtatttcaacgtaggttctttctgttttccctaagtgttggctggtctgagaaaaaagagaaagagtacaaagagaggaattttacagctgggcctccggggatgacatcacatattggtaggtccatgatgtcctgagccgcaaaaccagcaggttttta

SEQ ID NO: 129822 - DNA, 429 bp, Homo sapiens
atgagggctctggattggaattgattaatatacattcatgggttaatggattaatgcattatcattggaatgggactggtggctttataagaaaaggaagagagacttgagctagcacattcagcccccttgccatgtgatgccctgtgccacctcaggactctgcagagtcctcacagcaagcaggtcctcaccacatgtggccccttgaccttggactttccagcttctagaactgtaagaaatgtatatttttctttataaattatccagtttcagatattctgttataaacaacggaaaacagactaagacactattctatccaaactcaagtgacatactgacagcatttgttcaaatcttggatttggggactccttgctctaggtcccatgtctgtgaggggaagtacttgactagaattag

SEQ ID NO: 129823 - DNA, 330 bp, Homo sapiens
ctatcctgaaactacaaaatgtacatgagaggaagaaaggaaggaaaggaaatggagaggtatcctgtgttcataaggtcaagattgtacatagtaaagatatagatttatttcatattgatctgtaagtttatttcaatttgtatcaaaatttcagtaagtttatttttagatatcgatgtttattctgaattgtatagaaagtcaaaggaccaacaatagataaaatatttctgaaaaaaataaatgaagtgggagaaatcactctcaataatgttacgacttactgtgcagctgctatagtcaagacgctgtgatcacaatagagaa

SEQ ID NO: 129824 - DNA, 298 bp, Homo sapiens
taaatggctgggtccatagtaagcactcaggagattatttagtgctatgattttttattattagtattctgtccagaggtaacagaatctgatgaagattctgccagctggtcaagttacctacacataagagcaaggctatattttctttttcttttttcttttctttgagacggagtctcactctgtcgtctaggctggagtgcaggggtgcaatcagctcacggcaacctccacctcccaggttccagcgattctcctgcctcagcctcccacgtagccaggactacaggtgcct

SEQ ID NO: 129825 - DNA, 266 bp, Homo sapiens
gcctggggtaattggggaggggcactggtgtcagtcttggagtccaaaggctggagagcctggagttgtgatgtcctgttcaagggcagaagaagggtgacccagctccaggagagagagagaattcaccatttcttcatctttttctacctgggcccccagtggatggatggttcctgctgacattgagggagaatcttcccactcactccacagactcatgctaaactcttctcaaaacaccttcacacagacacccagaaatc

SEQ ID NO: 129826 - DNA, 345 bp, Homo sapiens
ccgcctcctgggttcaagctattctcctgcctcagcctcccaagtagctgggactacaagcgtgcaccaccatgcccagctagttttttttgtatttttagtgagacggggtttcaccatgttggccaggatggtctcaaactcttgacctcatgatctgcccacctcggcctcccaaagtgctgggattacaggcgtgagccaccaagcctggctagcagtccccaagttttaaggaagcactgaactccatgacaggtttagtgcacagtgaacatctttcacacgagaagatcagaagatagccaccgcacctttgatccccggttctccactggcttgcag

SEQ ID NO: 129827 - DNA, 279 bp, Homo sapiens
cactttgctcaagctcccagcttggccattggtgctcctccatcctgcagtcctaccccttagcctgccacagcccttgacttttcaggcccaccttcagccaggcctcactctcctacttctggccaggctgttgcccaaattgccatctccagtgggtagaagactatttatagctcccactgcaaattggttcggagactgaacgctggtctcctgaaatagacctttagtgtggacagagctcatggcaaaccttcttgggtgtagggtactcag

SEQ ID NO: 129828 - DNA, 537 bp, Homo sapiens
ttctagaggatccctcaacggcaggttgtactgggtacatttcccctgatctcgtgttctggcctgtaccactgtcctgagaccacctttcctgcatctgtcatgactctggtcccacctgtgctagccccaggcccctgctcctattgttcaaccccgtccctgggagcaccactccttcccagggctctgggtctctgctcccggggcttgggaacatgcatgtccttggtgagaagaccacataaaagggcatggcctacttccaggagcctccctgattcccacttcgagataaaaataataaacacacacacatacagagggcggagagtgaggggggaattaagtggtgtagaagctaaggcacaaggatttacaaagcacagggctgcggtaacctggcaacctacgaaaggtgtgtcagaatgagtaggatgcaaatagacaagcaccagggctgggaacagtcagggctggacgggggaaggtcacaacgtgctggcctggttccttgtggcgctgagctgaggaggg

SEQ ID NO: 129829 - DNA, 825 bp, Homo sapiens
tgataaaagccagcatctccttatgataaaaaccctcaactaggcataaagaaacatacctcaaaataataaaaaccatatatgacaaacccacagccaacatcatattgaatgggacagagttaaaagcattccccctaagaactggaacaagataggaatgcctactttcaccatttctattcaacatagtacttgaagacttagcccgagctatcaggcaagagacggaaataaaggacatccaaattggaaaagaggaagccaaactatctctgtatgctgattatatgatcttatacctagaaaacccttaagactcctccaaaacactcctagatctaataaatgaattaagtatcaggttacaaaatcaatgtacagaaatcagtaacactgctatacaccaacaatgaacaggttaataatcaaatcaagaacacaatccgtttttacaatagctataaaaaaaaaaaaaaaagccccaagcctaggaatatacttaaccaagtaggtgaaagatctctacaaggagaactgcaaaacactgctgaaataataaaacaaatggaaatacatccatgctcagggattgaaagaataatattgtgaaaatgaccatactgcctaaagcaatcctatgaaattcctatgaaaataccaatatcattttcacagaattaggaaaaacaatcctcaaatttatatggaaccaaaaagcccaaattgctaaaacaatcctaagcaaaaagcataagtctggaagcattacattacctgacttcaaatcatactacaaggctgtagtaatccaaactgcatggt

SEQ ID NO: 129830 - DNA, 473 bp, Homo sapiens
taccatgccgtacccattaactatgtcttcttgccttcctcttgtctaaaacaagtgaaatttctttactcatccttctatgaaaaaacaaaaaacaaacaaaaaaaaaacactcttcccaattcattggtagctccagaatttctacacaggatgacccagaggcagtaattttgttggaaagacatgccaaagaacatatcttgagtctgtcttgcagagcagatgctgtgtttttgtttagtgttggcttctgtagggtggcctggaaggagtggtgtgctaattagctcagtcacagtcctgtgggctagtttttgtttgtttgtttgtttgcttgccactccagactttttctccactcttccctaccttgtcctgtacccaaagagggtgatttctgtgggctgtttactcaaagtcccttgtccccctgtaagaaaaccacaaggttggatcaaagagagacagag

SEQ ID NO: 129831 - DNA, 552 bp, Homo sapiens
gtcatgtctaggctcaccccgatgcagtccagtcatgcttcccctatgacttagttgtttgtattgtccccagagtcaagagtgtcccaagtctatgaatcttgctccagagcattgtaatttagcctacggccttgttcacacaaataaatctggcattagttccagctggcagtgatatgggcttggtgattcacttttaggcctcattggagtagagttaaagaaacttcattgtcagaaagagtgagatctctaccatgtgtcttctaagagtgttcagagtgttttttttttttagcgtgcagaagtcctaactttattcctagtaccctccattctctcttttttttattgaaacataagaattgtgcatatttacagggtacatgtgatatttttatacatgtatacaatgtgtaataatcaaatcagagtaattaggttatcagttacctcaaacatttatcctttgtttgtgctgggaacattccaaatctcttcttctagctattttgcaatataaaataaattactattgccaccttatga

SEQ ID NO: 129832 - DNA, 233 bp, Homo sapiens
agggctccaacctaacccttcctttctttcactttagatacactccctggactatctcattcacatctttggattcatttacaaacataagctatggtatctctatctctaatttagatgtgtttcctgagctccagatctacatagccaagagacaactgtaatctaacaggaacctcaaatgcaatacaaccaaaactcaagattgaattcaacatctcccccaccaacct

SEQ ID NO: 129833 - DNA, 383 bp, Homo sapiens
acacagtggctcactgtgctgagacaaagtggaagctgccagtactcttaaagacaggcctcagcactggcattgggtcacttctgatgtactcttttgggcaaagcaatcacaggccagcacaggtccaaggagagaggaaatagactcaacctcttggtaggagtcgtagcaaagattttgtggccagtgattcagttgcagttatctgctgctacctagcaaactaccctcaaaacacagaatcttaaaactacaatttattaacatctttcacaagtttgtgcattgcctagactcagctcagtgtttctcacttgaggttcctcattctgctcagttagttggaggctggggttagagtcctctgaaggctctagcgg

SEQ ID NO: 129834 - DNA, 179 bp, Homo sapiens
cacctctgtggcatacagtgtgttgaattgaaacaaagaagcaaaatgagctttcataaagtgactcagactaggtattattttaacgactttttacaaattatgtgagcaatcttcagtttgttcaagggtattttagttttcttggacttaaataaagtttctatttcagaatcatt

SEQ ID NO: 129835 - DNA, 456 bp, Homo sapiens
gcctgggtaacagagtgagacgctatctccaaaaaaaataataataataaaataaaaataaaacaaacaacaaaaaaaaggagaagaaaataaatataccataatgttgaaatataaaaatatagggggttctttctaaatgccaaacttcttagtttgcagaaagaaagggcatgtttccatgcaataagtttataaagcaaatagcatgttcaagtacaaaagactctttcatgaactgcggatgaaccttctgagtgctggacataatctcaagatttaaagttggtttacttaatatatcttctagaatacaatctttaggaaaatgttttggcatcccattcataattctctgtctagtctaaaccatagatacttattgctaatgtcatataaagctgtgtgtgtgtgtgtgtgtgtgcacgtgcacatacatgtgcctgtttgcacata

SEQ ID NO: 129836 - DNA, 263 bp, Homo sapiens
gaatataaccgtgtttggagataagatctttaaagaggtaattaagttaaaacatgctgctagggtgtaccctaatccaattcgcctggtctccttagaagaagagaagattaggacacacacagagatcccagggatgtgcacatgcagaggaaagaccatgtgagcacagtgattgtcacgaagaggccacgggagaaaccggcaccccactcttggatatctggccttcaaaactgtaacaaaatgagtatctgctgctt

SEQ ID NO: 129837 - DNA, 3942 bp, Homo sapiens
  misc_feature (2882)..(2882): n is a, c, g, or t
aacggtcgacggtggccgatagtggtcctactgtcgtgggactgctctgcgcgctcccggtggggcgcgcctgcgcattatgctggtctccatggcggggcctcggagccaagacgagagaaaatgctgctgtgaagacccaattaaagctttcacataaatgaagctacagctatcatgatttagtgcccccaaaaggaagaacttcagtggacaagaaaggacatttctgggggtagtagaatgcttgaggcctggaatttaaacctgagccactatctgaagctattaaataatagaagaaaatggaattgaatatgatgtcagcatggaacaatctaatgattcattaagagtcaaccataatgacggtgaagagtcaaaaaccagtgctcaagtatttgagcatctaatctgtatggactccagggattcttcctttggacaaaatgattctcctacagttttgcccatcactactcgtgaagcaaataattcactcatatcacagaatataccagggcccctgactcagacacagactctttctgcagagcaattccatctagtggaccaaaatgggcaggctattcaatatgaacttcagtcattgggggaatccaatgcacaaatgatgatcgttgccagcccaacagaaaatggacaggtacttcgtgtaattccacctacccagacaggaatggcacaagtgattatacctcaggggcaacttgtggatgtgaatagtcctcgggatgtccctgaagagaaacccagtaacagaaacttaccaactgtaagagtggatactctagcagacaataccagcaattacattcttcatcctcaaacatccttcccattgcccaaaaagtcagtgaccggaatgctggaagaaccccttctggggcctcttcagccactttcttctaatacacctatatgggcctgccgtcttaggagctgtgagaaaattggagattcataccgtggctactgtgtaagtgagactgaattagaaagtgtcctaacatttcacaagcagcaaacacagagtgtttgggggacccgtcagtctccaagcccagccaagcctgctacacgcttgatgtggaaatcccagtatgttccatatgatggaatcccatttgttaatgcagggagtagagctgtggtaatggagtgtcagtatgggccaagaagaaaaggtttccagttaaaaaaagtcagtgagcaggaaagcaggtcttgtcagctctacaaagccacttgtccagctcggatttacattaaaaaggtacagaagtttcctgaatatagagttcctacagaccccaaaattgacaagaaaattatcagaatggagcaggagaaagcttttaacatgctaaagaagaacttggtagatgctggtggtgttcttaggtggtatgtacagttacctacacagcaagctcatcagtatcatgaattagagactccctgcctcactttgtcaccttctccttttcctgtgtcttctcttgaagaagaggaaactgcagttagagatgagaattgtgcattaccctcacgtttacatcctcaagtagcacataagattcaagaattagtatcacagggaatagaacaagtgtatgcagtaaggaaacagctaagaaaatttgtggaaagggaactgttcaaacccgatgaggtacctgaaagacataatttatctttttttccaactgtaaatgatataaaaaatcacatccatgaggtacagaaatccttgagaaatggagatacggtatataactcagagattattccagcaacgcttcaatggactacagacagtgggaatattctcaaagagaccatgacagttacatttgcagaaggaaattcaccaggagaatcaattaccaccaaagtggaaacaaatcagaccaggggttctttgtctcctgagccaacccacttgctctcctcactctcctcatttcagcccaaaatatttacacaactacagggtttgcagttacaaccaaggtacacctctcctgatgaatcaccagctgtggtatcagtaaataaccagccgtcctctagtccttcaggacttctggatacaataggaagtgctgtaatgaataataattctctactgcttggtcaaagtcatagccttcaaagagatacatgcttaacccaaaacaatagtactgcctccaccatgggtaaccttccagaaccagatcaaaatctagttgcaatggacgagctggtagaagttggagatgttgaggatacagggaatctggaaggaactgttcatcggattctgttgggagatgtgcagactattccaatacagattatagacaaccactcagctcttattgaagaaaatccagaaagtaccatttctgtgagccaagttaaacaagaacccaaagaaccagcattgtctatggaagcaaaaaaactgtggactataagaaattatctgctacataaattattgaagcttttcagaatttacaactctggtgacttctgatgtcttagaaaggaaggtgaatatagtcaaagcgtggcattgagataattggactgaagaccagtttgatgagaagcttttatttaaaactgatatatttgttgccagttccatatttttaccttccttaagagatgttttactcttcttattttgtataatttttatgctctttgattatctaataaggccagtatttcaaaagctgttctgaatttatccacagtaatatagtctgaacacaaatagtttacttaacttatccttggaaatattcaattttggttattacaaaacagaaaagaacaacagcaacaaaaacattgtgtgaatntatgtttgtatgtgtgtatgtatatcatgaattttttttttaagttctgaaaaagaacttgttctctccttaaagttgtgaagaaattgttaattgccagacaggtaagaaaatgtttataatctatctcattaagaaagatgaagtattagattttacatcataacacaaagtccagcagctacatctgtggaaactgtgcagttgcattttagcctcttcccttccaatttttgtacttttaactacaaaccagtagtatactaatggttatctaatagaaatttaaagtgtcttggtaagtactgagaatttttacttgaattaatcagataagcaacagaaatcaacatatgtagcatggatttgtgctatattggaagtaaaacactataggcagaaagatgtagaaattaagagaattgaaaaagaataatagaattccttggtgtttacagataatttggaaaactttttgatgacagcagaggattttttcccccttattttgtaatgaagatccagcactggttaaaaaataatttgatttgtagttacatttttctatgccagagctcttactgaattgatgatattaggatttctagtattttaaggtaagtatttatagtttaaaatttagtttatatttaaaactttaaaacatctgatctgggatttttttgttaagtaagtatattaacttcaaataccaaattactactaagcagtatattgattataagcatctgttgtctaaagattggtactaggctggacatggtggctcacacctgtaatcacaatactttgggaggctgaggtgggtagataacctgaggtcaggagttcgagaccagcctggccaacgtggtgaaaccctgtttctactaaaaatacaaaaattagctgggtgtggtggtgggcacctgtaatcccagctacttgggaggctaaggcaggagaatcgcttgaacaccggaggcggaggttgcaatgagccgagatcgcgccattgcactccagcctgggtgacaagagaaaaactccatctcaaaaa

SEQ ID NO: 129838 - DNA, 2573 bp, Homo sapiens
aacggtcgacggtggccgatagtggtcctactgtcgtgggactgctctgcgcgctcccggtggggcgcgcctgcgcattatgctggtctccatggcggggcctcggagccaagacgaggttgagtagactcgttttgaattttctcccctctgctccggcggacttcccatgtcgccttgtggggctatcggcggcggcaggactgggggagtcagaggtctggcagcgctgtctgcgcagacctaccggacgctacctcccaacccccctgtcttcctcctgcctcctcctcctcccgtcacctcctgacccgccggagctccgagcaactgccggcctccgcctccagccgcagccggtcactggcggcgccttccgcgccaagcttgggggccttttcggggtcccacatggcacggcttccgacccccggcccgggacggggctcgcaggccccagaggggcaggctggagaaggaggaggttaggtgtcttcaggagggttgctgagcccaaggacgcgccatcgccgcggagaaggagccggaccccttgggcggagcgcccaatgtgtggtccctcacgccgtcccgcaccttgctttttagggttctttttccgctttctgagcccttttataccttacgtttagaaggggaaaatcatcctcccacaccttctccccgactttttgccttttttgtcttgaagttacccaaaggcctgtgtattgttctcaatggtcccaagaattactctaatatagttgtttttctgagggaggatggatggagataactatcctgatcccaatgtcactttttaaggcattcgcttcaagagacaagcagtttagaatcaggcagaactggattgcaaaatttatgggcagaccggtatgtgtgcaggtgaagacaaagctttccttttttacgttgtttaaagatgtcctactgtaaggtagacgcctaatgtttaaatgaacgcctaatatttaaatagagaatgagaagagatttaaacaattggaagaaaaaataatttttattagagagcaatgacaataaaagtaggactcttttcagtttactcacctttgtagctccgaatccgggccctggaaccagaattcctgggttcaaatcctgcctctgctacttgattaacctttttgtgccacacttttatcaactataagaattaactgcggcatcggaagcactcagtatatgttaattattatcatcaaatagttactaattccagtttaactagaagctttgccagcgtgaatagataagggagaatagccacattgagtggaggaataaaattagaaaacctctgtgctgaagtcccaggagatcacttattaggcttgagcttgctaatggaagtggtgatcgtttaaccatgtggttattgtagtggtgaggatttacacattaaataagtcttgggcatctgaagcttgaaacactttcttaatgaaatcttgccgttgaatctgtacttactggtaatatgtcattggttaaaatatatttataaaatgtataattgaccagcaggttaatacatttttatcattaatttaaatttatcaaaatgagaatatacagtacctgacagtagagtttgatcttaatttgatttgaaaattatgatcaggaaaataacctgaatatatgcttaataatataagactttcagtttgcaaaacagaaatcctgacttgactaaaatacacttttcatttgacggagacctttagttaaggaaagattagttttagcattcaacataactaaatacccagcattatgttttacggtttttttcaacaatgatttatgtgtcgtgtttggtgttgcctccaaacagtacctaggatagctgatgcttttactttgagtctttttctttagttggaacattaattgcaagcttttggttggtaatcattttttatgggatgtatttactatatggtcctcatggagacacattgttatctggagaaccacagtttggaaaatacatttctctttattataaagttttttgttttatatatataatgccacagtgtgataggatacaaagactaagcattagggctttggagtcttaattgttctttgtgtttttctttttttccaatttgattatggatccaagcctaatgcactctgtgatcttaagcaagtttcttgacagttccagttttcttatctacaaacagagacaagaagatctacctcagagtcattgtaaggattaaataaatttgtaaagctctcaaagagcagcctaatcccagcattttgggtggctgaggcgggtggagcacctgaggtcaggagtttgagaccagcctggccaacatggtgaaaccccgtctctgctaaaaatacaaaaattggccaggcatggtggggggtgcctataatccgagctactggggaggctgaggcaggagaattgcttgaacctggaaggtggagtttgcagtgagccaagatcacgccacttcactccagcctgggcaaaaagagtgaaactccatctc

SEQ ID NO: 129839 - DNA, 2037 bp, Homo sapiens
  misc_feature (1762)..(1762): n is a, c, g, or t
  misc_feature (1838)..(1838): n is a, c, g, or t
  misc_feature (1941)..(1941): n is a, c, g, or t
aacggtcgacggtggccgatagtggtcctactgtcgtgggactgctctgcgcgctcccggtggggcgcgcctgcgcattatgctggtctccatggcggggcctcggagccaagacgagagaaaatgctgctgtgaagacccaattaaagctttcacataaatgaagctacagctatcatgatttagtgcccccaaaaggaagaacttcagtggacaagaaaggacatttctgggggtagtagaatgcttgaggcctggaatttaaacctgagccactatctgaaggtttaatatatctttgccaagtccaagggtacaaagattttctcctgtgttttcttctagaagttttatcatttgatagtctgtgatccatttcaagttgatttgctatctggtgtgagatgatcgttgccagcccaacagaaaatggacaggtacttcgtgtaattccacctacccagacaggaatggcacaagtgattatacctcaggggcaacttgtggatgtgaatagtcctcgggatgtccctgaagagaaacccagtaacagaaacttaccaactgtaagagtggatactctagcagacaataccagcaattacattcttcatcctcaaacatccttcccattgcccaaaaagtcagtgaccggaatgctggaagaaccccttctggggcctcttcagccactttcttctaatacacctatatgggcctgccgtcttaggagctgtgagaaaattggagattcataccgtggctactgtgtaagtgagactgaattagaaagtgtcctaacatttcacaagcagcaaacacagagtgtttgggggacccgtcagtctccaagcccagccaagcctgctacacgcttgatgtggaaatcccagtatgttccatatgatggaatcccatttgttaatgcaggtacttttttaaagaattattttaaaaggttcagcagcagccatagtccattgtcaaaatgtgattttcctaaggtgataacatttttattttggtagctgacaattgaatgctaattgattaaaatgcatattaaattgaaaaaacttatagaaaatataatcaattactttataatattgcattttaatatatcaatgaataaataagacttctttcatatattatactgaaaaataaaatatcgaagtttccattaaacctatttaataaaatgttaaaagagcaattttattttaaatatgtacatcagctgtgtttttccccttcagattaaatattttagccttctctcttaatttgtattgtgggagaaatttatgtctattttatgtagcttgtaactctggagttactgtatagaatttgtatacaatctagagttatagaattctgatactaaagttctcaagcattaggtatgttatatacagtattctcagacactgggttagttgtttactaagggagtagagtttcaagcaaatctcttagactagttagagccccaaagaatctaaaactaagcgatttattttaggactatgagggcactaatttagctgaaagagttgcagtttcatcctggacctctgaggttaatgagatatacttaagatgagataaatgtaaccacttctgcctgagtttcatcagtattctataaaagaaatgcagcattaaaaataaatgagctgggttatttatatatttatttatttattttaaacgtggaggctcatgcctctaatctcagcactttgggaggccnaggcgagaggattgcttgagctcacgagtttgagacccacctgggcaaaacagggagacctcatctttacaaaaantaataaattacctggacatggtggcatggggctgtagtcccagctatttgggaagctgaggtggaaggatcacttgacccttggaggtcgaggctgcagtganccgtgatcatgccactgaacttcagcctgggtgacagagtaagaccctgtctttaaaaaaaaaaaattaacaaataataaaatgaacttgaaatcc

SEQ ID NO: 129840 - DNA, 4840 bp, Homo sapiens
  misc_feature (3780)..(3780): n is a, c, g, or t
aacggtcgacggtggccgatagtggtcctactgtcgtgggactgctctgcgcgctcccggtggggcgcgcctgcgcattatgctggtctccatggcggggcctcggagccaagacgaggttgagtagactcgttttgaattttctcccctctgctccggcggacttcccatgtcgccttgtggggctatcggcggcggcaggactgggggagtcagaggtctggcagcgctgtctgcgcagacctaccggacgctacctcccaacccccctgtcttcctcctgcctcctcctcctcccgtcacctcctgacccgccggagctccgagcaactgccggcctccgcctccagccgcagccggtcactggcggcgccttccgcgccaagcttgggggccttttcggggtcccacatggcacggcttccgacccccggcccgggacggggctcgcaggccccagaggggcaggctggagaaggaggaggttaggtgtcttcaggagggttgctgagcccaaggacgcgccatcgccgcggagaaggagccggaccccttgggcggagcgcccaatgtgtggtccctcacgccgtcccgcaccttgctttttagggttctttttccgctttctgagcccttttataccttacgtttagaaggggaaaatcatcctcccacaccttctccccgactttttgccttttttgtcttgaagttacccaaaggcctgtgtattgttctcaatggtcccaagaattactctaatatagttgtttttctgagggaggatggatggagataactatcctgatcccaatgtcactttttaaggcattcgcttcaagagacaagcagtttagaatcaggcagaactggattgcaaaatttatgggcagaccgagaaaatgctgctgtgaagacccaattaaagctttcacataaatgaagctacagctatcatgatttagtgcccccaaaaggaagaacttcagtggacaagaaaggacatttctgggggtagtagaatgcttgaggcctggaatttaaacctgagccactatctgaaggtttaatatatctttgccaagtccaagggtacaaagattttctcctgtgttttcttctagaagttttatcatttgatagtctgtgatccatttcaagttgatttgctatctggtgtgagctattaaataatagaagaaaatggaattgaatatgatgtcagcatggaacaatctaatgattcattaagagtcaaccataatgacggtgaagagtcaaaaaccagtgctcaagtatttgagcatctaatctgtatggactccagggattcttcctttggacaaaatgattctcctacagttttgcccatcactactcgtgaagcaaataattcactcatatcacagaatataccagggcccctgactcagacacagactctttctgcagagcaattccatctagtggaccaaaatgggcaggctattcaatatgaacttcagtcattgggggaatccaatgcacaaatgatgatcgttgccagcccaacagaaaatggacaggtacttcgtgtaattccacctacccagacaggaatggcacaagtgattatacctcaggggcaacttgtggatgtgaatagtcctcgggatgtccctgaagagaaacccagtaacagaaacttaccaactgtaagagtggatactctagcagacaataccagcaattacattcttcatcctcaaacatccttcccattgcccaaaaagtcagtgaccggaatgctggaagaaccccttctggggcctcttcagccactttcttctaatacacctatatgggcctgccgtcttaggagctgtgagaaaattggagattcataccgtggctactgtgtaagtgagactgaattagaaagtgtcctaacatttcacaagcagcaaacacagagtgtttgggggacccgtcagtctccaagcccagccaagcctgctacacgcttgatgtggaaatcccagtatgttccatatgatggaatcccatttgttaatgcagggagtagagctgtggtaatggagtgtcagtatgggccaagaagaaaaggtttccagttaaaaaaagtcagtgagcaggaaagcaggtcttgtcagctctacaaagccacttgtccagctcggatttacattaaaaaggtacagaagtttcctgaatatagagttcctacagaccccaaaattgacaagaaaattatcagaatggagcaggagaaagcttttaacatgctaaagaagaacttggtagatgctggtggtgttcttaggtggtatgtacagttacctacacagcaagctcatcagtatcatgaattagagactccctgcctcactttgtcaccttctccttttcctgtgtcttctcttgaagaagaggaaactgcagttagagatgagaattgtgcattaccctcacgtttacatcctcaagtagcacataagattcaagaattagtatcacagggaatagaacaagtgtatgcagtaaggaaacagctaagaaaatttgtggaaagggaactgttcaaacccgatgaggtacctgaaagacataatttatctttttttccaactgtaaatgatataaaaaatcacatccatgaggtacagaaatccttgagaaatggagatacggtatataactcagagattattccagcaacgcttcaatggactacagacagtgggaatattctcaaagagaccatgacagttacatttgcagaaggaaattcaccaggagaatcaattaccaccaaagtggaaacaaatcagaccaggggttctttgtctcctgagccaacccacttgctctcctcactctcctcatttcagcccaaaatatttacacaactacagggtttgcagttacaaccaaggtacacctctcctgatgaatcaccagctgtggtatcagtaaataaccagccgtcctctagtccttcaggacttctggatacaataggaagtgctgtaatgaataataattctctactgcttggtcaaagtcatagccttcaaagagatacatgcttaacccaaaacaatagtactgcctccaccatgggtaaccttccagaaccagatcaaaatctagttgcaatggacgagctggtagaagttggagatgttgaggatacagggaatctggaaggaactgttcatcggattctgttgggagatgtgcagactattccaatacagattatagacaaccactcagctcttattgaagaaaatccagaaagtaccatttctgtgagccaagttaaacaagaacccaaagaaccagcattgtctatggaagcaaaaaaactgtggactataagaaattatctgctacataaattattgaagcttttcagaatttacaactctggtgacttctgatgtcttagaaaggaaggtgaatatagtcaaagcgtggcattgagataattggactgaagaccagtttgatgagaagcttttatttaaaactgatatatttgttgccagttccatatttttaccttccttaagagatgttttactcttcttattttgtataatttttatgctctttgattatctaataaggccagtatttcaaaagctgttctgaatttatccacagtaatatagtctgaacacaaatagtttacttaacttatccttggaaatattcaattttggttattacaaaacagaaaagaacaacagcaacaaaaacattgtgtgaatntatgtttgtatgtgtgtatgtatatcatgaattttttttttaagttctgaaaaagaacttgttctctccttaaagttgtgaagaaattgttaattgccagacaggtaagaaaatgtttataatctatctcattaagaaagatgaagtattagattttacatcataacacaaagtccagcagctacatctgtggaaactgtgcagttgcattttagcctcttcccttccaatttttgtacttttaactacaaaccagtagtatactaatggttatctaatagaaatttaaagtgtcttggtaagtactgagaatttttacttgaattaatcagataagcaacagaaatcaacatatgtagcatggatttgtgctatattggaagtaaaacactataggcagaaagatgtagaaattaagagaattgaaaaagaataatagaattccttggtgtttacagataatttggaaaactttttgatgacagcagaggattttttcccccttattttgtaatgaagatccagcactggttaaaaaataatttgatttgtagttacatttttctatgccagagctcttactgaattgatgatattaggatttctagtattttaaggtaagtatttatagtttaaaatttagtttatatttaaaactttaaaacatctgatctgggatttttttgttaagtaagtatattaacttcaaataccaaattactactaagcagtatattgattataagcatctgttgtctaaagattggtactaggctggacatggtggctcacacctgtaatcacaatactttgggaggctgaggtgggtagataacctgaggtcaggagttcgagaccagcctggccaacgtggtgaaaccctgtttctactaaaaatacaaaaattagctgggtgtggtggtgggcacctgtaatcccagctacttgggaggctaaggcaggagaatcgcttgaacaccggaggcggaggttgcaatgagccgagatcgcgccattgcactccagcctgggtgacaagagaaaaactccatctcaaaaa

SEQ ID NO: 129841 - DNA, 4719 bp, Homo sapiens
  misc_feature (3659)..(3659): n is a, c, g, or t
aacggtcgacggtggccgatagtggtcctactgtcgtgggactgctctgcgcgctcccggtggggcgcgcctgcgcattatgctggtctccatggcggggcctcggagccaagacgaggttgagtagactcgttttgaattttctcccctctgctccggcggacttcccatgtcgccttgtggggctatcggcggcggcaggactgggggagtcagaggtctggcagcgctgtctgcgcagacctaccggacgctacctcccaacccccctgtcttcctcctgcctcctcctcctcccgtcacctcctgacccgccggagctccgagcaactgccggcctccgcctccagccgcagccggtcactggcggcgccttccgcgccaagcttgggggccttttcggggtcccacatggcacggcttccgacccccggcccgggacggggctcgcaggccccagaggggcaggctggagaaggaggaggttaggtgtcttcaggagggttgctgagcccaaggacgcgccatcgccgcggagaaggagccggaccccttgggcggagcgcccaatgtgtggtccctcacgccgtcccgcaccttgctttttagggttctttttccgctttctgagcccttttataccttacgtttagaaggggaaaatcatcctcccacaccttctccccgactttttgccttttttgtcttgaagttacccaaaggcctgtgtattgttctcaatggtcccaagaattactctaatatagttgtttttctgagggaggatggatggagataactatcctgatcccaatgtcactttttaaggcattcgcttcaagagacaagcagtttagaatcaggcagaactggattgcaaaatttatgggcagaccgagaaaatgctgctgtgaagacccaattaaagctttcacataaatgaagctacagctatcatgatttagtgcccccaaaaggaagaacttcagtggacaagaaaggacatttctgggggtagtagaatgcttgaggcctggaatttaaacctgagccactatctgaaggtttaatatatctttgccaagtccaagggtacaaagattttctcctgtgttttcttctagaagttttatcatttgatagtctgtgatccatttcaagttgatttgctatctggtgtgagcatctaatctgtatggactccagggattcttcctttggacaaaatgattctcctacagttttgcccatcactactcgtgaagcaaataattcactcatatcacagaatataccagggcccctgactcagacacagactctttctgcagagcaattccatctagtggaccaaaatgggcaggctattcaatatgaacttcagtcattgggggaatccaatgcacaaatgatgatcgttgccagcccaacagaaaatggacaggtacttcgtgtaattccacctacccagacaggaatggcacaagtgattatacctcaggggcaacttgtggatgtgaatagtcctcgggatgtccctgaagagaaacccagtaacagaaacttaccaactgtaagagtggatactctagcagacaataccagcaattacattcttcatcctcaaacatccttcccattgcccaaaaagtcagtgaccggaatgctggaagaaccccttctggggcctcttcagccactttcttctaatacacctatatgggcctgccgtcttaggagctgtgagaaaattggagattcataccgtggctactgtgtaagtgagactgaattagaaagtgtcctaacatttcacaagcagcaaacacagagtgtttgggggacccgtcagtctccaagcccagccaagcctgctacacgcttgatgtggaaatcccagtatgttccatatgatggaatcccatttgttaatgcagggagtagagctgtggtaatggagtgtcagtatgggccaagaagaaaaggtttccagttaaaaaaagtcagtgagcaggaaagcaggtcttgtcagctctacaaagccacttgtccagctcggatttacattaaaaaggtacagaagtttcctgaatatagagttcctacagaccccaaaattgacaagaaaattatcagaatggagcaggagaaagcttttaacatgctaaagaagaacttggtagatgctggtggtgttcttaggtggtatgtacagttacctacacagcaagctcatcagtatcatgaattagagactccctgcctcactttgtcaccttctccttttcctgtgtcttctcttgaagaagaggaaactgcagttagagatgagaattgtgcattaccctcacgtttacatcctcaagtagcacataagattcaagaattagtatcacagggaatagaacaagtgtatgcagtaaggaaacagctaagaaaatttgtggaaagggaactgttcaaacccgatgaggtacctgaaagacataatttatctttttttccaactgtaaatgatataaaaaatcacatccatgaggtacagaaatccttgagaaatggagatacggtatataactcagagattattccagcaacgcttcaatggactacagacagtgggaatattctcaaagagaccatgacagttacatttgcagaaggaaattcaccaggagaatcaattaccaccaaagtggaaacaaatcagaccaggggttctttgtctcctgagccaacccacttgctctcctcactctcctcatttcagcccaaaatatttacacaactacagggtttgcagttacaaccaaggtacacctctcctgatgaatcaccagctgtggtatcagtaaataaccagccgtcctctagtccttcaggacttctggatacaataggaagtgctgtaatgaataataattctctactgcttggtcaaagtcatagccttcaaagagatacatgcttaacccaaaacaatagtactgcctccaccatgggtaaccttccagaaccagatcaaaatctagttgcaatggacgagctggtagaagttggagatgttgaggatacagggaatctggaaggaactgttcatcggattctgttgggagatgtgcagactattccaatacagattatagacaaccactcagctcttattgaagaaaatccagaaagtaccatttctgtgagccaagttaaacaagaacccaaagaaccagcattgtctatggaagcaaaaaaactgtggactataagaaattatctgctacataaattattgaagcttttcagaatttacaactctggtgacttctgatgtcttagaaaggaaggtgaatatagtcaaagcgtggcattgagataattggactgaagaccagtttgatgagaagcttttatttaaaactgatatatttgttgccagttccatatttttaccttccttaagagatgttttactcttcttattttgtataatttttatgctctttgattatctaataaggccagtatttcaaaagctgttctgaatttatccacagtaatatagtctgaacacaaatagtttacttaacttatccttggaaatattcaattttggttattacaaaacagaaaagaacaacagcaacaaaaacattgtgtgaatntatgtttgtatgtgtgtatgtatatcatgaattttttttttaagttctgaaaaagaacttgttctctccttaaagttgtgaagaaattgttaattgccagacaggtaagaaaatgtttataatctatctcattaagaaagatgaagtattagattttacatcataacacaaagtccagcagctacatctgtggaaactgtgcagttgcattttagcctcttcccttccaatttttgtacttttaactacaaaccagtagtatactaatggttatctaatagaaatttaaagtgtcttggtaagtactgagaatttttacttgaattaatcagataagcaacagaaatcaacatatgtagcatggatttgtgctatattggaagtaaaacactataggcagaaagatgtagaaattaagagaattgaaaaagaataatagaattccttggtgtttacagataatttggaaaactttttgatgacagcagaggattttttcccccttattttgtaatgaagatccagcactggttaaaaaataatttgatttgtagttacatttttctatgccagagctcttactgaattgatgatattaggatttctagtattttaaggtaagtatttatagtttaaaatttagtttatatttaaaactttaaaacatctgatctgggatttttttgttaagtaagtatattaacttcaaataccaaattactactaagcagtatattgattataagcatctgttgtctaaagattggtactaggctggacatggtggctcacacctgtaatcacaatactttgggaggctgaggtgggtagataacctgaggtcaggagttcgagaccagcctggccaacgtggtgaaaccctgtttctactaaaaatacaaaaattagctgggtgtggtggtgggcacctgtaatcccagctacttgggaggctaaggcaggagaatcgcttgaacaccggaggcggaggttgcaatgagccgagatcgcgccattgcactccagcctgggtgacaagagaaaaactccatctcaaaaa

SEQ ID NO: 129842 - DNA, 4001 bp, Homo sapiens
  misc_feature (2941)..(2941): n is a, c, g, or t
aacggtcgacggtggccgatagtggtcctactgtcgtgggactgctctgcgcgctcccggtggggcgcgcctgcgcattatgctggtctccatggcggggcctcggagccaagacgagagaaaatgctgctgtgaagacccaattaaagctttcacataaatgaagctacagctatcatgatttagtgcccccaaaaggaagaacttcagtggacaagaaaggacatttctgggggtagtagaatgcttgaggcctggaatttaaacctgagccactatctgaagaagttttatcatttgatagtctgtgatccatttcaagttgatttgctatctggtgtgagctattaaataatagaagaaaatggaattgaatatgatgtcagcatggaacaatctaatgattcattaagagtcaaccataatgacggtgaagagtcaaaaaccagtgctcaagtatttgagcatctaatctgtatggactccagggattcttcctttggacaaaatgattctcctacagttttgcccatcactactcgtgaagcaaataattcactcatatcacagaatataccagggcccctgactcagacacagactctttctgcagagcaattccatctagtggaccaaaatgggcaggctattcaatatgaacttcagtcattgggggaatccaatgcacaaatgatgatcgttgccagcccaacagaaaatggacaggtacttcgtgtaattccacctacccagacaggaatggcacaagtgattatacctcaggggcaacttgtggatgtgaatagtcctcgggatgtccctgaagagaaacccagtaacagaaacttaccaactgtaagagtggatactctagcagacaataccagcaattacattcttcatcctcaaacatccttcccattgcccaaaaagtcagtgaccggaatgctggaagaaccccttctggggcctcttcagccactttcttctaatacacctatatgggcctgccgtcttaggagctgtgagaaaattggagattcataccgtggctactgtgtaagtgagactgaattagaaagtgtcctaacatttcacaagcagcaaacacagagtgtttgggggacccgtcagtctccaagcccagccaagcctgctacacgcttgatgtggaaatcccagtatgttccatatgatggaatcccatttgttaatgcagggagtagagctgtggtaatggagtgtcagtatgggccaagaagaaaaggtttccagttaaaaaaagtcagtgagcaggaaagcaggtcttgtcagctctacaaagccacttgtccagctcggatttacattaaaaaggtacagaagtttcctgaatatagagttcctacagaccccaaaattgacaagaaaattatcagaatggagcaggagaaagcttttaacatgctaaagaagaacttggtagatgctggtggtgttcttaggtggtatgtacagttacctacacagcaagctcatcagtatcatgaattagagactccctgcctcactttgtcaccttctccttttcctgtgtcttctcttgaagaagaggaaactgcagttagagatgagaattgtgcattaccctcacgtttacatcctcaagtagcacataagattcaagaattagtatcacagggaatagaacaagtgtatgcagtaaggaaacagctaagaaaatttgtggaaagggaactgttcaaacccgatgaggtacctgaaagacataatttatctttttttccaactgtaaatgatataaaaaatcacatccatgaggtacagaaatccttgagaaatggagatacggtatataactcagagattattccagcaacgcttcaatggactacagacagtgggaatattctcaaagagaccatgacagttacatttgcagaaggaaattcaccaggagaatcaattaccaccaaagtggaaacaaatcagaccaggggttctttgtctcctgagccaacccacttgctctcctcactctcctcatttcagcccaaaatatttacacaactacagggtttgcagttacaaccaaggtacacctctcctgatgaatcaccagctgtggtatcagtaaataaccagccgtcctctagtccttcaggacttctggatacaataggaagtgctgtaatgaataataattctctactgcttggtcaaagtcatagccttcaaagagatacatgcttaacccaaaacaatagtactgcctccaccatgggtaaccttccagaaccagatcaaaatctagttgcaatggacgagctggtagaagttggagatgttgaggatacagggaatctggaaggaactgttcatcggattctgttgggagatgtgcagactattccaatacagattatagacaaccactcagctcttattgaagaaaatccagaaagtaccatttctgtgagccaagttaaacaagaacccaaagaaccagcattgtctatggaagcaaaaaaactgtggactataagaaattatctgctacataaattattgaagcttttcagaatttacaactctggtgacttctgatgtcttagaaaggaaggtgaatatagtcaaagcgtggcattgagataattggactgaagaccagtttgatgagaagcttttatttaaaactgatatatttgttgccagttccatatttttaccttccttaagagatgttttactcttcttattttgtataatttttatgctctttgattatctaataaggccagtatttcaaaagctgttctgaatttatccacagtaatatagtctgaacacaaatagtttacttaacttatccttggaaatattcaattttggttattacaaaacagaaaagaacaacagcaacaaaaacattgtgtgaatntatgtttgtatgtgtgtatgtatatcatgaattttttttttaagttctgaaaaagaacttgttctctccttaaagttgtgaagaaattgttaattgccagacaggtaagaaaatgtttataatctatctcattaagaaagatgaagtattagattttacatcataacacaaagtccagcagctacatctgtggaaactgtgcagttgcattttagcctcttcccttccaatttttgtacttttaactacaaaccagtagtatactaatggttatctaatagaaatttaaagtgtcttggtaagtactgagaatttttacttgaattaatcagataagcaacagaaatcaacatatgtagcatggatttgtgctatattggaagtaaaacactataggcagaaagatgtagaaattaagagaattgaaaaagaataatagaattccttggtgtttacagataatttggaaaactttttgatgacagcagaggattttttcccccttattttgtaatgaagatccagcactggttaaaaaataatttgatttgtagttacatttttctatgccagagctcttactgaattgatgatattaggatttctagtattttaaggtaagtatttatagtttaaaatttagtttatatttaaaactttaaaacatctgatctgggatttttttgttaagtaagtatattaacttcaaataccaaattactactaagcagtatattgattataagcatctgttgtctaaagattggtactaggctggacatggtggctcacacctgtaatcacaatactttgggaggctgaggtgggtagataacctgaggtcaggagttcgagaccagcctggccaacgtggtgaaaccctgtttctactaaaaatacaaaaattagctgggtgtggtggtgggcacctgtaatcccagctacttgggaggctaaggcaggagaatcgcttgaacaccggaggcggaggttgcaatgagccgagatcgcgccattgcactccagcctgggtgacaagagaaaaactccatctcaaaaa

SEQ ID NO: 129843 - DNA, 306 bp, Homo sapiens
tattgccagtggtggcaagcattgggtgatcagtccttgggtaatgggggcatgcatggcagtgcccctggtcttaggggaggtttatttcctattctacactacctgtttcttggggtgcagggcactgtgtgggcttaggttcagggtttgcagctgaaccactgaatctagatggagtcttggattcctggctttgtagtcttttgtctggtggaatgatggcagggctccaggtatgtggatatgccaggacactggcttccagaacagaattcactttattggtggctctgctctcagcat

SEQ ID NO: 129844 - DNA, 421 bp, Homo sapiens
ctataaggtaggtactattgttagctccattgtttagatgagtatactgaggtatagagaagttaagtaacttgcctaaggttgcacagctgggatttggacctggttggtctggttctaaagttcacattctttaagcaccacattattcctcctttcaatatattataaccatactggtccctgaaagtaaaatcaaataactgaacccctacaatttgaacaaatacttaataaaatatcttgaaactacttatatttgaaatttttttgctacaaaaggaaacagagttcaacatcctactcaccgccccccccccccccagtttagtggaaattaaaactaatttgggtacctgctgccaaaggctgtgatgaggttggttcagttcaattagacagttactgagaatttcctaga

SEQ ID NO: 129845 - DNA, 1131 bp, Homo sapiens
aggctttatcatatttagaggaaaggggttgttttaggcatacagttatgatactaatacattaggggaaaactggtgacatcaaaatgaattctaatatctagactgatggaaagttttctaaagttttctttggacaagtgttgattttacacatatgttgttattaagataataccctattagaaaactgactttgtgctgctagcaagtgtatctatgtgtctcctaactaatcattgtaaggtatatgttttgatgtgttaaataagttttcaataagtgttaaactgtattttaaatagggcatctataactgtgtcttgtctctttgctttaaagtgtcttttgtttgactataatttagtgttgcaataggattgcaagtaataattttgtggaattgtgaaataactgtgggtacttttaatgtgagagtcttatctatagtatttgtgcttagtattttctagattagcatgaattacacttcctaaggtcactttggaagatgattgatttgatttaattaacatattgatttcactttgactatatttttcttaaagaggaagggaaatattttcaggagatgtttgaccttcttagatgaatggttgagggtagggcccatttgttaggcagcccatttacatcattccaaaaaaggaccagtattcagtgttatgctgcttagctgaggacaccctttttccccagggcctgcccatctacgtttgtattcagtgctctgatttactttattcaccccttatcccatcaatatgttttgtcttctgcttgattcccttgctctcccaggcagcaacctgatcaattcattcacaccatggtgctaatagctaatgttaggttcatattaatttacccaggaatatctgaattccaggctttaggactaggcattaaaccaaagtggtgactttcaatggagggctaatacatactgaagcagacagactggagggaaagaaattttggataaagtgggtcccacagcactgcctttcatattgcatacagtaagcaaacacctactttggttaccataatgggaatgctgacttttaagaaattaagaaatgtatccatgaacatggctatcagttt

SEQ ID NO: 129846 - DNA, 703 bp, Homo sapiens
ggcctatacctaccataatctaaacttaactgctttgtacttttgttttgaaattttcaatgtatttcttgtgatttgaagctttattagtttgtcataaaaccataatttatgaactctcttactataaagcgaggagaaatccagactaataactgctaagatcctttgtaatgctgacttctcatggtaatacctgagtagacctctttatgtgaaagccctgttagggaagctcctggtgaagcaggtgggtttcaagtttgaattgtgtatgcatcctgagatccagaaaggtcaagtggcctgggctgagcgggaagtagttatatcctgggtgttaaatctataaaggcttactttgaagatattgcgagtttggttccagactactttaataaagcaaataatcgcaataaagtgagtcacacaaattttttggtttctcagtgcatataggttatgtttggccgagtgtggtggctcgcagctgtaatcccaacactttgggaggccaaggcaggtggatcacctgaggtcaggagtttgagacaagcctgaccaacatggtgaaacctgtctctactaaaaatacaaaaattaaaaataatagtaaaaataaaaatacaaaaattaaccaggcctggtggtgggcacctgtaatttcagctactctggaggctgaggcatgagaatcacttga

SEQ ID NO: 129847 - DNA, 287 bp, Homo sapiens
gtctttctgtgcatcaagaagtagaatatgggtttggaggacaggtcattctttcctaaattagatgtggtcttcaaaaacacccaaacagcataggggcaagttaagttttccaaagacaaggaaatgtaaagtgttaaatggtccaatgtggaaactagcgtttaataatccaaatctgaacccttcatgactgacaaaaaaaatatgcctcccaaagtgagaaaattgaaaatcaccccaaagggcataatttggttgaatatctatagctgatgatgcctggg

SEQ ID NO: 129848 - DNA, 334 bp, Homo sapiens
ggcatggtccctgactacaaagagcacatattctagctaaaagatacacttttctaaaagtagaactaatgtcatgatataatatgatgctaaactgtgtgactggatctacaaatatagagataaactcacaattttagccaatagctttaactttctatttaattttttaaagtcaaaatcaacactcaggtgtggactcgacttgtcatctagtctagaacattacctaggtatagataacagcaaagcctttactagtcgacatctagaatacatttttaaaactattagtttcggccgggcatggtggctcatgcttgtaatctcagca

SEQ ID NO: 129849 - DNA, 739 bp, Homo sapiens
  misc_feature (671)..(671): n is a, c, g, or t
ggaaccaacctagaatttcctgataggctggatgaaggctgtgaaagaaacagacattggaaatgcttcaaagtttcttaaatgaccagctggaaggctggaattgctgtcaactgagaaaacgaatatagtgggttgtgcatatttgtgtgcggaagagagatgaaatgagatcaagcggagggttaaattagtagtcttgatgtggagagcctgagtaaacagttagatatacaagtccaaaatctggagagttctggtttggagatacagatttgaagttattggcacatacatggcatttaaagaataaggcttgaagatatcactaaaggaaggatcgcagaaaagaagacagagagagaaagaaagaagaaagaacgacacgagaacagaaagaccgaccgaacgaaacgaaagaaacgaaagaaagaaagaaaagaaagaagaaagaacgaaggacagaaacgaaaggaaaggaaacgaacgaacggaacggaaacgacacaacacaacaacaaaccacaacaaaaaaagttgggcgggccgacccccgcacgaagagaagtttgcaacaccgagtggcgggcggccgcggccccggtaggtaagcaagctgggcaagcggcctgcaaaggccatcgtggcacacacgtggcggtgtccccaanaaaaaacgcgcggggacggcgtcgacaccccgaagggcgagcctgcgtcagcggacccacagctacga

SEQ ID NO: 129850 - DNA, 917 bp, Homo sapiens
ggaagaagccttggtgggtttgtgtgggtctttctcttatgccatatccctggtttatatttggatgggaaaatacataaatgtttgatggtgatcatttttatgaaacatgacattgtcaactcctttcttcatatgcattttcgaattcagttcttaaccaaagaagctctttctacaacagggttaaattataaactgaaatagcaaaaaaaaaaaaaaaaaaaaaaaaaaaaactgtggttgggccggcccgcggcccccgggagaaaggttttataaacccattctggtgtgtgggcggcggccggccccagtgggggttgggggcaccgaggggcccacaaggcggtgttccccggaggagaacccgtgggcatatgagaacaaggtggcgtggtggattttactcaaccacaatataaatcagcccgccgggggaaaccagacgaggtgtttcgtgaaacaatccaaaagggaggttcagaaaggcacataggggaatcatacaaaggaggagtcaaaaagaacacgccgaaatcaaaataagcccgcccgggagaagaaagaaacaatcatagaaaacaagagagaacagaacgaacaaacgcacgacgaccagagcacacgagagaacagctgacgacagaacagaggcggcgcagacaggagagaacggacacagatagacgagagggagagagagagaggacagaaaagagagagaaagaaaagagaagaagaaggacagaagacacgccggcgcaacgacgaaggaagaagagaggcaaggaggaggtgagaggggacagcgagaagcagagcagaacgaaagaagaacgagaagaaacagaagagagcggagagagacggaggacagaaggaaaaagaacaagaagaagaggagaaagaaagaa

SEQ ID NO: 129851 - DNA, 1040 bp, Homo sapiens
gtggcttagtttccttaaatatgctcttaagatagttttggattatgcggtattgactgtcttaaatatgaaagataagtcattgcattaagagttcaagctaaatggatacattaagatacagttcctaaacaaattatttatttccaccttttacacaaatcttgggagaattggtgtcaggaaggttcagccttaaagttaagcatgttcaagaaagacacttttcagacagcctgtttatttactgagagctctggcattgggcattttgtctttagtattctcacatagcctacaacctgttcctgttaggaacaagccaagatagctaagaagttacggaagccatgcaatatgtcaattacattgctttttataaatggacaacttatgtgggcatttttgggcagtatatgacttccttgcaggctcttaagttggaagggtttctgtaaaaaggacagttacgggtataatatggctaagagaaataatacagaacctgaaataaaagtaacttcaccagggagttatcctgacttaggtgacatacagtcccagttggcagttactttaaccaggagccctagcataacctcaagactcttagaaactttagaacatggaaattgttaaaagctttgaattgcacatttagattgtggctattaggaatttttaaagttgtaattcctaaaataacaggtcacactaaccggtcttgtccatattcagggttgagtgtaaaaatgaaaggaatcacaaaactgaacttagacctgtggtttaaggatcaaggtgttcactagaagtcactgttactaatacttgatgacaatgtaaagaaacattaaggattatatttgattgttttcaaagacactggctggatgtggtggctcacacttgtaattcctagcactttgggaggctagggcgggtgggaggatctcttgaagccaggagttggagaccagtctgcccaacatggcaagattcacatttctattaaaaggaatatttagtttgaaaaaagg

SEQ ID NO: 129852 - DNA, 669 bp, Homo sapiens
accctctattctctccaaatgttcattgactactaatgctctattctgtttcaccggagaaaaatgaaggaccgaccttctggatctattgcttaagccttcaggtgcctgcatataagatatataaaaggctcagttttattccatttcctggggtgttttgttttgttttaataactgatatccagtcatttcctattttgttcactgaagtgtcatgttttacccatatgcagagttaacaagtttctattatgtatgatctccattttcaaaaatgtctgaggacctgtagagtacactttaaatgcttcaggaagtcagtcataaccttttatatttgcccatagtttgctttcttgcctcatctctgatctccctgagctccatttatactgggccaaaaacttactgctttctcttaagcagaccatctattttatgtgtcagtgcttttgctttcacagatatttaaccaaatgattgtcacagaatatcctaatagtaatatgagatatcagggacccagtacatacctattgaataagtgactacatttggggatttttttttttgagatggagtttcactcttgttgcccaggctggagtgcagtggcacgatctcagctcactgtaacctccgcctcccaggttcgagcaattcccc

SEQ ID NO: 129853 - DNA, 153 bp, Homo sapiens
gcctcctgggttcaagcagttctcgtgatctgccagccttggcctcccaaagtgctgggattacaggtatgagccactgcaccctgctgctagttctttatgtcttgttgacctgacatgtgagctgtcctacctcttttttttttttttttt

SEQ ID NO: 129854 - DNA, 434 bp, Homo sapiens
gagtggtaaggggagaacgggcaggaagggctcatgatgagctctaggccgcagtgaacacaggaaaggcctcattgggaggggcagagagtaggcaggctctatgccctctggcccctttccgtggcagagtcagtcctgaagcatctaccccagtgctaactagaagcgtggggagaggtgatggggaaggcctaggggctgggagcagtgtcaggaagaccttggggttgtggaaggaactggtcctggattcagactcccaacccagactgacgtgacatgccatgagaaggtattattctcccattttatagatgtggaaactgagacccaaagaggtcagtgactggcctggaggtcagtcagatagagagttggtagcagagccctgatgaaagtcaggttggagtgtcctccactggtgaagtgta

SEQ ID NO: 129855 - DNA, 605 bp, Homo sapiens
gagttaaggttttcataatttcttctagcctggaagattctcacagttttctgtcttgtccctctaggccctgcttcctactagctccgacaggtcttcttatttttgatatatatgttatgcgtgtcagatttactaggcacctatgtccttatgatctggtttactcagcctgtccaacttcaggccttgcagttttctagcaggaatcctctacttccaaaattaagatttattgtccttcagtggccactcagatctcttcactaaatacttgagttcttcctgtgtatgttattttatgctaggtgctatgagagattcaaagatataatgatgcttcatagagaggttgccatttgggcactcaggccttttatggaaaagataaataccaagatgaatttgtttgaggcattataagaattgtcataaggtgttacacaagtaagaatgacatttttagtgctggcaacttacttatgatttcctttgacttgtgattttccttttacttatgatttcctttccctgaagttgtttagcatttataacttataatactcagatcatatattattatactacatttacagtatatatca

SEQ ID NO: 129856 - DNA, 456 bp, Homo sapiens
agaaagactgcgggtatagtcacgttaaaggcacctgtgactccagcgatgtcacagttaattatacctgtgattttccgtcccctccctccaggcacctcaccaactttagttaactacacagaagcttaatgaaattctttgcttctgcagttggagttgacaccttgacagatgttcaacagcttgtttccaggtgggacgctgatgtaggctgccccacttcacgcaaaacaattacgtttacgattttcgcccaaaatattgtctcctgtcgttgaaacccatagagaacacttgtaacctatagatttcttggtgttgtggtgaatatgttcagcttgttgtaagaatagttcataattgatgctcttggcatttatcacccagccgtgatgtgctcaacgcgtgatgactaataagttgtatttcgttggatccttttttcttgctttc

SEQ ID NO: 129857 - DNA, 327 bp, Homo sapiens
gtaccctaaaatgttattcatcatgccattcaatattatttctgtcctagtttctgtccaataatcatttctggtgatttcagtatccacagtgatgactgttttaattgttccatttctcatttctttgatttcctcttctttaatgattttgtcctcaaccttatctcaaccactgacttaccatggcatactctagaccagaggatctttaactttactcaggcaatataaacctatggattatcctttcagacataagaaatcctaccctaactaccaccatgaccctaactacagccatgaccctaggatacagtagggaga

SEQ ID NO: 129858 - DNA, 543 bp, Homo sapiens
gaaagatttaatgaacactaacctattcaacaaatttagccggactcatgagataaactgctgctctatgcctcatgctatgatgccgtaggaagtacacaattacttatctcatgttcttgctgaaatgtccagtcaaaatttgatcaggaggaaataatcagacaaatccatccagattgtaggacattcaataagtaactagcttatgtcctgaaagacaaaaacagggggcgttgggggagacatggagctatttgtccaggatagggatgacgagagaaacgacaagcaagtgtgatatgtgatcttgactggatttttgatttaaaatttttaaagaatattttaagacaatgagagaaatttgtggcctatatactagaagacattgtatcaaagttaatcttggaaggtgtgataatgttgtgcttatgagacaaatttccctattgttagatgactcgtgtatttagtagtaattgccattgtacatgacaaatttctttcaaatggctcaccacatagagtaggaaaaacaac

SEQ ID NO: 129859 - DNA, 187 bp, Homo sapiens
agccagagggagaacatgtcaggcagaaagagaagcaaatgcagaggctatgaggcaagaatgtgctttgctgtcaagaacccagacagcaagacgaagatgggtaggagaggagggtagggaggtagagcagtgtgggtaccagagaacggagaaccttgcaggtcattgttaggactgaattatc

SEQ ID NO: 129860 - DNA, 343 bp, Homo sapiens
taaaataaaataaaatagaattaaattctactcaggtaggttcagggcaataaacattctaataacatgtcttttaaacaaattataggatacgatgggcatagactgctcttggtcttcccccagcctcctcatcctccctctttaggggtagccttgaacttgcaatggagaatgagggccaggagggggtggagtcagcacctggctgtctggatagccccaccataccttgttcagtcgcttctcttcatttcaaatgatccctattggacctcacactctttgctagtcttgcccctaaggatgcagacagaaaattcatgatgggcagacagaaaat

SEQ ID NO: 129861 - DNA, 228 bp, Homo sapiens
atagaggatcttagtagtcgctctggacatgggcatgtacagattctcctcttgtggctttcacttaagaaacagaatttgtaaggataagggcgttacaaatcatcaaattgaatccctctttcaagaaaccagtctcatagtcacatgattattgaccagggcaaagaagtccaggcatgtgcttttggaatggcatcctgtgccacatcctccactaaacatgtt

SEQ ID NO: 129862 - DNA, 624 bp, Homo sapiens
ggttttatatgccacaatttagatagtcttaatttaaatttccataaataagtgcaggagaaaacagaggaagtgcttcgaagtcaacaacctggtgacacatattttttagggttttcaggcaaatcttcccatgggattttaattgatatgcaacatagtgtggcctcaggcccccttccaagcacaggactctggtaatttgtacaagctttccttcctcctctatacttgactgaagggaaaaatggaagatggtagacatcctctcaagtggatgtaggaggtaattagaataataaaattgaataattattaagtagtttgctcaaggatattaatcattctgcccattttgaaggagaaaaaatattcctacaaataaatagtagttgtctcttagaagactgagaaatccaggagtttgggggaaatgtgactataattgaaagaaaagagcaaaatggattaatatactagttttccaaagaaatattaaacctgcctaaatttccactataacttctcttgggaaatcaaactggaggaactggacctcttgggaatactatcaccataacataacataatttgaagttgacactagaagttgaagtttatttt

SEQ ID NO: 129863 - DNA, 538 bp, Homo sapiens
attcacaatagcaaagacacagaatcaacctaggtgcccatcagcggcggactggataaagaaaatgtaatatatacactatggaatactacacagccataaaaaatgaaataatgtcctttgcagcaacatggatgcagctggaagccatcatcctaagcgaattaatgcaggaacagaaaaccaaatgctgcatgttcttgagagaactaaacattgagcacacagatataaagatgggaacaatagacactgggggttactggaggggggagagggttaaaaaactacccatttggtactgtgctcattacctgagtgatggaatctgtaccccaaacctcaccatcatgcaacatacttatgtaacaaacttgcacatggtaccccctgtatctaaaataaaagttgatagaaacaaacaaaaaatgaaatgcagatcaggaggagccagaaacctggactaaaaggggagagaggaaaaaagagggaaatggagaggaaagcagggggaaagaggtggggaccagaaggatac

SEQ ID NO: 129864 - DNA, 363 bp, Homo sapiens
tccctcagcccctggaaaccaccaatctactttctgtctctaaggaatggcctattctggacatttcagagagacagaattttgtaatatgcagtctttcatgactgaatcccatgacttagcataatgtttaaaagggttattcatgttgtagcatgtaccagcacttcattctttttttactgcccaggaatattccattgtgtggctgtcacttctgtctacccattcaggtgatggacatttaacttgctccttgttgcttttagcaattgcaaataagaaacagctgaaaaacaatggcattcaaactagactgtggtcattttcaaaagaataaaaatctttagggagaaacaaaat

SEQ ID NO: 129865 - DNA, 437 bp, Homo sapiens
tggcaaggatgggaaggcatgttcagtcctaggagtaggaaggggcagaggtgttgatggcccctacagagcggccaaggacaaggagctgctgttcgaaacagccttcctgctccccaacctgcctcccacccaacaggttttgcatatactctactgggaagagggacacacccgactgcatcactgccctccaagtctctccctgccctgtccagcatccaggagcacccctagttggggaagcttctgtgactccccctacaacagcctaggatggagtggggtttgtgaacaaatgcagaaggcagtcttagggaggtcagctgacatgcccctggcctgtggctgggaagtagcagaggctaaggttcttccccgctctggggttgccaggagtagcactggatcagtcaggtgacagggctctcctctct

SEQ ID NO: 129866 - DNA, 278 bp, Homo sapiens
tggtgcagaaaatacaaaatgttaccactgggcagccttttgtcactcatccttatgaggcattctggaggaatcaaaccagtgtgtgctggcataaaagaatgaagacacagtcattgaacaactgctgtgggcagtgccttgcagagccatgagaaatacaaaaagtagataaaagagtttcagcccttaataaatctgattgtgttatccattttccctttgcccctctagctctactctaccattctctccccaattctgtgcccattatcaat

SEQ ID NO: 129867 - DNA, 249 bp, Homo sapiens
acaaagcttcacggacacagccacgcgcatttcttcgctgtctatcatctgcaagggtcttgagttgccatgcggagtcgagacgtcgagacacaggaggcctggcctgcaaagtcgccaagtcacaaatgtttgctctctggcccttccccggaggagttggctgagcccactctgtgccgtccctcccggctccagctcatgctcaggggctccctgaatgttccttgggcaccaaacaggagtgag

SEQ ID NO: 129868 - DNA, 603 bp, Homo sapiens
aaataaagttgtgatgctccacattaagagaatgaaggacaaatattatatgatcatatgagtatatgcagaaaaaacatttgagaaaattcaactttgctttcatgataaaaactctcaacaaattaggtgtgaaaagaatatgtatcagtgcagtaaaggccatataatacaacccctcagcttacatgtacccaacagtgaaaaactgaaagcttttcctttaacatcaggagcaagacaaggacacccacttgccacttacattcaacatagtactggaagtcgtagccagaacagttaggtacaaaaagaaataagtcatctgaattggaaaggaagaagttaaattgtgactgtttgcagatgacatgattttatgtataaaaaatcctaaagactctaccaacagactattagaactaataaatgaattcagtaaaattgcgagatataaaatcaatatacaaaaattagaagtgtttctactcataaatcacagacaatccaaaaaagaaattataaaaaccaattcattacaatagcatcaaaaaataaaatatttaggagtaaatttgaccaaagaggtaaaagatctctata

SEQ ID NO: 129869 - DNA, 202 bp, Homo sapiens
ccccaccggctcagcaaccctcccagggaggttattactggctccactttgcacatgaggaacttgaggttcagcaatttaaagggacgtgctgaagaccacccacttataagtggccaagttgggatttaaagacaggttgtggcaatggagggagtagaggtgggtgtatgcatgtagagtgggtatttgagcacaggtg

SEQ ID NO: 129870 - DNA, 379 bp, Homo sapiens
gccgagcaaagagctcattgtcagagtttacgcaactgtttgagttgcagagccaatttaaaaataatttctgtccatctggagtggatttaagagatgaaagaaaagtaaatgatataaacctctggaatgttttagaaaaatgcattgagggaagaaaaaaataagggcatagcgttaaaccatccctgcaataaagggctccttggggtgtctgctgcatcagaaggagccctgcaggtttactgaatgaatctctgaatcttggagtgtgaagagaccaaataatagtggggtagtagtagcagtagcagcaagaaaagctgacaccaggcacttactgtgtgtctcacagtaatcctgcaagggtagaggttat

SEQ ID NO: 129871 - DNA, 507 bp, Homo sapiens
gacttcctacacagactcagtactgaggctggcaaagagagactccaacaattctgtactgatgacattctttttgtgcagagaaactctactcccagaggctaacacagagaaaccaggaaaattatttaaatctctaggtagctaacagttaaatggctataaaagtctcccaatgtctgaaattaattcctgtagtaaatatccctaccaaaaaaaagacatacatcatacctgtgagttacagagatttaagttcacgattagttgtgataaatggtgggtctagtggctttttgatgaataactctctgtcttgatcaaattcaaagaccattaacatggattttagtaactgcatttatgactagtattttacagacaaaaatttaaaatcaattaatatatctctaattattatatttcctatcctcccaatgcataaatctattctgttccgtagtgagagatcaaaattaaataccaagatttttttttttttttttt

SEQ ID NO: 129872 - DNA, 408 bp, Homo sapiens
gattgtaaaagacagctaataatagtagatagctcataggcttgaagtgaggaataaataagctgctgtacataaagtgcaaacagaagagctgagacttagcaggcactcgatagctgtgtaccgaatgaatttccagtttcgcaagtcatctatgagtacccccaaaatagatcacttagtttgcttgttttcatgctttataaaaatggtagcttcagagacttgctttgttcactcaacattacactagcaacatttgtattcagatattactgagaatattcattccgtcgatggacatgtgggtcattcctcgtttttgtattttcaacaatgctcctgtgaactcttgtccatggcagagggctcacctctgggattttctctaagacctgggagaggact

SEQ ID NO: 129873 - DNA, 869 bp, Homo sapiens
gatctcacttcacaaaaataagtctgctctccctctgagagtatatttctatgcttcaattaactttgctttaagcttgcattctggagttagtctgcaatttttttgtttactctcacaagaactgagattgctggtccagagctccaactctgttcatctccttggttaaagaatccattccaatgcagaattcccactgacacatcacaggatcaaatgttctggtggccaccctcttgcaaggacttttcttttaactactcctgacatactctattcaccacctcacaactgctaagtattcttccttcttgccttcagcattcttgcctacggaatcatcttcaaattcatggtcagatactttaaatgcttaagaggatattcttgaatatccttatattctattattcagttgatctgactgacacagtttcttaaactcagtttaagatcattatttataaagctacagggaataactagttactgtgacttctccctttattgactctaaataccacattgtgattcattgttgtagctcatgatttttaagcagtaatattctgtgattaaaaaataatttccagccatttatgattcaaaattggttgctcaaggaatgaatttcataaaaaataatgactgtaagtgcctctgtgaattacttttttaaaaaaatattttaatcctatccttattgctgtgaagaagagactacaggaagaagcatgtgcttaatgaccagaaaatgagtcaaaccattgatgtgaaactgagcagcttaattttgttggttaatggtgagtaatgcacaaaacaagccaatgactaaaatatatcttagggagaagaaaaagacc

SEQ ID NO: 129874 - DNA, 345 bp, Homo sapiens
agggtcactaaaattaactgtcagattgtaaagaatcctcgttaaagcaatgatcagaaccagcagtttaaagggcccagttaagggagaagtctgtccttcaacttgttgtgcccctctgtctccccagttcatgagggtttttccagagatgtaccttgagatttgcttgccacattcagctgtggattgagtctagatcattctttaatagtggtaatcattggagtcttttattcggttcttttaaattttttgaggagggtggagaactggcctttacttatattcctttgcttaatgaaaatccatcttgctagtaaggattggaggtgtcagaaaaga

SEQ ID NO: 129875 - DNA, 437 bp, Homo sapiens
gtgtctccgcccaaattcaatgacaaatcaaagacaatggggaaaatgccttgaaggcatctcagagacctttgtggcagcccctcccaccacagactcagaggccaagaggggaagaatggtttcacaggccaggcccagggcctggctgccctggggacactgctccctgcatcccagccactccagctccagccacggctaaaacagtcctagattatgtctcaagctgctgttcaggcaagtagaagccataagccttggcagctttgatgggtgttaggcctgcaggtgtgcagacagcaagaattgttgaggcttgggagtctctgcctagatttcagaggatgtatggacatgcctggatgttcaggcagaaggtacactgcaggggcagagccctcatggagaacctctactaggacagtgcactgggg

SEQ ID NO: 129876 - DNA, 404 bp, Homo sapiens
actctgtagatagggagtttacagccagaccagattctagtaactagaaggagctgattgcacttataaaatagataacatttggaaaggactattttgaatgcttgggataggttatttgctgctttttttcctctctttgggcctctggcgttgtcttctgtggactgggcaggctgtggtggtagggaaggggggagcttagagatgaagagtatgtgggactcctgaagtaacggcaaagggaaatgcattgagatgtcaagatgagggagaaggctttgacatgggtccccagcgggggctgtagaatcaacgaacctctccaaaccggtccccaaacactggcacctggatgagaaaaggagcagagctgagcactttttctctgccctctttctgcc

SEQ ID NO: 129877 - DNA, 712 bp, Homo sapiens
catccttagtggaggaagtgttatttaaaggcattagatacaggtatcaacagtgcttataaaaggtgcttaataacctgggaaaacctttaaaaaatctgttaatttatatactgcataattataattatgcaacagattaaagtttgctttttttaaaagcagtatattagatttcagccaaaagaggcattttgttaagacaccaccatgtctatggtaatctgttttcagtagtaaccatttgaaacaacagggtaaaaattttaagcagtaattactgcatgccagattgtgatgatacctagtagagaaatatgaagaaaattattggagatgttgattcttagacagtttttttggtgatttgaattaaattaatgagaacacaaattttaacatttaacatctttacatgtaagtattgagtaactgattaaagtggatgcacttcactctgcttatatgtagattatttttaataccatgaatatatacatatatataaatgcaaaacgagaatttggaagatcttattccttcactgaaagagaaggtgaaaacttaaaaattctttgctttatatacttatttttaattaaaaaaactggcttgtgatggaacactcaacatttttaacattccttatttaagcaacaattttcaaaatgagttggaagtttattacaggttgggtatctcttacccagaa

SEQ ID NO: 129878 - DNA, 380 bp, Homo sapiens
taaagtgaggggtcgttgttatgtgtgtttgagacaaggtctagttcagtcgcccagctggagtgcagggcacaatcacagcgtattgcagcctccaccttgtaggctcaatccatcctctcacctcagcttccccagtagctgcatctatggtatgcaccacgcctgtctaatttttggatttttggtagagaagagttctcgttatgttgcccaggctggtctcgaacttctagcctcaaaaaggttagtcctactttggccaaagtactgggattacaggcatgagacatcatacctggcctttttttcttttcttttcttttttccccagtgctacctttttacattccatatacttcccctgcatattccacagg

SEQ ID NO: 129879 - DNA, 241 bp, Homo sapiens
ggaggttgcagtgagccgaaattgagccactgcactccagcctgggcgacagagtgacactgtctcaaaaaaaaaaaaagaaaagaaaaacaaaaaacatgaaacatatcatttgcccattttccattgtaataaatgttttagttcaaaaataaaaagagaatcactcgagaagtgcaggcacaaactttggtttggtctctcgtatttgtttggtagttaccttagacaattgatttct

SEQ ID NO: 129880 - DNA, 147 bp, Homo sapiens
gcacatcacattcttcagaagcaagaagccactcatctagttttcagacaatgtgttaaattcaacattcttgggcacagtgactcatgcctatattcccagcactttgggaggccaaggcaggaagaccgcttgaggtcaggaatt

SEQ ID NO: 129881 - DNA, 405 bp, Homo sapiens
tatttgttcaacacagtaatatgtaacgaagaacggaagaacaaatataacatgagagatatagaaaacaaagagcaaaatggcacatgtaattccagctacatcacacactacataaaatgtgaaagagctaagcatacaatcaaaaggctatataaaaagaaagctgcaactataatctatccctaggaattaatactttagattcaaagacacaaacaacttaaaagtaaaaggatgaaaaatgatatacaatacaaacagtaaccaagagagatggagcggcacatgttggcagagacagacagagagagagacccactgcctacaagataaagtctaaatcactttataatctggcctctccttttcagtttagtcttccactcatgaccaatgtgaatt

SEQ ID NO: 129882 - DNA, 430 bp, Homo sapiens
aatcctgcccacctgcctggcgtggctgggagacccgcccgggtgctctctgtctctccctccctctttcactgctccctgaaggcagcgtctaaagaggctgaggctgtcctgtcactgccccgacctctgaggagaagcccgcggctgtcctgtcactgccccgacctctgcggagaagcccgcagttctgatcacggacctcagatggggaagcgcacaggaggcctcgggtggccgggctgtgctgcttctccctagacgggcagagctggcgcataggaggtgcttcacaggtgactaaggaggcaaagacccgaagcctgggggactgcagtgtccggtggatcccagctgcggccatcgggcccatgggtgggagagccaagggaggggctcagctgggcaataggatgggagtgggcggggg

SEQ ID NO: 129883 - DNA, 443 bp, Homo sapiens
accagaaaccatagcagggtttccaaggaaatgagtcctgacagtttcatgattgagccaatgggtgtcaagtaggagcaggcatcttatcttggcagcagcctgtatttcaaagttcctttttttttttttttcctttttcttttttctctctcttttttttgaggaggagcggggccccacccggagcaccaagctgggggccgggggtcccaaaaaagttttgcttacccctaaaccccaggcttaggcgatttacccgtttgagcctcccggttggggggagattttaattttttgggggaaatgcgctttagccaaggtgccttgggggggccaaacctcctgaaaaaggcgacctcccattttggccttccaaagggcctggaggaccgggggaaaccttccaaggcccttaaggttatccctttgaaaccgggggc

SEQ ID NO: 129884 - DNA, 206 bp, Homo sapiens
tcaagcacatctctagcacccagcccacattcagacggtctacaagagcatgtgtgtggaagggcacttaatctactcacttttggccgggcgcagtggctcacgcctgtaatcccagcactttgggaggctgaggtgggtggatcacctgaggtccggagttcaagaccagcctgaccaacatggagaaaccccgtctctactaa

SEQ ID NO: 129885 - DNA, 267 bp, Homo sapiens
tgctgggattacaggcgtgagccactgtgctcggctggtagtactgttaagcgctaagagcacaaacaaaaactatgtctaaaatgtagggcaggtagagcaggtgaggattaaacccagttgaaatcagcggtttcagtagtaagtgggcagatcataattacctgtgttgctcagagacctaagctgagagtgggggtggggaaaggtcacacccattatctttggagaaatgatgagagtaaataacccatagtttccagttta

SEQ ID NO: 129886 - DNA, 224 bp, Homo sapiens
tttctagtaggcaaagctgtcatttaagtgacccactataatttgggatgaaacccgaaggaaattttgccaagtttagaataggagttgcatttctgagtttactcagcatgatgaatccactaaaatgctgactattctttttttggcataaacttacgtcaaggggaaaatgaacattaaaatgaatatagctagagaggcaaaccgtcacaacattcact

SEQ ID NO: 129887 - DNA, 173 bp, Homo sapiens
actccgtggagtgatgtgttgagactatgtaaatgtcttcctcagactttcacccactagttttgacagccattgatgattcttcagctgcatctttcttactacgtttattagttggctttctactgtaaagaagagctttcctcatttatttatttatccattaacatatg

SEQ ID NO: 129888 - DNA, 467 bp, Homo sapiens
actgctgagcagcagcaacccactgggtgaaaacgctggaggctctggatgctgcctggtggcggctgtgagtgatcaggtgccagcgtcagcatcgggtcatccactgtccagaatccagcaccactccctaaattccaacttccccccaacacggggcctgctctgtgggcttcagccggctcggatgttgtctgcagctcccgtcccgtaccctctccactcccacaccctgcctggacatggttacacagtcacacacactccacacagtcacacagtcacacagtcacacgtggccacacagtcacacgcggtcacacagtcacacgcggtcacacagtcacacacagtcacacagtcacacacggtcacacagtcacacgcggtcacacagtcacacgcggccacacagtcacacgcggccacacgtcacacgcggtcacacagtcacacgtggccacaca

SEQ ID NO: 129889 - DNA, 631 bp, Homo sapiens
cagtccctggtgaggatcccaggaggcccagctgctgcaggccttggtcaacacctgagcaaccacaaggagttgaatgccgggcctgagctctgactgtaactgctctacacttggcctgtgccagtggccatgtgcaagtggtcactctcctggttaacagaaaatgccagattgatatctgtgacaaagaaaacagaacgcctttgatacaggctgtccattgccaggaagaggcttgtgccgttattctgctgaaacatggcgccaatccaaaccttaaggatatctacggcaacactgctctccattatgctgtgtatagtgagagcacctcactggcagaaaaactgctttcccatggtgcacacattgaagcactggacaaggacagtaataccccacttttattcgctataatttgcaagaaagagaaaatggtggaatttttattgaaaaagaaagcaagtacacatgccgttgataggctgagacggtcagctctcatgcttgctgtatactatgactcaccaggtattgtcagtatccttcttaagcaaaatattgatgtcttcgctcaagacatgtgtggacgagatgcagaagattacgctatttctcatcatttgac

SEQ ID NO: 129890 - DNA, 235 bp, Homo sapiens
aagcagtgggtaaatagcctcaacaaacataaagatacatgaggacttggtagatgataaagatgacatctcaaattggtgggaaattggtgggaaataggtggtagtgacataactggttagctgtctatggggcaaatctttaatatgtcactctttagaccaaaattaataccaggaggattaaagacttcattgggggcagggcacagtggcttgcgcctataatcccagc

SEQ ID NO: 129891 - DNA, 600 bp, Homo sapiens
ccctagaataaaccaattctgagacgtgttttatacagtctccccaagattctccttgactcaatttcccctcccttactggtacttcctggaattttcttctagataaattttacttaagtccttatctcagctcctgcttcttggggtactcaacctacaataccatgccagttttatttattttttatttttttgagacaaagtcttgctctgtcgcccaggctggagtgcagtggcacaatctcggctcactgcaacttctgcctcctgggttcaagtgattctcctgcctccgcttcctgagtagctggattacaggtacccgtcaccatgcccagctaatttttttattattattttcagtagagacagagtttcaccatgttggccaggctggtctcaaactcctgacctcaggtgatccaccagccttggcctcccaaaatgctgggattacaggtatgagccaatgcacccagccccatcccagttttacatgtgagcctcctccaatgcatgactttatatctgcatactgagacccagggtaagagatacccagccctcaagtcctaccatagtcctgtgagaaatgcc

SEQ ID NO: 129892 - DNA, 470 bp, Homo sapiens
gggccacctgagggaccgagccattagggcttcagaccaaggacagccccagctcctctgagcacctgcatttgcacagcctgccagggaagagtctcttcccaggagcgtgcagaggtgattttgggaaggtctggttgtcagggttgaaggcggcgtgtagaagtggaaacacaggggctgggcaccgtggctcacacctgtaatcccagcactttgggaggccgaggcggatggatcacgaggtcaggagatcgagaccatcctcgctagcacagtgaaaccccgtctctactaaaaatacaaaaaattagccgggcgtggtggcgggtgcctgtagtcccagttagtcaggaggctgaggcaggagaatggtgtgaacccgggaggcggagcttgcagtgagctgagatcgcgccaccgcactccagcctgggtgacagagcgagactccatctcagaaaaaaaaa

SEQ ID NO: 129893 - DNA, 328 bp, Homo sapiens
ggaaaacatctttatgtatggaggcagaattgaaacaaatgatggcaatgtcacagatgaattatgggtttttaacatacatagtcagtcatggagtacaaaaactcctactgttcttggacatggtcagcagtatgctgtggagggacattcagcacatattatggagttggatagtagagatgttgtcatgatcataatatttggatattctgcaatatatggttatacaagcagcatacaggaataccatatctgtgagttacttaaaaattgtaatttctttattgattgggaatgtttttctctttaataaaatcttcatatg

SEQ ID NO: 129894 - DNA, 129 bp, Homo sapiens
gttagaccctagttccagcttaagatttctgagttgagaaacttagactacttgtgagtatgtctcagaagttaagtttggataaaattagatatgtaaaggattatgtcaatttgcaaaagaaaaaaa

SEQ ID NO: 129895 - DNA, 531 bp, Homo sapiens
tctgttaaaatatttgtaaagaagtttagacgttatgacatttcagccctaaatattttggaatacacctccaaaaactgagaacatctcaatgtcattattatacctcacaaaattaacaatgcatttcttaatatcatttgatacatagtccatattcagcacttcttggttctcccccaaatgtctcctcacagctgttttgctcgctggtttaattattaaaacattatgcggctgggcacggtggctcacgcctgtaatcccagcactttgggaggctgaggcaggtggatcacctgaggtcgggagtttgagaccagcctgaccaacatggagaaaccccgtctctagtaaaaatacaaaattagctgggcatggtggcgcatgcctgtaaccccagctacttgggaggctgaggcaggagaatcacttgaacctggaggtagaggttgcagtgatccaagatggtgccattgtactccagcctgggcgacaagagtgaaactccgactaaaaaaaaaaaaaaaa

SEQ ID NO: 129896 - DNA, 334 bp, Homo sapiens
ggttgagcaggtttgctaaatttcctgtcatttttaagattccgtgattctgattcggctcaaccccaagactcatcggttctgtgttttccacttctctctgcaactgacacattccccggagggagaacaactttctggattgtgagatgtgtgttcttagtctcttttaagggagcccctgtgattcttggctgggcacggtggctcacgcctgtaatcccagcactttgggaggccgaggcgggcggatcacgaggtcaggagatcgagaccatcctggccaatatgatgaaaccccatctgtactaaaaatgcaaaaattagccaggct

SEQ ID NO: 129897 - DNA, 358 bp, Homo sapiens
attgatctctgggtttcagtattactcagggccgcccactgagtaatacctagtgcccccaaggggcactgagagaagtaaaaagaagcaggaagaaggaagaggagaaaacaagggaggaagcgggagtggccacgtggcacctgcaatctcatcagagctgcccttggccccacccgtcctgtctaggagaattggcacacactccctggagtctgggcactgaccatcagcaatgatgccagccaccgggcctccacagctagggcgggagcagggccctggtgcccaatgatgcttttagttggcagatggtgggaggttctgagggtccggaagaggggctgagtcatcactc

SEQ ID NO: 129898 - DNA, 483 bp, Homo sapiens
cataagagaccccaagtgagaaccacctggctgagccccactgatctgcagattctaagcaagatatacaatggtcatcgtttgaagcccctgcatatggattgcttgtcacagagctgaagacagccagagcagacttgcatacctgggagtggagtgctaattcacaaagcccaagacttgtgagtgagatggtggctctgcaagcaggtagccttcaaggttggaagaatactggtggtgacagggggataagggctgggaggaaagtgagggaaatgttggaaggtgaaggagacaaaagggcaccctgttagttagtggcagaaactctaccaatatggccccacacagtgacataggaaagagtaaatgtaataaataatctggggaaatctgggagacttgtcaaaagtgacaattggtgtattttggctatgtatgattaaatgaggataaagagaggagttgaaaagaaaaggc

SEQ ID NO: 129899 - DNA, 185 bp, Homo sapiens
tgtagctccctccacactgcaccccacgggcatgtacaattattatgtgtcaattataaacaaaattttcaaaagcaggtaaaccacgccaagggaagagagttaaggtcgcagtgtcatgggtggaggggtgagggtacacaagggccactttacagagagagggtaggggtgacaggaggggg

SEQ ID NO: 129900 - DNA, 130 bp, Homo sapiens
tggtgacaactagttcttggtaatcataataatcagacaaaaacaattttattacttcagactcaaagtttaaaaacattgcttatcaataaatggtcttccctttattaaattcatataactgacaatc

SEQ ID NO: 129901 - DNA, 160 bp, Homo sapiens
tagatgtgtggactggagcaggtgtgggtgtgctctgtgggacgtgctgacttccgccccagctgagaatgcagaagagcagcatgctgcttttcaccatcagttcctctgtccaaactcgaagccacctctggtgaagaggcagtagcatttggcaatg

SEQ ID NO: 129902 - DNA, 383 bp, Homo sapiens
gatccctgattctgtcttgtaatttctttaccccactaacacactcaccactttctaaaaccatacataatttatgtttattattattttaggtcatcatccactagagtgtgaactctgtgaggcaggaccccatgtttagtgacatgtctttgatactaacagccatatctaatacatggaaggactcaactatttgtttgaatgaattcttataataggatacatttagtcttcaactggctggtaggctattaagatataaaacaaactggaaggattttgctgtttaaatcacacctacaatgtctacatttattagaaagggaattttcataaagcaacagtaaaaccaaaggacactgctatttgttgctgataat

SEQ ID NO: 129903 - DNA, 551 bp, Homo sapiens
tgcacagcctctagatcacgtgcaggcacaggtgctgggaactacagaagaggttgaatagaaggcttaacaatgagtttggaagtcaggcacagagggtttgacttccgggggcaccccttgccagctgtatgaccctggcaagtcactcttcctttctgcgccttggtccctgcatctataaattgctgtaaggatgaaattacataattataggtaaagcacctggcacagtgaacagtccacaaatcttagctataataacaatgacgtcagttaagtaactcacttagaaacaacactggccactgaagtggagggccagtgaagtggagtcaagtgctgggaggaagtccaggccagcaggccaactttggtatacaaagatgtgaaaacacgcttggcgtggtggctcacgcctgtaatcccagcacttcggaaggccgaagcaggcagatcacctgaggtcaggagttccagaccagcctggccaagatggcgaaactctgtctctactaaaaatataaaaattagccaggcgtgttggcgtg

SEQ ID NO: 129904 - DNA, 689 bp, Homo sapiens
tgcacagcctctagatcacgtgcaggcacaggtgctgggaactacagaagaggttgaatagaaggcttaacaatgagtttggaagtcaggcacagagggtttgacttccgggggcaccccttgccagctgtatgaccctggcaagtcactcttcctttctgcgccttggtccctgcatctataaattgctgtaaggatgaaattacataattataggtaaagcacctggcacagtgaacagtccacaaatcttagctataataacaagatgacagattttgatcgttttaaagttatgaaggcaaagaaaatgaggaacagaataatcaagaatgaagttaagaagcttcaaaaggcagctctcctgaaagcttctcccaaaaaagcacctggtactaagggtactgctgctgctgctgctgctgctgctgctgctgctgctgctgctgctaaagttccagcaaaaaagatcaccgccgcgagtaaaaaggctccagcccagaaggttcctgcccagaaagccacaggccagaaagcagcgcctgctccaaaagctcagaagggtcaaaaagctccagcccagaaagcacctgctccaaaggcatctggcaagaaagcataagtggccaatcataacacagtaataaaggttcttgatgacctgttaaaacaacaaaacaacaaaaaac

SEQ ID NO: 129905 - DNA, 300 bp, Homo sapiens
tttgaattttagactggaactatcaatagtaattttagaactagtgttgttggcattgggttgtatgatataataacagggatgtgaggactgttctgtgctgactagttcacttaagcggtatctacattacgctaagccattctcctaattcaatgaggaataaatatccaatttgatggggaaactgtcatgataaaacaaccagctgattccattttcatctcttcaagctactgctaaagtagagagtaaagaaagccctgagtccaagtcaaagctaacagagttagtatttca

SEQ ID NO: 129906 - DNA, 574 bp, Homo sapiens
cacctttaggattttctacatataagttcaagttatctgtaaacagaaagaattttactccttccttccaatttgaatgtctttttttcaattcttgcctaatttttctgactagacctttcaatactatgttgaataaaagtgtcaaaagcaggcatccttgtcttgttcctgctcatacagggaaagctttcagtctttctccgttgagtatgatgctagcattgggtttttcacatattgcctttatgttgaggtggtttccttctattcttaggatgttttcattatgaaaaaatattgaatttcatcaaatgcttttattgattcaatcttattactgattatagttctattcatatttttgtgtgtttctaggagtttgtctatttcatctaggttatccaatttatttgcataaaattatttatagtactttcataatcattattttattagaattggtagtaatcgcttcatttttctttctttctttttctttttttttttttttgaagagagggacgggctctcactatgtagaccagtccaggatggaatacagtggtgtgat

SEQ ID NO: 129907 - DNA, 258 bp, Homo sapiens
ctcatttcagtttgataactctgcttatttttctgcttgatttaacaatttctgaaaagcatgtgttaaaatatccaattatgatggtttttgtttgtttgtttagtatttttttggtagagacagcgtttcaccatgttggccaggctggtctcgaacttctgacctcaagtgatctgcccgcctcggcctcccaaagtgctgtgattacaggtgtgagccaccacacccagccactcaaacttaatgtagtaaact

SEQ ID NO: 129908 - DNA, 385 bp, Homo sapiens
ccaccaagtggcaccggactcccagcagtttctactccactaatccatcttgtttctgccattgcatttattgtgtccattcttctttattttgtgtttttttagtttactcctgtttccctctcaccaatacacacacacgcacgcacacacacacacacaccatagccatttgcatcaaagcaagcagttccattttaaggttcaaaatgtcttctttgaatgtatcttttacacttccttttccaaaatcaggatttctacaaatgacacaggtaacttgatgtctactatttactgttccatacacacatatagtgactatatcagccatggcctggcaagtttgataagtgaagccattccattttttagaacaaaaaaa

SEQ ID NO: 129909 - DNA, 437 bp, Homo sapiens
aatacactgtagatgaatgtctgcatcaagctgatgcgtgctgtcaaatccagggagattcaaatcacaaatttaacaaacgtatcttctccttaaaggattatatattactatgattaaaaaaaatagatacactaatgtcatccaaaaagtataggtatgtgtctccaggtaaatgataaatgacagagatgacaaaatagctcaaaacgaagtcagcaagtgaaacacaatttataaggcatgtccatgtaagaattagcacagagaaataactacagagccaagaagtatagactgcaaaagatatcaacgtaccacagaaaacgacagaggccaaatgagaagtatggagaaagaacacctaaggggtctggaactagaattgtcctggcaggcttgagggaacaagaggcatttaaggtgaacttctggat

SEQ ID NO: 129910 - DNA, 428 bp, Homo sapiens
tggggaggcctcaggaaacttacaatcatggcagaaggggaagcaaacacgtacttcttcacatggcagcaggaaagagaagtgcagagcaaaaggtgggaagccccttataaaaccgtcagatcttgtaagaactcactcactattatgagaacagcagcatgagggtaacctctctcatgattcattacctcccaccggctctctcccatgacatatggggattatgggaactacaattcaagataagatttggatgggaatacagccaaaccatatcaaagagtatattatgatccatgctgatatgaaggaaaattattctgccttggtatgagatggattgtgaaagagaaggacaagatttgctgatttattcaaaacatatttactgcatgcttacaatatactggccctcttctaatcaa

SEQ ID NO: 129911 - DNA, 384 bp, Homo sapiens
aacgccaaacagtaaccgccttcaggttcagcttcggcatttctaagcctcagcgtcccaggcacgatgatggggctgtggctcctccctcccattgagaacacttcactgcctcctcgcagtggtgcctactcagggagaacagagacgctcaagctgactgagcttacgtggctgatgagttgcagagagttctccttagcctgtgccccctccctgaggacagggactatgtcctattcctccccgtggcccctgtgtggcctggcatcatgcccagttgttctagaaaccagccaacatggactgaattgattccccaaagctggagggattcatgccattcacctatccatacagtatatattgggcattgggcatttc

SEQ ID NO: 129912 - DNA, 509 bp, Homo sapiens
atgaggagatgccaggatggtgtctttttcccctcactttctgagcagatgttgggatagcattctgaaatcttgaggacacagatatctgaatcttgcatagggagcactgtcatatggaagtcagagggttaaaaacaaaaaaaaaaaaaacaaaacaaagccttccctaggtgcagtggttcacgcctgtaatttcaccactttgggaggccgaggcagttggatcacctgaggtcaggagttcaagaccagcctggccaacagggcgaaaccccatctctactaaaaatacaaaaaattggctgggtgtggtggggtgcgcctgtaatcccagctacttgggaggctgaggtagaattgcttgaaactgggaggcagaggttcagtaaagacttgaagataaattaataatttttcattaaaaatatattaataatgcattcttactgaaaatcataagaattacaatgatttatgggtatacatgttcagtagctttttaatac

SEQ ID NO: 129913 - DNA, 316 bp, Homo sapiens
gagatggcaccaccacactacagcctgggcaacagagtgagactccagctcaaaaaagcaaacaaaaaaccaaaaaccatgcagcatttatgctagacagcaggcagagtggtgcaggagagtgaagcatatcatgtgttctatcattatggagtgagggctctaactcttgtgtccttgagtggctagggaaatctccacagaggagatactgagattaagggagacctagaataggcaagttatgcctacagatgttccagggtaaagcttagaagccaccttcataagaagtagaactgccctggctagaaat

SEQ ID NO: 129914 - DNA, 129 bp, Homo sapiens
tgcggcgtgaaccactacgcctggcctagttttaattttttgagaacctacaagggttccagtttcttcaccttcttgccgtcacttgttattttttttaaatagtcgctgtcctaatgggtgtgaggt

SEQ ID NO: 129915 - DNA, 255 bp, Homo sapiens
gggtggcgtctagaggatccctcataggtcgcaggcgcaggtaagttcatctatctgtatgcctaaatctggatcaatattaaaaacccatgactgctgcataccaaagccacatccttcaacctaatctttactaatattaaaggtaaaatatataaaaagatggaatttttatatccatctgtctttcaattggttccactcttgggccagaaataaaagttacttattgtctcccttcatcctaacacttgc

SEQ ID NO: 129916 - DNA, 203 bp, Homo sapiens
atcaaatgcaccatggtaattcttagcaacataaataggttagtccaatctaacttaatttccattctgtgtttaaaaataatgctagtaacaaatttcagaagtactccttcagaaaagctacaaaaactgcatgcatgttgcaacagataggaagagcttctttcgtattttcaaatatttcacatttcatgttttcaaat

SEQ ID NO: 129917 - DNA, 424 bp, Homo sapiens
caaaatcaagaatttgacattggtactatgcatatatatgtctttgtgtcatttatcatatgcgtacatttgcgcaaaaactaccacaataaagatacagaactgttccaccttaaagatcattcccatacttctcctttttatgcactcataccactcctaatcatctctaacccctgacaaccactaatccgttccatctttgtaattttgtcattttgagaatgttctataaatggaattatatcctttagacctttctgactcagcataatgcccttgcgatccatccaagtatgcatcaatagtttgagtctttttattgctaagtactattccatggtatggatgtatgaaagtttatttagtcattcatcgattgagggttattttagttgtttccagtttttggttttacaaataa

SEQ ID NO: 129918 - DNA, 245 bp, Homo sapiens
cctcagggagcatttacttatggcagaaggttaagtgggagcaggcttgtcacatggtgacagagggagcaaaagagagagttgtgggggtaagtgccacacaattttaaataaccagatctcacgaaaactggctgggcacggtggctcacacctgtaatctcagcactctgggaggccgaggtgggcagatcacttgaggccaggagtttgagaccagcctggccaacatggtgaaacccaat

SEQ ID NO: 129919 - DNA, 638 bp, Homo sapiens
ttttcaggagacatgggtgtggttttctcttttcgcatgttttagacaaaagtggcggactgatgagtttaatacaatggaataccatggcttgtgcatgagggagtaactttttacaggaatgtttattatctttgtcatccgaatccatatgccatgctcagaaaatacaatggatctgtgtcccgagtggaacagaaatagtttttccatgctgaaatgtgttttggtcaccatttgacatttttaagaagcagctctgtgaaatatttttgaaagtggatttatgtattcatattcattcatgtgctgttttttcatctatatattccccatcttattccagaaaggatttaagctggctcatgcatttgttgtatttggaatgtttctttataggtcaaggactagtttcccagtgaattgatttaaagaactgcagtcctctgactcaggcttgaattcacatatgatattggccatttgggatatctctctgttgtatgggcagagtaaacacaagtataaatctgtgacaacattttggatttctcagatcaggtactccatcatctgctttttatcacgtacaaaagaaatacaaggccatttatttccctattaccctgtgaaaagta

SEQ ID NO: 129920 - DNA, 274 bp, Homo sapiens
ctgaggcacccgccaccacgcccagttaatttttgtatttttagtagagacgggttttgccatgttggccaggctagtctcaaactcctgacctcaagtaatccacccacgttagcctcccgaagtgctgagattgtagacatgagccactgcaccaggcccagcttccaactttttactgtaacttttgttttggggtggggtgggggtctcactatgttgcctggagtgcagtggctgtttacaggcactgtcatggtgcatggtagcctcc

SEQ ID NO: 129921 - DNA, 175 bp, Homo sapiens
ccaccagaccccacttccaacaatggaggtctcattaaatacgagatttggaggggacacacattcaagctatatcacccttgttatagtcttttattacaatgtttggtgtgttaggcctcaggaaacaatatccctgaccttctcctgccctcctttcatctgcaccaaggca

SEQ ID NO: 129922 - DNA, 167 bp, Homo sapiens
ttggccaggccagtcttggattcctgacctcgtgatcttcccacctcggcctcccaaagtgctgggattacaggtgtgagccactatgccctgcctgcaaattatttaattagtactttattaatagtgagaaactatttgagacatttcacaaaagatccaagtgg

SEQ ID NO: 129923 - DNA, 601 bp, Homo sapiens
aaggaggaggaggagggagagggaagggagaagtggaggaaagaggagaatagaagagggaagaggggaggggagagaaagaaggaagggaagagaaaagagagaaggagatgagaaagaaggaaaggaggagggaagagaaggatgaagagaggtgggaggaaaggagagaaggaagagaaagaggagaaaggagggaaggagggacagagtcaaacaagatcaacagaacactggctcaggagtcaggtgaccatgattcgagtcccctgtagcctcattgggtgaccctgagaaagtctcttcccttctctgagccttggtccctgccctgttcaaagagcggcttaggctgactgcagtccaagtccctttccagcccttggactctccacccatcagggatgctcttagggccaagtgggcaagtgactccttggctctttcaaccatgcagagagatctctatgggaactggcagagccctggcaagttgaggccatgggaggctgaacttgcttgtccaaggccctctgcacagagaagccacccaggcccagccctgcagctctcccgcttctcctgactccaccactcttca

SEQ ID NO: 129924 - DNA, 196 bp, Homo sapiens
ctgccttgtctcttcttctgtttctgccaagacacaatctttcatttggggcttggccctagcctttccagtccctcctctcccttacatacctcaaggattggggagctcactccctctcaggttgtgtaatgagggtgaaaatggctcctttttgttacggctcctgtgtgctgcgtgcctgctccatgcctgg

SEQ ID NO: 129925 - DNA, 669 bp, Homo sapiens
gtctgcagtggcctgctttttggcatttcttctaagctgaatgcttctctaaaatcttagcttatatctgtagccaaagtacctagccctctgctcacccttctgtggcatccgaggtatctttggtgaacattcaaggacgaattaccaaggtgttctctctcttcgtcaacactcacctcccaagcagcgttctgtggtggggcacattaccaccatgttggggaatcagtgtgtgttcacacgacaagaggcgaaaaagaaaaagacaagaattgccaaaacaagcaaatttttcctattctttcctctgtctgagaaatgttcctcaactttccccaacacccgatgcatgatacctgccaaaaaaagctttctccttgctcttcagacacaggctcattgtgagccattctccccggcatccccgcgagtgcaaatttgtgtatgtggtgttttgttttgtatttattttcccagccctttgaaaacagggccttttcctatttaaaataaatttcagaagtgaaatactttttcccttttgagagcccagcccttcctccatacaaaccttcaggcattttcagaggacaatgaaaacttgctctaaaacaccatccatagacttcccttcagtcagtgtttttctcacacattaacaacaaa

SEQ ID NO: 129926 - DNA, 296 bp, Homo sapiens
ggaccactggttacctatgcatatgaagttttaatggtgtattttaggatatagcatttgactttcctttaatctgaatctgattttatagaattctgtatcacactttcctaaaacactgtaagcatcagagaacaccttagttaaggttcaatgtaaatttcatgttgctaataaggttgttttatttaaagcatttaaaaggccaataggctgggcgtggtggctcacgcctgtaattccagcactttgggaggccgtggcgggcggatcatgaggtcatgaggtcaggagtt

SEQ ID NO: 129927 - DNA, 511 bp, Homo sapiens
cagggtagtcttatttgcgttaatctgtttggtgtctgtgacattcctgagctatttatatctttttcaagttttggatagttttctggtattatttgaaaaagctttctacccctcgttcttgcttaatttcctcttgaacatcaatatttcttagatgtggtcttttgagatagttttctatatcttgtaggcaatctttggggatttcttaaattcttttttcttttctgactgtattttcaaatagcttgtcttcgagctaactgattctctttgaagtattctgctcttgaaagcctcatgaatttttcagttcagcaaatctatcattgtctttttagggtcagtcaccggttccttgctttgtgtgtttggggagatcatggttccatgtttgctattgttttttgtggatgtattaatgcatgtatctttgcattgaattattagtaatttattccagtcttttctgtctgtattgttttatttttattgaatatgtttgctt

SEQ ID NO: 129928 - DNA, 701 bp, Homo sapiens
tgcagtggctcacgcctgtaatcttgacactctgggaggctgaggcgggtggatcacttgaggtcacaggttcaagaccagcatgaccaacatggtgaaaccccatctctactaaaaatacaaaaattagctgggcatgatggcatgcctgtggtcccagttattcagaaggctgaggcagaagaatcacttgaacctaggaggcagaggttgcagcgagccgagatcacgccactgcactccagcctgggcaacagagagaaactctgtctcgaaataaataaataaaaaataaaaaaataaaaatgccacaatgaactttagttatattcttgatgagttctactttggctattataagcatgacaaaaaaaaacttttcaagtatatcaactttttaagctttacaaaaaaactcaaagttcacaggcccaaattaagcagcagctcttatactttccatccaaaacctgagaagactagcatcaccatctctccaatctacaaatacaagaactagggaggatgacaatgaaacatcagggagatgaacaagggcaaaatgaaactaaataggagtgtacagctattaaattccaacctttagctggcaccatattaaaaaggcaccctggcaactataatcctttgcagggaattagggtagaggaacaggacacagcagcatagaaacagagttt

SEQ ID NO: 129929 - DNA, 171 bp, Homo sapiens
aaataaataaataaacaaatatggaaagggggatggctagaatgaactctgcagtgctggatcagaattggaaatatcaatgggagcacatagttttataaatttgtgtgtgtgtgtgtgtgtgtgtgcgcgcgcgcatatgtgtgcatttgtgtattagtgtgatagtct

SEQ ID NO: 129930 - DNA, 269 bp, Homo sapiens
atgtattctgtgtgtagtcttcggaatttctctagatttcttttaggggttgagttatttcttttttttccctccatgctttatattttacttcattgcaatggcacttagaatgattgcttaggggccgggtgcggtggctcatacctgtcatcacagcactttgggaggccgaggtgggcggataactagctcaggagtttgagatcaacctggccaatatggtgaaaccccatctctactaaaaatacaaaaaaaaaaaaaaaaaa

SEQ ID NO: 129931 - DNA, 357 bp, Homo sapiens
tgaaaaactcatactgagtgtggaaatccgggtttgttgagtactcatatgcgtagaaaaatgattaccaaaggccaggcatggtggctcatgcctgtaatcccagcactttgggaggctgagaagggtggatccacgtgaggtcaggagttcgagaccagcctggccaacatggtgaaaccccgtttctactaaaaatacaaaaattagctgggcatgttggcacacacctgtaatcccacctacttgggaggctgaggcaggagaagcatttgaacctgggaggcagaggttgcagtatagccgagatcataccattacactccagcctgggcaacaatagtgaaactctgtctc

SEQ ID NO: 129932 - DNA, 815 bp, Homo sapiens
gatatgattaattacagtatagcattctttatttacattctagtttaccctcagtactgataatatttcttcatcttttggagtaaagtcctttccatagcttcttaaatcacatgtttaaaatgatctcagttatattggtaaggcagaaacttaaaggtcttatttttctttctaatcagtaccaagaccagtgtgcagttcccagtaagtactcaacaaatttttttcaataaatatttttgaattatattccgaatataattatattcagaatataattcagaatattcagaggtagacactagctctatttctaaacactgatattaacatttcactgaatatattattgacatatgctttgaaaggataaaacatatttcaattcatgtttatgagctaattttgcagttctctatcatcagctgactgtgtgatgtattcccctctgattgatattgtattatactgggaagattatttttgaaattctgcaatgtttacatttaaaaatttataaatatttataaatatcaagaagtgaagtatttcagagtcaaagtaatttatgaaatgaaaaaaaatttagaaagtattacaaaaagcccaaattgttcagtgtaatattttttctattccatctgagttagcagtggaatgggaaatataggaagtgacaataagaatttgagtcattttcccaaatgtatattcattttaaatgtagtactctgaagtgtcagctaactttctttgttttttaacatagcatataatttccctaatgttttgcaaaacaaaaacaaaaaaaa

SEQ ID NO: 129933 - DNA, 432 bp, Homo sapiens
ggtggtcttgtgagacaggactggagttcttcaacaacctggagtctcagaattcccctcagaatgccatgaggatacacctgccgagtgattttgcagcagtgttcgggggacctgaatgaggtgtgaagaactggcatgttgcctggcgaggggggtgcccctgatggctcctctgtctgccttctgagtaccatctgtcgccacctctgggtaacgttcattgcatgcttagcacctacaaggtactattctaattcaacaaccctatgagacaggcgctggtgtttccctaaattacagaggaaggaactaaggcagattaagtaacctgccggaggtcatgcagctagtaggtgtacatgttgggattgaaccccggtcatgtggactccagcctgaactcatttccaccacattcagctgagatga

SEQ ID NO: 129934 - DNA, 168 bp, Homo sapiens
cgtcagttgaaagctaaattaaatcaacttttcatgcttttgttagttgacttgaaatctctttaaaatgccttttcactgacagcagtagggaacccaaggcaggcagcatctaaaatggaccctaatacctgactctgggtattcatgctgttggattgaacctcg

SEQ ID NO: 129935 - DNA, 301 bp, Homo sapiens
tctcaccacccaggctctgctttgtttccaaagctcttcccgtagctggtcttctcaggcgtctcagtctagcttctttgaatgccagctgacttcaccccatcgtccctcactgcacatcctctggaggcctcacagtgcttctccctctctgctgtcccctctaccctcacctccagaagaactgacttttttgaaaccacattgtcctttcattgatcacaccactatcactgcctttactgttctgaaataaatttatttacccatccatctatgctgtcaatctgtatggtcctga

SEQ ID NO: 129936 - DNA, 723 bp, Homo sapiens
tgagacttcatatagctatctctgaaattttgggcactaaaagaacttgagaaagttacttcataaatgtgtggaaactggaaattgactctatatctttggtaataaaggggtaatgtcagtattttcaacatcctggtgtccagtctagaaagacctagtaggagaaaaatattaggcttttccaaaggatctgtttctgatttcttaacataaatttggccttgttgagtcctttttaatttgaaccggcaaagtatctccccctgcctcagaaataacttattgattaaaatcgaaaactagggccaggcacagtggctcacgcctgtaatcccagcactttaggaggccaagataggtggatcacttgaggtcgggagttcgagaccagcctggccaagatggcaaaaccccatctctactaaaaatacaaaaattggccgggtgcagtggctcacacctctaatcccagcactttgggaggccgaggcaggcagatcacctgaggtcaggagctggagaccagtctgaccaacaaggagaaaccccgtctctattaaaaatacaaaaactagccaggcatggtggcatgcacccgtaatcccagctactctgaaggctgaggcacaagaatcacttgaacccaggaggaggaggttgcagtgagccaagatcgtgtcactgcactccagcctgggcaaaaaagccagactccgtctc

SEQ ID NO: 129937 - DNA, 372 bp, Homo sapiens
ggggaaatcaagattctttctaatatgagatgtcaagcatgtgctctggagctcaaaggggaggtgtgttctactggtagaattttcataattgtcagtatttggtagacaacatttaaagtttgggaataggtgaaatccaaggagaacataaagatggaaaagttggccaagcgcggtggctcacacttgtcatcccagcactttgagagtctgaggcaggcggatcacaagttcgagaccagcccgaccaacatggtgaaaccctgtctctgctaaaaatacaaaaactagccgggtgtggtggtgcatgcctgtaatcccagctactcagaaggctgaggcaggagaatcgcttgaaaccgggaggcg

SEQ ID NO: 129938 - DNA, 492 bp, Homo sapiens
tgcctcctgagttcaagtgattctcctgcctcagcctcccgagtagctgggactacagatgtgtgccaccaagcccagctaattttgtatttttattacagataaggttttcttcaatgttggtccaggctggttctctgaacgtcccagaccccttcaggtgaaattcacttcgaccccatatgatccgcctgccttggactcccaaagtgctggaattacaggcatgagccatggcacccagcccgtatcagcctttttttaggtaaaatattatttagaattttctagagcagcctctatgagtagatcttttgattgtactctacttgctgtaacagccagaaatgcagaatgatgtttatctagaatctgcaaataaggtctggcctctgcctggaatttataaaacagggtcctactttagattgagaatgtacagaaaaccaataggaggcattttctgcattgtgagatgtcaacatagacatt

SEQ ID NO: 129939 - DNA, 684 bp, Homo sapiens
ggtgctggtatttatagccatgaacttattacttgaaagcatcctagggacccaagtcttaatcaaggggcagttcttccaagtagtggttgaggaagttgggtatgctttccaaaacttctttcctcactaaagattgcagatatactctgtaagtgacttcacagaatatactcaattgtcatattttaatttacatgtttcttctgattataggtcccacgtgattataagttctgagatcaagggtcatctttgtgggggtgtgtgtgtgcacttaaaattttatgtgctggtaatagttatcttgtggatatttaagaaataggaatgtgtgccatattttaaatacaccttatatgcaaaaattttaatgtaatttaagtatatcgcaaaaaataaaaaaaaaaaaaaaaaaaaaatggggggggggcggggccctcggaaaaggctttttcataacacacttgtgcggttggggggcgggggcgggcccccaggtggattaggtagaacactggggggccaaaggcgcggctccccccgaagggagacccgcggcgccagagaaacaagagcggggtgggattccctcacaaattaaaaacaccccggggggaacacgagagcgttgccgcaaacacatccgaaggggggttccgaggggcactcccggacctatac

SEQ ID NO: 129940 - DNA, 314 bp, Homo sapiens
tatcatgtctatggtcacacagccgatacacggtagaggcaggatttgaactcaggcagcttggctatttcagagcctgcactgtaagcgttatgctccattggctctctactcaccaacagcatccacacaaagacacccccttcccctcacaggactcaggagagggacctttggggtctgttttccctcacagctgctccaactggtcaagttagcatgacgtcatccggatgacataaacaaatttgcagtcaggctgaggtgagggggaggacaaccctcagtcaggtttgtcctctacaggctccaca

SEQ ID NO: 129941 - DNA, 363 bp, Homo sapiens
gttattagagtgacacggtattgagagtgcacgacggatttgaaagccactgcttattctaaggactgaccatcttcagctttctactggacacacacacgcctgcccatggcaagaagtcttttatggaaagccaaacgcattctcctggaaaggccacatggagcactccaggctccctctccaggtgtccccccaccccctgtgtctggcggcaaatggctaatgacagatgggcagccggaggaggcctgaggttttcatggaggctcacactcacccccccagcgcatcaccaccgggagaacactgcagccaagcagcctaatggaaacagacagcagcaaccacacagcccttagg

SEQ ID NO: 129942 - DNA, 397 bp, Homo sapiens
gggactggggagcagccacatgccctctgcaggggagtagttgccaggaaggtgcaggcggaggccctgctctccatcacagcggtcctgtttatgagatcgtcactctcaagaggccaaaagttatgaccaaacttcaagagaaactcccagtaaagtagtatttccacagcagacagttgggatgcaggtccacccacagccagctctgagctgacacaggggccctggccagggttccaccctgctctgcctgcctggggccctggctagcctgcagataacatcaagtagtttcgtaatttccacacacagcacttccagagcctcataatcaaccatctataaagtctcaagaagccatgttgcttcctcatggcacctgctttccttcctc

SEQ ID NO: 129943 - DNA, 355 bp, Homo sapiens
acgtagcaataggtcccactatataatagctcttacttgctttagcctctgtgtgtgtctcgagatgtacattttttatactatatattaggtttctcccaagaagcagaatcaatagaggggtggagggtatacgtgtaagaaagagatgtatttttcaactcatgtgattgaagagtgacaagtccaagatcttcagggcagcctggagccccagggaagagttgatgctgtgcttaaatagaaggtcactttttttttttttttgagacggagtctcgctctgtcacacaggctagagtgcagtggtgtgatcttggctcactgcaacctccacctcctgggttcaagtgat

SEQ ID NO: 129944 - DNA, 252 bp, Homo sapiens
caaagcaccccaaaacttagcggcttaccacagccatcttcccatactcctggttctgcaggtctggaagttgcacagagcacaggagggctgacttgcttccatcctgtaaagtctgaggcctccactgcaaagactccacagctgagagggacccaacagctggaaccatctgaagatgtcatctctcatgtttcccccacatgatgctggctgttggtgcgacctcagcccaggctgttggccacaaca

SEQ ID NO: 129945 - DNA, 405 bp, Homo sapiens
tgtccagcatcctgaaaatcattatttcatatattttccatttaaaaaaactgtttcaggtaagaaggtgaatctagtccctgacataccaagttgaccaaaagcagaggtccctccaatgttctttgcatgccactgacttacatgctcaagagaaatctaggagtcatccctgacacccttctcccctttcccacagccagtccatcaagacttattctctgtcccagacaggcgcggtggctcatgcctgtaatcccagcactttgggaggcaaaggcaggatgatcacttgaacccaggaattcgacaccagcctgggcaacatagtgagaccttgtccctacaaaaaattgaaaaaactagtgaggcatggtggcacgtgcctctagacccagctactca

SEQ ID NO: 129946 - DNA, 477 bp, Homo sapiens
cctcagcctcccaagtagctgggactacaggtgtgtgccaccacacccagctaatttttgtatttttagcagagaggcggtttcaccatgttgaccagactgatgtggaactcctgatctcaagtgatccacccgccttggcctcccaacatgctgggattgaaggcgtgagccaccacacccagcctggtcctctgtctttttaaatatgcgtacgccctgccaccctttcctcttctttttctctctctcttaggacatagcagaggggtctaagtcaggggattgttttgagttaggactaacaggatgagaagttagccaggcagacaaattgagctcggacgtgtgttctggctgaaggaacagaaggtcccaaggcccagagccatggatgcaccctataactggggactgacaagtagcttgctgctgctggggtgaaaggcagggtgtggcaaggccagggatgaactt

SEQ ID NO: 129947 - DNA, 241 bp, Homo sapiens
cacccaccagattggcaagcatttaaaaatctgacaatacccgggttagtaaggatgtggagttgcagaccgtgtctgtggtgggggagtaaattggcacatcaaccacttagagcgattcggcaatatctagtccagatgaagattaacatatgctacagctcaactcctcgccatgcagaaatgccaaagaaccttggccacatatacccagggacacatgtatacgaatgttcttagc

SEQ ID NO: 129948 - DNA, 435 bp, Homo sapiens
atttttagtagagacggggtttcaccatgttggctaggctggtcttgaactcctgacttcaggtgatccgcccaccttggcctcccaaagtgctaggattataggcctgagccactgcgcctggcctctttgactaacttctaatgcactttcgaagaagttcctttgccagcttttctagttcctaactttatgcatctcccttttagccttttacttactctatccatggtgttctagagaagttagacagaggaaaccaaggagggtcacgtactctcttgagcgctcttgttctgtggttggatttctgtacagatgtctccatgatatgagcaacagagcagaaatttggagctagattttctactggtcaagcctcaagtgtaatcctatcctatgggatgtaagggcatactgatttttcctgtttct

SEQ ID NO: 129949 - DNA, 645 bp, Homo sapiens
gtattcttttgtgtttgtccccaggccttacaatgacttcccagtgcaagattcagacgcatcattatgtacctatgacactgaccccactgtttattttccaaatattaggtactttggggaagcatgatgagggaagctgtgttgtgactgcccatgagggtggctgatctggctggaggtcaggatggctgtgaggtcaccagatccctaaggggcttgagggaggaagatcagttctccaggaagaatcagatgaactggaagtaaaggcagagaagctaagcgtgtatcttggacagctttcttcttcttctctttttttatttaaaaaaatttttttatcatgactgactgattcagtgaacttgatttttatgagctgctttgcagacatgaagagaaaaaacagcttggcaggagtagggaaaggggggagggatctaaagtaaataccacacttgcctgcagtttagttgttgacaaaaaacagttttccctgagaagcatgtgtaatatgtcaggaagaaaaaagagcaattaacactcttcttacataagatcttattgatagcactgtattaattttaatcatttaggttaaaatgctcttcttttttttaactaccggtcaataaactatat

SEQ ID NO: 129950 - DNA, 357 bp, Homo sapiens
gagcctcaggcctctgggggacaatagcaaaagctctaacatttatgtcactagagtctcagaaggacaggagaaagagtgcggcacagaaaaaaagcatttgaaaacataatagctggaaactgtccaatttagtcaaagacataaacttacagttcaagaacccgccagacaggatgaatctcaagcagaataaaacacaaagacactccatgcccagatacaccataatcaaactactgaaaattaagtcaaagaaaaaatattgtaagcagccagagaaaaatgatattttacttataagggaagaatggttcaaatgactgtggacgtcctttcagaagccatagaggccag

SEQ ID NO: 129951 - DNA, 646 bp, Homo sapiens
gggagaaagccatgtgaagacgaagacagggatctacatgccgaggaatgccaaagattcccagcaagtcatcagaagccaggagaaaagcatggagtcaacttttgtctcatggttttagttctaaagtaaccaaactttggatatcttgatcttggacttctggcctccagaactgtgagacaataaaattctgctgtttaagccagatgaatttctctttaaatttgtaatactctgttatggaaaccttagaaaactgatacacccctttttgcagataataaaactgagtctcaccaccagtgtaaaagtgttcctatttctccacattctctccagcacctgttgtttcctgactttttaatgatcgccattcccaactggtgtgagatggtatctcattgtggttttgatttgcatttctctgatggccagtgatgatgagcattttttcatgtgtcctttggctgcataaatgtcgtcgtttgagaagtgtttgttcatatccttcgcccacttgttgatggggttgtttgtttttttcttgtaaatttgtttgagttatttgtaaattctggatattagccctttgtcagatgagtagattgtaaaaattttctcccattctgtaggatgcctgttc

SEQ ID NO: 129952 - DNA, 236 bp, Homo sapiens
ctagtagccacagtggatctgaaagcagctctggatctgactcagagagtgaaagtagttccagtgacagtgaggcaaatgagccatcccagagtgcatctcccgaggtgagacagaggcggtggggtaccttccacaggccctctcagggtccttggtgatgtccatttaaaacctgatccaaatataaaaggagaaggaaagaaggttccatagtctgacaaaaagaaattgta

SEQ ID NO: 129953 - DNA, 1082 bp, Homo sapiens
accagcatcttctaaaaatgtcagcagcagtgaagtttcagtttgggaaataatgcatttcccctctctggagagtgcacagttatatctccaagaagtactgaaattcagaagtctgcctaatatgtattaaacatttagcttttctcaaactttgaccaccaaatcctttgtctcgctctaactatagttaacacagaatcagtgttcccaggagcacactgtgaaaaatgtagcactctacaaaagtcctaatctccacaggattaagtgaaaccatgattaaccctctgttccttgtccttattagtaccattttctgaagagtaatgtatccccccaaaacttttatactagtttcactaaccagaatccatgtacataaggaaggacagatatttgctccctactaagacatatctattagctacattaaaaaaagtattgcatgccgattttaaagttataattaactggtgatatcacagatattccaagatataattgctggaataaacactgttgttgaagccttctatctatctcagtactagaattaaactcaagtgcagaatggcagacaaagttaactaaaaatcactgtattatttcatttggtcctccaaatagctttgtgagctaaggaggagaaggtgtatcatcaccacttccattttatagatgagaaatcaagtgatttactcaaggttaagtcctccaattctttgttatcctgcattttctcttggctgtagtttaattaataatcctaagaaaatgcttatattttagagtgcagtaagagtacataaacaatgttaaatgcccatcttgcatgtataaaaagttatagcaagaaatctggctgggaatggtggctcacacctgtaatcctggcactttgggaggccgaggcaggaggattgcttgagcccaggagtttaagaccagcctgggcaacatagggagatcctgtctctacaaaaaaatttagccagacacagtggcttgtgtcctagctactcaggaggctgaggtgggaggatcacttgagccaaggaggtcaaggctccagtgagcta

SEQ ID NO: 129954 - DNA, 523 bp, Homo sapiens
tatctgtgaactttgaaagttactgtttctgttaacttatcagttaatggatatttatctgatttaagcttctttagaattggagatactaaagttggacttaagccattatcacagttagaaatatatattaacctataaacgttcataatagtttgctgcctgagatggggtagttattaaatatcttcagtgttaaagaaaataatcaggccaggtgcagtggctcatgcctgtaatcccagcactttgggaggccggggcgagtggatcacctgaggtcaggagtttgagaccagcctaaccaacatggtgaaaccccatctctactaaaaatgcaaaaattagctgggtgtggtggcgcatgcctgtaatcctagctactcaggaggctgaggcaggagaatcgcctgaacccaggaggtggaggttgcagtgagctgagatcgcaccattgtactccagcctgggtaagaagagcgaaactccatctcaaaaaaaaaaaaaaaaaaaaaaaaaaaaa

SEQ ID NO: 129955 - DNA, 275 bp, Homo sapiens
gtggggttgttgagatgacgtgaccttgagtcttgcgcagcctgtgtctgccatgtcagccttggtggcccccagcatgagtgtggcactccggtgtgcctgtgtcccagtgtggctgtgtgtctcaggcaagtgaactgatgtctgtgtgacatgtcttccgtgggcatgtgtgtgtccacgcacacacacacatcgttctggactgctcttggacggacatgggcatggatatggggtggaggggacacagggacgggaaaggtacaaataca

SEQ ID NO: 129956 - DNA, 310 bp, Homo sapiens
acctggcagccactcccagagctcctggaactctggcccaaggctctctgactgactccttctcggcttaccggctgaagactgatgctgccccatcgcctcagaagccccgtagaccatcacagacgccgagctttaggtaactcacagtggagggtaagcccgtccccttcttaatcaatatggaggctacccactccacattaccttcttttcaagggtctgtttcccttgcctccataactgttgtgggtattgacagccaggcttctaaacctcttaaaactccccccactctggtgccaactta

SEQ ID NO: 129957 - DNA, 674 bp, Homo sapiens
gacaagggtggaaaaaagactagatttaagcagtaaaagatcattaagcgaggcttcatcacttcttcagtaggacagttattattgggattcaaagaggggcttatcaatgaatactatgttgtccttccccttctaaatttgaaatcaactgagaagtagataagaagattgaaacattttttttttaatagccttattggtaaggctcaatggagaatatgccatagatctgttcccaagtgagcttgctaaaatcctccctcccaattaaacttaacaggatgatggacatctggaacttccaccccacccctgactccacccgccccactgcgggttgcttagtacaggacctgtagacaaaggctggcatcccacacgctatgcttaatcctgctggtgcttcagctctcttggagagcttgggaggggctgggccacgggtgactagtttcttctagttgtcagagggttgaggaatgaggtctagaacattatggctgcagactttactttcttaggaagatttgaggctgccaaatagtggccttccactaccagtatgcttgtatggtgctttttcctaccctttctagaagattgaaccatgagcttaaattacatattttagaccaaagagaattacagatttctgtccttaaaaactcata

SEQ ID NO: 129958 - DNA, 146 bp, Homo sapiens
atgtttttcctctgttaggagcttattggtatgcctctactgtacttacacaatcaatgggaaaacaatctacttgaaaagcttacaagccacatctttaaaccaataaggagctctcacctctctgatttacatcctgctgaaag

SEQ ID NO: 129959 - DNA, 520 bp, Homo sapiens
ggcagctgagcggatgtggggggtggccggcggcgctcaggaatgcggccctccccctctcccagccgacagcctctttggctcagaaacacagcgccccaccctggctggccgccctcagcccaggcctgatggatcggactccaaccagggctttcgctgggccctgctgccctggacctgccctgctctgtaaccgtgaggagtgaggacacagaggaggggtactgagtctgggcctaggcccctgccctgaggtggaagtggagaggtagagcgggagcaggagtgggtcaggctgggggaagcaggccacagcccgcagcctgagagcctaccctggactcagagctgggcagacacgccccaagagtcccatctctggaaagccccgtgggtctctctgttaattaaatacatttgtttggtaaaagcaactaaaaatacttgcagcatcgtgagctgcggagaagagctggctaattaacgcctggtttgtttgggatctggaatacatttc

SEQ ID NO: 129960 - DNA, 678 bp, Homo sapiens
aaagaaaaagaaaagcatcactgtgctgtcaaaacttaatttttaagtattacttatggttctgtatttatcctgcaatatttttagctcttagaaaaaaagtggtagctgggacatttgttgcacttgggaggctgaggcaggaggatcacttgaggccagggtttgaaatcatcatagggggaccccatctccttaaaaaaatttttttaagtagatggatgtggtggtacatgcctgtgtcaggattgtctaagtcttagctacttgggaggatgaggtaggaggatcacttgagcccagaagtttgagactacagtgagctatgatccagcctgggtgacaaagtgagactctgtctcttaagaaaaaaaaaaaaaaaaaaagtgaatgctgcctgaaggttgaaaacacctactgtcgagaaaacactcacacctgagcagtccatttcttccacgggaagtccagttctgaacaacgtgcctgttgttcaactatctgcccgagagtaactgcacatatttgaccgtagaagcaagcacctttcccaaagcgtcttcgcgcacaaccgctaggaaccttttcacaagacttgatccatcacccttggactcatatggctggacccgcgaagggctcattaccctgcaaacccgcggcactctttggccaacg

SEQ ID NO: 129961 - DNA, 207 bp, Homo sapiens
aaagactgtagcacaggagtttttaatctttcagactcttccataatgagcctccagcaatttgtcaagaacccttaagtttttcctattttgacactggttcctatggagattgctgctcttataagttgtgagaaatttaattgttttttacttttgatataaatacctctacatgagtaatacatctgtatatttgctgtattt

SEQ ID NO: 129962 - DNA, 321 bp, Homo sapiens
gaggctgaagcaggagaatcgcttgaacctcggaggcggaggttgcaatgagccgagatcgtgccactgcactgcagcctgggcaacgcagcaagactctgtctcaaaaaaaaaaaaaaaaatcgtaaagatggccttccagctttattttgctaagagtagtctttacgtggtccgtgtggttttgttaacacggcagtttcgatttactagactaaaactagcatataaagaagctaagaaggctggccaacgatcccacaaccagcataaggttctcagtgtggcagtctctgttgttcagagtccatgttttaattt

SEQ ID NO: 129963 - DNA, 356 bp, Homo sapiens
ttgccatggatgggagccgtgtaaccagggaatgccccagctagtggtcacactccaccagcaaactctgcccctggtgggaaggaacagacagcagcactcttcaaaatgactgcgtgggaactgggggtcatattcaagaagcccctttcagtgccagcctactccattcctcagaaagcaagctggtattgcaagagttaaatgtgatgcagtcccagttcctgaagcctacagttagaccagccccgcttcactagcgtgtcaggtggccttgttcctaacaggaatcgcaggcctttccctttgtgaccagaattctgtggcttacttctttgcctcaaagctgcactgag

SEQ ID NO: 129964 - DNA, 770 bp, Homo sapiens
ggagttggagatcagcctgactaacatggtgaaaccccatctctactaaaaatataaaaattagccaggcatggtggtgtcacctgtaatcccagctactcaggaggctgaggcaggagaatagcctgaacccaggaggcagagcttgcagtgagctgagattgccccactgcactccagcctgggctaaagagtgagactccatctcaaaaaaaaaagtgttctattaaaggtaatgagtagagcctattaatgattggaggcacatgataaaaaaggctaaactgctttgaagggaatacttggacacacagacattactgttgattctggtgaggactccgaaagtaatgaggagagctagagagaaagcttctactatcttagagaatacatatattatgaatagaatgttgctagattatgagctttgacagtttttctggtgatattttacctggtaatgaggaacacactatttgaaactggagggaaggctattcttgtcataaagtgtaagaaaactgagctgaattttttgcagccactgagtgaaagatgtaatttctaactgattaagttggatagttagctgaggagatttctaagtcaaatgtggaaggaacaacctagtttctcattgttactttattataattgtgacaggaaagagataaattaggatataaactattaagtaaaaatgaatgagcactgattattttgaaagttctcagtccatccaaataaaatgctctggaaattgggtc

SEQ ID NO: 129965 - DNA, 321 bp, Homo sapiens
aaaggcttcagccaatactggagggatgggacagggcaggataagagtctgcaaacatttggaaggctcaaataccctggagggatggaattaccttgcctagtagccaagtgttttaaggcatcaggcaaggccttgcccataattcactttctatctgtacatgaaagtcccaccaaggatgaaggatatggctgaacactggacctggtctggagtggagtggactctgagaatgtctgtctgctgacactacccttgttgcacttcctggggtagggacaataaaggagacccatgtgaccagagtctccacatcat

SEQ ID NO: 129966 - DNA, 318 bp, Homo sapiens
tgctgggattacaggcatgagcaaccgcgcctggccaggagtccttttcaatagctactaactatgggctaggctaagtgtccttcacctaagccccacctatataggctaggagatagcattcctgtaacagaaaaagaactggacttgaactctgaggacttaagctcaggatctgactggcacttactgaccttgaccaatcacaagctctctgagcctcagtctcttcatcaatacattgaagataatctcaaccttgattcccctcttttcaggattgttttgaataccaagtgagacaatggccaatgcatt

SEQ ID NO: 129967 - DNA, 740 bp, Homo sapiens
ggaaacccctgataaacctgtcagatcttgtgagacttactatcgcaacaatagcacaggaaagactggccccgtgattcagttacctcccgctgggtcccttccgtaacacatgggaattgaattctgggagatacaagtcaagttgagatttctgtggggacgcagccaaaccatatcacctggtttctctgtgttgcccaggctagtcttgaactcctgggctcaagcgatctgcatgcctcggtccatcaaaatattggaattacaggcttgagccactgtgcccggcctctgctgaccttttaaataaagctttggcaagtgacagtttgaggttaggaaccattgataattgatgaattaccggataagtctttatttcttccttctacatctgataataaatccgatgatttccattttcatgtcattgcgcctctactgttaacatataattatttatactttctatttttttttttttaactcttccactttctctttttgtggtggggtacttaccctagcaataaacacattgttgtcttagatgctgcattggatagcagatacgtggatatagtattagactagagaatgcttaagaattctgcattccaaaagcatactaaagcctctgtttctagtgcttaagcaacagtgtccttgatatcagtctaagaaagtctggatattgacatgcaaatgaaaaaatcagactctttgaattttgtttg

SEQ ID NO: 129968 - DNA, 434 bp, Homo sapiens
atttttttttctttgaggcaggatcttatttgtaagccaggctggaatgcagtcttatgatcactgctcactgcagccttgacctcctgggcttaagcaatcatcccacctcagcctcccgagtagctgggactacaggtgcataccaccacgtccagctaatttattatttgttgtagagatagggtctcactatgtttcccaggctggtcttgaactcctggactcaagtgatcctcctgccttggcctcccagagtgctggggttacaggtgtgagccactgtgcctggcccatggctcagatttaaaagatgtaaaaggtgtatagtgaaaagccacccacttcctgtactagctaccatattctctctttacaggcaactggtattcctccttccagagataactctgttaatatatatatatatacac

SEQ ID NO: 129969 - DNA, 570 bp, Homo sapiens
agaaagttaaataaactgataacgatagaaaaaaggcttatatcagaaatataaagaaatttccatttttttaatactatacaatcataaaaaaagaatgaaatcatgtcttgtgcagcaacgtggatgcagctggaggtcatcatcctaagcaaactaatgcagaaacagaaaactaaatactgcattttctcgcttataagtgagagctaaatattgggtatacctggacataaagataggaacaaaagacgctggggactactagagggggaagacagggaggaaagcaacggctgataaaccacccattgggttctatgctcactatctgggtgatgggttcaatcacaccctaaacctcagcatcatgcaatatatacctttgtaacaaacctgcaaatgtactccgattttaaaataaaaagtgaaaaaagaaaaaggaaatacaaaaaaattcaaattaaaaaaaaggattaatttattatatataccccacatatgtgaacacaaaagggtctggaaggacacaagtcaaattgctcattgttagccctgacaaaacatgga

SEQ ID NO: 129970 - DNA, 242 bp, Homo sapiens
ctaggacacctaatcagtaaaggcaaacggaaaatagtacctgaacgaattgaaggtgtcacatctctacctttgcctgaaacaaagcaggaacttagaaaattcttgggattagttggatactgtcgtctatggattgactcttatgcctgaaaaacaaaatctctacataaaaaactcacccaagaaggaccagacccccttctttggaccctatcagaagtccaacaagtagaagagtt

SEQ ID NO: 129971 - DNA, 180 bp, Homo sapiens
agctttatagaaaagtttgctgacctctgttctgtatcaaattttaggcagtttaaaaggaaatctattggaatttcatataatatatagattaatttgaggagaaataattattcaatattgagtaatcatcaaagaacaaacgcagtgtctttcttcaattttttttttttttttttt

SEQ ID NO: 129972 - DNA, 594 bp, Homo sapiens
tggccactagaatgtgaatccagggtaggttccgcagtagggagcccaggtcgttctatgtctgttctggacatcagtggggtgtctggcagtttagtgtgggctcactgagaagctttgcaaggaccacatggcagcaagatgcgctcgagagacagagaggcaaggagggagggaaacagacacagacagagtgcgcctgtgagacagagagaggtggagaccgtgaggccgtgagagccagccccaagagtactcgctcccctgtgccttccagctcgccctggcacacccctctcatctcccagccaagccaggtgctaccctgttctcctccgtgtgctcttgcctggaactctcgctctgcctccctgcctcacctgtaacctccacaagcacctcctgaatccctcagagctgtctctgcagccacatgttcacccatgtcatggacccaccgagcactttgagttacttatgaccttggttacttctccctggccttgactatagttgatgcaggtgccttgtcgtgtgtgtgtgtgtgtgtgtgcgtatgtgcgtggtaaaacacataatatcaaacttaaccat

SEQ ID NO: 129973 - DNA, 177 bp, Homo sapiens
tgctgggattacaggcatgagccaccccacctggccctgataattatttgtgattcctttctttcgttgcaccttttgcatacattcaatcaggtatcaggttctggcaagtctacctcttccagttcctcaaatcagcccttcctctcattctctcactttggggaaagcctggat

SEQ ID NO: 129974 - DNA, 700 bp, Homo sapiens
tctgctgttgttaggtggagtattctgtagagtttatagtgttcaagtcttctatttccttgatcttctatctatactatccattactgaatgtgaagtattaaggtttctaactattatttttgaattatattctgcctttcaattctgtcagtttctacttcatatattttggggttctcttattaggtgtacacatgtttataagtggcatgtaattttgatggattgacctttttattgttacaaaacattctctgtagtagcaattttttgtcttaatgtctgttgtttctgctgtgagaatagctgcatcaactctcttttggttactttctgcatggtataactttttttatcttttactttcagtttatttgtatctatttaatctcaagtgtgtctcttgtagccagttatagttggattatgttttttaccccttctgcctatgtgctttttgtttggagtgcctgattaatttccatttaatataattaccaataaagtggaatttacatctgctattttgctctttgttttctatgtgtctcattgttttttggggtggttattcctctagtcctgtagtgctgccttttgtgttaaatagatattttcaagtgtatcacttaaatcacttgttttgtactgtatacttttagttcatttttgtagtggttgccctgggaattataat

SEQ ID NO: 129975 - DNA, 814 bp, Homo sapiens
caagcaacagttttgactcttagcttcttgaacacttattgtctttaaagaaaagtaataccagcttggcattaggtttgaaagagttttcacatagggagtggtgagggatagagtaggtcccagcagcgtccctttaacactcactcacataccatgtttctgaaagttatatattttggcatttcttgttagaacttgcagacatgctgggcgcagtggctcatgcctgtaatccccagcactttgggaggctgaggtgggtggatcacctgtgggtcaggagttctaaaccagcctcaccaacatggcgaaaacccatctctactaaaaatataaaaaatagccaggcgtggtggtgcatgcctgtaatctcagctacttgggaagctgaggcaggagaatcgcttgaacccaggaggcagaggttgcagggagccaagatagcaccatggcactccagcctgggagacagagcgagactccgtctcaaaaaaaaaaaaaaaaaaaaaaaaaaaaattgggggggggccggggcccggaaaagttttaaaccctccggtgtggggcgcgcggggggccccagagaagggtggtatcttggacacgttgggcccaaaaggggggtccccataagagagaaacccggggaggaagagcaaagtgcgcgtggggtttcccacccgaatataaaaaaaaccccggggggggaccacccgagggggtcctgagaaacaatccccagatgggggtcagaggggaaaaacggggcttacccacagggggctcaacgggaggccgaatttaaattacg

SEQ ID NO: 129976 - DNA, 520 bp, Homo sapiens
attctaatataaaaagaaagtataaaatagtttaaaccaaaacaaaaagaaaactttccaaatcttcaaatagatgtaaatatacaggtataagaacatcagagaacaccaaatagtttcaacccaagtaagattatccccagggcatataatagttaaactctcaatgttcaaaggcaaagagaggatagtaaaagcagcaaaagaaaataagtaatttggtcaggtttggtggctcatgcctgtaatcctggcactttgggaggccaagaagggtggatcacttgaagtcaggaatttgagaccagcctggccaacatggtgaaaccctgattctgctaaaaatacaaaaagtagctaggagtggtggtccccagttacttgggaggctgaggcatgaaaatcacctgaactcaggaggcagaggttgcagtgagctgagattgcactgctgcactccagcctgggcaacagagtaagactttgtctcaaaaaaaaaaaaaaaaaaaaaaaaaaaaaa

SEQ ID NO: 129977 - DNA, 689 bp, Homo sapiens
gaatccccttctttttcagatgaagaaattgaggcccagggacattaaatgacttacccgaagtcaggcagcagctcagtgctagcagagctaagactggaagctattctagaactgtgttttatttattcattcagtttctccaatttaaagcctggctaaggagataggactaatacacccagaaataattaacaggaggaggcatgtaattagaagcttaaatttcaagagtggaaatgggccttagaggctatctattatgacttcctacacaaacaaacatctctccatacccctgaccattgagtgcttagcatttgacttgaaacccacctctagtcctaattttgttccttggagctatacaggatatatctacatcttctgctgtgcacagtcctccaagaatttcaaaatagctcttttgaacctatagaacatcatatccaagctaaaaactccaaacttctttaagtctttcacattatacatgattttgagcaatagtcattataaacctggttgtctcccttcgatggattacagaaacggcttccaatgaatgatacctcccggtattcctgtccttgtgtagtcccctcccatcctgaaggtaggttctttgacctacatagaatgtgacagaggtgactctttgctagttctgatcttcagcctcaagaagg

SEQ ID NO: 129978 - DNA, 332 bp, Homo sapiens
ttcttcaacaaagattctgaggagaaaagcagcaatttgagtctcattcctccttgccactctgaaggatgtggcaacatgcagtgaaatcctcaaagacggacattaaagactggggggagaaagagaagctcaaagcttatatgatcagctatgaaaacttgaaaggatgcttgtgtgagaacaagcacttcaaaataattctgtcaactacagaaaagtaccttttcacccaaaatattttaaactttgtacatttttttaataaaaattaacaaaacatagcacaataggatgcccagattagttcaacctttgctgaagcatcatct

SEQ ID NO: 129979 - DNA, 801 bp, Homo sapiens
gtttttggtctcgtgtatgtagattcacttaatctgcattgtaaggaaactagccttttgtcatatgtcttgaaaactttttattgatttgttatttgtattttgaccatatggtatgtttttctgtttagaaatttttatgtagtcagatttatcattttcttttatgactttgagtcataaaagtgaaaaaagtcattgagttttatgtaatccttagaaaatccttcttgaggatcataaaaattttcccccatgtttactcctagtaagtacttttatactttttatgatttcattttaacatttaattatttgatttatttgcagtttgttttgttctagagagtgaagtagtgaaataattttatatttcaagattatttcccatttgttccaataccttttattttgaattatccttcttaaccactttgaagtaccatttttgtcatattcttgtagtatgggtgaaatatttcctctgcttttccatttatctgtcagttcacacagaagtatcagactgttgtgctataatttttaaatactagctaaacggcttttccataaatatttttcttggctatcttatgtgtgtataattttctacttcatcttaaaattttttttatcttgtcccctctccctctgttggagttttagtaggttgcattacatttatggattaattttggggagaattgaaatacattcggtgttgatattgtgtatttttccataaacacgtggtttttattaacatgtatttaaaaaaaatttagcatataattaggtgaa

SEQ ID NO: 129980 - DNA, 750 bp, Homo sapiens
cgtggtggtacgtgcctgtggtcccagctagttgggaggctgaggtggcaggatcacttgagcccagaagatgaggctgcagtgagccaagactgcaccactatactttagcctgggtgaaagagcaagaccctgtctccaaaatataaatacataaatataaaagttttttaaaaaaattttaaaaatagccagcatggtggtgtgcacctgtagtctcagctacctggggggctgaagtgggaggactgcttaagcccaggaggtcaagggtatagtgagccataatcatgccactgcactccagcctgagcgacagagtaagactctgtctcaaaagaaacaaacaaacaaacaaacaaacaaaaaaacttgccaggcatggtggctcatgcctgtaatcccagcacttgtgggaggtccaggcaggaggatgtgcttcaggccccaagtttgagaccagcctggacaaaagtgagaccatggtttttggttctcagatttttacaaaagaaaataactacacataaaacaaagccaattaatggacaataggtaacatgctccttttcagaaatgtttttataacatggcaaatcctttaagtttacaataatatagcactaaaatagcatgttttctaaacactattccatgcagttatttatcagtggtccacatatacccatcacttcatttaaaaggatttgagagagtttgcaaatcactaaaaaaaaaaaaaaaaaaaaa

SEQ ID NO: 129981 - DNA, 249 bp, Homo sapiens
agggaaggggagtggggatcaatgctgtcttgcagcctgtttctggctacttttcatcaacatctcgctgagccctagagtaacccacaaggcaggttgtagcagcctcgtctttttttttgttgttgagatggagtctcgctctgtcaccaggctggagtgcagtggcgcgatcttggcccactgcaacctccatctcctgggtttaagcgattctcctgcctcagcctcctgagtagctgggattac

SEQ ID NO: 129982 - DNA, 701 bp, Homo sapiens
caatatagtgaagagagtaaattcttttttttaggtctccattactaacaacatatacatgtatgtttttaatgtacttaagggtatttcaaattcattttactgtttaaataatacctgtttgtcaatgctctcatttttagaaaacttggtaatgtcaaaaatgtacagaaaaattgatgcaaaagacttcaggatgcattgaactattgataccaccaatgcagcaaaaggacactgaagtggtggccaagagccctgggtttccatcctggctggcccagaggctaggccagtgatttggacaaactcctttactctcttagcttgagtttcctcttctgaataatgaaactgggaaagtttgaactagctgatctttaagggtcttttctgctctgatgtaaaatagaattctatttttgacatttcatcagcacttgtgtttgcactctttgtttccttggcaaatacctatcttggatgtagaaagtttcttccagtcctcagcagagtcatcattattctaaatgaactcagcctaaattcatggtaatcatgatatatgtatgaattcactcattcattcattcattcaataattgagttgcctaccctttatcaggcattatactaattattagaatacaggatgattaagaaaatgtttttgcaatcaagaaattcccagcttagtgggg

SEQ ID NO: 129983 - DNA, 339 bp, Homo sapiens
gtagctgggattataggcgcccaccaccacaccccgctaattttttgtatttttagtagagacagggtttcaccatgttggccaggctggtctcgaactcctgacctcaagtgatccacctgcctcggcctcccaaagtgctgggattacaggtgtgagccactgcggtcagactacattacattctaatatagttatagtcacaggtaccaaggatcttcaacatgtctttggggggaaaaccattcaacccacaacaaaagctaaagaagaaaaatcacatgattgtatcaatcaatatagaaaatttgacaaaattaaacaccttttcatgataaa

SEQ ID NO: 129984 - DNA, 441 bp, Homo sapiens
atcaaggggtagttttgacttacatgtctcattatttaagaaataaggttatagctacccaaatagtgattaactctgatagatctgggcaaaataaattgaaaaccttccagagaaaggattcaccattctagatgccatagaacattcgtgattcacaggaagaggtcaaaatatcaacatgaacaagagcttggaagaagttgattttaaccctcatggatgactttgagaggttcaagacttcaatggagaaagtaactacagatgtggtggaaatcacaagagacctagatttagaagtggagcctgaagatgtgaccgaattgctgccatctcagataaaacttgaatggataaggagttgcttcttatggataagcaaagaaagtggttttatggaatggaatccactcctggtgaagatgctgtgaacattgt

SEQ ID NO: 129985 - DNA, 324 bp, Homo sapiens
aggtgattcaggcttgagcaggtgtgcagaatccaccctgaatctcaaagggcagtaagtgtgatgttaatcacctgtggattccttcttactgtggctcttgttgagacttcagaaaaccatactggataggcccctaacacatgtcacatgtcatggcagtacactgagctgtgacgatgagcctgcatagacacagccattaccttcatgaggtttatagtcaaacaggagagatgacactaatcatcacacaaagaaaatgtaaaattgcaactgcagtcagtgctgtaaaggagtggttcttagttctatgagaacaca

SEQ ID NO: 129986 - DNA, 583 bp, Homo sapiens
acgatttatgaatcagacatgaggtttggcacacagataaatgtgatttcagacagcatccttctcactaacttgctgccttcttggaataagaatttccaagatgtctcaggaggtaccaagggagcagcaacaaggcctaatgatcacttcttcaagaatttatcccaagaaatgcattgtatcttaagttggggaacacttttacctactcaaaaatcttttgaggtattcagataaatccatgatctgagttttatgttaatagttttacagtgtcatagtgtggtaattaagtgtagaattttaacctctgaggctgggcgcagtggctcacgcctgtaatcttagcattttggaaggctgaggcagaagaattgcttgagaccagcccaggcaacatggcgaaaccttgtctctacagaaaaatacaaaaattagctgagtgtggtggatcatgcctatagtcacagctactggggatgctgaggtgggagggtagtttaagcaagggagtttgaggtggcagtgagcctagttggcactattgtactccagcctgggtgacagaagaccctatctc

SEQ ID NO: 129987 - DNA, 334 bp, Homo sapiens
cactaaaaatacaaaaattacccgggcgtggtggaaggtgcctgtaatcccagctacttgggaggctgaggcaggagaatttcttgaaccctggaggcggaggttgtagtgagccaagattacaccaatgcactccaggctgcgtgacagagcaagactccatctcaaagaacaaaaaaagaaacattaagagaataaaaaagccacactacagactgggagaaaatatctgcaacacaaagaacttttatctagaatatataaagaacttctataactcaatttaaaaaaataatccagggactttttccatcataagtccattgggagcctg

SEQ ID NO: 129988 - DNA, 359 bp, Homo sapiens
tgcttacagtcaatcaaccagagaggaataaaggaggaattttctaagggtactggggagtttcccgtgacctcaggcgtgaaaaagacatttaccgaagatggaaaataggatgctactctcttccagttactatccgatttggcatcctatgttccactcttcaggtaaatgtctttttcactgccgcggatactatactacatcagataccattactctcatgactattcattggaacagagaacaggaagctcacgaaccgcagataacaaagggaactgaggacaggcacgcgtgacttatgtctgcaaatcccagtgcattggagacggcaaggccgggtcggactcccctgg

SEQ ID NO: 129989 - DNA, 376 bp, Homo sapiens
tcagcctcccgagtagctgggactacaggcgcccaccaccacgcctggctaattttgttttttgtatttttagtagagacggggtttcaccgtgttagccaggatggtctcgatctcctgaccctgtgatccgcccgccttggcttcccaaagtgctgggattataggcgtgagccaccgtgccccacctgggtttttatttttaatagagtagctccttaatttgaaacctgcttcccctctaatccccaacccagaaagaagaagggttgtgtatggtccataaacaaacttctcaactattaagtcaggtgtttgctttgtactctttggtatttttgtaggtctttatgttttctgtcagatcctctcacta

SEQ ID NO: 129990 - DNA, 398 bp, Homo sapiens
tcgagccttaccgaaagtgtgtagtcacgttactgaaatcacaagttgcaagagacaaggagcaggtaggggaacagcgagtgatgccttcttctggcgctcagtaaactggcatttgacataagatgaacatagagcagctacctgtggggatatgtcacttttcgtctgtagctctccgcttagggacaaaaggaaaggcggcttcttgcatgactcagctctcagcttaatttttttcttttggcacagtgaatcggggtcctgagtatttctctttccctttcagcccgcttttccctttaaatgttgaagccctcaaaatcacatttggatgatttggagaaaggcacagacctgtttctgaggcattgtccttaactgtggcactttttttt

SEQ ID NO: 129991 - DNA, 191 bp, Homo sapiens
attcagccctgactgccacttgtccctctgacctagccataaaatactaatatttgcagctccctcttatatggtgaggaataataaaacattatagcactttgggctttgtttcatttcttcccattgatagcttttttcctgccactgtcagcatagctatttcccagcatgtttttccctccagttct

SEQ ID NO: 129992 - DNA, 219 bp, Homo sapiens
tgtttagcactgaggcattgcaaccactgttgctcagcatggtcctccaggactccaaacatcatgatcctcaagaatctaattttaattctcaatgtttcctgtaagtcacagcccttttgctcaggcagaatagattttctactgacatcaaatggtctgacctataatacaatatcaagataccttggctattgtgggtggacaatttcttctata

SEQ ID NO: 129993 - DNA, 272 bp, Homo sapiens
aagcaactagagctaagatttgaatggaggcagtctggctcctgagttcaggcttctgacactgcctgtgtaatcatgagactacatctgaccatgctcatgacaccaaatccatagtcttccaaacgggggatcagagccaaccacagcacctccttctctctcactggtccacccagttgacaaatactgttaatgctctctgatctctctctctgtctctctggcctggctccctctcttcaggtttggctccttcctcatcttcttct

SEQ ID NO: 129994 - DNA, 845 bp, Homo sapiens
agtaaaaaaacaagggtttttataatagacaaatatggttttgaacttggttttgccacttattagatgtgaacctttgggcatgttaatgttgtttacgttcttagatcttcagtttccttctctataaactgggagagatgtctatttaatccatagggttggaatgaagatgaagggaaaatgcctgtgtagcctcacgcccatagtacggaaatcaactgctatttctctttcagtaagagaaactgggtttggaatttatagtcattgttgactttaaatcacacattttgtgtaatatattacttaggaaagaccagaagtatgtacaccatttttttttttttaaatctcttggtgatgtaattacagatgattattttctttgtacttttgggtacattccattctttttttcacaaagaacatgcattatttttgtaatctaagagttatgaaataaatgtaaaattgagtgtcagtttatgtgcacctattcattggaatttaagactctccattctcagattctgactctaaatttacaaggcacatactaaaaccataagcaatttcaatccagttattctatcatgaatttatagttttatgtctttgtctcatactgattataaatggcccacttaatcttatgaatgtttaaaacaggtaatagattcacatgattccaaaacgtttttcaaaaacatattgagaagaagtattgtcccatctgttcttcagtatggccagtttccactgacctctctttctctattactgctccccaccagattggggtaacctctttatgcaaaaataaacaaatatgaatatatact

SEQ ID NO: 129995 - DNA, 930 bp, Homo sapiens
tccccacgagtcgtccccctttaggaagtttttgggggtcagatctcacccccccttgcccacacaggttgggaagaagactttgggccgacgcccctcacttctcccccagacccaattgcagggactttagtcctctggagtgctgcgtgtgagttaccttgtgtgtctgtgtgcgtgcctagaggtcaagtgtaactggtgttcgtgagcacctcgtggttgcgggtctctaactctcgtgggtctctaagcgcacccgcggggctggagcggaggttcgtgtctctgggagggtcagtggtgtgactgaagctgggagttagctcgtgtctgtgggtgcctcggtgtgtgtctctggggctctgagtccctgtgcgtgcgtgtgtgtctgtgaacccgacaggaagctccccgagggcaggaatatgttttgctctctactcgatcccagcgactggcaacgagcgtttaataaatatctgttgaatgaataaatgtctgcgtgtgagagcgtctaccctccagagtggcctcggaggaaagggcccgagggcggccatccaaaaagacccccagacacggggtggggcgggggcgaacggcccgcgtcgctcccattcctcctagcgccccttcccccggtctccactccaaagtttccctggggctgaagaatccacccagagacgaagacttggcggagggggctggagactcggggacccggggcccgagacgggagtgcgggcagagggagggctcgggagcgacgacccagagccgtgaaacgaaaaagaaagcaggcaaagcagcacggagcgaaagagcgaaaagctccctaccaagccaggctttgttccctgaacctaagactttacccggcggctggcggcgggcgggccgggagcgagcgagcggaggcgcgcg

SEQ ID NO: 129996 - DNA, 247 bp, Homo sapiens
ccagcatggcaccgtaatatgtactaacctgcacattgtgcagaagtaccctaaaacttaaagtataaaaaaattatggaaattattttccaaaatgaaatttattggtataattgctcaaattttcatctgtttaatatacagtgaagtcatcattttcttttctcatctattttcttggtttactttccagttctaataattatagcttgccttctgttacatcattttaaaaatatttaataac

SEQ ID NO: 129997 - DNA, 315 bp, Homo sapiens
tccctccggggctcgctccccacgtgcactgcccaagtcccatgctccacctgccaagtcctctctcgagtccttctggtgcccccagccttgccacctgcagctggctgacctcacaggccttcagggtctccctgaccctcctcctcctagccacccctgcagggccaccagaaggcaccacctatagcaagcatcagccacacctcacccctgcagagagataaaacagcagtaacaggaacctgcctgtggcggcccactgcccagaacccccacacccagggggtgccttgcccggcccctggccgtctc

SEQ ID NO: 129998 - DNA, 463 bp, Homo sapiens
gggtgagagtggcctccagggcttctgccacagattccagagcctggattcaggattcagaacccacccagtcacccccggtctgtgccctggtgggctcccatgcactcagtcctcagtttccccatccggcagcaggtgggtctgtggcgacttgcaagtgagcccagtgtgagccgcatccccacacactgcccggcccccacccctcgggctccatggcagctctttccaggcgcctgctcttccagtctccagagaagaaaggcctggggagcgggcggagagtgtctatgctaggatcagggtcagagagggaggagctggccgtcaggtgggccaggaagcctcagtcccatgccccggccctccagcccgatgcccacccagtcctgccctccagcccgatgcccacccagtcctgccctccagccccatgtccacccagtcctgccctccagcc

SEQ ID NO: 129999 - DNA, 527 bp, Homo sapiens
tttttgtggagtcttttatgatagtttttatcaagcgtgcaagcatgagaaccctctcttcacagcctcctccagctctatttgtcagggttttttgtttgtttgtttaacattagtgattccattttgactttgacaacttttacactatatagctgttctaaaatttcattttgcaaaatgaatactgatatggtttggctgtgtgccaatcacatctcaaattgcagctcccataattcccatgtgtcatgggagggaaccagtgggaggtaactgaatcatgggggcaggtctttcccatgctgttcttgtactattaaataagtcccacaagatctaatggttttataaaggggagttcccctgcactagctgtcttgtttgccgccaagtaatacatgtcttgcttcaccttcaccttccaccatgattgtgaggcctccccagccatgtggaactgtgggtccattaaacctctttcctttataaatgaccagtctcgggtatgtctttattagcagcat

SEQ ID NO: 130000 - DNA, 394 bp, Homo sapiens
ggcactgtagaaatgcttgaaagaatttgaatcctctgctctgaatgtttaggtcaagagtccaaatcaattcaatcagaaggtagtgtatcctctgtggccatgttcaactgttacgcaagtaccacagatgacacagaacatttctgatagtcacagtccactaaattgataaatgggatctaattaaactaaagaacttaggcacagcaaaaagaaactatcatcagagcaaacagcaacctaaagaatgggaaaaatggggtcgggcatggtggctcaagcctgtaatcccagcactttgggaggccaaggcgtgtggatcacgaagtcaggagatcgagaccagcctggctaacacagtgaaaccccgtctctactaaaaatacaaaaa

SEQ ID NO: 130001 - DNA, 131 bp, Homo sapiens
atttagcaggctgctcctcctcaccttgtcccccgtctttcatgaagccagggcgttctagaaacgtagaggaaaaactggaatgacgttctatgatgaggtcaaacccatctgcccaatttcacacacag

SEQ ID NO: 130002 - DNA, 412 bp, Homo sapiens
gtaaaaccccatctctactaaaaatacaaaaattagctgagcgtggtggtgggcacctgtaatcccagctacttgggaggctaaggcaggagaattgcttgaatccaggaggtggaggctgcagtgagccaagatcacgccactgcactccagcttgggtggcagagtgagactttcccccccccaaaaaaaagattacagttagatgagaagcgtaactggttttctgttgtacagtagggtgactatgactaataataatgtatatttcaaggtagctagaagattttgaatgttatcaccacaaagaaatgatagatgtgactggtgtggtggcttatgcctgtaatcttaacactttgggaggccgaggcaggaagatcacttgggcctagaagtttgagaccaacct

SEQ ID NO: 130003 - DNA, 565 bp, Homo sapiens
aaaaaatcacagggcggtatgggaggctgaagcaagagaatcgcttgggcccgggaggcggaggttgcagtcagctgaggtcatgccactgcactccagcctgggcgacagagcgagactctgtcttgaaaaaataatagtaatttaaaggtttatatggacattattgtgtgaagattagtttttacttctctgagttaaattcccaggaatgcaatactgggtcatattgcattagtgtgctgaattttataagaaaatgtcaaattgtttcctagagtggttttaccattttacattaccactaacaatgtgtatcagttatccagttctctgtatccttgttggcatttagtgttctcactgcttttttattttagctattgtaatagacatatagtgtatcctattgtcacttaaaaacacttttatttcttctagactttaggttgtttataacaattttcattttaatttgcattttcctatgatattgaacatctttttatgtgtttatttgccatttgtatatattattctgtgaaatatttcttctctgttcttc

SEQ ID NO: 130004 - DNA, 202 bp, Homo sapiens
tggctggtacccttatgttctgaccaccagaatgttggctctgccgtgctccgaccaaaggaagcaagcagccctcttcagggcacagtgccaggcagcaccccctccctgccctggccctaacccacagcttgagggggatcctaaaagcaacagctctgaaagacacttggggccactgcaactccgcaccaagcagagt

SEQ ID NO: 130005 - DNA, 557 bp, Homo sapiens
tagatatgtctgccccattttcctctcatattttttgtctctggccctaaatctctttctggtcttgatcatcgcaaacttcattctcccattaatgaaacttgagctatgagagagagattatggataaaaagaagcaaagacagcattagtgtattagaagagctggtggcaaaaggaaaagtgcaggtgagggggaaagcaaaaggtagggaaatttaaggattagagagaaggatatctcgaccttgaagagtcagggtaggggaaagaaagtaatctggataaggaaagaaataaagccagttttaatgtatcccaaaagtctcaagacagattaagacttattaaaataaaccacaatagcagcttttattctcttccacccactttaacctcaaaaacaagttccttggagatttcggttattggattagtcattatcctagacactactcgtattataattcttgacaatttcaataactatgtagacaatccttccaagttcttcacccccatgccttgaccctttttcaatcttaagccccttcctc

SEQ ID NO: 130006 - DNA, 328 bp, Homo sapiens
ccttgctgtcaggaaacattaagtttcctaagtgacatcctttttctgcatgtttacttatggttatgtaaatcaagcgggcctccccattggaaatgatggcagtggttacaagggacttcacctggtcttttgtagttgtggcaaatagataagatacaaatgtgacctgcaattcagttcagcattatgaagctgtatctgctccctgggtggtggtcacagccctgctttgtggccctaacccttgccttcctgctggcgggccttgcacaggtgcagagagggggttagtattggcaagctaattggataaatggtgaagttt

SEQ ID NO: 130007 - DNA, 379 bp, Homo sapiens
attctgaaatccacacactctttctcttccgattgaggcaagaccctgaatggcagaaggctctaaaggcagcccttggtgaagctaatgagctgtgggagggcaggtgatgggggctgtgatgggaggtgtgctttcaggatgcacagacgttacttcaataaataatgagctcaatatccgtgggcgagttggtatttaggctcctttccgtgtgtttttggatggatgattaatgcagctgtaaaagagaagccgtgagctgtgtgtgggcagatgcagactgaaatgaaggccccgagcaaagttccatcgtgggacatgggggtccaatgtgtaaccccctccccggaaggacacagcacctactctgtgcggg

SEQ ID NO: 130008 - DNA, 694 bp, Homo sapiens
tacaaacatacagttagatagaaggaataagtttcagtgtttgcagagtaaggggactgtagttaacaacaatatactgtatatttcaggatagcaaaagagaggacttgaaatgttcgcagcacatagaaatgataagtaatcgaggcgataggtaccctaaataccctgacttgatcgttacacgttctctgtatgtaacaaaatatcatgtactgcctaaatatatataaataatatgtattggtagaaaaactgcttttcttaatgtgactttttaaaaagcaccgtatttagaaggtaaattccctataattagtgacaaattatatgtggtatcatgatttgagtggtaaaagttttgaagtttttgtgtttttgtttttgtttccgagacaagatcttgctctgttaccaggctggagctggagtgcagtggcgcaatcactgtagcctcaaacccctgggctcaagctatagttttgaagtttttgtcttcttttttgagcataaattcaaagaaatagttgtgagctgtttgcacccactatggtgttttaagaacagaacatcatcattccctcagagttaaccactttcccgagttttgctttttcttttgccattacttttatttttagagctccatgtattttgtattcctgaaaacaaaaacagcttttgtactttatat

SEQ ID NO: 130009 - DNA, 728 bp, Homo sapiens
tatctcagagagtttcacttaatctaagtgtcattattcaatatcaaagcaggaaaatgtcatctgatatcctcccacttatgaaagttttaatcatccctcatcagaactaaacttctttctcattctggttatgctattaaactttcttcagatattgatgtaaaattctaaccatgcccaactttttttttattatactaattatactgtctttagatgcctacagccatttaactgccatggacttagaaaagccaaactcctgggttatatctgtgaaattacagagtcctatagataaacccaactgtttttggaaaaatatcaattgttttcttcctcatagacaataatctcgtaaaagatttctaatcatgggacagttaatcacggggacagtttctggttgtttcctcagagttatgttggctcattacagaacagacactccttacctgcagaatttgtacattgtggggagtaatttatcccaaaccagttcagacactaggactaaaatgttaatagtaccatttggagaatgctcagtacttgctaaacactttatattaatatttcctttaacctcatcatagcatccctattaggtagattattattcagattttacacacagtgcatttgtacatagagcttgcccaacaccacacaggtagtagtctgatctcaaattaagccctagaagccacagtgggagagtacca

SEQ ID NO: 130010 - DNA, 1016 bp, Homo sapiens
aaaacaatagtcagcctgactgtacaatcccttcattggcagtggatagctctggtgttttatttatgttgatcacactgtcaatgctatatggaataaccatttagttgcctctctattagtccataacatttttattactgtaattaaatgtcattatccatattgaactctgtattagaaaaatcaaattaggtaaactgaaatatccagaaagaactacagaactgttgggattcacccccagcaccctgacgtcatcttcagactttgatgagaaggaaaaaaaaaaaaaaccatgagtattcacttctcacagatagaggtcactaatggactgaatttgaatcactgtagcagaaatcacaaagttattaaagtaatctagtgaaaaaggaactcgaattgaaattaaagatatcaaaagatgattatccagaaaagtctgacctgaatacaaatattacatcaccttgaccttttttgaatcttctaaacagagagcaaaaccaaaagccgctcggcacccttgctgttttttaacttcagacgcttcagatcccagaagcaggaattcttccttgtaaagtacaaagctcaagagtcaaactagatcagatgttcacactgggtctctacagaataaagcttctggacttgtacatacttgagcctttcttaaaaccacagcttcaaactgggaaaatataaagttgtctaaatcctaaatcaaactctccagcaggccagaatataaatgtaacgggcatcagagaaggttcaaattagatccagccggtcaaagtcaaactcgtatatgatcacatcatctgaaacctaacatacaggaaaagccaggactgctttggggactccagggtagcccagcatggtgtcatttgggaatctactttcttctgctaaaagcatcccctggaatttctaaaactgcaatgaaactactgaagtgttaagacatgggctttaaaacaacaacaacaacaacaaaaaaaaaa

SEQ ID NO: 130011 - DNA, 371 bp, Homo sapiens
tgggtctccagaggggatttatgtttccttctgttggatgtctttgggtgctaccaacctgggaatactgtatgttactatcctggcttggagcttcctagaccatgctggtggtataaattcaaaccccagatggtcataaagcttgattgctatgaactgaatgttcatcccctcccacacctccttcatatgttgaagtcctaatccccagtgtgatgattattggaggtggggcctttgggatgtaattaggtcttgagggtggaatcctcatgagtaggattagtgccctgacaagaagagacacagaaaggtctttttctccaccatatgagaatatagcaagaaggtaaccctctgcaaaccag

SEQ ID NO: 130012 - DNA, 233 bp, Homo sapiens
ttggcctccatagccagccctactgggtttacagaaaagggacaggcaggggtgaagccaggtcatggctgagtccatctcaacagatccagcttcacctgcaagtgaccacgcaggtgacttcctcatggtgacaaaaggagtcatggcagggtagagatatcataccatggcaggggaaagatatcatagaattttccatgagcacatttatgagacatcaagttacaact

SEQ ID NO: 130013 - DNA, 746 bp, Homo sapiens
agtctttagggtggggagacagtgagtttaggtatgtggtctgcctatggcagtgggttcctaagccacagatccttttaggcagtaccacttcagtggctccacctgtcactggatctgcttaatactgtttccttcttccccttctagcctaaaagagttaatggtttcctgctactgtcagcccctgggtgccttttcatcccttgaggttaccattgacactactcaaacaaaataatggtatgtttgtgtttttgttataaacaattttaaaaaatttaacagaaacctgcatttataaggaacactaaaaaggtccattttaaaataattgtttattaaactgtaacaaggtttctagcaattttagattgaatgtgatgctcctaaactgctttaatacatgccataattacaaattaaatttttgggtcagacttcattataactgtggtaatttaaaaaaatccacacttgaaatgagacaagtgtctgttgactaaagagaaaaaaaagacaaaaaaaaaaacttttgcggcggctggagcctaaaaaaatttctaagcacttctgtgggcgcgggcgccgtatggttatgtggaccttggccaacgtgtccaagagagaccggggcctcgccaggggtgggtttctccccaataaaaacgcgggggaacccggcttctgacatccagaggggtcgggccttgcggcctcaacggtccagcaccgttagcccggag

SEQ ID NO: 130014 - DNA, 268 bp, Homo sapiens
atataaaactcaacttcagtgtcgtaaacacaattctaaacccgagagaaaataatctggaacctaattccttctaaatttggcataagaaatttataacatttttcaaaagggcacaaccagaggtgcttttctaggtgagaatgcttgagctcatgttcacattggtctaacagcaccttctttgcagtgagatgctgttttcatacaactggaatcagccttcaaatccttcagtgaagaggctgggacggcaatctgccccttc

SEQ ID NO: 130015 - DNA, 717 bp, Homo sapiens
gtaaggcttaaactaagattacagcttttatattgtctgcctttagaagtcatatttggaatttattcagtttattctcctgccctttcccttttgttctgattctgtcacttacgttttcatttaaacatagtctttttatgaattaaaataagtatcagcagatggtatgcagtatagatgcttataaaataggaaaatgattgcagagacatttaaaatgactattgataaataatttatattgatattatttgttactcactttttaatttctggaattcaaatatttttaaatctcaaatagtttcacaacctggcatttatgaaagtgttgccccaatttattcatacttaccagggtggtaaaaatcattcaagaaatgttgagttacatataatctggaagcttctaagttttaagggcaacactcattgcacacttaatttcttctttcaacattgacctgtcacaattgttgttgtttcattaagtttataaaacatattaaaatacgtggagtaaaaattgttatgtctctaataataagtatttttgatttgcagatagagctttaggaaacagcactgcatgcattattcacatctgctgtgagtatacttgacacagctgcagtggagagatgcttgaaaaacatactgtaaaatacactcggtttcctcttattgacatatttagcagaacaaggctaattg

SEQ ID NO: 130016 - DNA, 450 bp, Homo sapiens
tcccagctatttaagaggatgaggtgggaagactgagttgagcccaggagctcgaggctgcagtgagccaagatcatgccactgcactccagggcaagcccttgtcttcaaaaaacaaaaaaattcaaaaaagtaatgcgttgaacaaacaccaagtacaaagtatactaatacagtggataaatgctactccaactctgatccactgactgccaggatcagcatgacactacagatggaactcaagaatctgtcataacaggctatccggctgattgttctgaatgtgaaagttttagaaacactgttccaagggtaaaaatgaggggacctaatttcttctctcttaggaatcttaccccccaaaaggtattgcaagcatctgttgtggggctggaattcctaaaacctctcaaagcatgctgtgtgaataaaaggacagtgttcaga

SEQ ID NO: 130017 - DNA, 645 bp, Homo sapiens
tggttctagaagtgcagctttccccaggaaggaggctggcaggatacattccatcagctagcagtggccctctctgcaaagggtgtaggcttgaagtgacacctctgttttgctgtttacttatttaattcttatatccagtgaaatttatttattatgtagttcaaaaataataaagtgaaaaaaatgctgcttctcagtgtgctttattaaaatattctgtgaaggtgaacatgtctcagtagtactgaggtgaaatagggcagcagggagacttgccagctccattttataaggaaatgttccaaagtcgttatttaaatgactgatatgtttagttatcaaaataaaattcccatcatgcacagtggctcacgcctgtaatcccagcaatttgggaggacaaggcaggtggaccacttgaggtcaggagttcgagaccagcccagccatcatggcaaaaccctgtctctactaaaaatacaaaaattagccaggtgtggtggcgcacacctatagtcccagctactcaagaggctgaggcaggagaaccgcttgaacctaggaggcagaggttgcagtgagctgagatcgtgccactgcactccagccagggtgacagagtgagactctgtctcaaaaaaa

SEQ ID NO: 130018 - DNA, 416 bp, Homo sapiens
ggcaccctggcgaaaccccttctctactaaaaatacaaaaattagccgagtgtggtggcccgcgcctgtggtcccagctagtcgggaggctgaggcaccagcatcgcccagcccggaaggttgaggctgtagtgagccgggaccgcgccactgcactccagcctgggcgagaggagaccctgtctcaaagacaaaaaaacaactggtaggaaaacgcaccctcaaaacacatgatgagatggtcgagaccagaccctaggagggtggggactggctgggtgggtatccagagaccatgggcgtttcataatgcattgtttcccatctcctccactcagcgactcttcttcccctgaagtcttgcattaagtaagtgaatgaatcaatcatcaagttaatgaagctctgactttgta

SEQ ID NO: 130019 - DNA, 444 bp, Homo sapiens
tgggatggatagatgcattttatttctctggaaatactccctgcctggcaagctcagagggctcacccctggagatgcaaattctgcctaacccctcccacagtcttttgagcagagatcctctcctctgtcccttagcagtgcagggcccaatctcacccagttctcccttcactgcaagcattgcttccccctcagtaaactacccaaacctcatttgttagcttgtttatgaagtaaatatcagggacatgaaataaaacgtctggcagcaacttccctaggacatcagtgactgtcctcaaactactctcaaaaggagctgtacatttccctaaagaaccattccaatgtaagatggcaaagtatccttggcagaaaattaaacctaaccacaagtgcctaggccctaggctatttagacatgaatcaaaaacagcagta

SEQ ID NO: 130020 - DNA, 700 bp, Homo sapiens
gagcatctactatgccaagccctgtgctgggctcaggaggacccagggtgggagcagaatcccatggaaccgcctaggaggttcaggaaagactcctttagagaggagaaccttgagctgagaccaggagggttggagaacttggccaactgaaggagagaggccagcctgagccagggccaggaggcagggactatgagtagtttattgtggctgaagcagggagttgacaggaaaatgttccttttcctgcactcacacaatcgtaatgatctgtgtcgctatttgtttagtgtctgtatcccctgttagaccacaagctccacgaggggtacagtgtgtatgtatactgctgcatcctggtacccagaacgatgcctagcacaggggttcccaacccccaggccaaggatcagtaccagtcatggcctgttaggaaccaggagcacagcaggaggtgagccgcgggcaagctggcattactgcctcagctctgcctcctgtcagatcagcagtgtggcattagattcccctaggagcttgaaccctactgtgaactgtgcatgggagggatctaggttgcacactccttatgacaatctaatgcctgatgatctgaggtggaacagtttcatgctgaaaccatcctgccccatcagtggaaaaattgtcttccatgaaactggtccctggtgccaaa

SEQ ID NO: 130021 - DNA, 425 bp, Homo sapiens
ccattaataacattctgtgagcacacatctagcttaagtgtttcccttgacccaaaatccaattaaaatcactattagattaagataatggttacatatcagaaatagctgagcaaaagattgagaagagaccatagggcacagaaaaatcctttagtgtttttgtttgtttttgttttttgagacggagtctcgctctgtcgcccaggctggagtgcagtggtgcgatattggctcactgcaacctccgcttcccaggttcaagtgattctcccgcctcagccccccaagtagctaccacgctccgctaattttttgtatttttagtagagacggggtttcaccgtgttggccaggatgttctcaaactcttgacttcatgatccgcccgcctcggcctcccaaagtgctgggattacaggtgt

SEQ ID NO: 130022 - DNA, 624 bp, Homo sapiens
gattatcttaagtagacatggactgtttggtcacttactctcaatatagactgtctccctaaaaatgttttaaataagaacaactttaaaagacacaaatctattttaaaatattggatatccaatgagtttatatttaaaggaggcttggatataaatagcattccaaatctgagaaaatatcttacttgcctttaataactgaatgaaaaatatatgagtagcaatacatattttttagttttgtttccacatcagtgcactgttctggaacagtatttgcctcatcgttattggagatactgaggctgcaaaagttgaatattctcagaaaggtctattgaaacatcaagtgcttggtccatggtaactggttgatagttatgtgagctttttctgtagcacatcaaaataaaaatagatacattaactttatacacatttatattacctgttacataatatttcttggactcatttcatagatttagtttttgaatctgtggtaaaatcttgaggtgacaacaattaataaatctttcaattttttttaacaatgccttactaggaacacaaataatctatgatgatagttgttcatcaagcagatattttatatttctc

SEQ ID NO: 130023 - DNA, 501 bp, Homo sapiens
tgagaggctgaggcaggagaatcgcttgaacccgggaggcagaggttgcagtgaactgagaaatcctgccaccacacttcagtctgggcgacagagcaagactccatctcaaaaaaaaatcagacaaaaaaaggcaactttatgatttcacttacgtgaaattctagataggtgaaactatagtgacagaaagcagatcagctgttgcctggggcaacacttagtgaaaaatcactaaggggcataaggagatgcttgtggtgatgacgttccttatcttgattgtgctaatgcttatatgggcacatacagccttcagagctcatgaaattatatactttagatatgcacagtttctcatatctcagttttacctccctaaaactattaagaaatttgtgcttaatactttggtgagcattttatgccctttgccccatgtagttggttctcactggtaggtaggcaggcaggtagaattagcagctttaggtgagacag

SEQ ID NO: 130024 - DNA, 616 bp, Homo sapiens
cacagtttggcttgcaggcagtttgagctaattggacctcatgaaaggcaaaaactctgcaaagtggtggagtcgccaaacctggactgttttattggttgaatggctagcttctttctttaggcaaagcataggatagtattcaagagtacatttttaataataaactggagataattaagtactggcatcaggcatatttcctcagatatcactgggtttgtagccatttcatccagagcatctctggatgacatctctggttggatccctggttgacatcatttttatccagagcagtctgtttcacattctgctgccaaactctgacaattgtttgaagactaggattaggagaagagagagagacataaacactcagttgtcctgccttgactttgacagatactaagatctaacatagtctaccaaatgaagagtgacagttaaagacagcttctgttattacctgaagtatcaaatatttagtgataccttttttgttgtttgttcctattttgtggcaggaattactgctatctaggaagcagtcatagagtcctctttatttgttaaagaacacaagactgaaacaacaaaatctaaaccaaaagta

SEQ ID NO: 130025 - DNA, 357 bp, Homo sapiens
cacaaatagccagtgtcgtggtgcacacctgtaatcccagctactcgggaggctgaggcaggagaatcgcttgaacccaggaggcggaggttgcagtgagccgagatcacgccactgcactccagcctgagcaacagagtgacactctgtctcaaaataaaataaaataaaataaaaattttaaaaagtgtgattcccagcatgaactgggaaaacatgttgggctcatggctctgctgcccgccaggccctccaccagctgtgggagaagccgcatcctcagctgccgcaaaccttcatgcaggaaaaggccagcctggcaaaccacaggcacgcgggtggcacccggccacacgg

SEQ ID NO: 130026 - DNA, 271 bp, Homo sapiens
agcagacatctgcagaagtttcagaactcagtggagcttggcttaagctctcatgagttgcatgtaaaggaatatgtatgtataagaggcggatttgaagtggcagagggtccacaaaaggcacaagtactaaccactgaatgggaggagatagaaaaatgtgtaagtcacaattaagtcacagaatcaccaagtctttaccaagtgcattgtcagcactttgcaaaacgctgtgtacttgtctttcaggaagcatacaatatgcacccaa

SEQ ID NO: 130027 - DNA, 427 bp, Homo sapiens
tcatgtctccatgcagctggccttcccttcttttttctcaatagggctttcttcaccttttcatctagaaatcttttttgcatcttttaaatttcaattgtgtgtcaactacttggtgaagtctcctttaatatcctccccatcctcaccagcacacacacactatgtggaattaattattcccttccatatattacttatatgtcttgttaatgcatctattcttatatgtatcacaccgaatcataattactataagcttcttgagggccaagactgtgccttattcatcttcacatttccactatctggcccatcataggttttccataaatttgttgagtctatagaccagtgtttgtatataactctatcaagcccctcttttctcctaggctccagatgtgttttttcacttgcttactgg

SEQ ID NO: 130028 - DNA, 494 bp, Homo sapiens
taatgataacagccctaaccatatattcccactttggagaataaaacagctcagggagttactgcctagggtgaaactgtaatggttcaaagtgccaacactccaccacccctcttccacactctcttcccctcacaacaggagaaagaatgtgagaatacaaatcagcagcatctgatggcctcactacactcccacccgcccatctgcttaacagactttatggcaagtgctttccttggaagtggctgaaagggagcaacaccttgcagtgggaagtaaacttaaatgttaaaacttgaccttccggccgggcacagtggttcacacctgtaatcccagcactctgggaggctgaggcaggtggatcacgaggtcaggagttcaagaccagcctggccaagatgctgaaaccccatctctactaaaaatacaaaaatcagccgggcatggtggcacacacctgtaatcccagctactcaggaggctgaggc

SEQ ID NO: 130029 - DNA, 481 bp, Homo sapiens
taattaaggtaatcccaccttcttcagctaggctttgtgaccacccaatattgaaacgatttcctctgcctctgaattcctacagcaacatttagttaagcattcatttggcaatttaatcaagtggtgacttatgatagctttttaagtgagcccagataataactatttatccctcatattgagtactgtccagtgctgcacaaagaagtcactcataaatatttttggatggctgatttactgattgaaattatatccttccatggagatttgctttgcaagggaaacatgaaaagagggcatctgggtgatactaggctgtcatcaacctatcatcaatgcttcctttacatgaccaaaatcaggccaagacaaagaagtcagtctcatctccatcatttgaatcgaaagaaaataatcccggtaatcacaaattccatttcactttagaataaccattcctaaaagtttgcaaaat

SEQ ID NO: 130030 - DNA, 487 bp, Homo sapiens
ttccggatttcccagggagggggcctctagacatctgccacagggtcagtcctcagaagccagtgttgagacgggggtgctgccacccacgaggactctcccttcccgctgtgcctgggagggagttgggggagcgtggaaatacagaacctgctgagtgcccagggccgctgctgcccagccactgcctgcagctgctgttccttcaggagccaaagtgagccctggggcaggggccgccagagagagccctccacagccgacttgctgtctgcccttggcagggcgctttccttttctgagcctgggtttgctccggggaaaagacattcttagaggtgcccaaaataagaggctcattgggacttggtggggtttggtacagatgaggccttggctgttgtcaaggattgccgcctgaaacccagcaccaggcttggggggcctgaagtcttggggaaccgcaggacagttctgagactgaagt

SEQ ID NO: 130031 - DNA, 555 bp, Homo sapiens
tgaggtttagttgagaatgtaattattaggaaaatggtgaaaagcaaattcaaacaaattctaagtttagcttgaaaaatggaaaaggttcttaagttctgtctgatgcataaaggggtagaagcaaaggaattatgctccaaagccaagaaagagggtgtacaaaagcagctgatccacttgacatagttcatagccttttgcaaaggaataaaagcctgttgagcagggaaccaaaagatctcattataggatgaagccaagccatattaaagcttgtgcactagtaactatgtctaaaaacagcctgctgttttatattgaaccaatacatttcttaacttggtaggttgcagtgtaaagatgtacagagcctgtctgctggatgctatgccaattacagatgtggcagagtggtgtcaaacacctacaaacagttagatcgcaagcaatcttagagtgaaacaaaagaagttttaaaatgtcacctcaaaacctagttaatcgtgtgtgtttgacttttagagtcttgaaatcacctttattatataattt

SEQ ID NO: 130032 - DNA, 826 bp, Homo sapiens
gatgtatggcttgcaaatattttatctcaatctgtaggttgtctcttcgctttgttagttgttttctttgataggcagaaggttttaaatatgatttcatttgttacctttccttttgttgccttgtacttttggggtcaaattttaaaaattattgcccagaccagtgtcatgtagtttttccaatgtcattttgtattttcctctagtagttttatagtttcagattgtttaattttttcatctattttgagtagacttttgtatatggtgtaagatgaaggtccaattttattcttttacatatggatatccagttttcctagcaccatttattgaggagattatacattttccattgtatattattggtaattttgttgaaaatcaattgactgcagaggtatggattcttttctgggcttgctattctgttccattggttgatgtgtctatttttatgttagtgccatgctattttaaatattattgctttaaagtatagcttgaaatcatggagtgagatacatctagctttgttctcttttcttatattgccttggcaatttgctttttgttatggttcacatacgttttaggatagttattttctgtatatcgaaaaatgacattggaatcttgatagagatctcaataaatgtgtagatagctttgtgtaacatggacatttttacaatattaattcttccaatacataaataaaaaatatttttccatttatttgtttcttcctcaatttttttttttgctaatattttatagttttcagcatacgggtctttcacattcttggttaaatttatta

SEQ ID NO: 130033 - DNA, 346 bp, Homo sapiens
cagttcctcctcctggggacgcgacaccctgagtcctgggcctttctgtagtccaagtgcccaatgctaaggtccacttagtccccaactcctaaatccccgtttctcctcctgatcaaggctcctttctgccttgccatgaaatggtggagtctctctacccctgggtctcttccttggtcctctgatctggtcattctcctcccccggcacatcccctcttcccctgacggagtcttactctgtcacccaggctggagtgcgtgcagtggcgcgatctcggctcactgcacactccgcctcccgggttcaagcaattctcctgtctcaacctgcagagtagctg

SEQ ID NO: 130034 - DNA, 285 bp, Homo sapiens
atttatgaatatttccaacacaaaatatctttcctttctgtactttgacttagataattctctgcttataatactagctggttttggtttctctgtggtgatctatggtgtgactctcatctcctctggagagagctccttatataagctctgtcacctgagggccactgctggcattccagtgagtgagctaagctctagaagccagacaagtagaattatttttcccaccgtagaagatacagtacaagttcatgtatagaagaagtttattattttctcaag

SEQ ID NO: 130035 - DNA, 517 bp, Homo sapiens
ttggatgatcaaatagaagatccctagcaagtaattttataaagacaaaaatttcgtgtcaactctgtaataaaacaatatatccttagaatcagttatcacttaaaatccttattttatagaaatttttgtgtttcaaaagtatagctagggcaagtcccccttcagggtggatacttaaaggagatgaaatcacttcataaaggtgtctgcactcccatgttcattgcagtgttatttacaaggtagccaagatatggaaacaacctaaatgtctgttgatggcaaattgataaagaaaatgtgtgtgtatgtgtgtgtttatacaatggaacgttattcagcctttaaaaagaaggatattctgtcatttgccacaacttggttggaccttatgctaagtgaaatagaccacgcacaaaaagaaaaatactatataatctcacttatatgtggaatgtttttaaaaagtcaagtatacggagacagagaataaaacagtggttaccttgggcag

SEQ ID NO: 130036 - DNA, 518 bp, Homo sapiens
  misc_feature (329)..(329): n is a, c, g, or t
caggcatgctccaccatgcctggttaattgtgtatttttagtagagatgggacttcctccatgttggtcaggctggtctcgaactcctgacctcatcatctgcctgcctcgacctcccaaagtgctgggattacaggtgtgagccactgcgcccagcctagtgtattcttttaatagagttttagaattttctggatactagtcttgctcattttttgttagatttatccccagctgtcttacattttttgatgcttttgtaaatagtattttctttctttttttgggggggggcgggggacagagtctcgctctgtcacccaggctgnaatgcaggggtgtgatctcagctcactgcaacctccgcctcccaggttcaaggaattctccggcctcagcctcctgagtagctgggactacaggcgtgcaagaccataccgggctaatttttttggtatttttggtagagatggggttttgccattgttggccaggctggtcttgaactctggacctca

SEQ ID NO: 130037 - DNA, 534 bp, Homo sapiens
caaaacatgtttggggcgccctatgtgctgaatctagcctgcagacaagttcaaatatgcagcatgtagcttgagatggatgagtttcaaaatgcaaatcctatctgcactggcaattggattattttgtgtcaaggaaaatgacttttctgtcttaaggtatttttgcttttgattgcttcttttattgcttgggattttcttctccctggtataacagcctagtggatactttatcatctaaagctacatataagcctatactatgatccagcaatagcccccctaagtgtatacccaaggaaaactagtgcatgatggatctattcaaagtaacacaaaactggaaacaagccagaagttcaacaacagaagaatgagaaatcttggtttattcattcagtggaatgctgtgcaataataagaacacacttttgttttgagatagagtctcactctgtcacccaggctggagtgcagtggcacagtcacagctcactgcagcctcaaccttccaggctcaagcaatcccct

SEQ ID NO: 130038 - DNA, 415 bp, Homo sapiens
tcccagattcaagcaattcttctgcctcagcctcctgagtagctgggattacaggtgcacaccaccacgcccagctaatttttgtattttttagtagagatggggtttcaccatgttggtcaggatcatctcgatctcttgacctcatgatctgcctgcctcggcctcccaaagtgctgggattacaggtgtgagccaccgtgaccggctctagtttcttaaagtagaaatttaaataattattttgggacctttctgcttttctaatataagtagttccttttcctctaatcagttgttttgttgaattcccaaattttcatattttatttgcatttctattcagtgaaagatatgttctaccaataattttacttgtggtttcttctttggttcttgggttatttggaagtag

SEQ ID NO: 130039 - DNA, 474 bp, Homo sapiens
cccagcgactctcaaatgagtgactcttctggagtttcccccatgactaactcatcagaactaaagccagaaagtagagatgatcctttctgtattggaaatcttaagtctgagcttctccttaatatattgaagcaagatcaacatagccaaaaaattacaggagtatttgaattgatgagagaattaactcatatggagtatgacctagagaaaagaggcattacgtctaaagtacttccactgcagcttgaaaatattttctacaaactgcttgctgatggatattcagagaaaatagaacatgttggagactttaatcaaaaagcatgttctacatctgagatgatggaagaaaagccacatattcttggtgatattaaaagcaaagaaggaaactactattctcctaatttagaaactgtaaaagaaattggactagaaagctctactgtgtgggcatcaacattgcca

SEQ ID NO: 130040 - DNA, 452 bp, Homo sapiens
ataacaaaaagacatttggggagcaagttaaggaagcttaaatataaactggataattgatgacatgaggaaattttcttagttgtgataactgaatagtggtagtacaggagaatgatgattttaagaggtgaatgctgaagcacttaggggtgaaatgtaattgggtctgtaatttacttccaaatgactaagtaatgcacatatatgcttgcaaattttcataataaaacttgggagaagagaaggcataggaaacaaatatatgaaaacgtaaacagtgcagcagtgattgcctctgaaaaggaaactaagcagctagggtcaagggagtcttctttttactactgtatatccttaaggatttttaaaattgtataccatgtacatgtaccagctattcaaataaataaggttttcaacattaacagtggctatcttttcagtagtgg

SEQ ID NO: 130041 - DNA, 462 bp, Homo sapiens
tcctttccccagggacattgctcaatgggcagcaagatgtaaactctggagtctacaggtgaaaccatgtctttctgagaagtaatggggtagtgccgtcctttacatattgcttcacgcaaagtattatgagacagtggcatctagcacttgtcttagggtttaataacatgaaagtccttgccctcagaaaaaaatccttaccatgtaccttgttttttcctgtaaacatgcacactgctggctggagtgtgacccccccacagcaaggtttcccaagggttctgaacttagagagttggcatctgcagcactgattatgatctttcctatatgagttaatctaagtggagggatacaaagccatgcttgagctgagtaggcccaagatgcagaagcagtggctgcttctctctctgttcccttcctcacaacagcaactgaaggggcatgtatgtggca

SEQ ID NO: 130042 - DNA, 224 bp, Homo sapiens
tctcagcctaatcatcacttccaagagtggcttccccttggagaagactttcctggtgggaggacttccctcacaaaacccaccacctcccacctccagcccagttactctgcctcccagcatccttctctttctttcagagcaccaatcacggtctatcactatttctatttactttatgctgacccatttatatctacctgtttatatctgtccccactagg

SEQ ID NO: 130043 - DNA, 283 bp, Homo sapiens
cacagcagctggacagcgacagtctgtacctctcttgttccagcacgaaacagaaaagaacaaattggagaagaagggctttctgcaaagcctcctcttcaatccccaggtcagagagctgtgcttagtttttaacacaatgcacagtcgggcctgaaagcaggctgctagggtgggagattgctgctcctgagccaaatgatggacaatttcttgtcagactggagagcaaacacaaacctcttcatgtcaaatgatggatacgagtgatggtgaggctctt

SEQ ID NO: 130044 - DNA, 433 bp, Homo sapiens
tgcatcttccaacaacagcttactggaatccctttaggcaaacttccaccgtccaaatgttcctttattctttatctccagaacccagtcacgcacattaacaaacagatgggagcattccaacttcgcattactgataagccctctatcattattgacaaactaaaaaacattagcagtcactattgtttaagaagacacctactctgcatctcactcaatccttggctttgctccccctgctcatctgactctctgcccagcacctcctcttgcttgcttatatccagccccattgtgtccgaaattggtgggttcttggtctcactaacttcaagaatgaagccgcggaccctcgtagtgagtgttacagttcttaaaggtggtgtgtccagagtttgttccttctgatgttcggacgtgtttggagttt

SEQ ID NO: 130045 - DNA, 448 bp, Homo sapiens
tatctatagaacttggcttttcttgttttctgtgtcttgtgtctgaatataataatgatgtttaacattctgtgtgtgacctctgactgattttggaaatgggaaaaggatccatggcattggtaggaaaaggttgccaagtctgccttaagaatttttaggaatggcagggcatggtggctcatgcctgtaatcccaacactttgggaggctgaggcaggcagatcacctgagattaggagttcaagaccagcttggccaacatggtgaaaccccatctctactaaaaatacaaaaactagctgggcgtggtggcaggtgcctgtagtcccagctactcaggaggctgaggcaggagaattgcttgaacctgggaggcagaagttgcaataagctaaaatcgcaccactgcactccagtctgggcgaaagagtgagactctgtctca

SEQ ID NO: 130046 - DNA, 253 bp, Homo sapiens
tccgccggctttggcctcccaaagtgctgggattacaggcatgagccaccgcgccctgccatatttaaagtttttaaaccagccaccagcagaggcctttaaaagcagacgatgagcctgggcaacaaagcaagaccctgtctctacaaacaattttttgttttttaagtagccctgtgtagtgacacaggcctgtagtcttagctactcaggaggcttatgtggcgggatcagtttagcccaggagttcgag

SEQ ID NO: 130047 - DNA, 121 bp, Homo sapiens
ggtccgatctgctttatattactttactttcctcctctctattcataaattaatgtgaaagagaaaatgcaaacattttcctagacaaagtgaaacatgtcctcatatcttactttaaaaa

SEQ ID NO: 130048 - DNA, 333 bp, Homo sapiens
taaagccactgtctgaatctcagcatagggcagaagaagctggatgtagaaagtgctttccatgattttctcaagcatgctctgaatgcaggggcggacggtgagggaggcccagagacccagggcctgtcactaaccagaaaaccacagcattgagaagcatcctccgcacgcttccaagagaacgttcttatcaccgttcatggggtgcagctatttactctgggctacttgcttaggagcagaggctggactttcaaggtgaatatggcccatcaatccggcagcaaacatactttttaaagctaagaatcttctttcgagttggagcag

SEQ ID NO: 130049 - DNA, 333 bp, Homo sapiens
agcctttgaacaggcctgtgtctaataaataccattttaggcatccatggtacaatgttaatgctcttctcactttacttggggtaaattttccttctaagttctgcagaaactgaagaatcaataacacaggaagcccaaaggcctgttttttaataaaataaacctaaaatggttactgggccctggaggatttctaggtgcacaagaaaaggggccaacacattcctttaactctgtttcacccatcctggccaactcagtattagctaagaattttcaaaactgtttcctttttgcccttagaaatatcttactcactaccttccaaac

SEQ ID NO: 130050 - DNA, 258 bp, Homo sapiens
acctatgtaacaagccttcacatgtaccctcaaacttaaataaaataaaatagacctatatttaaaaatatttttattgtctaatttaaaatgtactttaaggctgttatttttttctatcatccatatgtatcagttactacaataaagtaattgagatttagaaaaaaagaatgcatgtacatgagatagaataaggatgcataccctatgatgaatacaaaagagggaaaaacctgtaaaaattgaatcaggaag

SEQ ID NO: 130051 - DNA, 348 bp, Homo sapiens
gatgcgtggtcctgggatgtcattaaactgcttatggcttctgtctctccatctgtaaaatggggaaataataacatctacattccaggactgctgccaaaattcaatgaagctatgcctaacacagcctggcacccagtgggcacccacaaacagtggccactgtctaactaggggagcctcaaatgccagcaggcctgtctagaaagagggtgaaagggaggtagataaagtttcatgagaagacgggggcaggaagaagtctgttcaccagaagcctctgcactgacttgtcagagggggcccacctgaggctgggctccaaaggaaaagggcctcctcagccca

SEQ ID NO: 130052 - DNA, 568 bp, Homo sapiens
tgccagtaggtacatgtgaaggaaaacaaaacaaaacaaaacaaaacaaaacaaaacaaaactgctctccctagccaaaataccgggaaaaggacaacctagcaagacagaaaaatgctagacaataagtgctctactccagccaaacaccacagaaaatgaaaaaaattaaaatgaacacacccctccccatgggagcaacggttgaatggcgtggggagccaggactttaatctcaatgatagatagtgagcacccccatcccctggcctattcagcatcagtgaagagcatggccttccacccctaatccatgacattgaagcaccttcccccttcctgctgggttgttgtcagggaagaactagtagaaagccaggacattcaccacggaccagcattcatggggccaccttccactcagtgtggtgttagtggagattaaggggggaacagtgactagacatacctaccactcccatccaggaagagatccgtgaagtcctagtggggaggtgaattcctacctcatccagctgaaaagaggggcctttggggtatcagagaa

SEQ ID NO: 130053 - DNA, 966 bp, Homo sapiens
agtggaagactaataagaaaatgctagtgagctccaatatttacaaaatcaaactatacatgtagttttatgatattaaaactatgcaacttggtaaattatactatgatattaaaatatgcaacttagtaaatcactgactacatattttcttaaagataatggctttttcaaaacaaatatccaaaacataaatttcactggccattgtctgaaatccctggctataaagctgacatttattttaatgatgcagtctctgctcaaaatatttcagaatgtctttttatgagtcttacaaggaaatcagttttcatgtggttttaacccgttttccactaatcagcttttgcaaagcttgctgacctattttatttaccagattttgttccaattaactttttccaaaaatcaaattcatgctcataggacaaaatgttattgatcattcaagatactcaaataagagcaagttatctgagaacctcacagacctgaaggaggacaggagaggtctgggcaggcaggagccaccgtgagcacctctgtgcccgggtgggactcatttatagggcatcagacctgacccacagccccagatctggcactcagaccacgtcaccttcagacacttcctctgcttccgtcgttagctttcctcttctcatctgtcagttgggagggggcccaattatatgatgaggaggtctgtgtctgattaaaaggactacttaaaaatagtgagaaatgaccatttgttgggaaaagtccttattaccctctccaaagtgagctcactgagtgtctgttgaatgaatttggccatggcattctggtatgcttggcatatggctgacttcttgcagtcataactcaaccccaattcccccaggaaacactcggcgggtccttcttccatgcgtgaggctcgtggcgggtccttctgtgagtgaggcccgtggcgag

SEQ ID NO: 130054 - DNA, 396 bp, Homo sapiens
gtgtctggcagttttctaagaattatcctgtgcgaattagaataattctacaaccttatgagggagttgctatacctcttccagagtttcagaaagcctccaagttccatatatgccatctcgaccctccataagatggaccaaaagacagggtgattggatcagacatgtgaggactcctaaatccaaaggagcaggcataaggcagcagctgcctcagtacaaaaaagcagagcttacaagtttttgctggaagtattgatgccgaagtattctctcgttgccatgacaggtttcagaagaactgctttcttaatccttctgactgcttcgaagttttcttttttctttttcttttttttttttttttttgagttgcagtcttgctctgttgcc

SEQ ID NO: 130055 - DNA, 494 bp, Homo sapiens
gggctttggcggatcccgcggtctctgctgaaccaggagcaggataaacctctccagtcggtggcatggggttagaacagcagatgccaaggtaaacatgcagccagtgggaaagcagatgctgccagctctcagcatccggcagagagggagtgaggcatgggaagtatgcctcgtccagaaggatggagtgggggatgcccatgatcagatatccccatcctctacagaagagaggccaacatgccatcctcaccaggtctgttcagggagtctagcttctgagttagacactgacagtggtgccaggatgcaagggcagtcagccattaagagctgggccctctgcagttcaaatataagccagaacctttaggagggccgaaatatgggagctcaaatgtctctcaaagccatcgggcccttgaaaacaactgttagagttaaaaaggataatataaattaatatgcctaggaagaacaaatatcaattt

SEQ ID NO: 130056 - DNA, 2029 bp, Homo sapiens
acagggtcgctgagaccagtgcacgagcctcttcggaagatgcatcctggactcttggccgcagaagagaaagcggttggggtctcccagggactctttctaaagggtcagtccaccatggtaggggttaacgtgggtccacccgtatagggaaaggaaagaaattgtatttgacacttcaggggggcgggtggcggacgggtctcgctgcctgattggttttgcatttcatcccaatttttttttctccactctctctccctcttttcagtttctctctctgatcccaggggaggggaaacgggaatagtgagagatcaaaaataaacctcttatgtcaagccgggaaggaagtataaataagaagggctcggcagcccactcggtgcttcccggggtggggaggaggcaggaggcggctgcgcggggctggcgcgggcaggggcggaggacgggcgcacgcgggccggggccagctgctcgcgctcggctcgggggcggcggcgcgggaggagcgggctgcgccagccagaggggccgccgggggagcgctcccgccgccgggccccgcgggcggagtcggccttgcacccgattgattccgttttcctggagagagcggccgggccgcgctcgggccgccagcacctgcccgcgcctggcgggtttttccttttcctgcgcgcagccaccgccgcagcccccatgttccccgcccccgccgccccccggtggcttccgttcctgctgctgctgctgctgctgctgctgccgctggcccgcggcgccccggcccggcccgcagccggggggcaggcctcggagctggtggtgcccacgcggttgcccggcagcgcgggcgagctcgcgctccacctgtccgccttcggcaagggcttcgtgttgcgcctggcgcccgacgacagcttcctggcgcccgagttcaagatcgagcgcctcgggggctccggccgggcgaccgggggcgagcgggggctgcgcggctgttttttttccggcaccgtgaatggggagcccgagtcgctggcggcggtcagcctgtgccgcgggctgagcggctccttcctgctggacggcgaggagttcaccatccagccgcagggcgcggggggctccctggctcagccgcaccgcctgcagcgctggggtcccgccggagcccgccccctcccgcgaggacccgagtgggaggtggagacgggagagggtcagaggcaggagagaggagaccaccaggaggacagcgaggaggagagccaagaagaggaggcagaaggcgctagcgagccgccaccgcccctgggggccacgagtaggaccaagcggtttgtgtctgaggcgcgcttcgtggagacgctgctggtggccgatgcgtccatggctgccttctacggggccgacctgcagaaccacatcctgacgttaatgtctgtggcagcccgaatctacaagcaccccagcatcaagaattccatcaacctgatggtggtaaaagtgctgatcgtagaagatgaaaaatggggcccagaggtgtccgacaatggggggcttacactgcgtaacttctgcaactggcagcggcgtttcaaccagcccagcgaccgccacccagagcactacgacacggccatcctgctcaccagacagaacttctgtgggcaggaggggctgtgtgacaccctgggtgtggcagacatcgggaccatttgtgaccccaacaaaagctgctccgtgatcgaggatgaggggctccaggcggcccacaccctggcccatgaactagggcacgtcctcagcatgccccacgacgactccaagccctgcacacggctcttcgggcccatgggcaagcaccacgtgatggcaccgctgttcgtccacctgaaccagacgctgccctggtccccctgcagcgccatgttctcaggctgccacctgcaggggtggatccatttcaagtatttatgcaaatgtgtctctgaactaaagtgtgatcttatgccaatgc

SEQ ID NO: 130057 - DNA, 380 bp, Homo sapiens
ttgtgcccagaagacactggccctgggcgcctgggttgagttcaaaaccaaaagaaagaagaaaagtgctgtaaattcgggatttctccaccggatgctcctgcttccgcatgggtgtcacctccatgccgtttcttcctctttctagggaaaagcttcagggagcagcagtgtgagaagtataatgcctacaattacactgacatggacgggaatctcctgcagtgggtccccaagtatgctggggtgtccccccgggaccgctgcaagttgttctgccgagcccgggggaggagcgagttcaaagtgttcgaggccaaggtgagaatcaccctgggactcagatccagagatggggaggaaggtcgcctgtccccaca

SEQ ID NO: 130058 - DNA, 4016 bp, Homo sapiens
acagggtcgctgagaccagtgcacgagcctcttcggaagatgcatcctggactcttggccgcagaagagaaagcggttggggtctcccagggactctttctaaagggtcagtccaccatggtaggggttaacgtgggtccacccgtatagggaaaggaaagaaattgtatttgacacttcaggggggcgggtggcggacgggtctcgctgcctgattggttttgcatttcatcccaatttttttttctccactctctctccctcttttcagtttctctctctgatcccaggggaggggaaacgggaatagtgagagatcaaaaataaacctcttatgtcaagccgggaaggaagtataaataagaagggctcggcagcccactcggtgcttcccggggtggggaggaggcaggaggcggctgcgcggggctggcgcgggcaggggcggaggacgggcgcacgcgggccggggccagctgctcgcgctcggctcgggggcggcggcgcgggaggagcgggctgcgccagccagaggggccgccgggggagcgctcccgccgccgggccccgcgggcggagtcggccttgcacccgattgattccgttttcctggagagagcggccgggccgcgctcgggccgccagcacctgcccgcgcctggcgggtttttccttttcctgcgcgcagccaccgccgcagcccccatgttccccgcccccgccgccccccggtggcttccgttcctgctgctgctgctgctgctgctgctgccgctggcccgcggcgccccggcccggcccgcagccggggggcaggcctcggagctggtggtgcccacgcggttgcccggcagcgcgggcgagctcgcgctccacctgtccgccttcggcaagggcttcgtgttgcgcctggcgcccgacgacagcttcctggcgcccgagttcaagatcgagcgcctcgggggctccggccgggcgaccgggggcgagcgggggctgcgcggctgttttttttccggcaccgtgaatggggagcccgagtcgctggcggcggtcagcctgtgccgcgggctgagcggctccttcctgctggacggcgaggagttcaccatccagccgcagggcgcggggggctccctggctcagccgcaccgcctgcagcgctggggtcccgccggagcccgccccctcccgcgaggacccgagtgggaggtggagacgggagagggtcagaggcaggagagaggagaccaccaggaggacagcgaggaggagagccaagaagaggaggcagaaggcgctagcgagccgccaccgcccctgggggccacgagtaggaccaagcggtttgtgtctgaggcgcgcttcgtggagacgctgctggtggccgatgcgtccatggctgccttctacggggccgacctgcagaaccacatcctgacgttaatgtctgtggcagcccgaatctacaagcaccccagcatcaagaattccatcaacctgatggtggtaaaagtgctgatcgtagaagatgaaaaatggggcccagaggtgtccgacaatggggggcttacactgcgtaacttctgcaactggcagcggcgtttcaaccagcccagcgaccgccacccagagcactacgacacggccatcctgctcaccagacagaacttctgtgggcaggaggggctgtgtgacaccctgggtgtggcagacatcgggaccatttgtgaccccaacaaaagctgctccgtgatcgaggatgaggggctccaggcggcccacaccctggcccatgaactagggcacgtcctcagcatgccccacgacgactccaagccctgcacacggctcttcgggcccatgggcaagcaccacgtgatggcaccgctgttcgtccacctgaaccagacgctgccctggtccccctgcagcgccatgtatctcacagagcttctggacggcgggcacggagactgtctcctggatgcccctggtgcggccctgcccctccccacaggcctcccgggccgcatggccctgtaccagctggaccagcagtgcaggcagatctttgggccggatttccgccactgccccaacacctctgctcaggacgtctgcgcccagctttggtgccacactgatggggctgagcccctgtgccacacgaagaatggcagcctgccctgggctgacggcacgccgtgcgggcctgggcacctctgctcagaaggcagctgtctacctgaggaggaagtggagaggcccaagcccgtggtagatggaggctgggcaccgtggggaccctggggagaatgttctcggacctgtggaggaggagtacagttttcacaccgtgagtgcaaggaccccgagcctcagaatggaggaagatactgcctgggtcggagagccaagtaccagtcatgccacacggaggaatgcccccctgacgggaaaagcttcagggagcagcagtgtgagaagtataatgcctacaattacactgacatggacgggaatctcctgcagtgggtccccaagtatgctggggtgtccccccgggaccgctgcaagttgttctgccgagcccgggggaggagcgagttcaaagtgttcgaggccaaggtgattgatggcaccctgtgtgggccagaaacactggccatctgtgtccgtggccagtgtgtcaaggccggctgtgaccatgtggtggactcgcctcggaagctggacaaatgcggggtgtgtgggggcaaaggcaactcctgcaggaaggtctccgggtccctcacccccaccaattatggctacaatgacattgtcaccatcccagctggtgccactaatattgacgtgaagcagcggagccacccgggtgtgcagaacgatgggaactacctggcgctgaagacggctgatgggcagtacctgctcaacggcaacctggccatctctgccatagagcaggacatcttggtgaaggggaccatcctgaagtacagcggctccatcgccaccctggagcgcctgcagagcttccggcccttgccagagcctctgacagtgcagctcctgacagtccctggcgaggtcttccccccaaaagtcaaatacaccttctttgttcctaatgacgtggactttagcatgcagagcagcaaagagagagcaaccaccaacatcatccagccgctgctccacgcacagtgggtgctgggggactggtctgagtgctctagcacctgcggggccggctggcagaggcgaactgtagagtgcagggacccctccggccaggcctctgccacctgcaacaaggctctgaaacccgaggatgccaagccctgcgaaagccagctgtgccccctgtgattcaggggggcaggggccagtcttgtgctcctggacatgcggtactgaggtgcagacaagggtctccactgtggtgactgggtcccttggccatatcaaggcagcacggcccacccaggcctcccattgccgcaacccctccagtactgcacaaattcctaagggggaagaggagagggtatggggcggcagaccctatcatcaactgtccagtggactggaccttgctcgggttcaagtagagggcataggttaaaaggtaaaagtgcacttattgactcagacaggacactcagcgtcagtctgtttgcaaaggactagcaaacttaaatgaaaaaaaaaattctatctggtttccccgataaataatctacctcacaggggaaaaaattagtacaagagaggcgtggggcagggagtcaatggtgaatgtcaaagcaggctccaaagctggaccccaagctgtcttcaagaatgaccacgactgtcttcagtgttaaaatccatcacctaaagggccgcagcgtcgcagggtttggagagccacatgttctcaggctgccacctgcaggggtggatccatttcaagtatttatgcaaatgtgtctctgaactaaagtgtgatcttatgccaatgc

SEQ ID NO: 130059 - DNA, 3273 bp, Homo sapiens
acagggtcgctgagaccagtgcacgagcctcttcggaagatgcatcctggactcttggccgcagaagagaaagcggttggggtctcccagggactctttctaaagggtcagtccaccatggtaggggttaacgtgggtccacccgtatagggaaaggaaagaaattgtatttgacacttcaggggggcgggtggcggacgggtctcgctgcctgattggttttgcatttcatcccaatttttttttctccactctctctccctcttttcagtttctctctctgatcccaggggaggggaaacgggaatagtgagagatcaaaaataaacctcttatgtcaagccgggaaggaagtataaataagaagggctcggcagcccactcggtgcttcccggggtggggaggaggcaggaggcggctgcgcggggctggcgcgggcaggggcggaggacgggcgcacgcgggccggggccagctgctcgcgctcggctcgggggcggcggcgcgggaggagcgggctgcgccagccagaggggccgccgggggagcgctcccgccgccgggccccgcgggcggagtcggccttgcacccgattgattccgttttcctggagagagcggccgggccgcgctcgggccgccagcacctgcccgcgcctggcgggtttttccttttcctgcgcgcagccaccgccgcagcccccatgttccccgcccccgccgccccccggtggcttccgttcctgctgctgctgctgctgctgctgctgccgctggcccgcggcgccccggcccggcccgcagccggggggcaggcctcggagctggtggtgcccacgcggttgcccggcagcgcgggcgagctcgcgctccacctgtccgccttcggcaagggcttcgtgttgcgcctggcgcccgacgacagcttcctggcgcccgagttcaagatcgagcgcctcgggggctccggccgggcgaccgggggcgagcgggggctgcgcggctgttttttttccggcaccgtgaatggggagcccgagtcgctggcggcggtcagcctgtgccgcgggctgagcggctccttcctgctggacggcgaggagttcaccatccagccgcagggcgcggggggctccctggctcagccgcaccgcctgcagcgctggggtcccgccggagcccgccccctcccgcgaggacccgagtgggaggtggagacgggagagggtcagaggcaggagagaggagaccaccaggaggacagcgaggaggagagccaagaagaggaggcagaaggcgctagcgagccgccaccgcccctgggggccacgagtaggaccaagcggtttgtgtctgaggcgcgcttcgtggagacgctgctggtggccgatgcgtccatggctgccttctacggggccgacctgcagaaccacatcctgacgttaatgtctgtggcagcccgaatctacaagcaccccagcatcaagaattccatcaacctgatggtggtaaaagtgctgatcgtagaagatgaaaaatggggcccagaggtgtccgacaatggggggcttacactgcgtaacttctgcaactggcagcggcgtttcaaccagcccagcgaccgccacccagagcactacgacacggccatcctgctcaccagacagaacttctgtgggcaggaggggctgtgtgacaccctgggtgtggcagacatcgggaccatttgtgaccccaacaaaagctgctccgtgatcgaggatgaggggctccaggcggcccacaccctggcccatgaactagggcacgtcctcagcatgccccacgacgactccaagccctgcacacggctcttcgggcccatgggcaagcaccacgtgatggcacgtgattgatggcaccctgtgtgggccagaaacactggccatctgtgtccgtggccagtgtgtcaaggccggctgtgaccatgtggtggactcgcctcggaagctggacaaatgcggggtgtgtgggggcaaaggcaactcctgcaggaaggtctccgggtccctcacccccaccaattatggctacaatgacattgtcaccatcccagctggtgccactaatattgacgtgaagcagcggagccacccgggtgtgcagaacgatgggaactacctggcgctgaagacggctgatgggcagtacctgctcaacggcaacctggccatctctgccatagagcaggacatcttggtgaaggggaccatcctgaagtacagcggctccatcgccaccctggagcgcctgcagagcttccggcccttgccagagcctctgacagtgcagctcctgacagtccctggcgaggtcttccccccaaaagtcaaatacaccttctttgttcctaatgacgtggactttagcatgcagagcagcaaagagagagcaaccaccaacatcatccagccgctgctccacgcacagtgggtgctgggggactggtctgagtgctctagcacctgcggggccggctggcagaggcgaactgtagagtgcagggacccctccggccaggcctctgccacctgcaacaaggctctgaaacccgaggatgccaagccctgcgaaagccagctgtgccccctgtgattcaggggggcaggggccagtcttgtgctcctggacatgcggtactgaggtgcagacaagggtctccactgtggtgactgggtcccttggccatatcaaggcagcacggcccacccaggcctcccattgccgcaacccctccagtactgcacaaattcctaagggggaagaggagagggtatggggcggcagaccctatcatcaactgtccagtggactggaccttgctcgggttcaagtagagggcataggttaaaaggtaaaagtgcacttattgactcagacaggacactcagcgtcagtctgtttgcaaaggactagcaaacttaaatgaaaaaaaaaattctatctggtttccccgataaataatctacctcacaggggaaaaaattagtacaagagaggcgtggggcagggagtcaatggtgaatgtcaaagcaggctccaaagctggaccccaagctgtcttcaagaatgaccacgactgtcttcagtgttaaaatccatcacctaaagggccgcagcgtcgcagggtttggagagccacatgttctcaggctgccacctgcaggggtggatccatttcaagtatttatgcaaatgtgtctctgaactaaagtgtgatcttatgccaatgc

SEQ ID NO: 130060 - DNA, 1479 bp, Homo sapiens
agcggagttcgctgcgtgtcgaggcgagcacgcgctccgccctggaggctgcggcgacgggtcctcctccgccgtccggtcgcgccctcgcggaagctcggcagtgcgcgtgcgcccgcacccgcactccaaattagaaaggggacgtctagtgggttgcccgggaggggtggcgggagcggtcctggaaataatctgtcctctgtcgccgggaactggcgaggtagttccttcgcggtggagagacctggaatggccaaatatcaaggtgaagttcaaagtttgaaactggatgatgattcagttatagaaggagtaagcgaccaagtacttgtggcagttgtggtcagtttcgctttgattgctaccctggtatatgcacttttcagaaatgtacatcaaaacattcacccagaaaaccaggagctagtaagggtacttcgagaacagcttcaaacagaacaggatgcacctgctgccactcgacagcagttctacactgacatgtactgtcccatctgcctgcaccaagcctccttcccggtggagaccaactgtggacatcttttttgtggtgcctgcattattgcttactggcgatatggttcatggcttggggcaatcagttgtccaatctgtagacaaacggtaaccttactcctaacagtatttggtgaagatgatcagtctcaggatgttctgagattgcatcaggatattaatgattataaccggagattctcagggcaacccagatctattatggagagaattatggatctacccactttactgaggcatgcattcagggaaatgttttcagtcgggggccttttctggatgtttcgcatcaggataatactttgtttaatgggagcttttttctatcttatatcacctctagattttgtacctgaagccttgtttggaattctaggctttctagatgatttctttgtcatctttttattgcttatctacatctctattatgtatcgagaagtgataacccaaaggctaactagatgaaaaagaaaacaaaactgagtttactaggatatctgagctaatgtagaacatcaaacagaaggacccatggcagtataaagcaatgaagcaatggagtattatctcacaaatataaaaccactataagacaaacatttgattatcatttgacaaatacctaggtataactggaattttcatgtttgaagttctaatattaagtttagaattataatgatctacagttgtatcttgattctatgttgtctggaaaaaatatggaattatataaaaagggatgcttttatatatttttcttttccccagaattacttagattaattagatgtatagtaaaatattgttaaatgtcagtttatccatcttatccttctcagcaggtacctatatgataatatatagctgtgaaactcatctaaatatttttgttccaataaaatattatatact

SEQ ID NO: 130061 - DNA, 1959 bp, Homo sapiens
agcggagttcgctgcgtgtcgaggcgagcacgcgctccgccctggaggctgcggcgacgggtcctcctccgccgtccggtcgcgccctcgcggaagctcggcagtgcgcgtgcgcccgcacccgcactccaaattagaaaggggacgtctagtgggttgcccgggaggggtggcgggagcggtcctggaaataatctgtcctctgtcgccgggaactggcgaggtagttccttcgcggtggagagacctggaatggccaaatatcaaggtgaagttcaaagtttgaaactggatgatgattcagttatagaaggagtaagcgaccaagtacttgtggcagttgtggtcagtttcgctttgattgctaccctggtatatgcacttttcagaaatgtacatcaaaacattcacccagaaaaccaggagctagtaagggtacttcgagaacagcttcaaacagaacaggatgcacctgctgccactcgacagcagttctacactgacatgtactgtcccatctgcctgcaccaagcctccttcccggtggagaccaactgtggacatcttttttgtggtgcctgcattattgcttactggcgatatggttcatggcttggggcaatcagttgtccaatctgtagacaaacggtaaccttactcctaacagtatttggtgaagatgatcagtctcaggatgttctgagattgcatcaggatattaatgattataaccggagattctcagggcaacccagatctattatggagagaattatggatctacccactttactgaggcatgcattcagggaaatgttttcagtcgggggccttttctggatgtttcgcatcaggataatactttgtttaatgggagcttttttctatcttatatcacctctagattttgtacctgaagccttgtttggaattctaggctttctagatgatttctttgtcatctttttattgcttatctacatctctattatgtatcgagaagtgataacccaaaggctaactagatgaaaaagaaaacaaaactgagtttactaggatatctgagctaatgtagaacatcaaacagaaggacccatggcagtataaagcaatgaagcaatggagtattatctcacaaatataaaaccactataagacaaacatttgattatcatttgacaaatacctaggtataactggaattttcatgtttgaagttctaatattaagtttagaattataatgatctacagttgtatcttgattctatgttgtctggaaaaaatatggaattatataaaaagggatgcttttatatatttttcttttccccagaattacttagattaattagatgtatagtaaaatattgttaaatgtcagtttatccatcttatccttctcagcaggtacctatatgataatatatagctgtgaaactcatctaaatatttttgttccaataaaatattatatactattggggaaaattcagtatttcttttagtgctagctaagttttgtgcatttggagcagttctgccttttcattctggtataattaattatttgctatcagctgaaactgaaagaagaaacttgaacttcatacttcgatatcatattctagtttacagaacacattttaatcaatagaagaattaagatgaaaaacatggccgggcggggtggctcacgcctgtaatcctagcactttgggaggctgaggcgggtagatcacaaggtcaggagatcaggaccatcctggctaacatggtgaaaccccgtctctactaaaaatacaaaaaattagccaggcgtggtggcaggcgcctgtagtcccagctactcgggaggctgaggcagaagaatggcgtaaacccaggaggtggattgcgccactgcactccagcctgggcaacagagtgagactccctctcaaaaaaaaaaaaaaaaaag

SEQ ID NO: 130062 - DNA, 831 bp, Homo sapiens
agcggagttcgctgcgtgtcgaggcgagcacgcgctccgccctggaggctgcggcgacgggtcctcctccgccgtccggtcgcgccctcgcggaagctcggcagtgcgcgtgcgcccgcacccgcactccaaattagaaaggggacgtctagtgggttgcccgggaggggtggcgggagcggtcctggaaataatctgtcctctgtcgccgggaactggcgaggtagttccttcgcggtggagagacctggaatggccaaatatcaaggtgaagttcaaagtttgaaactggatgatgattcagttatagaaggagtaagcgaccaagtacttgtggcagttgtggtcagtttcgctttgattgctaccctggtatatgcacttttcagaaatgtacatcaaaacattcacccagaaaaccaggagctagtaagggtacttcgagaacagcttcaaacagaacaggatgcacctgctgccactcgacagcagttctacactgacatgtactgtcccatctgcctgcaccaagcctccttcccggtggagaccaactgtggacatcttttttgtggtgcctgcattattgcttactggcgatatggttcatggcttggggcaatcagttgtccaatctgtagacaaacggtaaccttactcctaacagtatttggtgaagatgatcagtctcaggatgttctgagattgcatcaggatattaatgattataaccggagattctcagggcaacccagatctgtaagtaatgctaaagcatgttcaaagttagaggaagacacatttcttctcttttgtaaagtgaggtttacc

SEQ ID NO: 130063 - DNA, 834 bp, Homo sapiens
agcggagttcgctgcgtgtcgaggcgagcacgcgctccgccctggaggctgcggcgacgggtcctcctccgccgtccggtcgcgccctcgcggaagctcggcagtgcgcgtgcgcccgcacccgcactccaaattagaaaggggacgtctagtgggttgcccgggaggggtggcgggagcggtcctggaaataatctgtcctctgtcgccgggaactggcgaggtagttccttcgcggtggagagacctggaatggccaaatatcaaggtgaagttcaaagtttgaaactatatgataatatatagctgtgaaactcatctaaatatttttgttccaataaaatattatatactattggggaaaattcagtatttcttttagtgctagctaagttttgtgcatttggagcagttctgccttttcattctggtataattaattatttgctatcagctgaaactgaaagaagaaacttgaacttcatacttcgatatcatattctagtttacagaacacattttaatcaatagaagaattaagatgaaaaacatggccgggcggggtggctcacgcctgtaatcctagcactttgggaggctgaggcgggtagatcacaaggtcaggagatcaggaccatcctggctaacatggtgaaaccccgtctctactaaaaatacaaaaaattagccaggcgtggtggcaggcgcctgtagtcccagctactcgggaggctgaggcagaagaatggcgtaaacccaggaggtggattgcgccactgcactccagcctgggcaacagagtgagactccctctcaaaaaaaaaaaaaaaaaag

SEQ ID NO: 130064 - DNA, 2134 bp, Homo sapiens
agcggagttcgctgcgtgtcgaggcgagcacgcgctccgccctggaggctgcggcgacgggtcctcctccgccgtccggtcgcgccctcgcggaagctcggcagtgcgcgtgcgcccgcacccgcactccaaattagaaaggggacgtctagtgggttgcccgggaggggtggcgggagcggtcctggaaataatctgtcctctgtcgccgggaactggcgaggtagttccttcgcggtggagaggtacgtccggcgcgcggcggcacgcccaccctatcggggcccgcggagccgcggacggcggggtctggccttcttggggtagctctggccgccgaggctctgcggggcggcgggagtcgccgcctccttccccccgggcccctccctcgtctggaagccccagaatcgccccgcggctgtccggagtcgccggcgacggtggaggggccgacgcggagagcggctctagacctggaatggccaaatatcaaggtgaagttcaaagtttgaaactggatgatgattcagttatagaaggagtaagcgaccaagtacttgtggcagttgtggtcagtttcgctttgattgctaccctggtatatgcacttttcagaaatgtacatcaaaacattcacccagaaaaccaggagctagtaagggtacttcgagaacagcttcaaacagaacaggatgcacctgctgccactcgacagcagttctacactgacatgtactgtcccatctgcctgcaccaagcctccttcccggtggagaccaactgtggacatcttttttgtggtgcctgcattattgcttactggcgatatggttcatggcttggggcaatcagttgtccaatctgtagacaaacggtaaccttactcctaacagtatttggtgaagatgatcagtctcaggatgttctgagattgcatcaggatattaatgattataaccggagattctcagggcaacccagatctattatggagagaattatggatctacccactttactgaggcatgcattcagggaaatgttttcagtcgggggccttttctggatgtttcgcatcaggataatactttgtttaatgggagcttttttctatcttatatcacctctagattttgtacctgaagccttgtttggaattctaggctttctagatgatttctttgtcatctttttattgcttatctacatctctattatgtatcgagaagtgataacccaaaggctaactagatgaaaaagaaaacaaaactgagtttactaggatatctgagctaatgtagaacatcaaacagaaggacccatggcagtataaagcaatgaagcaatggagtattatctcacaaatatatggaattttcatgtttgaagttctaatattaagtttagaattataatgatctacagttgtatcttgattctatgttgtctggaaaaaatatggaattatataaaaagggatgcttttatatatttttcttttccccagaattacttagattaattagatgtatagtaaaatattgttaaatgtcagtttatccatcttatccttctcagcaggtacctatatgataatatatagctgtgaaactcatctaaatatttttgttccaataaaatattatatactattggggaaaattcagtatttcttttagtgctagctaagttttgtgcatttggagcagttctgccttttcattctggtataattaattatttgctatcagctgaaactgaaagaagaaacttgaacttcatacttcgatatcatattctagtttacagaacacattttaatcaatagaagaattaagatgaaaaacatggccgggcggggtggctcacgcctgtaatcctagcactttgggaggctgaggcgggtagatcacaaggtcaggagatcaggaccatcctggctaacatggtgaaaccccgtctctactaaaaatacaaaaaattagccaggcgtggtggcaggcgcctgtagtcccagctactcgggaggctgaggcagaagaatggcgtaaacccaggaggtggattgcgccactgcactccagcctgggcaacagagtgagactccctctcaaaaaaaaaaaaaaaaaag

SEQ ID NO: 130065 - DNA, 1242 bp, Homo sapiens
  misc_feature (32)..(33): n is a, c, g, or t
ttaacatattcttcttgtatataaaaaaatanngcctcagtgattatggagagaattatggatctacccactttactgaggcatgcattcagggaaatgttttcagtcgggggccttttctggatgtttcgcatcaggataatactttgtttaatgggagcttttttctatcttatatcacctctagattttgtacctgaagccttgtttggaattctaggctttctagatgatttctttgtcatctttttattgcttatctacatctctattatgtatcgagaagtgataacccaaaggctaactagatgaaaaagaaaacaaaactgagtttactaggatatctgagctaatgtagaacatcaaacagaaggacccatggcagtataaagcaatgaagcaatggagtattatctcacaaatataaaaccactataagacaaacatttgattatcatttgacaaatacctaggtataactggaattttcatgtttgaagttctaatattaagtttagaattataatgatctacagttgtatcttgattctatgttgtctggaaaaaatatggaattatataaaaagggatgcttttatatatttttcttttccccagaattacttagattaattagatgtatagtaaaatattgttaaatgtcagtttatccatcttatccttctcagcaggtacctatatgataatatatagctgtgaaactcatctaaatatttttgttccaataaaatattatatactattggggaaaattcagtatttcttttagtgctagctaagttttgtgcatttggagcagttctgccttttcattctggtataattaattatttgctatcagctgaaactgaaagaagaaacttgaacttcatacttcgatatcatattctagtttacagaacacattttaatcaatagaagaattaagatgaaaaacatggccgggcggggtggctcacgcctgtaatcctagcactttgggaggctgaggcgggtagatcacaaggtcaggagatcaggaccatcctggctaacatggtgaaaccccgtctctactaaaaatacaaaaaattagccaggcgtggtggcaggcgcctgtagtcccagctactcgggaggctgaggcagaagaatggcgtaaacccaggaggtggattgcgccactgcactccagcctgggcaacagagtgagactccctctcaaaaaaaaaaaaaaaaaag

SEQ ID NO: 130066 - DNA, 1220 bp, Homo sapiens
cttgtttttccctctaccagattatggagagaattatggatctacccactttactgaggcatgcattcagggaaatgttttcagtcgggggccttttctggatgtttcgcatcaggataatactttgtttaatgggagcttttttctatcttatatcacctctagattttgtacctgaagccttgtttggaattctaggctttctagatgatttctttgtcatctttttattgcttatctacatctctattatgtatcgagaagtgataacccaaaggctaactagatgaaaaagaaaacaaaactgagtttactaggatatctgagctaatgtagaacatcaaacagaaggacccatggcagtataaagcaatgaagcaatggagtattatctcacaaatataaaaccactataagacaaacatttgattatcatttgacaaatacctaggtataactggaattttcatgtttgaagttctaatattaagtttagaattataatgatctacagttgtatcttgattctatgttgtctggaaaaaatatggaattatataaaaagggatgcttttatatatttttcttttccccagaattacttagattaattagatgtatagtaaaatattgttaaatgtcagtttatccatcttatccttctcagcaggtacctatatgataatatatagctgtgaaactcatctaaatatttttgttccaataaaatattatatactattggggaaaattcagtatttcttttagtgctagctaagttttgtgcatttggagcagttctgccttttcattctggtataattaattatttgctatcagctgaaactgaaagaagaaacttgaacttcatacttcgatatcatattctagtttacagaacacattttaatcaatagaagaattaagatgaaaaacatggccgggcggggtggctcacgcctgtaatcctagcactttgggaggctgaggcgggtagatcacaaggtcaggagatcaggaccatcctggctaacatggtgaaaccccgtctctactaaaaatacaaaaaattagccaggcgtggtggcaggcgcctgtagtcccagctactcgggaggctgaggcagaagaatggcgtaaacccaggaggtggattgcgccactgcactccagcctgggcaacagagtgagactccctctcaaaaaaaaaaaaaaaaaag

SEQ ID NO: 130067 - DNA, 660 bp, Homo sapiens
ggaactggcgaggtagttccttcgcggtggagaggtacgtccggcgcgcggcggcacgcccaccctatcggggcccgcggagccgcggacggcggggtctggccttcttggggtagctctggccgccgaggctctgcggggcggcgggagtcgccgcctccttccccccgggcccctccctcgtctggaagccccagaatcgccccgcggctgtccggagtcgccggcgacggtggaggggccgacgcggagagcggctctaggtgggtttggcggcggcgaggacaccgccgctccctctagggtcgctcggagcgtgaccctgagaactctccttaatgcaggaggggtgtgcgcccgctcgccaatccgtaaggacaccggccgaccccgggcctgcgtttctcagcgttcggagttgccttcgcttaatggcgaggcggatcgttctggagcttccacctctttagaggcacgaatctgtctgctgggctgccgataaatttttaacagatatagcatacgcagaaaagtgcatacgacatacacgtttaaagaagaattaataaaacacccagataaaaacgaaaagggcattaccggcaccccaggagtttctcacccatgccctgtgctcctttcggagcctgattgtctcct

SEQ ID NO: 130068 - DNA, 1405 bp, Homo sapiens
agcggagttcgctgcgtgtcgaggcgagcacgcgctccgccctggaggctgcggcgacgggtcctcctccgccgtccggtcgcgccctcgcggaagctcggcagtgcgcgtgcgcccgcacccgcactccaaattagaaaggggacgtctagtgggttgcccgggaggggtggcgggagcggtcctggaaataatctgtcctctgtcgccgggaactggcgaggtagttccttcgcggtggagagacctggaatggccaaatatcaaggtgaagttcaaagtttgaaactggatgatgattcagttatagaaggagtaagcgaccaagtacttgtggcagttgtggtcagtttcgctttgattgctaccctggtatatgcacttttcagaaatgtacatcaaaacattcacccagaaaaccaggagctagtaagggtacttcgagaacagcttcaaacagaacaggatgcacctgctgccactcgacagcagttctacactgacatgtactgtcccatctgcctgcaccaagcctccttcccggtggagaccaactgtggacatcttttttgtggtaaccttactcctaacagtatttggtgaagatgatcagtctcaggatgttctgagattgcatcaggatattaatgattataaccggagattctcagggcaacccagatctattatggagagaattatggatctacccactttactgaggcatgcattcagggaaatgttttcagtcgggggccttttctggatgtttcgcatcaggataatactttgtttaatgggagcttttttctatcttatatcacctctagattttgtacctgaagccttgtttggaattctaggctttctagatgatttctttgtcatctttttattgcttatctacatctctattatgtatcgagaagtgataacccaaaggctaactagatgaaaaagaaaacaaaactgagtttactaggatatctgagctaatgtagaacatcaaacagaaggacccatggcagtataaagcaatgaagcaatggagtattatctcacaaatataaaaccactataagacaaacatttgattatcatttgacaaatacctaggtataactggaattttcatgtttgaagttctaatattaagtttagaattataatgatctacagttgtatcttgattctatgttgtctggaaaaaatatggaattatataaaaagggatgcttttatatatttttcttttccccagaattacttagattaattagatgtatagtaaaatattgttaaatgtcagtttatccatcttatccttctcagcaggtacctatatgataatatatagctgtgaaactcatctaaatatttttgttccaataaaatattatatact

SEQ ID NO: 130069 - DNA, 967 bp, Homo sapiens
agcggagttcgctgcgtgtcgaggcgagcacgcgctccgccctggaggctgcggcgacgggtcctcctccgccgtccggtcgcgccctcgcggaagctcggcagtgcgcgtgcgcccgcacccgcactccaaattagaaaggggacgtctagtgggttgcccgggaggggtggcgggagcggtcctggaaataatctgtcctctgtcgccgggaactggcgaggtagttccttcgcggtggagagacctggaatggccaaatatcaaggtgaagttcaaagtttgaaactggatgatgattcagttatagaaggagtaagcgaccaagtacttgtggcagttgtggtcagtttcgctttgattgctaccctggtatatgcacttttcagaaatgtacatcaaaacattcacccagaaaaccaggagctagtaagggtacttcgagaacagcttcaaacagaacaggatgcacctgctgccactcgacagcagttctacactgacatgtactgtcccatctgcctgcaccaagcctccttcccggtggagaccaactgtggacatcttttttgtggtgcctgcattattgcttactggcgatatggttcatggcttggggcaatcagttgtccaatctgtagacaaacgggttcatcagagaagagcagccgtgcaagtgagcagacccatcaagaggctgttgcatgcctggacacacagaactctcctgcctgtacagtcggatgcaggtcagggcctcagcatataccccatgaccgaatgctcccttcagcctcaccacgtttatgcttcacgttactagactgtgtttccatcctttggttctcaggttaaatgttccctcctcactcagactacccaaaagtaggcagtgcaaaagtagtgcaaaagtaggcagtgaccctcccctccccttaccccagggcactctgaggcattcagacat

SEQ ID NO: 130070 - DNA, 2188 bp, Homo sapiens
agcggagttcgctgcgtgtcgaggcgagcacgcgctccgccctggaggctgcggcgacgggtcctcctccgccgtccggtcgcgccctcgcggaagctcggcagtgcgcgtgcgcccgcacccgcactccaaattagaaaggggacgtctagtgggttgcccgggaggggtggcgggagcggtcctggaaataatctgtcctctgtcgccgggaactggcgaggtagttccttcgcggtggagaggtacgtccggcgcgcggcggcacgcccaccctatcggggcccgcggagccgcggacggcggggtctggccttcttggggtagctctggccgccgaggctctgcggggcggcgggagtcgccgcctccttccccccgggcccctccctcgtctggaagccccagaatcgccccgcggctgtccggagtcgccggcgacggtggaggggccgacgcggagagcggctctagacctggaatggccaaatatcaaggtgaagttcaaagtttgaaactggatgatgattcagttatagaaggagtaagcgaccaagtacttgtggcagttgtggtcagtttcgctttgattgctaccctggtatatgcacttttcagaaatgtacatcaaaacattcacccagaaaaccaggagctagtaagggtacttcgagaacagcttcaaacagaacaggatgcacctgctgccactcgacagcagttctacactgacatgtactgtcccatctgcctgcaccaagcctccttcccggtggagaccaactgtggacatcttttttgtggtgcctgcattattgcttactggcgatatggttcatggcttggggcaatcagttgtccaatctgtagacaaacggtaaccttactcctaacagtatttggtgaagatgatcagtctcaggatgttctgagattgcatcaggatattaatgattataaccggagattctcagggcaacccagatctattatggagagaattatggatctacccactttactgaggcatgcattcagggaaatgttttcagtcgggggccttttctggatgtttcgcatcaggataatactttgtttaatgggagcttttttctatcttatatcacctctagattttgtacctgaagccttgtttggaattctaggctttctagatgatttctttgtcatctttttattgcttatctacatctctattatgtatcgagaagtgataacccaaaggctaactagatgaaaaagaaaacaaaactgagtttactaggatatctgagctaatgtagaacatcaaacagaaggacccatggcagtataaagcaatgaagcaatggagtattatctcacaaatataaaaccactataagacaaacatttgattatcatttgacaaatacctaggtataactggaattttcatgtttgaagttctaatattaagtttagaattataatgatctacagttgtatcttgattctatgttgtctggaaaaaatatggaattatataaaaagggatgcttttatatatttttcttttccccagaattacttagattaattagatgtatagtaaaatattgttaaatgtcagtttatccatcttatccttctcagcaggtacctatatgataatatatagctgtgaaactcatctaaatatttttgttccaataaaatattatatactattggggaaaattcagtatttcttttagtgctagctaagttttgtgcatttggagcagttctgccttttcattctggtataattaattatttgctatcagctgaaactgaaagaagaaacttgaacttcatacttcgatatcatattctagtttacagaacacattttaatcaatagaagaattaagatgaaaaacatggccgggcggggtggctcacgcctgtaatcctagcactttgggaggctgaggcgggtagatcacaaggtcaggagatcaggaccatcctggctaacatggtgaaaccccgtctctactaaaaatacaaaaaattagccaggcgtggtggcaggcgcctgtagtcccagctactcgggaggctgaggcagaagaatggcgtaaacccaggaggtggattgcgccactgcactccagcctgggcaacagagtgagactccctctcaaaaaaaaaaaaaaaaaag

SEQ ID NO: 130071 - DNA, 223 bp, Homo sapiens
attgctcctgttattgatttctagtttcaggccattgtggacagaaaataatacttgatagaatttcaatcttcttaaatgcattaagacttgctttgtggcctaacgtgatctatccgagaaaatgttccacgtatacttgagaagaatgtgtattctgctctgactggatggaatgttctgtatttctattagatctattctatttggtctaaagtttagt

SEQ ID NO: 130072 - DNA, 125 bp, Homo sapiens
ggtccccttatgttctgaccattttagtgagaacccaggctgcccctcgaagggcacagagaaacagggagcgtcacagtcagctcgttctctctgtggatttttgagtctccatcctgaagcct

SEQ ID NO: 130073 - DNA, 198 bp, Homo sapiens
tcaaggccactgcaatgggtgacagagtgggactctgccaatttaagggaaaaaaaagcactgcttattcccaacctgaggaaattggtagtttctgtaatggtagtcaggaagcgcacttctttcttatatgttaacagatgacattagtaaaaccttaacctaattgttaacagaatttgctgtagacacatggtt

SEQ ID NO: 130074 - DNA, 186 bp, Homo sapiens
gggacctgcctggcaggagagtttttaaacagtaacatacaggccaggcgtggtggctcacggcaaacctctttttttaataaattacccagtcgcagatatttctttatagcaatgagagaacagaataatacagaaaattggtaccaggaatagggcattactataaagatacctaaaaatatg

SEQ ID NO: 130075 - DNA, 351 bp, Homo sapiens
gtagagaggaggtttcaccacgttggccacgatggtctcaatctcctaacctcgtgacccacctgcctcggcctcccaaagtgctgggattacaggtgtgagccaccgcctggcccttgttagtgttttttaagggttcccctcctcccccttttaaagttgttctaaccatttagaggatgctgtagctaccaggccacttggaacgtacacctgtctgagttgagaccgaagttttaaattcagtcagttcttcatttgtttgtgactttgcggattatgtggggatattttaaaatccaagtttgaggatgttcagcactcactcagtggacctttatgttctcctaa

SEQ ID NO: 130076 - DNA, 163 bp, Homo sapiens
cttggtgataatgatgatgacgcttattaatattagagcactagtacaatgcctgatccatgtggacactcgataggttctagtctgttcctctgttcctcccttttcccctttcccttgtggactttcccacaactcacctctcacccctcactattgagag

SEQ ID NO: 130077 - DNA, 487 bp, Homo sapiens
taactttccacaggtagaaagaatattctcaaatttaaatgaaaaaatcaaaaagtcagagaaaataaacgaaaaccatttcattctcttataaagcctaatatattttctgcttaaaactctgtaattagattaaatacacaaatggttaagaaaaaatttacaaaattaaacaaaaaggaagggctaggttatttttctttattactgcgacaatatgacttcatatttttcataattgtagaaaacaacttgcttttcaccactttaaaagaatattgaaatgtaagataatttaaaatgttgcatataaatgtataccctttacttcctatatccacaaatggacattcccaatgctttccagaatttaaagtgttaagaagtttggcatttagaatgtcagcagatatgcctttgatatgatattacattaagcaaataaactcaatgtaataattttcttagttatatttattatgctcaa

SEQ ID NO: 130078 - DNA, 448 bp, Homo sapiens
aagattatttatttacttcaagagttaagagtggcagtttggggatagcaccaggagatatcagctgtgatggcttggaaaaacagtgtaaactggcagtgtaaacaagagcagggcatgtatgggtagttgagaaaggtgaataggagtatgactagacagaagatagtagggatgacaagtttttttggggggcacagtccaagttggtctggtgtctggaatgagactggggcctaataaaaaggcgtctatacaggagcttaaatgggctgtaccctgaggacaggcctgaattctgagaagggaaagtggtaaaagtattgtccagtccttttgaagttggtggctgagcttggtgaggtgtgtttttaaaagacctttagtccattctacttttcttgaagatggaggaccgtaagggatataaaggtttcactgaaaacta

SEQ ID NO: 130079 - DNA, 256 bp, Homo sapiens
ctcccgagtagctgggactacaggcgtgtgccaccacacccagttaaattttgtacttttagtagagacgaagttttgccatgttggctgtactggtctcgaactcctgacctcaggtgatgttcccaccttggccttccaaagtgctaggattacaggcgtgagccactgcgcttggccccaggccatcatttaatgttaaatgtttttaaagcttttaatgtcaaaggcttttaacttcaaatggacccaaaat

SEQ ID NO: 130080 - DNA, 116 bp, Homo sapiens
aaaggatgagagtaacattttcataggaataaccttgaaacagatcttctataatatgccaaccaagtaaatgtttgcaaacacaggaaattttatgattagtgactattggttgt

SEQ ID NO: 130081 - DNA, 441 bp, Homo sapiens
tcagtgaagggtggtatagatttagcttattttaaaggtttaatatcttagccactggtttggggcttcatttcagtactcgtagcaaggacctcatgctttcgttattaattaatgtttatccttttgttattaattactgtcatgacacctttgctacatgttaggcacctggatagagaagagtttccaggttctgtattactgcctcttcaacacttgtcgggatgccgaagctagctacttttaaattttttgtataaactaggactgactcaaaaaatagaggctttcatgtagacctagaggggcatgaaagaatgaagagctgtttggttgaaagatatgaaatatttacatcccagagataacctgctgtaattcatcccattttctgttgtttcttaatgttaatattttatgcagtcattcacaagtgtt

SEQ ID NO: 130082 - DNA, 479 bp, Homo sapiens
tatgggtaaacctgactggccaaaaaacatgaaaataggcacaacttcaatagcaatcagaaaggtacaaagtaaaacaacagaggtatttttttgcccatcagattggcaaaactaattaggcaaccctaatgctcaggcttagcaagggtggggaaatgaacactctcacagcaattcctggaggtatcaatcagcaaagccattctgcagggcaacttggcagcttccgtttgtacttaatataggtgtgcccctgccgacctagcagtttcacttcttgatagctacaccagcgaaacccttccacacatgcttcagcaagcatatagagcaggggtatccaatcttttggcttccctgggccacatggaagaattgtcttgggccacagataaaatacactaacactggctgggagcagtggctcacgcctgtaatcccagcactttgggagtccgaggcgggcggatcacgag

SEQ ID NO: 130083 - DNA, 820 bp, Homo sapiens
tgctggattatatggtaagagtatgtttagtttttttaagggaaactgccaaactgtcttccaaaatggctgtaccagttttcattcccaccagtgatgaatgagagttctactgctctacatggccaccagcatctgatgtggtcagtgtttgggattttggccattctaataggtgtgtagtagtacttcattgtggtttttatttgcatttccctaatgacttatgatacagaacatctttttatatttatttgccttctatgtatctactttagtgaagtgaacagatgtacaagtctttggcacattagaaaattttggagcatttttaattgagttgttcattttttaattgttacattttaaaagttctttgtatgttttgaataataatctggctataatcacttaatatttccaggagattttttttttaagcttttcttttattattatactttaagttttagggtacatgtgcacattgtgcaggttagttacatatgtatacatgtgccaggagattttaagttagtttttttcagatgagaacagagacagttttcttccttctcaatctgtgtaccttttatttccttttcttattttattacatttgctaggacttccagttcagtgctgaaaaggagtgttgagaggagacatcctcaccttgttcctgatcttagagagaaagcttctagtttctcaccattaaatatgatattagctgtagattttttaatagatgttctttatgaagttgaggaagttctcttctattcctaatttcatgcaagtttttatcatgaatggg

SEQ ID NO: 130084 - DNA, 329 bp, Homo sapiens
ggaagactaaggcaggagaattgcttgaacccaggaggcggaggttgcagcaccactgcactccagcctgggcgacagagccagactgtgtcaaaaaaaaccaaaaaaacaaaatcagaatgctgccagaggagagaaagaaccagctgttcccagcagccttctactagtcagtcccaactaccctctactgcttcagttgccaactgatgttagttttctcacccagtaacttcgttggcttgtgtttttttagccatctgtacacacttgagcttgcaatcctggcatacagtgataaacaaaatagacatggtccccgccctcac

SEQ ID NO: 130085 - DNA, 782 bp, Homo sapiens
ggaactgcaaatgatacagccaccctggaaaacagtttgacaatttcttaacaaagctatgtttattgtatttttattcataatcaccaaaaactgtaagcaaccagagtgtccttcaataagtaaatagataagcataatacaaaaaatccattcaatgaaatactattaaataataaaaaaggatgaagtgtcaagccatgcaaagatatgggtgaatcttaaatgcatattgctaaggaaaactatccagctggaaaatgctacttaccatatgattatattcatatgctattttttaaaaaggctaaactatagatatgcttaacataccagtggttgccaggcattcagtgggggtttgtgggatgggtgacagtagtgaagagatggaacacagaggttttttagggagctgagattattctgtgtgatgctgaaatattgagtacatacactatcagtctgttgcaatccacagaactttacaaaacaaaaagtaaacctaaccttacacagattttttaaaaagtcatttagaggtcaggagactccaagatggaattcaggctgagacaaaaaatatctaactgtattacaaatgtatgaaatatcttatctgaagggagtggaggataacagtggtgacataagtaactttgaaaataaatggagatgagtctgtaatagtaaaggcaaaagaaactacataagcaccatattctagttgaaaagggtgtttacacaggggtacagattaacaatcctcataccactataca

SEQ ID NO: 130086 - DNA, 307 bp, Homo sapiens
gacctcaggtgatccacccgcctcagcctcccaaagtgctgggattacaggcatgagccactgtgcctggcccaggagacttaatatttaaaggctgtcaattatccccaagttaatctagaaattaaatgaaattcagatgaacatcctaagaagttttgaattactcaaagtcttagcaggaaaccaatggcacacacagaagtgttcaccgaggggagtcaatgaaggacctgtttacaaaggtgtggacaaagcttaaggaaaccaagaaaccaacaggggaaggtgaggcaccctaagctag

SEQ ID NO: 130087 - DNA, 338 bp, Homo sapiens
gcccgcctcggcctcctaaagtgctgggactacaggcatgagcaccatgtccagctgagactgcatttctaaaggctccaggtgaggttgctgctgtgatgctgagggtcccaggactgcatatctgctgcagggccttgccctttccaactcctgctgccttcttgacattccctcccctttcactgagcttgtgcacagactgtcttctcccctctgggctacgcacccagtttttcctgtctggaatgagctgctattcccccttaccctacacaccccatctcctctttccccaacagcaccctgtgctgaagccttcgcaggatttaccaggc

SEQ ID NO: 130088 - DNA, 447 bp, Homo sapiens
ggtctcgatctcctgaccttgtgatcggcccggctcggcctcccaaagtgctgggattacaggcgtgagccagctcacccggccacttggtggcttgtttctttcagaacgagaattccacaaaacccaggaaatcgtcttgtgacctagctccaggtctcaaagttatgtctgctgcattcttttggtcaagcaagtcactaaggccagcccaggtttaagggaggggagttagactcttacctttcactgtgaggagtagcagagaatttgcagcctgtcttaaatgttttgtcacatactgtatgtgtttcatcaagtctaacatgttgtgggagccaaggcccttggccccctaaaggtttgctgaaaaatcactggcatgaggcagattggctaatcggagaaaaggcacacacatgtatttaccatgtatacacaggagcc

SEQ ID NO: 130089 - DNA, 857 bp, Homo sapiens
gagggaggataggcagtgaggcagctggttacattcttgtgaggctctgattagcctcagcaaatctacattttacatgtgaaaacctacatttttacatggggaaaaagtaaattatgcattgttgcacacctagtaaatctatattttacataagataaagtaaacatgtgaaaatagggagtagaggctatgacataaagctgtaaaattacagttatctgtttggaaacaaaagcaaagcagtttttctgtgtgtgatccagttcccaagcttaactttcccttggtcatagtgagtttggggtcccgagattctggttttttttttttttttcttcacattattcaaggcaccatacaaaggctcaaaaaataagttgttgtattaaaaatcatacaaatttgtgcatgtggatactgtggtatatgcacaaataaacaaactggttatattggaataatttttactacgtcctacaaatatttacaatatcctaaacatacaacaaaattatttcaaaacagtcatcttctaaaccatggatctttttgaataccttagcagttagtgtggttcatttgaaatacacagaattggaaattacaggcctctgggttcagtctcgaatctgccttgtgtgatgtgtcttcatatgttacccctcagagcttcttctgaggccttattttgtctggttatactagatgacctctaatattccctctagtacactggattccatctcaaaggtcattgcttcttgaagctgtcatcagtaatagaaaagccctattttattttcccagtttatttaaccccaatcctagtaatccccatgcaaatgtagatcaca

SEQ ID NO: 130090 - DNA, 687 bp, Homo sapiens
aaagtgctgagattacaggcgtgagccatcacgcccggccaagaatacttttaagtaggattgcattatgtactaatttttttaactagccagtcactcaaaaatatactgtaaacttattgataccagttttttactattataaaaatagcaagtattgtctaagaattcataaccacccggaatgccaggtttgaatttagaattctaggattcttggaatcactcattcctatccggccacctatattgtcctatactgacaggaaatttgcacgtatatacctggacataacagcctgcacgtccaggctccaccctccagctactacaagttgttaacctcggctattcaacaagctttgaggtacacacagtaattgcataatttggctgttttggcagggcattccagggttcctgagatctaagtgtgggttggaatgaagtgcagtggaacacatcctcttggccggctcatttcctgctcatatgcactaggagaaattcatagaaatgttcataccagcatttgtaagcagaagacaggctgagtgcctttgctcatgtctgtaatcccagcacttcgggaggccgaggtgggtggatcacctgaggtcaggagttcgagaccagcctggccaacgtggtgaaaccccgtctctactaaaaatacaaaaattagcc

SEQ ID NO: 130091 - DNA, 496 bp, Homo sapiens
ggtcatagctgactctagaggataaaaggacgagcagcgaagacacagtcatgagactagttgtgtcatgatacctctcacatcagatgattgagcaagaaaggaaagatctgatgtcagcgtgtaaaggctggatatgggcaccaaggattggggagctcagttcgggagatgtgttttggtctttattaccggcagcccaggggcaggaatactgactgcagctttgggtagtttgaggacacatctgaaagaggtgagctgaagcctttcagttttcagctgtacttgcattaaagcaaggcttgtccctgctggggtacccttcattcctcgacctcactgactggtgagtttcttccatttcatgagtaatgaccatctgtgggcacagagcttcgtcatcttactgaatccccgccctttgcaggggtgaccttactgtcacttacagatgaagcagctgggactttgggaggttcagcagcttgcccta

SEQ ID NO: 130092 - DNA, 745 bp, Homo sapiens
gtggggagtgacatgatgaaggaactgtttaggaaaatcactccaacaatgatattggaggtttggtaggaaacagtctggaagcatgcagctgtatcaagcagctgttggagtgatccacagtgatcagacttgggctgaggttatggcagaattaatgaaaataacccaatcttgaggatactttgaagaaataaacaatggtgtatggcagactataggagaagggcactggtaaattgtccaaggtgacatcttgatctcaagcttggaaagctggaagaacgctggtatcaccgagaaatgagaaagttggtaacttggataggaaatgcattttcgaaaaattgtaaaatgtatttgagattatggtagcttcaattaacatttttatatatatttttaaaacattctaggccaggcgtggtggctcacgcctataatcccaggccaaggtgggcagattacttaaagtcaggagttcgagaccagtggggccaacatagtgaaaccctgtctctactaaaaatacaaaaattagccgggtatgtggctataacccaactacttgggaggctaaggcacgacaatcacttgaacccaggaggcagaggttgcagtgagccgagattgcgttactgcactccacactccagcctgggtggcagagtgagactccatctcaaaacaaacaaaacattctaatcttctagcattcctacttttgaatatacaccagaaataa

SEQ ID NO: 130093 - DNA, 150 bp, Homo sapiens
tttcacctcagcctcccaaagcactgggattacaagcatgagccactgcacccagcccaccgtatttcatttccaaaataactgagaagtcatggtcatcacgctcttttttttgagatggagtctcactatgtgacccaggctggagtg

SEQ ID NO: 130094 - DNA, 493 bp, Homo sapiens
gaggaaaaaggcaaattaagttgtgatgaggggagaaaagtcagcaaaaacctaaatacatatgtagtttcattatattttatagaatcttagccaattgctgatagaaagatttacatagcaatcccacactcagtaaacatgtaatgagtaaaaaataaatgtcttctgttgctttcttaagctaagaaaaaagttgggttgcttatttatttagctgatattggtttaaaaataatgttcaactcctactagttgtaaacagtgtactggaccgtaaagatgcaaaagtaggcaagaaaagggacaatcacagcatgatattaatgtaacaagcctcacttaggggagcacagacgaagagtgcaacccagtaatccaggcaggagacatcaaggaactctttccagcagtgtagggtttcgaatggcatctgaatggctgaacaccaacagttcacctggtgaggcaaggaagggggcattggctgggt

SEQ ID NO: 130095 - DNA, 572 bp, Homo sapiens
tgcagtttttctacttctcaatagatgtcatggctataatatggtaaagttgactctgaagactacattgaaaatgacatcatcacttcagatgcaaattcaagcatgccatcaggatgggtgtttcttggaatttcccagtttcactcagatactaccttcactgttatttgccatagtttttatctacctattttatttccttaatttaaaaaaatcagtttatgtttattaaatatgactatttaaaaagacaagtatataccactgtcataagtcaatagccagttatcatttcctctatatataatctgtagaaacaaatattaaatggtataattaaatttgagctttgataccattgtctgataaaatccctgggcctgaaagctgttctatctttgttataaagatattctgcttcatgaaattagaaggataaaaaaaggattaaagagagaatactttctcactgtgtgaaaaaatgctgcgtctgggaaccgcaaaaaaaaattcttctttctcatacttaacaaaaatatcaactgaaaccaagtcttagcgacctggat

SEQ ID NO: 130096 - DNA, 398 bp, Homo sapiens
tgggcatggcccagcagggtcaggtgtcacctctgttctcccagtggggagttgatttcttctctccacagatcatgtctttaccctaccagggtccagtccaggctgaactagaaccatcacatcacctctgaactgaacagttgaggggttggggcagataccccagtgggacttcatgtcatttttctaaaccaataggactgggcagtcctcgctgggattgccctggacaatacaaattgggatttgtattgtcacttgaggaaagtcattggtgctttgagtgaggagtggaggggaagatggggtcagaggcctactgatagagcaatgaaccctgctgtggaaggatgcaactttgatcccaggcttcactttgggatcgtgagagggct

SEQ ID NO: 130097 - DNA, 1085 bp, Homo sapiens
ataaagacttaaatatgtactaaagaggtgaagctgttaaatggttaggagaatatcgttataacctcaggataggaagattttgttgtataagacacagcaagtacaaactacaaaagaaaagattgattacttaaactccactcaagaacttctgttcatcaaaatacgtcataaggagtctgaaaagcctgtaatcctagcactttcggaggccaaggccggcagattgcttgagcccaggagttcgagaccagcctgggcaacatagcaagaccccgtctctaaaaaaatacaaacattagccaggtgtagtgttatgtgcctgtagtcctagcttcttgggaggctcaggttggaggattgcctgagcctggggaggtcgaggctgtagtgagctgtgattgcatcactgcactccagccccgttgacagagcaggacacagtctccaaaaaaagagactgaaaatataagctacaaagtgtgagaagatatttacaaaatatatacctaaaaaataattagaagtatctagagaattggtatgaatcatcaagttaaagacatcctaatagagaaatgggcaaaagatatagaaagatattttacagaagaagaagtacaaataatttataaacttacacaaagatgctcaatcccatttgtaattagaggcatataaaccaaaaccacaatgagagtggcaaaaatttaaaagtcacatcatcatcttcattgcttctgtacatggaagtacaaattggtatataccactttggtaacagttggtcagtacctaataaagttgaacttatttgtattctttaacctagtaattttactcctagaaaatatactttagagaaactattacacatgtttactaggatacatatacaggagtatttgtgacagcactgttcataatcttaaaaaagacaagaaacaatctaaatatacataggtagagtggatcattgaagtctggtatattcctaccatggattactatgcagcagtgaaaatggatgcaccaaggcatacactgaacaaaaggatgaatctcaaaaatacaatgttaag

SEQ ID NO: 130098 - DNA, 316 bp, Homo sapiens
ggcatgtgccaccacatccagctaacttttgcatttttaatagagacggagtttcatcatgttggccaggctggtcttcaactcctggcgtcaagtgatctacccgcctcggcctcccaaagtgctgggatcacaggcatgagccactgtgcccagttgattcagactcttaaaagagcctgactcctagaatgttagacctatcacctagtctgatttttccatcacatagataaacaactgaagcccagagaaggaaagggactcacccaactaggtggtggtcggcaaaagagcccaggccccaaagttataa

SEQ ID NO: 130099 - DNA, 480 bp, Homo sapiens
tcacagacacctataaatgacatttaaccaggtatctgggcatcctgtggcccagtcaagttgacacataaaaataaccatcattaccaggtttcttaagagaagcctagaaatctatatttttatatgaatttttccaattttcaatggcttagcaactaatttagttttattttgaagcatcgtgagtgacagaccacatctgcaggctaggtctggttcttgggtcactaatttgtaacctctagtctaaaatatactacccaccagccttattgcacacagagggctaccggacacagagtatatatgaactaaaaatctccagcagtgatgtttgcattctgtcattccacccttctttttttgcactactcttttggaacatgttcagtgtatctgagttgggttatagttaggtgatatggattagaagtggcttgtcactgcttactatttatgtattgtaagatgctcgtg

SEQ ID NO: 130100 - DNA, 183 bp, Homo sapiens
gggtcttggatctggctttagaatgactcaggttgaacacataaagccgtaaggtaaagaggacatcatccatagcaggaactggcaatttacagggctgggagacttaaccgtcccagacgggtgagctcctgatactcaagttagcgctgactcagcgagggccttgaggcttgactcaca

SEQ ID NO: 130101 - DNA, 381 bp, Homo sapiens
ataatcttctactgtatcctaggaaagaacttaacaggatacctgcaggaatacatggtagacaagtgttaaggacaccatcctcacttacatggaaatataaagatctaatggtctgattgtgggaaacacactttctcaattagcaggttacagcacggttccattaatgactattgttaagcttgattgtgagctcattacagaaacctaaaaaacacattgctcaagtgtgtttaaggaaacaatttgttttacataaaaaaagacaagacacaaataattctgggcacttccatcagcagggaaccttcaacactacttggatttgccatgacttcaatgtcaacaatgtagtggcaccatcatctcttgatgatg

SEQ ID NO: 130102 - DNA, 757 bp, Homo sapiens
aggaaaaatcagaaggtagtctttataggaagctattccagcagtcttaaggtaatgaagtccagaccaaggtgctaaataaatggaaagaaataggtaaacatgagcaatggcttgggagataaaattgctcaaagttggtaatttgagttgggactcagtagaaaatagattcagctgacgtttatgagcattgtattagtaaggccttgttgaacacttttacatacaactttcaagactaggaaactgggaaaataagagtgtctttaacaaagttttaagagttatttttagtttggccttagatgtacatacatcttttaaaaatctaacatagtatgcacatattagactcttcgttgatggttatttcaaagtagtaacatcatgatacggaggacaaggataatatcttctttaggacttgttaaaatgaaaaggatactgtatgtgggcaagggataaaaatccattttatttttatggtctcatattgattgcatttgtaaaatttgactccttatatattcaaatgcctcacatgttcttaatagaatgtcttttaaacaacagcgtagtatagcaaaaagaggattggactgaaagttgggaaacctgggtgaccttccggctgacatagtgggtggccttgggcaagtcacttatctctctgttcttcatttcttccatccaaccaaacaaaaggaggagctaaagttttacatctccaacatgacaaggtcattgatgataa

SEQ ID NO: 130103 - DNA, 327 bp, Homo sapiens
gtcatattatttctgtatctggaaagcaagcttccagcagtccagtgtgctgttggagcaggacaagaatccacatcgggaagccaccacttcctgagtcatattatttctgtatctggaaagcaagcttccagcagtccagtgtgctgttggagcaggacaagaatccacatcgggaagccaccacttcctgagtcatattatttctgtatctggaaagcaagcttccagcagtccagtgtgctgttggaaggcagcacctttattaaaagaaaagaggtgttagggcatgagactcacctgccatgcctgctgtgtgagggacgc

SEQ ID NO: 130104 - DNA, 330 bp, Homo sapiens
tcaaattaactgacagacaagtggaatccttatgtatgttaaataggaaggaagtcagcctaagatgaaaagacaccacccaccaatgataattcatttaagtagacagttataggaaagcaataaccatgatgtcatgtggctatatgggctctgaagtaagactacatgagctcaaatcctaggtctaccagttattagttgaatgagctttgttaagttatttaacttttctgtgctcagtatcctcatgtgtaaaatggtaacaaaacctacttcaagttgtttcgaggattcaattaagttaaaccatgtatgtgtttagaagag

SEQ ID NO: 130105 - DNA, 340 bp, Homo sapiens
gatcctatcctacattcaaattagaccactttatctgtttctcatagctgttatttggacttcgtttttctctctgccacctggcctgacctctatgacattttaagtctgtttaccacctcttagctgcctaccatggaaagcaaaagactccaacacatccaagttccagagccctttagatgcccagtttcctacaggaggcatgtctccattcttcctactttctgagattctctctagtaaactcagtcatgtccatttcttttcccactcttcctactttccagagaaatgttttttccttggcttagaatagaaaaatacttcaccacatata

SEQ ID NO: 130106 - DNA, 266 bp, Homo sapiens
attgccaagcagagaaaatggcatgattagaaatataattttaaataccggttttcagagattttgtacctgtcaaggctatgagagaatttctgaattagcataccagttcctccccgattttccaagggcctgaagaaaccagctcccttcccactcagcctgtggctgtggccatgactgccctcctctacccgcacctggcctggggagtaactcagccgcagggcctcaatggcagcgtgcagagggttggaccgcagtgc

SEQ ID NO: 130107 - DNA, 424 bp, Homo sapiens
ttcacaacaaagctgtgagaggtattatgcccattttacagatgaggaagctacactgagagttgtgacaggtgtccaaattcatgtaagtaataaacgctgaaactgagctttaaaccaaatccttataaaacttccatatatgtgtttccataactagaagaagcattgtatgtttttaactaatttagcagtcttgtaggaatgcattcattaaatcagtgcactttatcagaagatttattttttagccaggctggctacaattatggatcatgccagatgctcaatggagggaggaagtgagatgaagtaggctaaagagaaataatcttggtcagattgaagaaggataagcactcttaattgtcaatatcaaatgaaaggagaaatatgaccttgatgtgaaggcttaaggcagggt

SEQ ID NO: 130108 - DNA, 221 bp, Homo sapiens
tatggtcctccagaaagacacacctggactaatttgaccctagaaactgcacggttctgagacatgctctggaccagcctgagctagagcagatgtggtgagggcggcgccaggggcataaagtgcagcctgggaaaggcagtaggtggagccgccagccgcctgtgtgggcagccaggatgcctagcacttgcacatttgttccatctgtgctgggggag

SEQ ID NO: 130109 - DNA, 353 bp, Homo sapiens
tcccaggttcaagcaattcttctgcttcagcctcctgagtagctgggattacaggtgcctaccaccatgcctggctaatttttgtctttttttcagtagagacgaggtttcaccatattggcagattggtctcaaactcctgacctcaagtgatccgcccacctcagcctcccaaagtgctgggattataggcgtgagccaccgcccctggcccatttactgtttaacatctgggatcacaggtgtgagccaccatgcctggtcaaccccgtcttaaaaaaaaatcaaaacaaaacagtaaattgcaatccaggtcttctcattccaaaccattagccgatgtgtagtattgc

SEQ ID NO: 130110 - DNA, 404 bp, Homo sapiens
aatagagaaaagagatcagaaagcagtatcaacccagccctgctgagtttttccaaaggagatctcccaggttcttggtaaagacattcctgctttgtacacctggcaagaagctttttaaaaaaattacatcttaaagggacaaagaaaggatttacacgttttgttgttgttgttgttgagacagtctcattctgtcacccaggctagggtgcagtggtgccatctcagctcactgcaaccttcatcatgtgggttcaagcgattctcctgactcagccgcctgagtagctgggattacaggcgcatgccaccataccctgataactgttttgtattatagtaaagatggggttttgccatgttgcccaggctggtcttgaactcctgatctcaagtgatct

SEQ ID NO: 130111 - DNA, 220 bp, Homo sapiens
gatggatttccacatgaggaagtgtcacgaacaagcgttttgcatctctgtcagctggattcccccatgtgtacgtatgtgagaacatgccgtgtttcctgtctgtaatggtagaggcagccctgatactggattttcacctgaggatggatagatcttcagggttcaagtgggtttgcatctggactttagggtggccctgtaggccctgtgtgagaag

SEQ ID NO: 130112 - DNA, 339 bp, Homo sapiens
ttttaaatttattgtagagaaggggtcttgctatgttgcccaggttggtcttgaacccctgacctccagggatctctcctgccttggcctcctcaggagctggaactacagatatatgctaatgtcttcaatttatggaaatgcagaaatgccttttttttttttttttttttttttgagatggactcatgttctgctgcccaggctggagtgctgtggtgtgatcttagctcactgtatcctccacctccggggttcaagcaattttcgtgcctcagcctcctgggtggctgagactacagatgcccaccaccactcctggctaacttttttgtattt

SEQ ID NO: 130113 - DNA, 236 bp, Homo sapiens
cctcctctcagtccgcctctctgagcacttcctacactgcatcataagtgtacgtggaaagatttcttatccttgtatccatacaataccctagtgggtatctagtcccttgctgtggagacaaggatgaagaagacacagatgaatggcttctcccctcctgcctcagacttggcagccatcagaaaatatgcacatctggctgggcgcagtgggtcacacctgtaatcccagca

SEQ ID NO: 130114 - DNA, 435 bp, Homo sapiens
gatctcaaaaatgcctatgctaaaacagagtactaaacagtgaaaaatcacgtttggcaatggaatgttttccacaatgtattgaaaagaaacctgattttatttttctccaacacaatatatatatagattcagttatcgatatttattaagcaccttgggttaaaccctgtgtattaatttattctcacgctgctatgaagaaatacttgagactaggtaatttataaagaggtttaattgacacacagttctacatggctggggaggcctcaggaaacttacaatcatggtggaagaggaagccaacgtgtccttcttcacaaggtgacagaagatatttttatatcttcactttatccacaaaacaatacataaattaacaataaattggttgtttcattgatcattgcttgctttggcaaatatttctcc

SEQ ID NO: 130115 - DNA, 480 bp, Homo sapiens
gttagtgggtgcagtgcaccagcatggcagatatatacatatgtaactaacctgcacaatgtgcacatgtaccctaaaacttaaagtataataaaaaaaaaattactgactgtggtaaaaggttgggaaagatgtctttcaagatgtttcctaaaacaaaattctgtaataattaaagtgacacttaccatgttctagacacttctaagtgctttacatgtgaacctcagttgaagctcactatcagtcctaagtggtaattatgattgctattgtacccattttacaaatgaggaaactgaagcatagagggattagttaagttgttcaaggtcaggtagctaataagtggcagattccggatgagaactcatcaggctggcttcagggactgtacttcttaaccagtaagaatgttggtttcttaggttgtatatgtaatgtggcttgccctaatattcaaatatttgtattctaatt

SEQ ID NO: 130116 - DNA, 517 bp, Homo sapiens
ctgactcgctgcctctccaccctggagacagggagagggaagaatttcggagaccagggtgggtgggtgtggcccttcacactggtattaaggcctccctcctctcctgtgacatgtaacccccagggcctgcaggtgcccagacagcctgagctcatggcgccctacggggaaggctttgcttagatgtggaaatcaggtagaggacactgggattccctcagtcaatgtccgaaatcaacctttaacctccagaagtgctttaaggcccgcttgaaaagggaaggaaaaggtaaacgttcatggtggccaaagtaataacccccacccccaccaattgctcatgtcctatgttacacagcacaattacataggaagggggaattaagagtgcagataaaattaatgttgctcatcagctgaccttaaaacaagattatcctggagtatctaggagagcccatgtaattacaagcattctttaaaactggaagagggaagtagaaggttaagaacc

SEQ ID NO: 130117 - DNA, 218 bp, Homo sapiens
ataagccacccaagtctatggtattctgttacagcagcccagatggactaagacacttactgaccagacccaagggtcgtgtagggtggtgatgtgctcactaaatactgtgccagtgccattgtagctaggggcagctgtgtgacctgcttctggctcatgcatgcaagagttctgtgtggagtttctgagaaaacctttaaaaggaggtctggctc

SEQ ID NO: 130118 - DNA, 349 bp, Homo sapiens
ctgaccacaccagtgcactccagcctggttgacagagcaagaccactgtctcctgaaggggtaaattcagacaccagttgattatctaggatttacttatagaatatcgatcctggaagggtagggatgctgtttgtagaatgaattattgcctgtatcagtctcctctaccgtgatttgctgaggagagcagcagggttttattagagaagggaagctgaagcaactgaaaccatctcacgtggctcacagccacactagcaggattggttcagcagatgtccttggggggcagggatgggaagcaggtctcagatcactcccaaagtttttacatctgggggttcca

SEQ ID NO: 130119 - DNA, 414 bp, Homo sapiens
cctcccaggttcaagcgattctcctacctcagcctcctgagtagctgagattataggcacgtgccaccacacccagctaatttttgtatttttagtagagacagggtttcaccatgttggccaggctggtcttgaactcctgacctcaggtgatctgcccgcctcggactcccaaagtgctgggattacaggcgtgagccactttgcctggcctggaggacatttttaattgccacaacttgtgggagggatgctactggcagctcgtgagtggagcctagggatgccgctcaatatcctccaatgcataggacgccacccccactaccacagtggagaattacttggccccaaatgtgaacaatgctgaggtcagaagaccttgccgtagcatgatggacttatgccatcact

SEQ ID NO: 130120 - DNA, 509 bp, Homo sapiens
taaggcaacggctgttcaagaggtgggatggagggtatgggttgcacatgcagaatccccctgggcttcgtgaagaacccagggcaccctgggctcagcaggaaggaacacactcaacagcccagggtctgtatatgaggggcaaagagctgactgccaaatcccagccaggatgtgactgtgccctgcccagttccctcaactccacctaccccatctccctcaactccacctaccccatctccctcatgctgccacccccgactgtcactgcaccgaccggccctcgaggacctgctcttaggttcagaagcgaacctcacgtgcacactgaccggcctgagagatgcctcaggtgtcaccttcacctggacgccctcaagtgggaagagcgctgttcaaggaccacctgaccgtgacctctgtggctgctacagcgtgtccagtgtcctgccgggctgtgccgagccatggaaccatgggaagaccttcacttgcactgctgccta

SEQ ID NO: 130121 - DNA, 325 bp, Homo sapiens
taaggcaacggctgttcaagaggtgggatggagggtatgggttgcacatgcagaatccccctgggcttcgtgaagaacccagggcaccctgggctcagcaggaaggaacacactcaacagcccagggtctgtatatgaggggcaaagagctgactgccaaatcccaggatgcccagggaacctcacccaatctgccgaaagaatgtgagaatggccattcccttctgtgaaattccaggggtcggtggggccaaacctatcatggcgggtcctgtgactcttcagcacagggcactgcaaatgatttcccctgtggaaagccagg

SEQ ID NO: 130122 - DNA, 139 bp, Homo sapiens
ttaatgatcttcttagcaatccgatgtctgctgcacagggtcgctctttgatctctaaacattaagtcagtactgaggctttcagtcctattaccttatccaataatttctaaaaaacgggatctgatggcaaataagt

SEQ ID NO: 130123 - DNA, 404 bp, Homo sapiens
gctgggactataggcgtcggtcaccatccctgtctaattttggtatttttggtaaagacagggtttcaccatgttggccaggctggtcttgaactcctggcctcaagtgatccgcacatcatggccccccaacgtgctgggattacaggcgtgagccactgcgcctggcctgcagttccctcctgactagggctttctgtgccctgatgtcctcgcttcccatccctgtcatgctctcctccctctcatgaccttcaatcatttctcttatccactgcctcaccatcatggtctgctgaagctgcatgtctgccttcatctacttgagagtcctgcagtgtgtttaatgtggggcagacccaacatgctgtgcataatttgcagataggttagagcaaagataa

SEQ ID NO: 130124 - DNA, 325 bp, Homo sapiens
agaaggtggcccatgggtggagagccacggctgtgctcaccactgatcactgcaactcagtcctctatgagcccccttcccttctctgggcacgtggaatcccagagcaccgcatctgaaacagtggccagaggagataaggggagaggccatgagggtgcctgaatcctcccacagccgggcaagagaagagggttccaatggcttgagagttggatgatgggactcagccaggactctggctggctggggctgctggtcttgtgtctttctcctctcccgtcttattactcctatcaatatgatgctgtgagaagtggtctgg

SEQ ID NO: 130125 - DNA, 228 bp, Homo sapiens
ggttaagtagtaactgtccccaaatcacacagtgttaaagcaggattcaaaagcaagtggctcaacttgatttcaaactctttccatatcatgcttttttcctggagaaatagtgtaagaaaagaaatacaaaggcattgggttatttcagaattaaatgtaatttttgtcaagcacagaaactgtgaagtattcatatgcctgtggtttaatgaaactggaatctgg

SEQ ID NO: 130126 - DNA, 395 bp, Homo sapiens
ttacacagtttagtcagttcgcctcacgtttttcacatttttgtgttttttaaaagtgatttcatagtttaaaaccctgtggatgctgctgaagtgctgtctggtgttcctaaacataggaaggctgggatgtgccttatggagaaaataggtgtattcaaaatgctttattcaggtctgagtagtttgtgttgttggctatgagttcaatgttagtcaatcaacaacatataagttgtctttaaaaagaaagacacacaaaaaggttatacactgatcagttgacaaaaatgtagtgagagacttgtggaaaccctgtatttccccaaggagcaattcggtattcagtattagctaattcagtgttcatggcaactttatagaacattgccagt

SEQ ID NO: 130127 - DNA, 556 bp, Homo sapiens
ggccaaatagcatcttagctctagatagaacagcagcagtcaaaaccatataggaacagtttatgtcatgaaaatcctccaaagtgttagctgagaaaaggactagaagaggaatctctggctgaggagaggatctgtctaggatccagatccccctctgagatactccacttggattttctctgcttttcccttaaaactacatcttgaatgtggttagaaattgtttttctttgatcatcttagagctaaaattggcctgtatctgcaaaataactcctgtagaataaactataacctaatggaatcaattgacaaaatattagtgttcagctaataaacagatggtgggatacaaaatcaagaaaaatgagtaggtttccggattttcctgcactaccaagaaccagtaagaaaatgtaactgggaataagattccatttataaaagaaacaaaacataaataacccaggaatatgccctaggaagaaatgtggaaattctttattatgaaaactcctaaagctttaagtacttaaaagaaatctgtacaaaa

SEQ ID NO: 130128 - DNA, 816 bp, Homo sapiens
ggcatctgaatgttgtcttaaaaaatgattaagttttagagagttggaacctggagggtagcattctaagcagaggaccagaaagcacaaagctttggctgctggaaaatgcagggcatttagttgtctgtggccagtgaggggagaagaaggagctgaggaagttggggcaagatggtaggagcccaaaggtcaggctggctttactgactccacttaaccggtgaagaaactgaggccaagaaggggcaatctggagccccattatgactttggtgagccccaggcactcttgacttcatgcattccttcctccattagaaaaaaggtaattgaatgttatgactgccttggttaattacagctatctcaatattacatattaaaacctattgttcaacttaaatgttcatttttttctcctgattttaaattacattaaaacatgttcacgggcccctaagagtttctcaggccccaggcacagtgcctgccgggtctaatggagaagctggcctgggaaggaagcagctgccggcccctcagacccctgggctttgtcatgcccgtctgcagcaaccagcagccctgactttcatcgtagtgaggaaaaatgggaaagaggccaagtctcttgtgtattctgatctttggctctggaaacttctataaaaattaaccttgaagtcaatgaactataatggctctgcagcagccggggggtgtgggataagaatgaaagagaaagaagaacccacagtgtttcaacattagaatgagtgtcagcacttgttgaattgtccccaccccagctca

SEQ ID NO: 130129 - DNA, 493 bp, Homo sapiens
ttatatcctcattttcctatctttttaaattttcttcaagtatgtattacttttttaaaaattgggtactatttctttttttaagaaaaaaagtgtttttctgtttaaagagaaaccactagtgcagataaacagctatgaaaaataattctaaaggtactcacaaaataggattttcttcaaagaaacaaaatcctaaatcagataataaatgctgaaaatagaggatctaggaaacagcctagcccctctatcccaattccttccccaagggacatctttctagtcagggtcaaaatactgagaagttatttcccagtggctagagcagatatcctaggagaagaatcaaaaaagaaagaaagaaaagaaaaagaagactacctactgctaatccatttttttttaaataaaggcagtgcaaagacagaaagggttgaaaatgacagctgtggcctttagaagcactggctttcagctatgttttgttttc

SEQ ID NO: 130130 - DNA, 229 bp, Homo sapiens
  misc_feature (13)..(13): n is a, c, g, or t
  misc_feature (31)..(31): n is a, c, g, or t
tggcggagtgcantggctcatgcttgaatancaacacttggccgggtacagtggctcacgcctgtaatcccagcactttgggagaccaaggtgggaggaccacttgaagccaggagttcgagaccaccctgggcaacaagcgacactctgtctctacaaaaaacttaagaattagctgggtgcttggcatgtgcctttagtcccagctattcaggagtttaaggtgggg

SEQ ID NO: 130131 - DNA, 306 bp, Homo sapiens
ctctctgcctctccattttccctctatacttaaacaaatacggagaagagagcaatgtcatcatatgaattagtagagaactcagtcttttctacagatgaaaccatttattacatttattctctaacaaatagatatatcaaactggaaaatcaatgtgaaataaaaatgtaaaagaaatggtcttttccaagtcattaacacaaaatatattttccaaatatagcagctgcagcaaggacagctctctacccaataccagctctcatgagcccagatattgatctctaatcctctcctcccctg

SEQ ID NO: 130132 - DNA, 765 bp, Homo sapiens
gggcgtgcttcctgtgtgcttagtgtggacgggaacgtgaatgtgagtggagcctggggagtgggccagggccaggacttggggagccagagtgtgagctggagcggaacctgcggggcagagtgcggcgtgcgcagcgtgcgcagctgatagcatgtgaacatggatcaagtcttccataccagggaccaggccaaaaccagactgccactgcccctacttgggccccactgtccccagaaagcagctgctgtgatcatgggcaatatctttggaaaccttctcaagagcctgattgggaagaaggagatgcgcatcctgatggtgggcctggatgccgcaggaaagaccaccatcctatacaagctgaaactgggggagatcgtcaccaccatccctaccattgggttgatatttgtggtcgacagcaatgatcgggagcgagtaaatgaggcccgggaagagctgatgagaatgctggcggaggacgagctccgggatgctgtactccttgtctttgcaaacaaacaggatctgcctaatgctatgaacgctgctgagatcacagacaagctgggcctgcattcccttcgtcaccgtaactggtacattcaggccacctgtgccaccagcggggacgggctgtacgaaggcctggactggctggccaatcagctcaaaaacaagaagtgaaagccagacagccctaacaaagcaccccacccaccccgtcggtggagcgggatcctctagatgacctcgcat

SEQ ID NO: 130133 - DNA, 731 bp, Homo sapiens
tttacatttcctttgtctaggatcaagtcttccataccagggaccaggccaaaaccagactgccactgcccctacttgggccccactgtccccagaaagcagctgctgtgatcatgggcaatatctttggaaaccttctcaagagcctgattgggaagaaggagatgcgcatcctgatggtgggcctggatgccgcaggaaagaccaccatcctatacaagctgaaactgggggagatcgtcaccaccatccctaccattgggttcaatgtggagacagtggagtataagaacatcagctttacagtgtgggatgtgggtggccaggacaagattcgacccctctggagacactacttccagaacacccaagggttgatatttgtggtcgacagcaatgatcgggagcgagtaaatgaggcccgggaagagctgatgagaatgctggcggaggacgagctccgggatgctgtactccttgtctttgcaaacaaacaggatctgcctaatgctatgaacgctgctgagatcacagacaagctgggcctgcattcccttcgtcaccgtaactggtacattcaggccacctgtgccaccagcggggacgggctgtacgaaggcctggactggctggccaatcagctcaaaaacaagaagtgaaagccagacagccctaacaaagcaccccacccaccccgtcggtggagcgggatcctctagatgacctcgcat

SEQ ID NO: 130134 - DNA, 177 bp, Homo sapiens
attttttgaggtaaatttgaaaagacataaaatagactaccctgacaaaaatcttcacagattaaaaatactaatatttgcattgtcatgtatattacaaacagtattccttgtcttttgcttttttgttttgtgtttagtgtttcttgctatatgaaatataacttctttatgcag

SEQ ID NO: 130135 - DNA, 251 bp, Homo sapiens
aagacatcagcttctcattcccagggatgtccctgccttgatattaggcaggacccagatgaaggtatgcagaaaatataggcaatggaggacaaagacacctctttaaatcttctttcttgtggaagccagggaacagagactattaaatggaataggtggaacctctaagattttacttctaatgagataaactttcacttattctcaattcaaatgactcattcagatctgatgtttgaacttggaat

SEQ ID NO: 130136 - DNA, 280 bp, Homo sapiens
ttatatgcaaaaggaaaaacctatttacattaacccaatggcaaggcattttatagactgaaggatcctcctataacattaattcttagtttatgtagcttatactactgggattagcatgtattaggcttcttcaaaactgagatacacctaggcacaccttaaggcatcagagattctggtatgttgtgtctttgttctcattggcctcaaagaacatcttaatttctgccttcattttgttatgtaccctatattcattcagaggcaggacaagcag

SEQ ID NO: 130137 - DNA, 882 bp, Homo sapiens
gctaacagatgtgaatgccttttggaaagtcaaaattggtgttcagatgggagacattatttttccacaccagtcagagtgaacttgtgcatggctgtgtgcgggccaactggcagtggacaatggagtcacctctatttcttgcaaggacagtggtgctgagtgtctattataagggtccgttttccctgggatctggtgggaggcattctttcaggacctgttcagctaaacaatgcctcattgtggacatgaaggactctggaccctgtggttcagggtgaccttttgaacatgcttagcagccattattataataaatatacaaaatgaaaacttgtgataaaatactgtgtgtattccctgcttaccaagcgccagccactgtaccaagtgttgtatattaacgagctaattcagtcctcacagtgacgccatccaggctctctttctccatattagagctgaagaaaaaggagtagagaggttgcgacttgcccaaagtcacatacctagaaagtggtggggtgggttagaactcaggtctatttgattcccgaggcttcctgcccaagcactgtctgtctcaaccctacctggtcaagccaagcagtgaggctccagggaacttgaggtgccttaggtcaggtaggagccccaggtatgcctgggatccagaccatagtgtactggctgccagcgcaggccatctccccttgataggtgggtgggcaggctgccctgagtcagcaacctcttgagcccaggagctcagcatggaactcagctgtgctggtggtggcccagctgccagggtgtttcaaaatagaagctacccctggaaagctctactgcccactgcgagactgttgtggaagaatg

SEQ ID NO: 130138 - DNA, 735 bp, Homo sapiens
gttaaaacagctagagattatttgaaaacaaaactccatctatctaggaaaatgactgtcaacttctttattttttaataacaaaaaggttaacatatgtccaaatgacatgaaatgagcatgatataaacatctagatcagaacctgctgtatggtgtccactaagtatacgttcttatttccttccactctcctccttttccattagtgacacacaatacttgtagagtaccttaaaccttgatacagatatttctcttgtccaaagttcatttggcaccattgatatttaaaagagaccaagtaaacatttatcttccaaatttgctaagatttgtctccgttttggtacaaggctgaaatttggactatcgctttttgtcatttttcttattgtagtggaaggaagaaaactgggccttacttggtttctgagtgccattttataattgttatatttctattctttagttcattatttgagttactctattagtagtctttcctttctctggatagtgagctactttttttatttaaagcttgattttaatgccacttcctctatctgttcctaattaattgcactcctttttggttatgtttcactttgaaagagctttttatgatcatttatgagtctctaagtctgtatttcctgctagattggagccccatgaggttaggttagagatttaaaaaaaaattaaatctagagtaggtgctcaataaat

SEQ ID NO: 130139 - DNA, 170 bp, Homo sapiens
gagcttagtgaactgggcctcacttcgtagtgagggcaaactcacatcctttcactgggtctcaatcctgggccactcgagatgtcaggcagttggcccggagctcggcaggtgggtctggctgcgatgctcacttcccagtgctgctgacctgggtcgaccaccgtgtg

SEQ ID NO: 130140 - DNA, 381 bp, Homo sapiens
tacagcgagacccatggggctcaggccttatgtctctctgttccaaagatgccatgagatgaggcctccatgtcccagcctcaccaccccaaggcctcgtctggcacgtttcctggcactctcccctcgtgccaccttggcctcccgctaaagcagaggaaccccagctccccagctctcccctccctgcaatccctgaaaccaaacagacccatgctctcttctctggttaagggccatgggaacccaggtggcaggtaacagggtgatagccagagagcacagatcaaaggtctggaatctccccaggtccacagagcaagctttcctgccttcggcacatggctttgtgtatcaattgtgtgccaggctcaggctagt

SEQ ID NO: 130141 - DNA, 652 bp, Homo sapiens
gcaatgagccgagatcatgccactgcaccccaccctggacgtcacagtgagactgtcccccctcaaaaaaaaaaagataaaaagatattagattttttatatttactattttaaacattgttttaatgagcatccttgataaatatcttttacatattaaaagtatgaaatttatggggaagagttgtagattgtaggtgatttgtttagttctaaagtatattgttaatcaataattgttaaaactgggtgctactggtttaggaatagtctaaagacaaatcagtagaacaaaacaaatagcagagaaatagccttatataaatagtaatttagtaaataataaattaccttttggaaatgttgctaggatatttgtgcaattcattgggaatacgtctaaatgtcagattaaatgtaagaaataaggtatatgtaatcattaaatttattttcataaaataagcatccttagatctagataatggactgatgatcttcttagaaatcttgtttctcatattttgtgattcactagatagtttctgttaacacttcagggccagaagaaacacacagaagcacacatatatatatgtgtacaaacatgcacacacacttagatgtgtatgtatgttatatatttacatat

SEQ ID NO: 130142 - DNA, 318 bp, Homo sapiens
aaaaagggtcctctaagctgaggaagtgaagattctgggatcctaccctctctaacaccaaggaggagaaatcaggaggttagggccctcccagcctcacttctcctggaccagacccctatttcatcttgattcctatccatctttttatttatttatttattgacagggtcttgctctgttgcccaggctggagtgcaatggcgcgatctcggctcactgcagccttgacctcccaggctcaagtgatcctcctatgtagctgggaccacaggcatgtgccaccatgcccaactaaatttttgattttttttttgt

SEQ ID NO: 130143 - DNA, 592 bp, Homo sapiens
cgtggggtttccatgataaccactctgcaacagactcccagagtcatctcagccagtctcatctatgtccagtcctcaatgcccacatttcaacatgttcaaggctgtcatcttccctctctacgttggtcttgctgcggcttctttagagaaattatcaagactttggagtcatacacctaggttggaatcctagttgtacacttttctgtgtggcctttgaaatgaagtccttttttctcatgttctgtgaatgctaccaatgctcattatacaataagcacttgtcaaatgctggtctccttccccattttttattagcatgaacatttcccctctctagtgggcttggaatcatctagtttttcattgtaataatgtacgttctcctcctctacacctccgcaagcccatttctctggaaacacctctcacgttggtcctgtcctttcaatattaagggatgtcatctgggcccatgcaaccagtgtctctgcctacccgatcctctctgcccgccactactgcctgaagcatgtttcagatcatattcccacccaaaaactgccagtgcccccactctcagttccat

SEQ ID NO: 130144 - DNA, 360 bp, Homo sapiens
agctctctctgtgggggacgtcctgacgctctctctgtgggggacgctctctgacgctctctctgtggggggggctctctgacgctctctctgtgggggacgctctctctgtgggcttggaatcatctagtttttcattgtaataatgtacgttctcctcctctacacctccgcaagcccatttctctggaaacacctctcacgttggtcctgtcctttcaatattaagggatgtcatctgggcccatgcaaccagtgtctctgcctacccgatcctctctgcccgccactactgcctgaagcatgtttcagatcatattcccacccaaaaactgccagtgcccccactctcagttccat

SEQ ID NO: 130145 - DNA, 562 bp, Homo sapiens
acccagagaaatgcttaaatccaccagtataaatgcttaaaaattttctttgttaaaccagaagggcatccttgacacaccccttttttcctacatgcacgaggtgaagaaaaacgcaggagcctgctagattttaagaatcaacatacagagtttgagactttatgcctcatttaaagtaacaaggccgggcacggtggctcacgcctataatcccagcactttgggaggccaaggcgggcggatcacttgaggtcaggagttcgagaccagcctggccaacataggcaaaccccatctctactaaaaatacaaaaattagctgagcgtggtggcgggcacctgtaatcccagctactcaggaggctgagccaggagaatcgcttgaacctgggagatggaggttgtagtgagctgagactacaccattgcactccagcctgggcgacaagagcgaagctccatctcaaaaaatacaaaaataatgcacatttagaaaattattcaatgtacaaataaatatgaataaaataaacatacagccaccatgtggtatcaggtg

SEQ ID NO: 130146 - DNA, 481 bp, Homo sapiens
caatcatgaatccagggcactaatctgcctccagtttatttttagcagaaatattattgaagtcttttcagtacataattaattttcaaggattgccattaacctcatagtatgagatgggacaagaaaatttttgcatgtaaggtttgagtggaaaataatgatttttaagtagtttgctatgtgtttggtgaggtagggtgttctatggtttttagttttctcagtttgacctaggagtaatgactctcccagccaaacataatccatctttagataatagtggctgtttatatatttaggatgtgtcaacctcctcaaggctgggaagtatcaaggcctaatataatatttggctttcatgttctgggtgtgcaacaagaggaccaacagtcttgttagctaaaatcaacccaaagtattagagtttggacatgaacttggcctgcccatgccagagggaatacccctgtgaaaagta

SEQ ID NO: 130147 - DNA, 365 bp, Homo sapiens
ggctgtgtatccttgaaaatgcctgttctcaaagtgtaatctttgatgatattgtcagaggaagcatgtaggtagcaaagagcaggagggggagcccctgggaaatcccacacccccagggaccacccaaatcaggcatgctagatataagcagagaggaggggaatcacctaggtagaaagaaacttccattatgatgcccaggaatcattcactttgcagttatcctgtcagaatgtagctagatagatgctgatagggcaaaggggacattcctaagcaaaacctggcaccgtatgtacacaagagggcaaacaagaaactcctaagagatacccaggtatcataagcacagatttaaccac

SEQ ID NO: 130148 - DNA, 569 bp, Homo sapiens
gagtgtttttatatggtagccagtctgaatccatttgtgatgatgatgaaaaacacaacagatagctggatagttaatgtaggaaactttgctttatgaaataaaattttgagaaagctaaatatattttcctaacattgaatcgcttacgtgtgttttatgtaacaacttattaatctctaatttttaataagtacagctattatttataaaatattttagcttataaataattttaacacactatatcatttgatctcaaacatgtaaaaatacttattacacaaaggaggaacatagagttaccacttgatttcagttgtgtttgctgactgacgtagggtcaaagaatacattagtagcactactgaaacataactctatggtatatgattctaaaacctgtgtttttcccactatgctatatgtacattcttatttcatgaatttagactacatttaataactgacacacgtactatttgttcaacaacagttaagttcttaagaagtaatgatggtgcaaaaagaaaattttaatcttgcctaattcttaatgtaatcagtaa

SEQ ID NO: 130149 - DNA, 528 bp, Homo sapiens
ttttttgggccagtagcaattttattaatgataataaaataactcaaagatattatcaaatctaatcttgttcaccttcataagtgctcaaagcaagacaaaaactcatcaaaagaagaaaaattagaacaattaatatttttaattgaaggatggctgagacactacgtaatgatgttggcacatcatatagtaaaaagttaatcaaaacatattaaaaataatgagaggagtgcacgtccttgttggccatatttctctcttcagatttttatgaaacatttatgacgtaaaaatctttttctcatgccaaaaatgattaaaacttgttttttaaaaagaatgcttagatatcatgtctttcatggccatctctaagtcctctctgaatttctaaaatttcgaatgccaatacatgaagaaaataattgtgtgttactttatagaatgtaacaaagtttgccagagcatagaaaccacatataaaggatggtttccactacaaaaagagttcaatgtcgggacagg

SEQ ID NO: 130150 - DNA, 643 bp, Homo sapiens
aaataaaggtgaactaaatacattgccagataaataaaagctgaaggaatttgttgccagcagacctgccttacaagaaatactagagagatttttttaggatgaaagcaagcaatatcagacagtaatctgaattcacatgaaaaagcaaagagtgcttataaaagtaactgtgtagttaattaaagagcacaaaacaatagaatatttcttcctctttctattcttaaccaatttaaataacataaagcaatatgtatttgtatataattgcatatatatatattgatttatcgttgtgcttataacatatacaaatgtaaaatatttgacaaaaaatagcacaaaggaggtggatgggaataaagttacattggagtaaggaaatgacgccagatagtaactcagatctacagtctgaaatgacaattaaaaaatggaaaataaaaaggttaatgaaacaaactctgtaaatatgtgcttgctctgctttcttctcttggcttccttggaagatgtaacattgcataaagtaataattataacaatgtattattagattcgtgaatgttatactagaaaatacatgatataaaaagaggaaaaataaagatgggtcaaaggaacaaagaaggcgtgacac

SEQ ID NO: 130151 - DNA, 116 bp, Homo sapiens
ctttgggaaatgctgatgaatgaaacgttgctggagaatggtagttagagttcacttaccatccattccgcgtcaggcatttaccaaacaggctaccacatgctcctcacagaggg

SEQ ID NO: 130152 - DNA, 281 bp, Homo sapiens
acaactcaggggcgagctgctgctaactcaggggcgtgctgctgctgactcaggggccagctgctggggattcaaaaatgaccaagacagggtccccaacctgctctgggggtgttcatcagctccagggagatgaaatttctcttgatggctcctctctgtgcccatcctgctctagaagcctcttcattcactgattggtatttggaccaaccaaatggtttttcctagccccctcctgggctctaaaggcagcaccagaaatttcaagcaagaagctg

SEQ ID NO: 130153 - DNA, 667 bp, Homo sapiens
gattcttgtacctcagcctcctaagtagctgggactacaggcatgtgctaccaggcccagctaatttttgtgtgtgtatgtgtgtgtgtttttagtagagatggggtttcactatgttggccaggctggtcttgaactcctgacctcaagtgatctgcccccctcagcctcccaaagttgtgagattaaaggcgtgagccaccatgcctggccaagcacagattttttttaaatggatctctttaacagttcatacatcaaagcaataaacacacaaacatccagaggaaaaaacatgaggttataaagtagcctagctcagcaccctggtgagtttgttgcaagtctaccaacatgggcctcatctagaaggaatgcccagagtctgggcttggtgctgattagccacactctcatatactttaaatcatctctagactacgtataatacctaatacaatgtaaatgctatgtaagtagtagttgtactgtattatttagggaataatcacaagggaaaaaagtgtgtatatgttcagtacagttgcagccatccattttttttcccagatacttttgatctgcagttaatttaatccacagatgtggaacccacacatgtgaagggccaactgtatatcaaaagccaaaaaatgttcatcaccac

SEQ ID NO: 130154 - DNA, 342 bp, Homo sapiens
tttgtgcagggaaacttccccttataaaaccataagatctcgtgagacttattcactatcatgagaacagcataggaaagacccaccctcatgatgcaattacctctcaccaggtccctcccatgacaggtgggaattctggaagctacaattcaagatgagatttgggtggggacacagccaaaccatatcggtcaggtatcttagacttgttcaaaaccaaaccttaagtttctacccttacctctgaaaatgacatcactattcttccatttgctcaggtccaagtctttgaggtcattcttggctccactcttagtatcacacctcaccagacagcaa

SEQ ID NO: 130155 - DNA, 438 bp, Homo sapiens
agcagatcaaacctctggacagctcactggaggtaacattacctgcaaagtaaggtgtatggggaagcaagtagatagtagaggaatgaaaagtgtgtgagaataatgctttcaaaacagtaggatagtatctgaaaagtatccttggtttttggattttcaaaacaatgagaaaacacagttgcagtggatgaatgtcggaaccttatgaaatgtgactcatctgacctttcagagattggaactgccccacagtgctgttctgctaactcttcttctctgccctctaaagtccctgcttccctttctttcctttttagtaccggggtgtacataatcgatccatcataatcatcagttcatgacatgttctcatcattgatccatagcacggccttgtttttgtatttggtcatttaaaataaatgtctgttttat

SEQ ID NO: 130156 - DNA, 384 bp, Homo sapiens
agcagatcaaacctctggacagctcactggaggtaacattacctgcaaagtaaggtgtatggggaagcaagtagatagtagaggaatgaaaagtgttttggattttcaaaacaatgagaaaacacagttgcagtggatgaatgtcggaaccttatgaaatgtgactcatctgacctttcagagattggaactgccccacagtgctgttctgctaactcttcttctctgccctctaaagtccctgcttccctttctttcctttttagtaccggggtgtacataatcgatccatcataatcatcagttcatgacatgttctcatcattgatccatagcacggccttgtttttgtatttggtcatttaaaataaatgtctgttttat

SEQ ID NO: 130157 - DNA, 306 bp, Homo sapiens
catgcccagcctaatttttgtatttttagtagagatggagtttcaccatgttgcccaggctggtctcaaactcctgccctcaggtgatccacccacctcagcctctcaaagtgctgggattacaggtgtgagccactgtggccgacctactatttttattatttttgagctaggttctcagtctgttggcagactggagtgcaatcatggctcactgcagccttgaactcccagactcaagtgatccttccacctcagcctctggagtagctgggactacagacatgcaccaccacacctggttaa

SEQ ID NO: 130158 - DNA, 399 bp, Homo sapiens
ggatgagttctggatgagggggcaaggaaaatgcttccagccctgtccccatcacttactagttgtgaggccattgacgagtcaatgtctctgcttctattttgctcatctgtaaactgggttgaagtctatttacccaattagcctgcctcacagaggtactataaaaggttagtgaagcaacagagatgataaaagcccacagaaaactgggtatttgcaagtggtgagcatcagattccccgagtttccagggcctctgtgctttgcagaaggaagtgtaggggggcttggttatctttatcttttctgcaggttcttgaactttctgaacctcatgaggggagagctgagtggatgccacaggcacagagaactaccacctctgccctgccccat

SEQ ID NO: 130159 - DNA, 248 bp, Homo sapiens
gtttggggcctaggaagattaatttggctagggccagaggaaggcggtaaaggttgtttgtagagctgagagaacaaacagtattttagaaagatcagttcagcatttctgtatagcttatttaatcctgttttgaaattttgtaacgtctgaattctaaactgacaacaactttaaaatcatcttttattggagtgctacaatcttttcaagtaaatagaatgctctcaatattcctctcccacgtt

SEQ ID NO: 130160 - DNA, 433 bp, Homo sapiens
attaagagacaaggctccagcatcagactctacaagtttagattctgatgctgtttattcccagatgtatctcagtttcctcatctgtaaatttgggataataaatattgctacctcaggtctgtgaaaattaaatatcaagcacagcacctgatctatagacagaaaagttggttgcttcacaaaatgacccgtcccttcctattcaatctcatccctgctacccctaggaactgtttatatgccaagcataattacttacatgcaaagtcctctgcacatgccaagcaatggtccttgtctttgaacatgcttttccctctacctgaaatcccattggcacttcctctgggttgaggttaccttttaccttttgaatccaactctgtgtctcctcttccttccctagttgtcctctccctattagacaaag

SEQ ID NO: 130161 - DNA, 172 bp, Homo sapiens
aagacttttcaagatctctaatatgctgtctcaaaatatacattaaaaatgtgaagggccatagttttcttttacttgtctatttactgaataaggctgaatttcagaaaatgtgaagattgaacaagtttcaggctataacgaaaatttaggggcttttgtgatctggtcc

SEQ ID NO: 130162 - DNA, 468 bp, Homo sapiens
tgtctcaaacaacaacaacaaagttctataagagcacataaatccagtaacgaatatcaaagatgacttttaagttacaatgaagctacgatttggcagatatgagtaggacgtttttaacagtgtttcagagaatggcacttgctaagacccagagaagcacagaagaaagtgtggtgcttcagtcattcataatggctggagcatagctaggttgggaatggtaaatgatgagactagagagataatcagggactggttagtgatgagtcagataaagacagtgagagccactgaaggaagaatgaagtgataaagtttgcattttggaaagatctttcaggctgcaatgtggtgagtagattggaggaaggcaaacctatagcagaaaagcttctaagctattttggatattcaagtgagatggtggcagcctgaagtaagctgacgtaagggattgtttgaacc

SEQ ID NO: 130163 - DNA, 327 bp, Homo sapiens
gtgactggcatgctgatcgtatgactacgtaggacagtctcaggcactcggtcttggctgagtcaacactctgagcagagtgagagccactgaaggaagaatgaagtgataaagtttgcattttggaaagatctttcaggctgcaatgtggtgagtagattggaggaaggcaaaccatgtcttctcagcagttagtgcatttagacatctcccattaagcacagggctcccccctcacttcaccctaccctagataacacacacaggaacataagcccctaaccaaacagaaaggaaatctcagacgtacagggctatcccaagaca

SEQ ID NO: 130164 - DNA, 590 bp, Homo sapiens
tatgttgatttatcaggaaagttaaatgaagaaatcttcaagaggccatttataattctgtttttaaaagtcaaaattgaaaagagttgggccaggtgcagtggctcacgcctgtaatcccagcattttcggaggccgggtgggtagatcacctgaggtgaggcgttggagaccagcctggccaacgtggtgaaaccctgtctttactaaagatacaaaaattagctgggcgtggtggcgtgtgcctgtaatcctagctactcaggaggctgaggtaggagaatcgcttgaacctgggtggcagaggttgcagtgagccaagatggtgccatgcactccagcctgagcaacagagtgagactccatctcaaaaaaaaaaaaaaaaaaaattgatagagtttatactatttaatgtttaaatgttttctgtaaattaaacatcaatagacttgataatcatatttcaggaacatttttttccattgaattatttacatatactgttgtactgtaaggctttaaattaattttaatattttattattttaattagcatttgaaatgtatagtgttcaataaatggattgcta

SEQ ID NO: 130165 - DNA, 526 bp, Homo sapiens
tatgttgatttatcaggaaagttaaatgaagaaatcttcaagaggccatttataattctgtttttaaaagtcaaaattgaaaagagttgggccaggtgcagtggctcacgcctgtaatcccagcattttcggaggccgggtgggtagatcacctgaggtgaggcgttggagaccagcctggccaacgtggtgaaaccctgtctttactaaagatacaaaaattagctgggcgtggtggcgtgtgcctgtaatcctagctactcaggaggctgaggtaggagaatcgcttgaacctgggtggcagaggttgcagtgagccaagatggtgccatgcactccagcctgagcaacagagtgagactccatctcaaaaaaatcaatagacttgataatcatatttcaggaacatttttttccattgaattatttacatatactgttgtactgtaaggctttaaattaattttaatattttattattttaattagcatttgaaatgtatagtgttcaataaatggattgcta

SEQ ID NO: 130166 - DNA, 622 bp, Homo sapiens
tgtttagtccttggtggctttggactacaagcctcgtcctgtgggctgagctccccctcagaactgtaccaaggcccatacctcccttctactccagtgtgacctaaggactcagctgggctttctggctgttttttgatatagcccttttttggtgcccattgttttcagaattatatcagtaagcatcagtaatcatcctttgattctatcggagtattctggtttctttttgatctgctttcccagaggagtctgaagatgagctcttatcattggtatttggatgcaggttgccatgtaccaaacaagaatatttcagaattgacctggagtagggctctggatagcaaacctcagctaagccaacaaggctgccatggtgcttaacacccagcctgggtcaactctaggtcctgagggactctggaaggctaagaaaggttatggaataccctaggggttcagtgtcctgttgtgggttttagggatttccatagtttaagggccttggtgattttcttggaggaattcataacattttaggacggtgacaaaacccagctccatcctggctttccctaccaccccaagataaagggagtcaccacagcccggttct

SEQ ID NO: 130167 - DNA, 302 bp, Homo sapiens
tcaaagcaggggtataattttcaatgtagaccctcttgtatctatttttgaattacattagtctatttccttttcaaaatttagctaaaaatttttctaaaaccaggaaatgactaacagttgtagctcattaatgggatgttgcgatttatgagtcaaacgactcttcaaatcaccaattagtggcagacactcctaaggcaacgtagaatattaaacacatatttaaaattcaactgttccttttctgccaggatagaaaccagtagtttttgtgtctcttggtgggggagtagagcctg

SEQ ID NO: 130168 - DNA, 294 bp, Homo sapiens
tttcaaccatgggctctgcaggggagaggcatctcctatttactttatgggagttggaagttaattcaaaccataggccccatgggggaagggatgccatccctactgatgtgggggtatgagtggaagacagggttttgcccatggaatctgagtggggatgaagggtgtttctcactgattccctactgtaccattcttctagtgggggaggagcatgacatttttgtggtattcacccccagaacaggttggtatggctgggccaccctgttccaggttctttggctttcc

SEQ ID NO: 130169 - DNA, 323 bp, Homo sapiens
aactcccgagtagctgggactacaggagactacaggcgcatgccacacatgcccagctatttctcttggtatttttagtggagacgaggttacaccgtgttagcccatgttatctgctcaaccaccccatgaagctgcaccagacagcccactttttggatgaggagacaggggttaagtaacttgctcagagccaggcagctggtatgtgtgtgaaggagtggacttccaggctccccttcaccatcttctgagagaaccccaagacacagtgggcatcaggaagggtaggtttctcatcacctctctccccaggctgtgcc

SEQ ID NO: 130170 - DNA, 700 bp, Homo sapiens
gaagatcggtagagaatttcatcaaaggtgccatgagaaataaaatcttaggaagaggatgctcaatagtgatggatgcttgaggagagacagaggattttgcaaactgattaaaggtgatagaaataatagtttctaattaaaactgcttctaattaaaactccttttaatggaaggataatacttagtgaatttgagttctcaaagtactgacttacagtttaaatatgaaagtctcatttttcttctaatagggttagtagagtataattaggcaaacttaacaagtgttgtgcagcacagagattattttaaaagttaagtatttgagaatccactttaatcaaaaccttttagtatgtgagaatataattacattttacaaatatatttgaaattctctttactatatgatggaaaggtatcaaattcatccaacattcagaggtttagtaccctaatgacgttcttatttaacaattaattttaataccaaaatgcaataaaacacatttagctatcttcttgcttgtcctggatattaataaaaatctgaggcttatgctgaggcaggaaaacattcgttaattttatgtcattaaaaaaagaaaactgtactcacttttgttctaatcttaaattttgtctttctttctgtacagtttctacctatttttactgtatctttccagttagttt

SEQ ID NO: 130171 - DNA, 582 bp, Homo sapiens
taggtcaacaaataatatatcaggctaaataaaaccaagttcctgccattagagaggtcacactatggaggcagagagagatgtagaaacataaagaagcatgatcaattccgagatgtgctatgggaacacaaagaatggggcagagaatagctgaaccctgttttatagcaggctggtaagacatgggatgttctaatccctttgaacctcctcctcccagattcatttgaagtggcttttaacccacagagctcttttcactttttttatcttagagggagggatagagggaagagtttgtacagctctgtaagtctagagaataagagccctaagaaattatttctgtacagatacagattggctttgatttaatttaaataaactggctctcaaaaattctaagaatactaactactcacacagttttgctttcatttacacacagatgagaaagcatctgtagctctgcattttatttgctataagcaaaaagtggttcgagatatttaagtatctgaagcttggttgtattgagtcctcacatgtcccagttcagcccactgcagtttttttttt

SEQ ID NO: 130172 - DNA, 233 bp, Homo sapiens
tcataggcagagctcagagaagctgctggggccaaggattaaaagtgaacaaatcctgccaaagagaagggctagttaaaaaaaaattaaaattaaaaagacagaaacaaataaaaggaaacgaagcccagaaggaggaggcccccagggagtatgggaagatggtaaaagtgagaatgagctggtgaatcccagggaagaggatgcctgagtgcttttactgtccttgcaac

SEQ ID NO: 130173 - DNA, 348 bp, Homo sapiens
ctcaaccgcctgatccagaggatccgctcagagatagggaatgtgaagaagcagtgtgccgatctggagacggccatcgccgacgctgaacagcggggggactgcgccctgaaagatgcccgggccaagctggatgagctggagggcgccctgcaccaggccaaggaggagctggcacggatgctgcgtgagtaccaggagctcgtgagcctgaagctggccctggatatggagatcgccacctaccgcaagctgctggagagcgaggagtgcaggatgtctggcgaatatccaaattttgtgagcatctccgtcatcagcagcaccaatgctggggcaggaggggct

SEQ ID NO: 130174 - DNA, 310 bp, Homo sapiens
aacacgtaatttgggagtcccagaagatgaggaaaggggaagaacaaacatttgaagaaataatggcccaacatttaccaaatataacaaacattagagaggttcaaaaaacttcaagtaggataaagtcaaagagatctgcatgtagacacaccatattcaaaccattgaaagtcaaagagaatcttaaaagcaaaacataagaaaatatactcttctgaaggttgtctacaaatctatctgaggcacagtgtggcttcaagattagactttggagtcggttttgtcatgtatgtctttggaggtaatg

SEQ ID NO: 130175 - DNA, 404 bp, Homo sapiens
gggagaagccttcttttaataaaatgtgagaaagcctgtgtgaagcagatgttctggcttgcagaacctcgtggagtctttattagtcacatgtgcattttggagcttccatttgggaaattctgaactgtagtgccacatctttgggaatgcaggaatcttagaataaatgtaggaacatgttctgttctgtactcttcttggtggagaatctagcgtggtatcaggcctgccaaacagcagccggaaggaggctcctcagggaagtgtcttaaacacctcgagatggcgcagctggctaggctcggtgtggtttgtaaaagatagcaatgaatttccatgccaggagcgcctgctctgtgttcacaaagcagtgtgtgtctgctttaatatctcattttggc

SEQ ID NO: 130176 - DNA, 379 bp, Homo sapiens
gatgggtagattggggatgaaagctaatagttacagggtttcttttgggggtgatgaaaatgttttgaaattgaagtgatggttgcacaactctgtgaatacataaaaaccattgaattatatactttaaatgagtaattgtgtgatatgtgagttatacttcgaagctgattacaaaaaagttgtaggaggaggaagggaggaggctaaaagaaaatacagtcaccaatcaaactgtatttatatctgtgaggggaaacatattaattgttctccataggcccttctggctcgcccttcatgacggagcctcaaagcatgcctgcattcctcagtgcctagtccactgcatgcaaataaaatcggatgcccagagcag

SEQ ID NO: 130177 - DNA, 641 bp, Homo sapiens
agaaggaggaaggacagcacagcctacagccgtgctcaggaagtttctggaacctaggctcatctccacagaggagaacacacaagcagcagagaccatggggcccctctcagcccctccctgcacacagcacatcaaatggaagggggtcctgctcacagcatcacttttaaacttctggaacccacctaccattgcccaagtcacgactgaagcccagccacccaaagtttccgaggggaaggatgttcttctacttgtccacaatttgccccagaatcttactggttacatgtggtagaaagggcaaataagggacctctaccattacattacatcatatgtagtagacggtcaaagaattacatatgggcctgcatacagtggacgagaaacagtatattccaatgcatccctgctgatccagaatgtcacccgggaggacggagtatcctacaccttacacatcatacagcgaggtgatgggactagaggagtaactggaaatttcaccttcaccttatacccgaagctgcccaagccctacatcaccatcaacaactcaaaacccagggagaataaggatgtcttacccttcacctgtgaccctaaaagtgagaactacacctacacgtggtggc

SEQ ID NO: 130178 - DNA, 352 bp, Homo sapiens
ctctgtgagtggtttgctgcctcctatccgtcaatatccaatgccctgggacagcgggggaagtgggattccagcctttcatttattctttcacctatttgtcctctttactctgtgtacaaaaaagagaggattatactatcatagactgttgtttctaaacagaaactcaggctgggcacagtggaatacgcctgtaatcccagcactttgggaggccgaggcaggcggatcacctgaggtcagcagttcgagaccagcctggccaacatggccaaatcccgtctctactaaaaatagaaaaattagctgggcgtggtggtgtgcatctgtaatcccagctactcgggag

SEQ ID NO: 130179 - DNA, 527 bp, Homo sapiens
agtgggaacactacactttctcatcaatttttctgtaactctgaaatagctctacaaaaataaagtctactagaaaaagaaaaacgatgaggacaggctaatgacaattcacaccatgactggttgatgaatgaaacatacaacctttcactcaattcatgaattttattttagtaagcctttatggtgcttcgtgagccagagactggtaaaggcaatgaaagttccacaggatgccttgttcaaaagcccatcactctctattttgagaagtgaaataagagctttgattagtatcagtagtgtccggaactcttgcacgaatatgagtgtccaggcggagccttggattgtgggattaccctctgtagaggtgtgtattatcttgacttatatggctagccgtgaggtaaaaaaagattcccagagttttgtgggtttttttttttttccctttgagatgaagtctcgctctgttgcccaggctgaaatgcagaggcgcaatctcggctcactgcaacctccgc

SEQ ID NO: 130180 - DNA, 1043 bp, Homo sapiens
gtatctggggcccttgagctgctgctcagcctgctcccacactgtgaagtgtactttcactttcaataaatctctgctttcctgcttcattctttcctagctttactgtgcgtttgtccaattatttgttcaaaacgccaagaacctggacaacttgctgtccgcaaccaatcagactgattgtgggctgaatcttcatttgcatggaagtgcaactttgtaacttcactttagcctctgattgcgggccaccacttcatttacatgaggcaaacaccaatgcgtttgttcaattctttgttcaaaaccccaagaatctggacaacttgcactcaagaccctctacgggtttggcgagccagtctttcagtggctgttttctagtagctccttggcaattgaggggaactggctgggaccactctccagtgctgtctgaaggccaaggagtgaacagggatggctgccctgccttgaagagggaaggactcttttctatcctttccagctatagtccctgatccctacatgtgatgcggttggcagcggaagctcatcctgggcgaactcacacacttttcaggagacttaaaccttttcttatgctaagttcttcccttcccctactcatctggctaaaggacagactatgcaaaaaaggttatacaagtcagagggtctgagcatgtcggaggtggtctgtgtggggcatggggtggggggaaaattcatgaaaggcaatttattgcctaaatttaaagggttaaagggttgctttaagtgggatagaaaaaccttaaggaaagttcatagtaggtcctcagtggtggagtgttgtgggaagtcagggaccctgaatgaagggactggctgaagccatggcagaagaacataaactgtgaagatttcatggacatttattagttccccaaattaatacttttataatttcttacgcctgtctttactgcaatctctgaacataaattgtgaagattttatggacatttatcacttccccaatcaatactcttgtgatttcc

SEQ ID NO: 130181 - DNA, 1216 bp, Homo sapiens
caaggcttcgtttgaatagaagtgcaactttgtaacttcactttagcctctgattgcaggccaccacttcatttacatgggtgcgtttgttcaattctttgttcaaaaccccaagaatctggacaacttgcactcaagaccctctacgggtttggcgagccagagaccatcaagcttcagatgatcatgtgacagggtttccagccagttccaggtgaagacaccacccctggccatcaagaagtcacccggtctccactagacagagtagggtgagagttccgtgatctccaaccggtagtgattatgccccaagtcagcataaagaagttacggaagaaaaaccatcagtccctctgtctcacataaagacttatggggatcacgtttctcagaggggagatgaggcaggagaatagggtctggaggcagggaacctaaggccgtttcacactgacttcttagaactaaattgaaaggaaaaccctaattttccatgcctaagtaacaaaaggaccagaggctactccctttgcaaacccccaccttttctgtgtggcatatgggaaattgaaagtacctctgattgattgttttctgcaaccaatcagatgtttgcattggagtgtaactttgtaatttcacttcagtctctgattggttgctgcagtctggaaattctgcaggccaagtcttcgtttgcatagaagtgcaactttgtaacttcatcttagcctctgattggttgctttctgcaaccaatcagatgtttgcataggcgtgtgacctttgtaacttcacttcagcttctgattggttgctttccacaaccaatcagactgattgtgggccaccacttcctttacgtgaggtgaacaccaagtggccaatggaaaacctcaagagggtatttggacctgagaagattctgtatctggggcccttgagctgctgctctgcccactctcacatggtggagtgtaatttcactttgaataaatctctgcttttgttgcttcattctttccttgctttgctgtgtattttgtccaattctttgttcaaaacgccaagaacctggacaacttgcagtcaagaccctctaccagtaacactagttgtatccctgtaaatgaatgggctttgaagattttctagaagaaaaagatcacctcattgtccttcattttttgacataaaactgtgatagcccaat

SEQ ID NO: 130182 - DNA, 868 bp, Homo sapiens
gtatctggggcccttgagctgctgctcagcctgctcccacactgtgaagtgtactttcactttcaataaatctctgctttcctgcttcattctttcctagctttactgtgcgtttgtccaattatttgttcaaaacgccaagaacctggacaacttgctgtccgcaaccaatcagactgattgtgggctgaatcttcatttgcatggaagtgcaactttgtaacttcactttagcctctgattgcgggccaccacttcatttacatgaggcaaacaccaagtaggtggccaatgggaaacctctagagggtatttggacctgagaagattctgtatccggggttcttgagctactgcttgggctcactcccacactgtgaagtgtactttcactttcaataaatctctgctttccttgctttgcagtgcgtttgttcaattctttgttcaaaaccccaagaatctggacaacttgcactcaagaccctctacgggtttggcgagccagccagcgagaccacgaacccactgggaggaacgaacaactccagacgcgccgccttaagagctgtaacactcaccgcgaaggtctgcagcttcactcctgaagccagcgagaccacgaacccaccagaaggaagaaactccgaacacatctgaacatcagaaggaacaaactctggacacgctgcctttaagaactgtaacactcaccacgagggtccgtggcttcgttcttgaagtcagtgagaccaagaacccatcaattctggacacggcatgatctcagctcactgcaacctctgcttcctgggctcaagcaattcccctgccccagcctcctgagtagctaggattacaggtgtgt

SEQ ID NO: 130183 - DNA, 503 bp, Homo sapiens
agggtccactcaagacagtagaaaccacagtaggtgctgatgaggacactgaatacagcaggttggctcaggaactgctggaggactgtaaaatacagagaaaatggtgagacagagctggccatggggagctggcattgcccgattccaaacgctcgaagggggccctgcccagctgctgctgcctcctccagaaggttgaggaggggccctgctgggacggggcctgccaacaggggacactcccagctgcgtgattccccaggcagcacggtgaggcaggatttgggaacactgccgaagctggagatgggaatcctggctatggctgtctggacagccctgggtgggcactgccgatggcacagtgcatggttgggagggagctgctgctgcttctcctcctgttggagcctgacagggggcagctaataggagccgtggcatctccactgtccagcccttctttgtggctaagcagcatgtggtcttgtccataggtt

SEQ ID NO: 130184 - DNA, 620 bp, Homo sapiens
cctggctacagtgctatctataacgccatgtctgtagtatcgtatcctgatcgagctgtacactagaatctaaatatttacatatacccaaaattaacttatgctcatatattaggatgtgagaatatcatctgtttatggacacatgaaacctcctaatgacctggaattgttagaatatttgactttttatatgcaaagtttttcaaccaagtggtttgtctaatatttaaacatgtactggcacaatttgtgatgaaaatattagcacatttgcaataatgtttctccataacagagaatgttaatggataccagaattttatttttgtatttatgttcatagtacttttcctcttgtctactccagacagttattccataaagcatttgtataattaaaaggaaaacagaaaaaggaaaagtaggcaaatgtgaaaatagtttcaatatatcttatgatttcttaatgtaaaatgttttgttgaagtatatggctatcatgactaagtgctagaatttatagttacaggcggtgtccttttaaatgtggaaaggcttttaaaatattttaaaactggacctgtattatcctgaatacactattttgaaaattttta

SEQ ID NO: 130185 - DNA, 4270 bp, Homo sapiens
aggagtagggagaagggatgaggtgactttttgggcggggtggggggaacgtctgggcagccagggacctgcccattcactcccctttcccagccccgggagggcgcagcgcccgggtggggagcccgagccagcccaggccggctctggcctcctgacccagacagcgcagggcgcgagggatcgcgcggccgagcccgggtcgcgccgctcccagcatcggggccgctagccaagagttcgaggccttcccgatccggatgtgatgaaaaagagcaacagagggagaagtgtttcaggattgtaggagtggaagaggggaaagagaggcagagagggggaaggccccctcgcaggggagccggctggagtgagctggctggaaagagggggcggagtgcgcggagtcagagccgccaccgctgccgcagttgccgccactgcggcgtctgggctgagccggagggaggcgggaggacgcgcaggggcggccgccgccgtcgtcaggccaccggggcgaaaatgcggccgctgccggaggctcgctaactttccggggcggaagaggaggaggaggaggaggaaggggcttggagcgactacggggggatgcggagaagcagtcagttccctgcacccagcacctcacagcccttcctccgtgcgccctgccgggcggcgagctaggcggcagcggcgcggcgcgggctcggcggagcggcccatgtccggcgcgggcgaagccctcgctcccgggcccgtggggccgcagcgcgtggccgaggcgggcggcggccagctgggctccacagcccagggaaaatgtgataaagacaatactgagaaagatataactcaagctaccaatagccacttcacacatggagagatgcaagaccagtccatttggggaaatccttcggatggtgaactcattagaacccaacctcagcgcttgcctcagcttcagacttcagcacaggtgccaagtggtgaggaaataggcaagataaagaacggccacacaggtctgagcaatggaaatggaattcaccacggggccaaacacggatccgcagataatcgcaaactttcagcacctgtttctcaaaaaatgcatagaaaaattcagtccagcttgtctgtaaacagcgatatcagtaagaagagcaaagtaaatgctgtcttttcccaaaagacaggctcttcacctgaagattgttgtgtccactgtatcctggcttgcttgttctgcgaattcctgaccctttgcaacattgtcctgggacaagcgtcatgtggcatctgcacctcagaagcctgctgctgttgctgtggtgacgagatgggggatgattgtaactgcccttgtgatatggactgtggcatcatggatgcctgttgtgaatcatcagactgcttggaaatctgtatggaatgctgtggaatttgttttccttcataaatatttatcttttgtttgtgttaaaactggagagtgtttaaaaatttccttttggggggaagaaaagcacattgtaagattctcatgaaacaacatggaatttgcactgttaactcattattgtaagtaatctctgaaagcctttttactttaaccaaatctacatggtttaatatgtgaaattttaactactttaactagttttataaatttcttaatatgttacaataacttagggacattttgacaccccccttcccaaatgttaaatgccttctcctttttaccgatatttctgtttcttttaaccgttctcaggagcactttgctccaaatatattatttttcagtgtgtatttaaacgaggcagtttattttgatatgtatctattcatgattgaaaggaagcagtcttggccaggcacggtggcttacacctgtaaccctggcattttgggaggccaaggtgggcagattgcctgagctcaggagttcgagaccagccagggcaacatggtgaaaccccatctctactaaaatacaaaaagttagctgggcttggcggtgtgcgcctgtagtcccagctactcaggaggctgaggcaggagaattgcttgaacccgagaggcggaagttgcagtgagccgagattgtgccactgaactccaacctgcactccagcctgggcaacagagcgagactccatctctaaataaataaataaataaataaataaataaataaataaataaacaaaccagtctttattttaaaagaaactttaggaaacaaacccacataatagttgggaaccagtgttgatctctctcccttaccttctccacttgttcaacagactctgaatgccgactgtgtggactctcttcctcagactgtggggacagatacaattccactcctgtccacaggaacatgagatttagcagactaaggagatctgtaaagaatgaaccataccacaaggcatactgaagtgaggattataagagaaataaactcaaaatgctgttggaatatgcagagaattgctaccagaatattcagtaaggtttcagggagaatgtggcatttgaggactctcttagaatgagtgattcacctgctatttaaatgaattatttagatttttgacaaagatttaggtggacaccctaaactgtgtgtgcctttaaccagttaaaagaacagtgccttcagcatacttttttattagttgtaggaatacagctttttgaaaaagctataaagtttaaattaactaaaaatatgcattttcttacacataatttaaatgttatcatacttttttgatgaaaacataatgccttagtaaaatagctctatttaataaagaagattgagtactctgacacatttcatttaaattaggaaatttttaatattaaaatcccagtgttctgagttattgaaaggctttcttttattttgagagctttaggtctttttgggatgagaacattttagttgtttagtttgtttcttaagcagtgctattttttgtaaacacagataaatggaaaccattcttttcaatgcagaagaaatctagatatcccctactgtgaccaaatttctgtattacgattttatgttaaattaaactaatatggcaggttataatgatccttaagtgtaaagaaatcagtcaattacaagagtaattgtatagttattgagacctatagtgtgtggcttagatgaaagggagagtaaattttcataccatgctctctcctactcagtttgatctctctaaaattgtagtttggtttgatttaatataattcttagtagaaattttgaaagtatgctttgggattaataattatttttaatttttctggctgaatatcaaattgatagtaacaacagaagcataattttaggaaggctttcgcaaacctagccttttaagagaggtttttaacctgaagcatgagaatatatcacctgtggtttttcctttgagatgaaacgtagtttctagttatatcattacttaaagggcttaaaaagaaaaaacttagcaaacttttgaatctttcttttattgctatttacacatacatacacacatacaaaacctttaaattttgggatctgaatataattctggtaaacagctgtcttcatttttctcctctaaagaacttaattcatttgttacataaaatataaggaaatctttatactattttacagtaaccacaatctaaatatttacatatacccaaaattaacttatgctcatatattaggatgtgagaatatcatctgtttatggacacatgaaacctcctaatgacctggaattgttagaatatttgactttttatatgcaaagtttttcaaccaagtggtttgtctaatatttaaacatgtactggcacaatttgtgatgaaaatattagcacatttgcaataatgtttctccataacagagaatgttaatggataccagaattttatttttgtatttatgttcatagtacttttcctcttgtctactccagacagttattccataaagcatttgtataattaaaaggaaaacagaaaaaggaaaagtaggcaaatgtgaaaatagtttcaatatatcttatgatttcttaatgtaaaatgttttgttgaagtatatggctatcatgactaagtgctagaatttatagttacaggcggtgtccttttaaatgtggaaaggcttttaaaatattttaaaactggacctgtattatcctgaatacactattttgaaaattttta

SEQ ID NO: 130186 - DNA, 4768 bp, Homo sapiens
aggagtagggagaagggatgaggtgactttttgggcggggtggggggaacgtctgggcagccagggacctgcccattcactcccctttcccagccccgggagggcgcagcgcccgggtggggagcccgagccagcccaggccggctctggcctcctgacccagacagcgcagggcgcgagggatcgcgcggccgagcccgggtcgcgccgctcccagcatcggggccgctagccaagagttcgaggccttcccgatccggatgtgatgaaaaagagcaacagagggagaagtgtttcaggattgtaggagtggaagaggggaaagagaggcagagagggggaaggccccctcgcaggggagccggctggagtgagctggctggaaagagggggcggagtgcgcggagtcagagccgccaccgctgccgcagttgccgccactgcggcgtctgggctgagccggagggaggcgggaggacgcgcaggggcggccgccgccgtcgtcaggccaccggggcgaaaatgcggccgctgccggaggctcgctaactttccggggcggaagaggaggaggaggaggaggaaggggcttggagcgactacggggggatgcggagaagcagtcagttccctgcacccagcacctcacagcccttcctccgtgcgccctgccgggcggcgagctaggcggcagcggcgcggcgcgggctcggcggagcggcccatgtccggcgcgggcgaagccctcgctcccgggcccgtggggccgcagcgcgtggccgaggcgggcggcggccagctgggctccacagcccagggaaaatgtgataaagacaatactgagaaagatataactcaagctaccaatagccacttcacacatggagagatgcaagaccagtccatttggggaaatccttcggatggtgaactcattagaacccaacctcagcgcttgcctcagcttcagacttcagcacaggtgccaagtggtgaggaaataggcaagataaagaacggccacacaggtctgagcaatggaaatggaattcaccacggggccaaacacggatccgcagataatcgcaaactttcagcacctgtttctcaaaaaatgcatagaaaaattcagtccagcttgtctgtaaacagcgatatcagtaagaagagcaaagtaaatgctgtcttttcccaaaagacaggctcttcacctgaagattgttgtgtccactgtatcctggcttgcttgttctgcgaattcctgaccctttgcaacattgtcctgggacaagcgtcatgtggcatctgcacctcagaagcctgctgctgttgctgtggtgacgagatgggggatgattgtaactgcccttgtgatatggactgtggcatcatggatgcctgttgtgaatcatcagactgcttggaaatctgtatggaatgctgtggaatttgttttccttcataaatatttatcttttgtttgtgttaaaactggagagtgtttaaaaatttccttttggggggaagaaaagcacattgtaagattctcatgaaacaacatggaatttgcactgttaactcattattgtaagtaatctctgaaagcctttttactttaaccaaatctacatggtttaatatgtgaaattttaactactttaactagttttataaatttcttaatatgttacaataacttagggacattttgacaccccccttcccaaatgttaaatgccttctcctttttaccgatatttctgtttcttttaaccgttctcaggagcactttgctccaaatatattatttttcagtgtgtatttaaacgaggcagtttattttgatatgtatctattcatgattgaaaggaagcagtcttggccaggcacggtggcttacacctgtaaccctggcattttgggaggccaaggtgggcagattgcctgagctcaggagttcgagaccagccagggcaacatggtgaaaccccatctctactaaaatacaaaaagttagctgggcttggcggtgtgcgcctgtagtcccagctactcaggaggctgaggcaggagaattgcttgaacccgagaggcggaagttgcagtgagccgagattgtgccactgaactccaacctgcactccagcctgggcaacagagcgagactccatctctaaataaataaataaataaataaataaataaataaataaataaacaaaccagtctttattttaaaagaaactttaggaaacaaacccacataatagttgggaaccagtgttgatctctctcccttaccttctccacttgttcaacagactctgaatgccgactgtgtggactctcttcctcagactgtggggacagatacaattccactcctgtccacaggaacatgagatttagcagactaaggagatctgtaaagaatgaaccataccacaaggcatactgaagtgaggattataagagaaataaactcaaaatgctgttggaatatgcagagaattgctaccagaatattcagtaaggtttcagggagaatgtggcatttgaggactctcttagaatgagtgattcacctgctatttaaatgaattatttagatttttgacaaagatttaggtggacaccctaaactgtgtgtgcctttaaccagttaaaagaacagtgccttcagcatacttttttattagttgtaggaatacagctttttgaaaaagctataaagtttaaattaactaaaaatatgcattttcttacacataatttaaatgttatcatacttttttgatgaaaacataatgccttagtaaaatagctctatttaataaagaagattgagtactctgacacatttcatttaaattaggaaatttttaatattaaaatcccagtgttctgagttattgaaaggctttcttttattttgagagctttaggtctttttgggatgagaacattttagttgtttagtttgtttcttaagcagtgctattttttgtaaacacagataaatggaaaccattcttttcaatgcagaagaaatctagatatcccctactgtgaccaaatttctgtattacgattttatgttaaattaaactaatatggcaggttataatgatccttaagtgtaaagaaatcagtcaattacaagagtaattgtatagttattgagacctatagtgtgtggcttagatgaaagggagagtaaattttcataccatgctctctcctactcagtttgatctctctaaaattgtagtttggtttgatttaatataattcttagtagaaattttgaaagtatgctttgggattaataattatttttaatttttctggctgaatatcaaattgatagtaacaacagaagcataattttaggaaggctttcgcaaacctagccttttaagagaggtttttaacctgaagcatgagaatatatcacctgtggtttttcctttgagatgaaacgtagtttctagttatatcattacttaaagggcttaaaaagaaaaaacttagcaaacttttgaatctttcttttattgctatttacacatacatacacacatacaaaacctttaaattttgggatctgaatataattctggtaaacagctgtcttcatttttctcctctaaagaacttaattcatttgttacataaaatataaggaaatctttatactattttacagtaaccacaatctaaatatttacatatacccaaaattaacttatgctcatatattaggatgtgagaatatcatctgtttatggacacatgaaacctcctaatgacctggaattgttagaatatttgactttttatatgcaaagtttttcaaccaagtggtttgtctaatatttaaacatgtactggcacaatttgtgatgaaaatattagcacatttgcaataatgtttctccataacagagaatgttaatggataccagaattttatttttgtatttatgttcatagtacttttcctcttgtctactccagacagttattccataaagcatttgtataattaaaaggaaaacagaaaaaggaaaagtaggcaaatgtgaaaatagtttcaatatatcttatgatttcttaatgtaaaatgttttgttgaagtatatggctatcatgactaagtgctagaatttatagttacaggcggtgtccttttaaatgtggaaaggcttttaaaatattttaaaactggacctgtattatcctgaatacactattttgaaaatttttaaaaatgacttctttattttgctttaccgtatgtttatatctaattgacatattgactaatgtttgaaagaattcaaccataagttaaaatctgaaggttatctttatcatgtttcatccctgtctgaagatttcctagtcttcttatgtaaatcacatgactcatgtccgtaaatgaactatgaaagatatcgatcagtttatgatcattgacatgtgatttcaaaacacagtgttcttttaaaaatctataatatgtcaaaatacaagttttttttttttacatcgttttagtaagttaatttcatttatttactttggagctatatttccacttagaaaaactaaggtaattttacaatatatgctgagattaaaaaccaaggtaaaaatgatcaaacatatatgaaattgagtcttagatttaatgaatttcactcgaaaataaatgatcagaagaattttcatctaaggcatagagtggcgaaatttttgtaaa

SEQ ID NO: 130187 - DNA, 434 bp, Homo sapiens
cttcacactgggtccaggtctccctcgggctgcgcccatgccactgtgaaagaatcccaacacctgcttttacgtcgtcccctttccaccaggacctgggattatcccttctaaacagctcttaaccccatctctgccagatttgcagactcaagatggggttgcaggggtggctgctgttcctggacctatatgctggtaggagactggtgctggcaggagcttcatggatttgccaaactatcacatggattgatcatggatgcccggcggagcctcacactctcttgccctgtggcctccacaccctgagtacttcaggcatgggacatgacacctgcactccacaccctgttccctctgcccccaccttgctggagctgcctcagttatcgtgcagcagggccaggcctgcgcctggttccctttctggc

SEQ ID NO: 130188 - DNA, 377 bp, Homo sapiens
agtaaagttcatgatttctcctagacatgttctctctctttatgacctagatcaagagtgatctctttaagtcttttcttcataatcccacagcactttgtacttagatgtacttagaaagaaccatatacacggtacgtcatgattgatatgcaagccttcaccactctacctgtcctaaaagtcagggacacaccttcttcatttcatcagtccctacttctatccagcattggcatccagtaagtattagtggaatggacagacaacccgaatttgtgctgatggcagtttaccctgttttaactgtcatccttctgctactagacatggatgagacctgagacgatgggactgctcagaggtccctggctctt

SEQ ID NO: 130189 - DNA, 358 bp, Homo sapiens
ttctcttactctcctttatactgatcactataaaggctatcaggtttacctctttgctgctcttaaacatgacttctccatgccccagctttattttaggcccttagaatttcccaccaaaattactgcagaaatctcctaaatgatcttactgcctccagtcttgcatttcttcagcagatcctccactgctgccagagtttttctaagacgcgaatatggtcacatcaatctcctactcaaaaatccaaattcctgctgggcgcggtgactcacacctgtaatcccagcactttgggaggccaaggcgggtggatcacgaggtcaggagctcgagaccatcctggctaacatggtg

SEQ ID NO: 130190 - DNA, 187 bp, Homo sapiens
gctgggattacaggtgcgagccactgcgtccagccccagttgtttgcatttttattacagtctatgatcaggtcatgagtcattggagagcagggattgggttttttccatgtgtcttttccttttggtgctctatacagtgtctgacacatatactggtgcaataagttactagggtctgaatctg

SEQ ID NO: 130191 - DNA, 205 bp, Homo sapiens
agcttggtgtgaaacatcaagattcattcaatacttattctacattaagcactgatgagatgtattgctgaacactgtgtgatgagtcaagaataaaaatgttacagaccttggattttatagcacagtgaaggggttggccaactacagccagcgagccaaactggcccaccttctgttttcgtaaataaaattttattggatg

SEQ ID NO: 130192 - DNA, 483 bp, Homo sapiens
aatttatccattaccactatattttctagtttttgtgtgtagaggtttttatagttgtcttgaatgatcttttgtatttctgtggtgtcagttgtaatgtgtccattttcatttctaactgagcttatttgaatcttctctcctcttgcttaatctgtttagtggtctatcaattttgcttttcttttcaaagaaacagctttttgtttcattgttatttttgtttcagcttcatttagttctgctctgatctttgttatatatatttctttctactagctttgggtttagtttgttcttatttctctagctccttgaggtgtgatgttaggttgtaaatttgtgatctttcagacttcttgatgtaggcatttagcattataaactttcctcttagcactgcttttgctgtattccagaggttttgataacttatatcactgttatcattcattttgaaaaattttcagattgctatctttg

SEQ ID NO: 130193 - DNA, 311 bp, Homo sapiens
ttaggtgactgagatatcatgctaccctgtggccagccatgtgggcacatcaccacgtcttagtcttcaggacactgaggcagaaagcaccgtcccattcacaccttggtaactgaactctaacatctcagcctgagaatcctggattttttgcttatttgtttttaaactaacttttcttttcctttcctttcctttccttttcctttcctttcctttccttttcctttccttttccttttccttttccttttccttttccctttcccttttcctttccctttccttttccttttccttttcctttcctt

SEQ ID NO: 130194 - DNA, 458 bp, Homo sapiens
gccgaggcagacggatcacatgaagtcaggagttcgagaccagcatggccaacatggtgaaaccccatctctactaaaaatacaaaaaattagctgggtgtggtggcagatgcctgtaatcacagctactcgggaggctgaggcaggagaatcactagaacacaggaggtggaggttgcagtgagctgagatcgcaccactgcactccagcctgggcaacaaggcgaaactccatctcaaaaaaaaagcaaaaatcagctgggcgtcatggcgcacacctgtagtcccagctactcggaggctgaggcaggagaactgcttgaaccaagcatggtgccactgagctcctgactgggtgacacatttctcctcctttaccacccccgacccccagagtttctgcggctgacagtgtatgcttccggagctgcttctgttacaaatatatcgctggccta

SEQ ID NO: 130195 - DNA, 252 bp, Homo sapiens
ggctagcaggaaagagaaatctgtaccagatactgagggaaggattaaggttgttccctcagtcagggctactaaggaagtaatataaataacagtgggctaggaaggatgcaaaaagaataaggaaagaaacatgcatacagcgggcttgtaacgtactcagtgatatttacttgtaagaaagagggaggggccaggcacaatggctcacacctgtaatcccagcgctttgggaggccaaagcaggaggat

SEQ ID NO: 130196 - DNA, 683 bp, Homo sapiens
gcacactccaatgttggtgaggacggtccatccattctgcatatgtctgcgtctttgggacttagagtctggcaagtagaagagggatttcatcttgttggaaaatataagttggaaaatcaacccacatgaaattgcagaagccaaggggtgagtgttctagaaagtgtctaattctttctttgcttttagctaggctgcattacatgattctatgtgttcattatttttggacactttctaaagagtagctagaattgtaaagacactactaaggtgataatttaaaaactatgctgtcattcatatcaattaaaaataaactcaggtataagacttggcccaactttctattttcttgctgaaattgattgtttaatttcatttttgttagttgaatatgtttgggtttctctatggtgcatctaataagattttgtgtccacattgtgaggctttatggcctttctcctttcagtatttcagtgtgtttatggttgctgctcatgtttaacctgctactcttaacttttagcagtgggaattaagagttcaggcatctgaatctatttaaatatcaaaactctgggaagcttctctgataaccaaatcacatttatccatgcacttgttctgagcagcagttgaagttaggtgatattttacttagtgatccttatata

SEQ ID NO: 130197 - DNA, 766 bp, Homo sapiens
ggaggaaacagataatgaatgctaggaaacagctgcttctaacgtggcaggcagaaatgcatcctcatggagcaaatcggtcatcacaggaatattagtggaaaatcatctctgattaaacattcaagagctatggaatgtgatttactttcatatattcacccttccccccattatctttccgttgcctgtagatttcatttttatttgtcaaataatacagaaatactttcttgtaaaagaatatttaaacaacagaactctagataggttggaaaagatagtcccctttatgctatacccttctcctttcccagagttgggggtcagcaccttctggaacccttcctagacatttgcatacatgtttattcttatttgcacataatcattgtctttttgtaaatggatttctgcacagtttgaatctgttcctttttacattgaatactgtcttaacgatttctctgcatcactatatttagataaacctcaaatttttagaagtagggcttatgcaatcaaacttaattaactttattaatctaaaaaataatctaaaaatctaagtgcctcttaggaacagaaaggtgtcatggcccacccactttgggactggatggtggatttaggatgttttgtggcaggctggcttgcacctggcaaaatatcttgggtcagtctaacaagggagaactgatctcctgccctgaaagtttattactgtggcaccagttctgcttaaaacaaacatttagtcttcttt

SEQ ID NO: 130198 - DNA, 329 bp, Homo sapiens
cctcctgcctctcccaacaactccacgcccctccctgctgtgccatcagcacaggcagcccctggggagtactaggggacaagagggaagggactgattttgaagatcagcatctgcattcctaccctggttccaccactcaccagtgtcacagcctcgggacattaacacagccctactttagaaaggagagaatggagccacatggaaattaataatagcacccacccgtgcgattgctgtgatgaccaaatgaggaccaaccaagcagagtgcttcacacagtgcttggcgcatggttctcattgaactacaaatttctcatctgg

SEQ ID NO: 130199 - DNA, 224 bp, Homo sapiens
tctggttacagtgggaatgataagaagtaaaagtgaaatatcatgaatgttttcttatatctacctaaatgtatcataacagcaacgacaaagataagcactgtaatcccagctactctggaggctgaggcaggagaatcacttgaacccacgaggtggaggttgcagtgagctgagatgacaccactgcactccagcctgggtgacagagcaagactctacct

SEQ ID NO: 130200 - DNA, 249 bp, Homo sapiens
gtaggtgattctagaggatcccgatagcgtctcaataaagattagttgacttttgttttctttctcaaacccatttttgatttttagcctgggtctatttgtcacatgtaacctcttttacattgacctccagtaagatcaagatccttcttggggcccagtgggaaaccagttctgtgccactaacatcaagacagtaggtggcatatattattttgcctctagatactcctgtagacatataaaggc

SEQ ID NO: 130201 - DNA, 294 bp, Homo sapiens
gtaggtgggatcccacgtccggctaatttttgtatttttagtagagatggagtttcgccctgttgggcaggctggtctcaaactcccgaactcaggtgatctgcctgcctcagcctctgaaagtggtgggattacaggtgtgaaccaccatgcccggccagggaaaaacatctttttgtaggtgttgacactgcagcttctaagttagttgagaggttggaacccccgcctccttcctgtggttggaaggaatagggaactagactctaacatttttttagctgggagccagat

SEQ ID NO: 130202 - DNA, 483 bp, Homo sapiens
ggcggtatctgattccggacatggtttgccttcttgcaggattgactggacatggtttgaattggtgacaacaccctgaaggagtggatgtgggtgagaaagagcaatagaagactctgcaattcctggcctgagcagttgtaggagaaggtgaggggcgggtggagtgagcttcatgggagaccgggtgtcctgtgttggaagtgctcattttgagatgtgtcctgggtgtcccagttgagatcatgagtaggatgataataagagtgtgtgcatctggagttcaggctgcaggtcaaggctggagataccaaggggggactgggaggaagacagaagcttatattgacagccatgaagtggaggggattccccacaggagcaagcgtaagcagagagaggactaagagcccagcccaggctctgcgaggagccagcagaggaggctcggaggagcagccatcgaggcgggaggaggatcag

SEQ ID NO: 130203 - DNA, 324 bp, Homo sapiens
taattttttgtaataaaggtgggttgtgagatgactgacatatgtatccctacattaaataccatcagaggctgtagtgggtatgctttgtgttatttttgagatggggtctcactctgtcacctacgctggagtgcagtgacatgatcatagctcactgcagccttgaactcctgagctcacgggatcctcctgcctcaacctctcaagtaaccgggattacaggtgaatgctaccatcactggctaattaaaaaaaatttttttagaagtggggtcttgctgtgttgcccaggctggtcttgaactcctgggctcaagagat

SEQ ID NO: 130204 - DNA, 750 bp, Homo sapiens
acagcagacagcagtctgatcagggttaaggaaaacttaacaaggaaaggttgagtgcctcatacctatcagcagttggggaagactttatcatttctaaaccccaaggaagcagagggagggagtgggtacaggaactagaaaagagtagctgctgttgttgaagagtactatggtagtgagagaaaactgtaactgtaaccatcctcctagggaggcatttggaaataaacaccccaaggatgctttacttccatctcctggttttctgctcatgctccctatgaactgaactcaccagaatctagagggcaaggggagtcttggtggaggctgtaaaggtcagcctatttaagcatagagccaggtagagaaggatggaaatggaattgacatggcaaaacgaaaatattttgcacacatctgcaaggtgaaagaagaaatgtttgaggaaagatgggctgaacccaatggctcctgcctgtagtcccagtactttgggaggctgaggcgggaggttggcttgaagttaggagtttgagaccagcctgggcaacgtggggagaccctgtttctacaaaaaataataaaatttggccgtgcatggtggtgcatttctgtagtcccagctacttggaagacaggcgggaggatcgcttgagctcaggagttcaaggctgcagtgagctatgatcgcaccactgtactccagcctgggcaacatagcaagacctgtctcaaaaacaaaaa

SEQ ID NO: 130205 - DNA, 189 bp, Homo sapiens
catatatatggaagtacagtagtgtaaatctaacattaatttctggtttctgcccccgagaaattgcagaatgtagcttagtcagtcatgtctgttctgttttcttctcatgcagttcctaactcttgtcttctttcgtaatctaaaaaaacctgctgcccagctcccatgtcctctgcttctcttgtc

SEQ ID NO: 130206 - DNA, 450 bp, Homo sapiens
ggagaatatagttattctcaatatgagaagtctcctggatcaaaagtaaaatcccttgaaaataagacttcctctctgtacacgtcatctcatatctcaagcggctactgaatacaggtaatgctgtactcctgatggaggcaatgtgcttttcaatttttcaaattcaccatgccaaaaatgtgaacatttgaaaatactgcaataattgactacattcgccaggattcatctgaatgtttgacattttgtacactcagcatattgtattttaacacctgctgcgtggctttctatgtcaaagtaaatatggacccagtaagcatattaataaaggcaggagaaaagttgtactgtttagaagagaatgaatataccaaaatcaagaggctccactttttccccacttctgctacatatctgctatgacctcacacaaaataacttcat

SEQ ID NO: 130207 - DNA, 352 bp, Homo sapiens
  misc_feature (5)..(5): n is a, c, g, or t
agtantttacctaaaatgtgctagtagctatagacatttatatgtgaagcagctcttttttttttttcctggaaaccgagtctcactctgtcgcccagggtggagtgcagtggcccttatataagctcactgaaacctccgcctcctgggtacaggcaattctcatgcctcagcctccagagtatctgggattacaggtacctgccaccatgcccggctaatttttgtatttttagtagagacggggttacgccatgttggccaggctggtctcgaactcctgacctcaagtgattcacccgccttggcctcccaaagtgctgggattacaggcatgagccatcacacccag

SEQ ID NO: 130208 - DNA, 366 bp, Homo sapiens
ggtgatggttcaacaatatgaatgtgcttaacaccactgaaccatgcagttaaaaatggctaagatggtaaattttatgctatgcatattttaccacaatggagaaaaagggggataaaaaagcaggtagagggctgttttgactttcaggacatagtttgctgacccataagttaggctgttgcattttaaattctaagcatagacataatgttttaagccagtaacaaagtaccatttatacactaacatcatgttcattttattcctacagatacatataatttctgtagtgaagttcttaagattagaagcctatttcccagtacctagaaaaatatgttttatataaagtaagagttcagg

SEQ ID NO: 130209 - DNA, 724 bp, Homo sapiens
tctggaactcctgacctcaggtgatctgcctgtctcggcctcctaaagtgccgagattagaggtttgagccaccatacccggccttagagagtagattttaagtattctcaccaaaataaataaataataaataagtaaataaatatgaggtaatacatgtgttaattagctagatataaccattttaaaatgtattttattttatttatttttatttatttatttttgagacagagtctcactgtgttgcccaggctagagtgcagtggcgcaatttgggttcactgcaacctccgcctcttgggttccgcaattctcctgcctcagctgcccaagttgctgggatacaggtgcctgtcaccatgcctagctaatttttgtagtttttgtagagatggggtttcaccatgatgggcaggctggtcttgagctcctgacctcaagtaatctgcccatcttggcctcccaaagtgctgggattacaggtgtaagccaccgtgcccggccttagagagtagattttaagtattctcaccaaaaaagagataactttgtgaggtaacacgtgttaattagctagctttagccatttcacaaggcatatatattttaaaacatcatattttacatgagaagcatgtaaatttcttttgttttgttttgttttgtttcattttgttttgttttgttgagatggagtcttgctctgtcactcagccttga

SEQ ID NO: 130210 - DNA, 353 bp, Homo sapiens
actaccttgttttcaccttgtcttttcacaatgcagtcatcattcaatttttgcttgtcaaaacactatgttgagttacagggaaaagtatacttgcataaagccatttttaatcccctttaactgaatacattacctccctctgatatggttgctctgtatccctacccaaatctcatgttgaactgttactcccagtgttgggggagggacctggtggtaggtgattgaatcatgaaggcaaatttccccttgctgttctcgtgatagtaaattcccgcaagatctgatggtttaaaagtgtgtggcgcttccccactttactctctctgtctcctgtcaccatgtgaaga

SEQ ID NO: 130211 - DNA, 205 bp, Homo sapiens
acatctaaagtgcacagagcacatggcagcgaattcctctaatgggcaggcaatcctggccactttgctggccctcccagtccgtcttggcactggatgtgggctctgggctttgtgtgatgccgtcaggcagagatgagcaggggacatgtgcacgcccacggctgtgctccggccctactgcctggcccgcctgccgcactag

SEQ ID NO: 130212 - DNA, 279 bp, Homo sapiens
gtagcctctacctcctgggctcaagagatccttctgcctcagcctcctgagtagctggtactgcagacatgttaccaccatggctggctagttttttttgaattttattttttgtggatatttggacccctttagatataaataaagagcttttataaaatatctatgagaatactatgcagccataaaaaatgatgagttcatgtcctttgtagggacatggatgaaattggaaatcatcattctcagtaaactatcgcaagaacaaaaaaccaaaca

SEQ ID NO: 130213 - DNA, 287 bp, Homo sapiens
atcatgatttgacagagccaatgctcaagtttactggatgggtcttttatattccactggtcatagaattaaaatgagactgagaaaccaggtgagctggatgcaaaccattaatctatacatttttaataaacagagtagacaaactggtacaagatacttccaggcaagtgtagaactttaaacaacatattataaatcactagctaatatatttattttatatcttgatttaaggtcagaatcagagtatccctggagacaaaaatagaactatcacagagcag

SEQ ID NO: 130214 - DNA, 845 bp, Homo sapiens
cccgggttcacgccattctcctgcctcagcctcccaagtagctgggactacaggcgcccgccactacgcccggctaattttttgtatttttagtagagacggggtttcaccgttttagccgggatggtctcgatctcctgacctcgtgatccgcccgcctcggcctcccaaagtgctgggattacaggcgtgagccaccgcgcccggccgcaccttttctattgtattaaatatttcagtttctccattgtatggaggcttccagcaattagtttacaagccaacttatttactattcagtaactttttttgatattgagattgttcctaattttgatcattttaaacaaaggtgtgaaaacaggccaaatcttttcattcactcatgactatttcacaaagatagattcgtagaataagtattttcaaattccctttcagaaaagtagtacaatttaacactcacaagcagtgaatgtgaagccaattctccatacctttgccagcaagggtggccccaagaaccacacacagtaccccagctaagggcaaaggtagcttttatcctggccatagcacactgctgatggtcaacaagacaccaagtcctgctcacagatgctaaacagagcagatcctctcaaaaaaaaacaaggaaaaaaactttggggcgcccggccgaaaggttctaacactcgttggcgcgggccgagtaggaaaatgtcctaggtccaggaacggcggacaggggggtccccaaaagccggggccggggtgcacaccagggctggctctggctcacggccatccccccccccgcggcggaggaggaaaaacaaagaaag

SEQ ID NO: 130215 - DNA, 291 bp, Homo sapiens
tgtccttcaatatcaatctttctttggagaagcattttccaagtatattccatgaatagtgtttttgttttgttttgttttgctttttgtttgtttttttaatggaaaaatcttgggatctgttgacctgaaattttggggagtgctagctaacatatttaaccctgaggatcaacagtgcacagctgcacattacaagttctaagaagtttgggtttgttaacccactgtttcctaaatcgttgtgctcagaaaaactccctttttaaaatattagtattctgtgaagtc

SEQ ID NO: 130216 - DNA, 252 bp, Homo sapiens
gaagagggcctgggatctctagaatggaagggcacctagaaattacaggagtggggatgaaagttgttgtctttctttttgttttctacagcgagactccgaactttaagtatgcccagctgaatgtgtcttattctgggctggtaaatgacaactggaagctagggatgaataagaggagcctgcgttacatcaagcgctgcctaggagccctgccagcagcctgtatgctgggcccagagggggtcccgg

SEQ ID NO: 130217 - DNA, 303 bp, Homo sapiens
ctcttgaggataggggaatgttcatatgaaaaaaaaaaaccactcagtttgtaattttacatcacccttctctacataaaaaaattcacagacaaagatagtatttgacctctaataccaatatccatgtattcattaataatattggattattaatcaccctttgatgttactggtaccaccagatgcacaacccttgaaatggcgcgcagagttagtgtcacctgtataaagcacagaaactaagttcttaaagtgcccaactaaatcaattcttctttaacagaaatgacttcctttttt

SEQ ID NO: 130218 - DNA, 513 bp, Homo sapiens
tctgtatattatgactgtcacagttctgcatgaaatcatacataagtgctgcctatgcatgtgtattatacatagcattatgtgtgtgctaagagtatagagggcacatattcttaggttctcctgatgctgtgtcacagatcattggtcattaaaaaaagaaaagaacaaaaaagagcgtagaaggcagactagaaggaggtagtgccaaacttaaaacagcaatcgcctttggccacgggtggttcaacagaatttggggttaatctgtaatattatatttctttaaaaaaaagatctccatgtaatcacagggataaggaaaaaaaaagttttaagcaaatgcaccagtgttaagtgttaattgtgggtggtggaaaattattacatgagaaaagaatgttacagatctatataaactaataaaagattttttttttttttttgagatggagtctcactctgtcacccatgctagagtgcagtggcgtgatctcagctcactgccagctc

SEQ ID NO: 130219 - DNA, 382 bp, Homo sapiens
ccacacaggcatccggccagcagtcagcatctcccggagatctgctgggactaggcctgcaggcagcctgaccgcagggagggaggcaaccttcgtgggagatcttcagaaatattgttcattcggtttctcaagagtctccaactacagtgcagtttagctttcacagcttacatcccaggtgtcaaagagacacaacttggggcagggatggggacagaggtcagagaaggaaaggtggcctaagggcattgaggggtgctccccagagtttgcagactggctctgcagacttgcaggtcatttcctgtaccctgtcctgaaaccctcccacggcccgtttgagcctatcagtcatttacactgtagcgagaagttacct

SEQ ID NO: 130220 - DNA, 256 bp, Homo sapiens
ctcttttgatgttagatggccagctgaaggaaatgtagataaggaaacaattggctatgtatttaaggtggtaactggggtcagaggacagtcagggcacctagaccagttcccttgtattgactcatggttaaatatagtacagactccacctgcatggttgcagacttgcctggcagctttttgctcaagctgagcctaagccaccaaaaaaaaatcagctttgctggaagctacagagacaaagggaaagcca

SEQ ID NO: 130221 - DNA, 369 bp, Homo sapiens
actctctgtctctctgtactatctttgcaactgttctgtaaatctgaaactattctaaaatgtaacatttataaaaaataatggcttatcacagtttcctctgtaagaaacaatgggaaaagggtgatctttgggtatgaaactctgcctctaccagctatgaagctttggatgtgttgcctaccctctgtaagcttcagttttctcatctgtaaaatggagagaacagttccaaccacgaagtgctgttgtacagattgagtaagatagtgcatgcaaaggacttaccactgctaaaagtgctttctttctgggcagcagcagtttctctgctcagtcagccttcacgttgggttcttgacaactgca

SEQ ID NO: 130222 - DNA, 403 bp, Homo sapiens
gcggacagttgtttttggctggctgacccggcatcacccatgccactccccgccccaccctcgctccccacaggtccatattttgcataggatcctgcctgacagtgggacagaagagcccactgtgaactgcaggaagtgacacctgggcatggccagctgcagactgggcagggtgtgtgggcaagacccagagaccggccactggggaactggtcacgggccagacctggagtggactccagccatctggttccttcttgccactgcgctcctccctgcaccctccagaaagtttgcagcacaaggtaatttttccaaatgtagttcaccctgtctctcgaggatgccaaggctcctgcagggtgcagtgggggacaggaacactgggttaagagactct

SEQ ID NO: 130223 - DNA, 238 bp, Homo sapiens
ccaagtgaaagttttgagagccatcacatggttttaccaactcagttgttgtaagccactgagttttgttttgttgtcttcttttaaattgtgtgttattgcagtatcatttagccttcagctattgatacaaacaagtatcctgtctttgttaaatacaggttgagcatccctaatccaaaaatctaaaatcttttttttttgagactgagtctcactctgtcgcccaggctagaat

SEQ ID NO: 130224 - DNA, 273 bp, Homo sapiens
cttctttatcctttctcataatagtgggcttattaaatcatagtctatttttttctaagataaaaatagcaacccctgttctttttgttttctgtttgtttcatacatttttctccatctccttactttatgggtgtcattgcatgtgagatggatctcttgaagacagcacacagttgggtcttgcttatctatccaatttgccactctgtcttttagatgagatgtttaatccatttacatttaaggtcaatattgatatgtggtttgttc

SEQ ID NO: 130225 - DNA, 294 bp, Homo sapiens
gtgggtgagtccctctctgaccctgggtgggtgagtccctctctgagcctctttcccagctgtaaggcgggaaagccgctcctcaaagatctgtttccagacatcccaagcccaacgcacgtggcaggccctgcagacagcggacaatgagaactgacaacaacccgctctcagggccagcagacgcgcctgcgcctcccgtggagtcctcgccaccccccacccagaccctgcctggagcccagtgtcccctcggagaggccgcatcccagggaggggccatacccaggaggc

SEQ ID NO: 130226 - DNA, 636 bp, Homo sapiens
tacttaggcacaaatatatttaatcacatgcacacaatatctcattggcttccattccatatagcatcctaaggctaattgtacagtcttgttcctaaattacctttccatcttccttaactctatctccataaaagtaccctttactcctactgaaatgattgccttttattcttatatcaagtttttgttctcgctattctgtcaacatcagtgtttctcagactttcatgtacacgtgaatcacctagagatcttgttaaaatggagattctgattcagaggccctggtgaaaccttagattctgcatttctaaataacttgtctggtgaagcagatgctactggttggaagatcacactttgagtggcatagatatatgtagaatgccttctccctttcctctctggtgacttcctacctcttatttaaggtcagacatacaaatcacacctcctttgcgataccttccttctgcagctccagtcagagctgtttccttctctgtattgtttagtgctttcacttggctacagttgggaaattgtctgctgaactttgtcagcggatgttagtgctgaggggtgcagctgtctgcaggaatctttctgtctttagcacaattccaacaacat

SEQ ID NO: 130227 - DNA, 608 bp, Homo sapiens
cacggtagctcacacctgtaatcccagaactttgggaggccgaggtgggtggatcacttgaggttaggacttcgagaccagcctgaccaacatgtcgaaaccccatctctactaaaatatgaaattagccaagtgtggtggcaggcacctgtaatcccatctactcgggaggctgaggcaggagaatcgcttgaacccaggaggcggaagttgcagtgggcagagttcgtgccactgcaatccagcctgggcaacagaatgagactccatctcaaaaaaaataaacaaaacaaaaacaaaatcacttaagaggaaattgcctctgggcctgttacgtttttcataaaatgaggaggttaaatcaaaaggccactaaatttaatacactgcaatactttatgacagtaagatgtctattaaatttatatttaaattatagggttttacaatttggcagttcctcaaaaactaaatgtaaaattaccacatgatcccgtaatcccaattctagttactttacccaaaaatactgaaagcagaaactcagattataccccagtgttcacagcagcattacttacagtagccaaaaggtggaaacaactgaa

SEQ ID NO: 130228 - DNA, 357 bp, Homo sapiens
gaaaggactgcaggggaattggcctagcagtggctgcccacgcagggcaggtgtctggacaagatactctgttgtgctgggaatgcacagtgtgtggggtggcagtatgtctggagagggctccccacggcttctgacaggccactggcccactcaggtgtggccaggatcctctcgagtggaggctgtggccactactgattactctgacactttgagccttggaccagaagagtccccagcatcgctcacctctggtcgggtaaagtgaggggagaggtgggagagtgcagcggttactgagaaccagtgaagttaatccattgtgccatgcttcccattccccccgaccctagc

SEQ ID NO: 130229 - DNA, 389 bp, Homo sapiens
tttctgcctgtgaggtccacccagagatactggcttttccagcaaccagaattaggaagaacttcagtttcatggcatgggagcccatagcaccccagaatcctgagccaagcattctaactgctaacaagccaatcccctgcctcctggcagaatcacccctaagagggcttgtaatgggcagtactggccccaaggcaaatttttttttttgagtttcttttatcctaacacaacttctacttcaactagcatcactgagctggctttggggtgagggtctcaggcacctaattgattttatacagaaaggcatttctcctgatattaatctttagggaaatgaaagtccacttttcttctgtccagtgttttgtggcccaaagggg

SEQ ID NO: 130230 - DNA, 476 bp, Homo sapiens
cacaggaaactttttaagtaggttttattatccttcaaaaaggataggaaaactgaggctgggaagggttaagtaactggcctatactcattgcagcataagtatcacagcttaaatgtgttccattctttgcctgaccccaaacctgtgctctaaagcattgtggaacatcaaaagcctctctgccttccctacagtccaaaaattctcaattttctactatgggagctattaaaattacactagataaacctgtattttaaaagtattcaaaacaaaacacaacacacttacttagagcaataataataaatattacagaataatataatccttcccgttctaaaatatttttaaagaatatgataactttatattgggtcctagataccatactgtatttagggaatttaccaagatagagctggctttattgtaagtcaagcaaaatgaactggcgttcttgtaagctgggt

SEQ ID NO: 130231 - DNA, 431 bp, Homo sapiens
ggcccggatcggggctatgcgcagtcagcagcataagtattctcgtatgaatgtgtcctattccatcgtccgactatcaacatgatgtcaactaaggggttgcgttacattctccagcccttctgactaccctagagtacatcagattcacacttgtctacattggcattgatcataatatgattaaacttccacagtatcagaggcggatgctcctctagagatcagaactagcttgcatgcaggcttgagtactggccagttcagcagaataatcagtacgtcgcattgcgttctacctgtgatgtttaaagaatatgataactttatattgggtcctagataccatactgtatttagggaatttaccaagatagagctggctttattgtaagtcaagcaaaatgaactggcgttcttgtaagctgggt

SEQ ID NO: 130232 - DNA, 117 bp, Homo sapiens
aaaaaaaaaacccacccatgctagcccctgctcagcaccctctcctggtgctattttgaggtgatatccatcttggcctacgggtctctactaaatctggctgtccactacctctga

SEQ ID NO: 130233 - DNA, 739 bp, Homo sapiens
caccatttacataagtgaaactataaattatataatttttatgttcattcactaaacatgcttgtgacatcattttgctcctattgattattcattaattttattttgtaatacttaattttatgactataccacaggtttgaggcctttgcttgttttgtttataatccactccactattgatagacacaaaagcagtttctgatttgaggctatcatgaataaaccttctacgaacaaatcagatatacacatttttctgtaataatattttcacttttcttgagtttaagtacataagagtggattttctgggttataaaataagtatatatttggcattgtatgaaatagggagacattttcctaagtggttgtgccatcttaaactaaaatgaaaatgtatgagaatcagttccactttctaaccaatacttgatgctttcagttgttttagtgttatccattcttatgggatataactgctgagtagctgtctgccttcccaataacacagaaaattgagggcccagaggacagttttattttcatatttgacatcttctattattttttatagaagggtgatttgggtagtaaaattgtctttcaactttctaggttgtctctgaatcttactggggttccttgtcttaaaccacattcagaaattttcacgaccaacttctttttatctttgtcatacgaggccaatgagggactgcattcctgagacttt

SEQ ID NO: 130234 - DNA, 718 bp, Homo sapiens
ttatatagaactctttgcattgaaaatttagcctgtgaagaacttcgtccatatgcccttagttttgttaatgtgattcacccacagagaaagccagggtaactaaatatgatactataatcagagatagaggatcttaacattgctcactctgtacatattttcatatggatgcaaatgtatttctgccagtttagaatatgtgccatggctttgctacttggcacttataattaacattagtagttatacccctcagtacttttggcttcaggtttttcttcattatcttgtctttggcccaagtataagaatctacagattctttctcataaaacagtgtctacagggaaaaacaaaacaacgctttttctttattacaaaagagaattggagggaggctgaggcatcggagggagactgaggcaggaaacttcctcgaacccaggaggcagaggttgcagtgagctgagattacgccactgcactccagcctaggcaacagagtgaggctccggctcaaaaaaaaagaaggaagaattctgtcttcttaagtgctttcttacatctttttttgttttaatatataattagtaagcttttgtatgttgtccttgttttcatttttagttctctctcatattctcttgatatcattttaaatgaaattaatttaccatttagaaaattccttggtccaaagtaaaatatgaatgaa

SEQ ID NO: 130235 - DNA, 694 bp, Homo sapiens
ggccacttggaaacttgagttgcagactcatttttatttttgtgaagaaattctgctgtgatgagatttcattttaattttttaaaaagttcccttaccattgctttactatgaattgggaatgctgtggtgagtgctccatctggtaacatcagtatatgttgtggttttttttttagcacagctacataatgactacaatgccttagcacccaattaaataacataatccacactttattgtgtcttaaaaacacaacattcaaagttcactttttttgctttgacatgatgagtatgcactggtagtaaaagtaaataaaatgttgcagtacagcaataatcgtgacacccatgacgctgccaggttgtaactgcatctgtataatttgtgatgcaccgaaaagcagtgtgaagtgatgagagtaccatatgtagtccatcacaactgctcagctctgccattgtagcatgaatgtgtccagtgataaataagtggctatgcttcattaaactttatggccaccaaaatttgagtttcatataattttatatgtcacagaggattctatagttggctttatggcaatcatttaacaaactgtccaaaattattcttaggcccctagcccatgcaaaccacgtggcatggggctagattggaccccttgggccttagtttggctgaatactg

SEQ ID NO: 130236 - DNA, 243 bp, Homo sapiens
gtttaatttgaaaagattggatatcagcattctgagattacagaaaattcaacgcgtgactcctcaggttcagtgcgtgctcttagacataggtgaagggaagcaaaagttcctattggaatactaccactcacctccttcccaactcccattgccccctccaccagtaacatacctgtgtaccttaccctcacctgtgaaaggacccatatgtacataaacccagaagataccacagcagga

SEQ ID NO: 130237 - DNA, 696 bp, Homo sapiens
gagaactgctctttctttatttctttatgtgtttgaaaatgaaattttacagtttcttcatctgaccctaaaatcctggttttctcagatcttttcttttcctgtttggtaaagtttactggtacctgtgttttaaaatagaatgtcctccctttgtatttaaatagaaagtacagacaactgcaattagattaagtcattcttaataaaaaattgggacttgacaactcccatcattgttcccaattcctttttctgtttttttttgttttgttttgtttgagtttctgagaagaactaaaagtcttggaacaactctttctttaacaagtactactattcccttttaagaagtgtatgtgcttcccagcaatttattgactatttctggcttcatcagtggaagagaattagatacatgtagaaattgaaattttctaatcaagagattttcctgaaggttcagatgtggagataagacaaagcagcgagtaagagaataattcgactttgttcatagtactctgacaccagtagctctgattattttaatataaagtattttggtttcaatcgtgctttaatgtcaacatttcgaaattgagtaaaaacttcttagggttagaataaaatttatagtggtagttaatgagttctgagggattaagttttgctcatttcctaaccatgcaccct

SEQ ID NO: 130238 - DNA, 165 bp, Homo sapiens
tggccatcagtgctgagctttgccctggtggcccctcctgagagccgtgctgttgccaagcctggtgcctgcctgctgctgggccacccaggtatgagctgcttattagcaagtgccagatggagtgggagaaacccttggccctggtgggacaggcaggcctct

SEQ ID NO: 130239 - DNA, 695 bp, Homo sapiens
attacaggcctgagccactgcgcctggccagggcctcattttccaaagtcttatctttcctatgatgctctattcatttacaagcatatatatatttaaaaggaaaacatggacatcctgcacccatcattctacagcttgtttttcatttccaatgcactgaagattgcttcatggttttgtatacggaaatgcgtagttcttttcctttttcttgactgcatactattccgttacataaatgtactgtgtaatatttaacccattccttgtagatgggtgccctgctagtctcagacatttgtccttatagacaatgtcacagccaaaggtatgtatctctgtatttttgcagacatcgtcatgaatatttttttttttttttgagatggagtttcactcttgtggctttcctctttttttccctggttggacagttttgagagtgttcttggaaaccacacgacacgagaacttgttgcctaaagagtgacagacaggacacagagattttgaaattgggcccggaagacgcttatcaacagctcggacacctcatcgtgaggcttcaatttcttcgaaaagaatttcgacaatgttcacttaccttgaaaaagaattccattctccatgatgtaattttcatacctagttttcgatagtcacacagggttgcctaccgccaaataattatg

SEQ ID NO: 130240 - DNA, 789 bp, Homo sapiens
gagttctttctttgaaatagtatgtagaagctcagtatataaaatacatataagcaggactgctgtgtttgaaaaggaaatgagggtttatggttctactttctcagttctcctcttaccctttccctaccatgagaactccctggaaagcataatttgtaaaccactgatttagaaattatcgaacataacttatccctccagtagatgttagacattgagtgaagttcatggcattatgggaagaacgtttgatttattcctttagagattaattttattgcttctaaatgctcgaatggagcaaggcaaagagaaagattcattctaaagatcttttagttgaaatagaattggactcaacttccttgcaggctaactttataattacaaaaataactatcaaatgctattttttatttgagaggaaagtctgtagatttacctgaatattaaacgatattcaactgtacattcacattttgataatggaagatgttagaaattcccaaatttactttcagaaagctaaaattctctattatgccggattgctattacagccaatgtttattctaaattacttacttaaatataagagtcagaggaagtcttcagggtgagaaaaaatatttagggcttatcttgcagggaaatcattattaaatttgtgcatagtttagcttaacatttatgtgcagtctagccattaaaaacattgttatttcctttttcctccacctttccctggagtgggccatcagttacccgataaagccatggaaatac

SEQ ID NO: 130241 - DNA, 356 bp, Homo sapiens
agtatttggaatcccaaaagtagaaatgcctttcccttgagattgttgtttctcaacctttaaaaatccatatttcctttctgataaacattaaaatctcacaaatcctagaggattgtaatacatgttccttcccatacagtcctactcctcctctacacctcaccatactgactacagactttctcttctagttccctcatctgtgaatattatgcaaagtccttctttatatgatttatgtaatagatttttaatattaactatttcaaaattgtatatccttcctcccccatcttcagattctaacattgcccctagtcagaggagaggataccccttaaagattactcagt

SEQ ID NO: 130242 - DNA, 293 bp, Homo sapiens
actgctggaatgtgcccagtaaagacgtgggggtgtctgggcagctgaaagcctccacacgggaattcagtaaggacaactgctgaaccctgggttatggatttaaaaataaacctcagtgacccgcatgccttaagaatcatttgggaaagaacgttgctgaatccagcaactatgtgccccactggggtgaactacagagagggaaaaagagaaaaatgcttttactacccctttcaaggagtatgataggacaaaaagacaaaggaaatccaaaattggcttccccaaga

SEQ ID NO: 130243 - DNA, 280 bp, Homo sapiens
gatgcgcgataatccaatgcacctatggagcacaggacatttaatccctatggaatatgtaaaccagagtgtagttggacttcctggtgaaacctctggaattttactacagggagttgggttaagcagtgaaacaaccattgttgctatgccacccttcctccatccaatggacggcaaagatgagggcttgagagctgccttcttcaaagctgacttgtggatctttacgtcatagaatcccaggaaaactctgaacatttactgaagcgacctctcc

SEQ ID NO: 130244 - DNA, 251 bp, Homo sapiens
cttctagccagggaaatcagaaaagaaagaaagaaagagagagagaaagggaaataaaagttattgaaatggaaaaataaaaatatctctatttgcagatttaatgatcttgtatataaaaatctctaaggaatccactaaaaaactattagaacaacaatgagttctgtaaggtttcaggatacaagattgacatatgaaaatcaatcatatttcttaagcttgcaatgaataatccaaaaatgaaagta

SEQ ID NO: 130245 - DNA, 496 bp, Homo sapiens
cgaactcctgacctcaggtgatctgcccgccttagcctcccaaagcgctggggttacaggtgtgagccaccatgcccggccagcaagccacttacatatttttacattttctgacagccccgttcaaaaaaagtcaaagagagttggtgaaagtgacttgaaacattttacctaacccagtagatgcatttccatgtgtagtcaatgtgcacgatcctcattgagccattttacatcaccttttgcatatcaagtcttcaaaagctggggtaccttttgcacttccagcgcacatcagttcagagtggccacattccaagggttcaggagccacctaggccacaggcaccccactgatatggtgaccggctttgtaggctagaggctccaggctaagctgggtccacgctgcccccatggggcgagacaggcagggaggggccctcaagtcacacccaacccctgccttctcggggctcacaatccaatcagggag

SEQ ID NO: 130246 - DNA, 558 bp, Homo sapiens
gtagtctcctttttaagcctgtaaggaatttaacactttgtttaatagacttctttaaaaatatgctcatgttttgttggactttgagtgatctgttaattcccaggtaagcatttctgtgtgcacatgaagatgcataactcatacctatttttgtggactcttgggcatttcatacagttctctgcagatagtaaggcactcaatacgtctttgcctaactagcttagcagtgtagtgatgggtttatattaattaataacaggtcgggcatggtggctcgtgcctctattcccagcactttgggagactgaggcaggcagatcgtttgaggtcaggagttcgagaccagcctgaccaacatggtgaaaccacgtctttagtaaaaatacaaaaaaattagccagtcatggtggtgcccacctgcaatctcagttactttgggaggctgaggcaggagaatagcttggatccgggagaaggaggttgcagtgagccgacattgcaccactgcactccagcctaggcaacagagtgagactcttatctcaaaaaaaa

SEQ ID NO: 130247 - DNA, 883 bp, Homo sapiens
aggagagcctggcagacagagctctgggtagagtctgggtagagggacctgtggtgggagaaagagagaagatcagagtggaggggagaagcagggttggggccttgaaggtactgctgagcatgtgggtccttatccttaccctgcattgcccgcaggcctgacctttgcttcattcttcatggctgccaagtgagagtgtggcccctgcagatggttggatcatccatccagttctttgcttcctctagctgatatccttctttgctgtactatatgggaaaagcaagaaatatttgacaccaaaattgcttcctttgtgtggccccgtattgccctgtatagaagcatttcgtcttcacaacaactctatgagcagtgtgaagatggactaatacaaagaggaactaggggagcttggaggaaccagagactcaatcagggattcaagtgaagtctctgttgcaaacccttgagcaggtgagaacccctggactcttgcaggggatgtgggaggagctgtacatacagacagtgctgtccagccaatgtgggttcaaaccctgcatctgtcactggctatgtgaccttgatcaagttccttaaggtctccaggtttgttttcttatctgtaagatgagaatcctcttctgcaaaccatgtctgtttaaaatatgtgcttattttgaaagtgatgtagcaacattttctctagttaatgttctttctccctcataattttaaaacatttattcatgactataatgttaagtctgtgactttatttttgctaaatgtccatctcagagaagaatatgactttatatagcgaagtattttttaaaaaatagccttagtaatgcatatttgcaataaaaatatt

SEQ ID NO: 130248 - DNA, 139 bp, Homo sapiens
actttctgatgcttttaaggatgttttataacaaattgtgtagctttttccaatggaatgtttattctgaattatctaattcatattgtaagtatagagggagtttaatataaaattattaaactaatatttgtgaaag

SEQ ID NO: 130249 - DNA, 277 bp, Homo sapiens
gcacttctgtttcctctgggaggaaatttgagggctggcaacttgactttgctgaggcagacacagctgatctgagatagcaccaggaccctggaggaggtcctggaggcttgtccactgctccccacactttcccacgggattcctgtccctccttcctgcagagggcagctgcaatgggatatttttggcagtctccctttgaaagcatcccctaaacgcgaatgtcaacagcagtgcttgcagggagcagctgtagctgtggggagccgtgtgg

SEQ ID NO: 130250 - DNA, 458 bp, Homo sapiens
tgtgcactttcctgacactccatgcactgcatcttgtctgcagaagaaggaatgttgtagttatcacaatagaagttacatgaaaaagcccctaagcatgggtatcctcagtcagagaagtggcctgataatcagaggcatcatttactgagaacctgctatgcgccagcatcaaactaggtatttacgtgctttctctccagccctcacaactctgaaaggaagtactgttgtctttgttcccattttatagttgaggagactgaagcacagtctctgtgactcacccacagacctgagctcgcaagcaaagaggctaggattggaacctgcgtctgttcggaacccaacctcatgctttttccattgtgcctgtggcttctctgtggtgaggactcagggggaggccttggtgttccttaggctctcattgttcaccacagtctaaacctttttga

SEQ ID NO: 130251 - DNA, 366 bp, Homo sapiens
aggatggaaagaaagatagatggtaggctttaaggcattcctaggtaaagtgacctagggatataaagatttgtttcttttggagtggtatagaatttaattgttcatggctgggcgcggtgggtcacgcttgtaatcccagccctgtgggaggctgaggtgggcggatcacgaggtcaggagtttgagaccagtctgggcaacatagtgaaaccccgtctctactaaaaatacaaaaaattagccaggtgtggtggtgtgtgcctgtaataccagctactcgggaggctgaggcaggagaattgcgtgaacctgggaggcagaggttgcaggtgagccgagatcacgccattgcactccagccag

SEQ ID NO: 130252 - DNA, 189 bp, Homo sapiens
ccactttccaggcagtgcgcatttacataattatgtaacaatttcttttcttttctttttttttgagacggagtctcactcggtcatccaggatgtcgtgcagtggcgccatcttggctcaccgcaacttctgcctcctgggttccagcaattctcctgcctcagcctcccaagtagctgggactacag

SEQ ID NO: 130253 - DNA, 182 bp, Homo sapiens
tgctgggattacaggcatgagccactgtgcctggccttaagttttttatagatgggaaaaccgaggtccaaacgtgagcaagggctctgcatgctacctctctattttctcagccccttctgcaggctccatgccataagaacatggctcctaaggttcaggcctatggccccagtttaggt

SEQ ID NO: 130254 - DNA, 439 bp, Homo sapiens
ctgttctcagagctgtatattttttaattcttttgttcccatttccctcctttgaaactgagataatggacctaataaattcagagtttgtccagatacctgtattgataaacactaacttgactggacagagcatgaaatatgttttgaagacttatttttggccgggtatggtggctcacacctgtaatcctaggactttaggaggccaagatgggtggatggcctgagcgaagtgtttaagactagcctggacaacgtggcaaaactccgtctctataaaaattagctgggcgtggtagtgtacacctgtagtcctggctactcaggaggctgtgtaggaggatggcttgaccccaggaggttgagactgcagtgagctgtgtttgtgtctctgtactcgagcctgggcgacagagcaagaccctgtcaaaaaaaa

SEQ ID NO: 130255 - DNA, 723 bp, Homo sapiens
tgatttttgtcagctgtaaagtaggggccaatttcattcctttgcgtgtggatgtcctgtttcccagcaccatcggtggaagcggctgtcttttcccattgaggagtcctgccatcctggcacctgtgccaaagcccattcgaccttgagtttgagggtttatttctgggtcctcgcctctgttcccttggtccatacaccacctttatatcaggacggtgatgctttcattcctgtggcttggcagtaaaattttgaatcaggaaatgtgagtctccagcttcgttctttttaggattgttttgggtaatcaggaacccttgagattccatgtgaatttagggtgggtttttctgtttctctgagaaatatccttgagattctcccaggaagatatattgttttgagggctttaaaactccctataaatattgctgtactttgggggcccttttcttcccacactgtgtttttgagatttacccatgctgttgtgagtacctcgctgaatgcagcacatactgcatcatacaagtgcatcctgatccatttcccctgacggacgtgttcattttttgttatggcaatgctgcaatacacgtttttagctgtgcctctttgtgcttgaatgtgaggggttttctaaggtgtgaacctcagaacagagtcgccaggccatagggtgtgcacagcctccgtctgtcctgggcggccccacgcggg

SEQ ID NO: 130256 - DNA, 856 bp, Homo sapiens
ggacgttagcatgcatatcgagtttgcccttatgtggtgggagttcaaacacacaaagacccactgtatgcacacaactgttcttgctggtttgggataggctgccatgcttttttaatgttagtacagcctgtatattcattacggaattcagataaaatttccttatgttctgctgttatgtttgatcgaatcctaatcacagtgagctcttcattagctcaatatgtggtttgccctctggaaacagcctttccccctttttctgtgtattggggatgggagtaataacattttggggaggtttttaaatctcccagaagaggaaagtggcctgctttggcaggtgtgtgcaggatagaatatgtttcatttgttctggtgccaagaatgagcgctgtactacggtagttcccttaggatttgtatgtgctctgggctcatgaagatactgcctcatgagctgtggcagttgtactcttttttgatgacctgaaaagggattatttctgaggaatgaaaggctcccatcatgactgtggatgtggaaaaccttttctagctgagagcatttatatctacaatacattttaaagtcagagttcatgttccctgttttaatcacatgactacatgtcccagtacacaaaagggcactggttggcgttctccttaatgtatttagtaaagatcagaagaaatcctttaagagtttaaatgcccctggaacaggcatatacaggctctagtcaagaatgaattcgagtgaaggaaagctgtgtgacacctggcattcctctgtgttcatggagcttatttgaggctagaagatggattttaccatctagacctctct

SEQ ID NO: 130257 - DNA, 797 bp, Homo sapiens
ggagcattttagattttgaatctttcagatttgggatgctaaaccagtaagtatatgacaaatatttcagaatcaaaaaatgtcagaaatccaaaacactttttgtcctaagtcttatgcataagaaatactcaatctgtgtgaactataggcatcaagctctacagcagttctctagaacctccccaccttgcataactgaaactgcacacccatgaacaacttctgattctacccactcccagctcctgacaaccagcagtctcttctcatattcactctggaatccacttacatgaggtccctagagtagttgaacccatggaatcagagagtagaatgtccaatgaaataaaatatttgcaaaacctctctccaaatttgtctcatatccatcaaacacacatggttcatgaggaccagatttccagcagttcattcccaccctttctaccagtcagttctgaatttgcaaatgtccacatgtatttctggaaagatccacatggtcctcacctgccctctgcagaaggagaggaaacttaaagaacccaagacagggaacatgcttctgctccaaagccaccagctcttgcctgtccccttcactctttctagatcattccttgcactctgctctatctttagaggtcactggttcaagtaagtcatcatgaaacacctgcaaaaaactgccccaccttgagcctccactgcctgatgactgaactgacctccagccttgattctggtctcccctgtgttatttctgctgaaacatccagtcccaggccagg

SEQ ID NO: 130258 - DNA, 750 bp, Homo sapiens
gttctactatgagtaaaatgctatcaaatagcatcacatgctatagagaaatctttgttaaaggaaaagtcaattgatgtgacaaatttcattgttgtcttactttaaaaagttgccacagccaccttaacctttagcaaccacaagttttatcagtcatcagccatcaacatcgaggcaagatattccccccagcaacttactgaaggctcagatgatcattaacagtttttagcaataacatttttaaaattaagatatatattagacataatgctattgcaaacttagtagactacagtgtagtgtgaacataacttttatatacactaggaaaagaaaatgtgtgtgactcactttattgagatatttgatttattgcagtggtctggaactgaacctacaatacctccaagatatgtctgtataaggagaaaggggcaaaggatttgagagtttaatgagcatgatctcaataatgggctgtggaatataagctttcctccttcctcctgcaaatgtttaatgatagcctgtgaaacatcatgagaattttggggctagagaaatgaacagacatggttcttgctctgagaaaagaaattatattatagtccattatttcccaaactgtagtcattcaaatgtcccatcatatttttgttatatctttgtgctccctgtattatcatatagtgttttttaaaattatgtacacttttaagtcttaataaacttatttgaaaagac

SEQ ID NO: 130259 - DNA, 271 bp, Homo sapiens
gccccaggcttactgtctcaatctgtgctcaatacagcagctactagccacatgtcgttagtaagcacctgaaatgttgcttgtctgaattaagatgtgctgtaagagtaaaatatacactaagttttaaagacttactatgaaaaggaatataagatattgcaatagttttatattgaatatatggtgaaatacagctgacccttgaacaacacaggtttgcactgcaaagatctacttatgtatcaattttcttcccatctgccacccc

SEQ ID NO: 130260 - DNA, 526 bp, Homo sapiens
aggactgagcacatcgtgggaacaggcactaaatttcaggtttcctcccagctcatccctcccctttcctttcctatgtatgtgcatttgtgtgacattcaacctaactgagaagggaccagtttgccagagcagtgggtttccactctgacttgggcctggtgttgttagggaaagcagccactttctgcatggctaccagaagcggtgacaaacttgggttccctattgtcctcctccaccgagtctgggtaacgtgtggacttgctctatggagaagcacactgccatacggtttctcccctcgccagccaggcagagcctgacctgggtctccccaagtgtaagcacttcagaaaaccaaactctaggttcggcagctcagtggctcacacctgtaatcccagcgccctgggaggccaaggcgggaggattgcttgagcccaggagttggagaccagcctaggtaacattgagagaccccacctttaaaaaaaaaaaaaaattagctgggtatggaggcatg

SEQ ID NO: 130261 - DNA, 555 bp, Homo sapiens
ttccatagaaaaatctgttacaattttattgagattttttgagaaatcaacatcttaacaatattgaaacctccaatccattaacattgtatatcctgtcttcttcaatctgtgagaagcttattctttgccctttgaatgttggtcatatagtggtcattggccaggacataaagaagcgggctgatgcctatccttgtttttctatagcctcatctctatagacaacattctgtccacaagtgaagaacaaagccagaagcaaacaggtggaatcctcaggagagtctttttgtaataaggagaaagatctcatatttgatttttacttctgacaggctctctggtcccatcccacctattcccctaccctaccagctgtgagaccaacaagagagctgggctacacccaacttctgtcccctcatacttgtgagaattccaaaccccgcagaccctggtctacttgggggaacccgatcacagtcccacctcctaacagcatgaagtttcaagctatgcatactacctgactctttccctttaatccctgta

SEQ ID NO: 130262 - DNA, 475 bp, Homo sapiens
atgacgggctaaaagggcccaccaaactgtaaagttgcaaaattctgtatttctaaaatatttccagagaatatcaattaggagacgatatggaaagcggggaagggtcaagagacaggttgctgaaaatagaagtgtgccccggatgctataggagcacagaaagagggcaactgatgaacactggggtgagagtggaagaggagaccctggaagactccggaaggaagttgtcttactctggtcaagcaggaggccctgtagagggagtggtgcagacccaccagcatatgcagcttcacaggggcaaaacacctgtaggtccatcacgtgttggggactagcaagtattcagcttggctggagcagaggcaggagtgggaaactggggacaggtgagactagaggttggcagaaaccagccatagtagtttttggctcatttggacaacaaggagccccacagagagagcgt

SEQ ID NO: 130263 - DNA, 400 bp, Homo sapiens
ttatggcattatgtgtctgtctttttgaccctgaagatttgtgagcccaagggcagtctgatgtcctggtgtatttgggaacttttctgttaatatgccagaacagctgcagcctctttctctatgtctcttcgtttttttttttttttctgtgtcctcattctttgtgctcactcttctcttacctccacccccttaaattggctgaatgaagattgtttgggtttttttttggctcatgttcatggaattcactgatcttaccatgttccccatcatcctgaagcagctggattgatagaatggtggaatggctttttgaagtcaccattacaatgccaactaggtgacaatactttgcagagtgggggcaaagttatccagaaggccatgtatgctc

SEQ ID NO: 130264 - DNA, 374 bp, Homo sapiens
cctcggccagcaaagggactgcatgaagggtaagccacaagagccaagctcccaggcaggcaggcagactccaccatcttgagcacaaaggccaggcgagagtacagcaggggtcaggctggccctcctcaccccattcttcatacagtagcttcccagaaggaagccccttcagaggtgaaccactgtgagaaaggcatcagcatgggcctggatagaaatagcagggaaacagagcaaggaagacagcagcctaggatgaccagcatgggacatgctggagaaagaagcctgttgtaatgctggatgtacctcatcatgatcattacagaaaagaagacagcctgtctgaaacaaggacacagaggagatag

SEQ ID NO: 130265 - DNA, 366 bp, Homo sapiens
cttcctggaagaggtggcacagtgggccacagaggctgaggggctacaacaaatactgaaaatgcagtggtcagtgaggtaacaacgggaacagaaaaagcagcagcaggcatagttggggggaatgtgacccctgggggcaaatacagtctggaaacactgggaagtccttacataaagattcctatagccagtgggaaccacgggaagctaacagagctttgggaaaaacagtaaaagcagcaggatgccgagcacccacgccctgctgggcccgaagccaagaccatgaggagattcaggagagtggtcccaggggtcagaagaggtgtgtagatctccaaaatgacctctcaccaatcaccc

SEQ ID NO: 130266 - DNA, 227 bp, Homo sapiens
taataatctaggtaaaagttaactggcttggacagggtagtagaagtagaaaatagggaaaatagattccagatgttatctgaatgtagcatctgctagatttatgaccagctggatacagggtgttaagagaaagtaaagaatcaaggatgacgcgggatttctggcttaaacaattagaaggctggaaataatcattactgagacagttacaactccagggaaag

SEQ ID NO: 130267 - DNA, 347 bp, Homo sapiens
aagtaaggcagaaaacagtaaagggaggagaaacttccataaaaagaagggaacatatttagcccttctttttacataaattagcaatatttctatatggaggtgtaatcaccagagggtacatgcagtcagagaagttactgagtaaagattgcaatttccctctcctgagtcctctccctatgtgttttagaggcccatttgctgacacaccagcaagcatttttttcctgttagcactatggaacctagatgctaggaaatacataacaagacactattgggcctcctgcaccaccaactgaattgtcagcaaagttcccacagcaaccctaaaggaccaggcc

SEQ ID NO: 130268 - DNA, 197 bp, Homo sapiens
tggttaccatgggctgacaagcagtgtgggggtgtgagggagggaaaatggggttataggatacacagcagacatgtaggatgcaaatctagagctgcaattgttatgtcatgaggattacagttaataaaatggtatcatattatggatttttgttaagtagattttagctgctcttgtcacaaaatagtaactgt

SEQ ID NO: 130269 - DNA, 648 bp, Homo sapiens
ggatcaggaataataaccaatgagtactacgcttaatacctgggtgatgaaataatctgtacaacaaacccccatgacacaagtttacctatgtaacaaacctggacatgtacccctgaacttaaacaaaaaacaaaaaacaaaaaaagatttcctcctctttaagagtatttccttaggataggttcctagaaataaaattactgaatcaaagttttaaaaaaatttaaggctgttgatacacagtcccttaatagctttcttaattgttggttacatttctgcaataatttatgtgtgcacagtttggtaaatcattgtcatctcttgattttatgtttttaaatctttgctaatgtgacagctaaacatggatttcttttacctttgttgtaatttgcttctttgtatttgaacttcctcttgtgtgaattattcatgcctttttgcctgtttttctcttaaagttctagtcttgcttttgtatctttgtataagtcctttaaccaagatactaatctttattatatttgctggtaatgtttttttttttttagcgatttgtctttttttggactattcctttttacctatgaaggatgtttttgtttatgttttttaaacacaattttacttcttttgtgattg

SEQ ID NO: 130270 - DNA, 419 bp, Homo sapiens
ccccagagcctgtggagcctgactcataccaaattaaaagtggctgtgacttttctccctctggagagttttgagctttcattttagagctgttcttcctaaagggtagaggaatgaaccaggtacctcccttgagaattaatgttctggaatgcataaagtgtgagaaagaaaaattgtcaccttagcagaacatggtcggatatgatgccagctggtccttctggaaaaatattagtgtttcttataaaacacctgatagatttgaataagcagatcaaggaagagtctggttactttttgccaagagaaaattttttgtttacttaaaagctcctaccttttaggcaagttttaaatacaactttgaaacatgcaattaatgtgtctgggaagtgtatttttgtctaaaatgaaca

SEQ ID NO: 130271 - DNA, 430 bp, Homo sapiens
cctttctattaattccaagcttttagataataacttaactctcaaccaactgccaatcagaaaatctttgaatctacctatgataagtcactgcttcgagttgtcctgtctttccaaaccaaaccaatgtattaataaactaggaatagagtaaaactacctcaacaggccatagccgcaaccgagcctgctgccaatgcctctaagccgaaggtggctgtgccacccacgaatgccaatcttggcaaatctgccagggatgtcttcaccaagggttatggatttggcttgatttgaaaacaaaatctgagaatgaattggaatttacaagctcaggctcagccaacattgagaccaccaaagtcatgggcagtctgtaaaccaagtacagatggactgagtacggcctgacgtttacagagaaatggaa

SEQ ID NO: 130272 - DNA, 355 bp, Homo sapiens
cgtgtggatgagaggcaggaccctggcacagaatgggtactctctgtcttcttgttcaaggggtagaggagccccggcataggggatggatacagcagtcaggagcagggctcagagggattcccaggttcctgggctgggtgttggtctcaggattccttcctgctttggtggcttctttctatgaagcaccatcaggcagtttgtgggtccaggccattctgagggtgtggacgctgtggctaggaacaagctcagggatggcatttggagggggcgtgtggcccatggtcaggcagtggaggagggctcaggggggccctgcagagagcccgggaaagcttcactctttctt

SEQ ID NO: 130273 - DNA, 296 bp, Homo sapiens
tgctgggattataggtgtgagccactgtgcccatccaagagctgtttcgtaaggaactgtgggcctgtattgttttattcattgtttagatgtacacactttaagtatctgcccaccattctttcatctcagatctgtcccttgggatcattttccagaaggaattcagggtttaatcttttgttggttactgttggtagtaaaacttttgtctgcacatatctttatttcatccatttttttttaaacttagttttgcttggtataggagtttaaattggtggttttacttacat

SEQ ID NO: 130274 - DNA, 446 bp, Homo sapiens
atctagaggatccctggggtctcttcctgacctcaagtgatccacctgcctcagcctcccaaagtgctgggattacaggcgtgagccatcacacctggccagcttctttataatcttatggtgccacagtgatgataaaggcagtccgtcgttggccaaggggttgttaggcagtgtatgactgtacttctgagatagaagattatccctgaggcatggtggccaaggactcctgtgagatgaaatacatgagcaattggcagttctttgtcatgagaatgattcaaaaacttctaaaagcttatacttgacagctctcactaagtagaacaggggtgcaccgactgccttagaactcatagtatggggggtccaagtgaaactgtggacttggctatgtagctgcttgggtattgcgacccagatgccttcctgagtgcttagca

SEQ ID NO: 130275 - DNA, 313 bp, Homo sapiens
agtgtcactgctccttcctctctagagggtggtttagcctagagaggcatttgaaatttgtctgacgataaatagaacttaaaggaattgtcctgagtttgaagcttctgagccttaggaaagacgggtctgagctgttttcaggctgcagtgtactttcagggcctggctgcttgtacaggttccagttcttcttccctagagagtgacctaatgttttatgtccggtatttgggggtagcttattttcctaggtgggagtctgaagatgcaggttttgctcagggactttggaatctaaatgacccagatt

SEQ ID NO: 130276 - DNA, 597 bp, Homo sapiens
gaaaactattaatctctttcacagggcattatcaaattattaggacagtgacaattccagtgcaacgataatagcagtgctccattaactccatctcacagtcctaggtaggtttcacgttctcatgaggaaaccaaacatttttcctgggggaaaaaatctcacgttgaactgtaatccccagtgttggaggaggggcctgctgggaggtgattggaggggtggacttcccccttgccgttcttgtgatagtgagtgagtcctcacgagatctggttgtttaaagtgtgtagcacctcacccttggctctcttcctctttcttcggccagtaagatatgcctgcttccccagtcgcctccaccatgattgcaagtttcctgaggcctccccagccatgcttcctgtacagcctgcggaactgttgagtcaattaaacctctttttttttacaaattaatcagcctcaggcagctctttgtagcaatgtaagaagggacgaataaagataattaatgcaaatttcattgggagagcacttgaaccatgatatataacatatctgtatagagtcttcccccctgtgaaaactaaaaac

SEQ ID NO: 130277 - DNA, 160 bp, Homo sapiens
tggtgagattataggcattagccactgcactgggccatgtgtacgttaaatttaaaatgttctctaaaaggcattttatacttctagcaacaatgtatgagaatgttttttctttccaaatcctcactgcctctgaatttgagtcttatgtatattttat

SEQ ID NO: 130278 - DNA, 103 bp, Homo sapiens
aagagaaggtttttcaactttaaaacctttacaggttattttttgacatatttcctctgttccatcccagattgttttaaagtatacgtcatttctttcagat

SEQ ID NO: 130279 - DNA, 232 bp, Homo sapiens
ccagtcttacccatcttaggaaatggtaccaactgctcaagccagaaccctggggtcactctgaagtctacccccaacctcacccccaaatccaacctaattgagcccttttaactgtatttccaaatggaacagagaatctatccaactcctctgctagcaccctggtccagccacatagcagtctcctggctgggctcttcttcagtggcctaaataatgtttctgattc

SEQ ID NO: 130280 - DNA, 193 bp, Homo sapiens
gggacttcatcctgagggcagagacttctagatttcttacgaaaacggtttcataaaagaaagaatattttaataccaaaagaacaggaaagaaggataggcgtggtggctcaagccggtaatgccagcactttgggaaaccaaggcaggtggatcacctgaggtcaggagttcgagaccagcctggccaaca

SEQ ID NO: 130281 - DNA, 666 bp, Homo sapiens
gatgttcaagttgatacttgtaaatgcaaagaaatgccgtgtgtgcgtgtgtgtaaattctcatagcttttggagtacaagaggtttttggttacatggatgaattgtatagtggtgaagtccaagattttagtacactcgtcacctgagtactgtacattttacccaatatatagttttttatcccttaccccctttcttccttctcccttctgagtctccacctccattatactactctgtctgcctttgtgtacccatagcttagctcccacttataagtgagaacatacggtatttggttttccattcctgagttacttcacttagaataatggcctccagctccatccaagttgttgcaaaagacattattttgttctttttatggctgagtagtattccatggtatgtgtgtatatatataccatatattctttatccctacattggttgatgggcacttaggttggttccatatctttacaattgtgaattgtgttgcaataaacatatgtgtgcaggtgtgtttttgatgtaatgacttattttcctttgagtagatacccagcagtgggattgctggatcaaatggtagatatacttttagttctttaaaaaatctccatacagttttccatagaggttgtactaacttacgttccc

SEQ ID NO: 130282 - DNA, 346 bp, Homo sapiens
attgacagtaaaggaaagtgaggtaatgttgtgaatttaaaagtaacataaagcttttcaatcacttgttaaaaatagcattgcagagaaacattgaaccctccttaaatgtaaatagcatgattcatcgaacatctagtcaagatgactaatctttttttctagtaacgctcaacagtctagaaggtacagaaggcggtgggtatcaaggtttataaaaggtcaggaattggaactctggggacctggttgttctcatgagggcacataccaagatcagggtgagctaggaagtttaagtgataggaagataatagatttatttagagaggggaaattgagacag

SEQ ID NO: 130283 - DNA, 519 bp, Homo sapiens
caggtccaggcgggcagcgctgtccggcgcctacctttctgcggtgccggaatctgctcgtctgcaaccgtccactttggtagctgccagccacatggggctgttgctaatgtggcaggtgtagctgaagagctgaacgctttgatttattttaattaattaagtggttatgtgttgccagtagctcccatctgggctgtgaccccatggtctgcggacctcactctggcaccagactccgagtggagctgcatgcggccaccggacagtgtggagtgcctcttcgggttgtgtagaagtaggaagtatgtcaccaacataggagctgttgctgctgcgttctctagcacacctgccttgtttgtactgctgggcgtggaatgcctctcgggctctgacagtgtcattgacactgttgctgatctccttggatttacctggtccatttggatcaagttctttcacctattcacatgagcagatatcaccttaaaaccttaaaggttggcttaacacttc

SEQ ID NO: 130284 - DNA, 447 bp, Homo sapiens
tgagagactgggataattcagaaaatgactgtgttctgtggctgcagagagtcatttccatgtagagtaaaaagccacacctcccatgggaaagcccccaaggaggaagtgaggcctgcttagtgacaggccctgcactggaaccactgataatcagagcacccatcggagggcagctagtctacacaatgagcactgtggacctttagtcagttttcctgtttagtttaaacaccagatgcccgatgcagtctccagctctgcaagggaaagaaggaaaagaaatctgggccctctaagcagtgggtgcttgagagagcactgggtatgttttcaatatactcctggagcaaactcggtgaggacctgagggtcagaggagaggcagctccgagagcctcacgtaccaagaagccagagagcacctgcttcccaggaaccctcccc

SEQ ID NO: 130285 - DNA, 418 bp, Homo sapiens
agcgtgtgccaccacgtccagctaattaaaaaacattttttttgtagagacaaggtcttgctatgttgcccaggctagcctctagttcctggcctcaagtgttcctcctgccttggcctcccaaagtgctgggattacaggtgagagccactggcacccagcccattgttaaattaagaaatttttgaagtttatatgacttccacaatttatacatataatacagaccaaagtgtggtctaacttgtatagatagttggaaatcttgtaaaatttataagctggcatcatatattttatatgctgttttggaatatatgctttttatatacatgtgaattttatgattgatatggggatataatgattatatcctacacttctgcattactccacaggtattactgttctaaagatt

SEQ ID NO: 130286 - DNA, 337 bp, Homo sapiens
gaaatctgatgaacatttctgtaacttggctatggagattaaaaaacaagtactatataactgaatttcccaatagctcatgactccttagcttttgggatctatgattcagaacattctccttttgcatttcaccagaggcattagtgaggtatgtgaaaacatgaacaagataggaaatatatttgcatagtttctgtatgatttgcatactcctccacaaactgtaatctattgaaaacacacacacacacacacacacacacacacacacacacactctcgtgtatctcccccacagggcgctttagaagcccaaatgacatgatcactactc

SEQ ID NO: 130287 - DNA, 200 bp, Homo sapiens
ggtgtgaacatcctggaagctgatctttgaggggctactcatctcaccctgactcccccctacccgcgtctaacctgtgtaagcccgagttggtcttaacacctatgcccaggacatctgttctctaactctgccctttcctactcctcatgcagcggggactgaagcctaagaaggtggtgtgtttactatttgtgcct

SEQ ID NO: 130288 - DNA, 378 bp, Homo sapiens
ttcccacttcggcctcccaaagtgttgagattacaggtgtgagccaccacgtccagccttacatggatttcatatatgtacacagatatctctaggcaagaaactagtcacggagttgcctttgggagaggttactgagattctaggggttagaaatgtgagggagacttaattgatacttacatcctctatggacattggagtttttcattatgtgcatgtattacgtttttagtgtaatgtttgatacctgcaaagcagtacatccaacatggtaaagagattaagtacatggaccatggagccagactgcctctctcagatcccagctgagtctgtgggcaagttccttaatctctctgggtctcagagcctttg

SEQ ID NO: 130289 - DNA, 635 bp, Homo sapiens
gatggggtctcactgtgttgcccaggctggtctcgaactcctagcctcaagagatcctcctgccttggcctcccaaagtgctggcgttatctcttggagttacttacattatgaaaaatctacaactacctctaaattttatttttatctaaatgatactgagaagatagcactgccagatgccatttttattatttggaatattaacttaagaaaaaatcatgttcatgctgtggcagaggcagatgtcaaaattgcatatatactttagcaaaaaatcaacagtccaggagatgttcactacaactgaatgcgctgccttttcaggcaatcctgtggctcaaataaagccatatttgcagtgcttacactttaagatcaatgtaatgtcatgtaagaaaccctccagtgttcctcacatgactgaaagttttgcactgtctacaacaaaaacactgaacactgtcagcatttggatgacatagctgcataatttggtctttctaccatattcatgtgagtgactcttgaaaaccatagatgctagctatttttaaaaaaactataatgtttgaaaaagttaagagataggatatttattcaagacagcttattctagattccatttgatatca

SEQ ID NO: 130290 - DNA, 161 bp, Homo sapiens
aatggcttataccaccagttcactgactttaactctttaaaacttaccaataagcaccagttctgaaatagctctcctttatctctgaaatgtattataagttttcaattaaaaacaaaagatctggccgagtgggatggctcatgcctgtaatcccagca

SEQ ID NO: 130291 - DNA, 822 bp, Homo sapiens
gtatagactgtttatttctgagtattttgagacaagaattagttgctgaagattttaggtgcattattactaataaatacaagtcagcttgctttttaaataaggggaggagtcatgtaagaaagaaaagccatgaatagcttttagttaacatatgaacttgtttaaagacacttggttggagtcttgattgttttgtaagaagagctaaatggtactactgtcccctctccagctgcaagaaagagaaatatgttctttgataatggcttttgtccctccaaggattgtcttattcattggattcagtgaaatagcagttggtcaaaagtctcttaagctgaaagaattgcgaggaaattagcagatagaacaccaagactcctaggagcggttctctagtagcagcacttgaattgctgaatgaatatctcccacgtggattctctatggttctatcactttataccatttactgtcataagcctcttatcaaaaactttgaaggtgtgtattattttatatatgtaccttagtgtctacacccattcacctagatctttctttgaattagattttcattgcaccttacctcaattctgttgcacatttatttaaagatctgataaactgagaaaagtatacattttgaggatacatttcaaccatttttttctgagttcatatatatcaggcattaggcagctcagaaatcacaagttggaaacatagtcttaacaaatttgttattaaaggaaagagaaatagcataaaattaagatcaaatttatcaccacagtatgtctactttcactggtatca

SEQ ID NO: 130292 - DNA, 732 bp, Homo sapiens
tgttttggtgtgtgcctgtaatcccagctactctctaggctgagatgggaggatggcttgaacccaggaggtggaggttgcagtgagccaatatcatgcccctgcactccagcctaggcaacagaatgagaccctgtcttaaatcacaaaaaacatctcggagtgatttaaagtctgcacactcttttgaacaaggatgcaaaatattgccaaagcaatattaacttattacttaaattaatggagaaagcatatctccttttatcttatattggcagagttttgatctttttgttcataaagtatttattaggttgctagcaagaaccaagttttttggcttgaacttaagtccttaaatgttctctatctaatgtgactgtagaactttggaaaatcagcaaaatggtggaacaggaatttgtgaatgaagaaaaaataaatagtccaaatactccactaactagagaatgggctctgaactgtgtgtgttttcatattttattctttccccccctcatcttagggtctgcttctattcatattttaaagctactttctctctctttctttgaattgatatactttatttctttctagctattttgaactttttatttatatttatttatttatttatatttcaataggattttggggaacaggtggtgtttggttgcatgaataagttctttagtgatgatttctgggattttggtgcacccaccaccc

SEQ ID NO: 130293 - DNA, 165 bp, Homo sapiens
aaggtcaaggaagagtgcctctgtactcagtagagctctgatatcacatttctccctctgttcttgaccatgcaagtctaattcagtgagatctatccattcagatccagcctggagctcaccgtccccaccttcctggtccagcttagcccatctattacagct

SEQ ID NO: 130294 - DNA, 515 bp, Homo sapiens
  misc_feature (499)..(499): n is a, c, g, or t
tagataacatactgtacggcgccctttttttgtttccaagaagagctaaacaataacagcaacctcacaaactctttgaataactgacattcctaatgtttatgtgtttaataaacaaatcatgttacagtctaatcattttcccagtccaactgtcttttaaaatttgcaatactcactttttcctatttcttgtttcatgacccactgaaatttacttcctccccattgtgacactgagaaagcactctgaagtcactaattaacccatcctgtgggcagtgtcctcattttgtatctccttcgctgacaacccagcaggattctgcatcttgactacttctcctttgtaaaacactttgtcccttagcgtctgtgttccccattgtgggctttcctcctacttctgcctgccctgtttcctatgcagcctcatcttcctatacagagtcattaaacgttaaagttctctagggtttggcataaggctgcatagganaaaaagggcggcgctg

SEQ ID NO: 130295 - DNA, 442 bp, Homo sapiens
tgctggaggtcagcagattggcttcttgctaggaagctgtggtattgccttagctcttaccagtgaagtttgtctaaaaggactgccaaaaacccagaatggagaaattgtacagtttaaaggttggccccggctcaaatgggttgtaacagattccaagtacctttcaaagccaccgaaagactggcagccacacatctcacctgctgggacagaaccggcatacattgaggtaagtcctaagatgtaaaatatgctttcaggcttttccttgggctttgcttgccacctttcaaaatataaaactgaatttttgcaacgttaatgttagaagatcctcctgctttgtgagatttccatcttttggcttgtaaaatgccttgtagtggatcttctatcctaattattttgatcataagtatacattcaagagaatgacagc

SEQ ID NO: 130296 - DNA, 341 bp, Homo sapiens
tgctggaggtcagcagattggcttcttgctaggaagctgtggtattgccttagctcttaccagtgaagtttgtctaaaaggactgccaaaaacccagaatggagaaattgtacagtttaaaggttggccccggctcaaatgggttgtaacagattccaagtacctttcaaagccaccgaaagactggcagccacacatctcacctgctgggacagaaccggcatacattgagtataaaacaagcaaagaagggagtgtaatgggagttacagtatcccggcttgcaatgttgtctcactgccaagctctgtcgcaggcctgcaattattctgaaggtcaga

SEQ ID NO: 130297 - DNA, 567 bp, Homo sapiens
tagaggatctcctttgggacggcggggtgacacttgccagtcagatgtgataatgcgtgctaggagggcggtgtcccgcgctggtcacacgcgcagtactgtgcagtgttggaggggccagcctgtctgcagacggtacactctgtttgcccatggagggcccccaggctggccccaaaccgacagggagtggaccgtgcaatgaaggaagaagtgcagaggctgcagtccagggtggacctgctggaggagaagctgcagctggtgctgccctctactgtctttaagtctgaattaaggctattaaaggctgtccgttaaggatctggcttcaaactgcctttccaccttcattctactatttcctctattaaaatatgctttgtgttttaagcaaattgttaatttttttttttttttaagatggagtctcgctcttgttacccaagctggagtgcagtggcccgatctcagctcactgcaacctctgcctcctgggttcaagcaattatcctgtctcagtcttccaagtagctgggagtacaggtgcgcgcctccacacccggc

SEQ ID NO: 130298 - DNA, 259 bp, Homo sapiens
accccatctctacaaaaaatagaaaaattagctgggcgtggtggtgtgtgcctgtaatcccaactactcgagaggctgaggtgggaggatggcctgagcccagagaggtcgaggttacagtgagctgtgattgtgccattgcactccagcttgggcaacaaagtgataccctgtctcagaaaaaaaggaagaaagaatttttttactgtgtgtcttagaatcaatgaattatggcttatcactcttgtgcatacataag

SEQ ID NO: 130299 - DNA, 374 bp, Homo sapiens
gaaaactatttatttaaagaaatagactgacactacccttttgctcttagtatttggtctccagcattaatctgatgatcactgatattgactgctgttcctattaaaccatgtttaatataccataaatcatgtcaaattgtacaagtctatatatttggaggaaggtaatttttaaagaatgttagcctgatgtatttatttgcattctgatttatttacttgcattttttatgtcctagaatctattataatcctctatcaggtgatcaaactttatgagattttaaaaataatagtttcgacttccagcaaatgacatacaaaatactctgatgaaattgaccttatgaacctaagtatttcccagggtt

SEQ ID NO: 130300 - DNA, 253 bp, Homo sapiens
agcctagttctaacaactaaaaatgtctccagacacggccaaatgtccccggggggaaaggagcagcaaaattgctgccaggtgagatcccctgtggcacagcaaatccaccaataagcatgtgacaagacatgtcacctcaatagtcagggaaatgtaccatcagagaagaataagatatttaatagcaggagtgcagggaaaaggatgctttgctggtgaagataggaatttagagccgcgatgggagatg

SEQ ID NO: 130301 - DNA, 719 bp, Homo sapiens
gcagtatgatgtaattactattattaacctgattttacaaattggaaaactgaggcaccaagaagctaagtaatttgccaagactacacagttggtaagtagttgagctaggatttgaaccccaggatccagagtacttgctcttcactattgctaaaatttagaaaaaatatacaggcaaaaaaaaaatacccaaagacaactatagatatggtaacttgccatctttattctgtaacataggcatccatacaactgatcctaggctttgtattcaattttgtatcatgctttttgaaacatgaaccttataatggtctttccatgttgttaaaagcttattataaatattgttttaatacctatttaaaattcccatcacataaatgtaccactgtttgcttagacattctcttatggttggccattttggctcttcagttttctgttttgatcactagcgctgcaatctctgtccctgtgcagaatttcttaatgttcttcagaatatattttcaggatactttatcagaagtgtatttccttaatccaatagtctgaacacttttagggttctagatacaggttgtcaaactgttttccaaaaggcttgtactctcttgcaatgtctacaacattacatagaaatgccttcttcattcacacttcagtgttgagaatgatttttaggaatctttgccaatgtgataggtagaatg

SEQ ID NO: 130302 - DNA, 615 bp, Homo sapiens
taggaagcaatatcccccacccaaacgacccggggctaggtgccagatggctagagaccgcctgtatagcctagagtctgagctgttattcagaccagccagtcttagctatttccctgccctttccttcagaacatacagtagagggtctgagccacgttcctcctcactcctgcttctgcctgtctcccatccttcccctcatggcccggtgtggtctgctgggcctctctttctttcatttctgtaggaattgtgagaacagtcaacgctgtcaatggcatccacctttctgcgtcctcaatcagttacttttatcagacctgggtacaaattcgagtttatgtccccaacttgggggagtgcaatggtggcacttcaatttcttcattatctgtgctcacctaaaagctgagtcactgctaaaaggctattttatagaattcagcagttgagaagtgaaagtcaaggtgaggctgaggtgaggagttgtaaagggaaaaagactttcccctgggagtcagagccagtgctctgaatgaagtgtctcaccccagtagagagggggtgatgctggcaaaggggttcggttatctccctgtgtgggcgatggct

SEQ ID NO: 130303 - DNA, 371 bp, Homo sapiens
gaggcaaagatattgccagaatgaaatgggcaagctatttgtctaatcctgtcccctatcatctgtgtaatggctattttcaattgtttggaggaaaatgtaatttcccaacataccattgaactgtgagctgtctcagtagtaaggaagaaagcaattttgttgcacctggagaaacctgagagagttctctaggataatgaggtgctgcattcagcccacttgatgtgcagacttcacactcatgcacttcccctcatctgtcaagatgctccctgggcagccatggagtcctgtgtttggaagacagatgtggctttttttgttacgtcaacctgcatagtgtgtataggggctctgcaggattttgg

SEQ ID NO: 130304 - DNA, 339 bp, Homo sapiens
aaatcagaaaccgttaaacacaaatgctcatgactgtctgcctcaaacacagcaaaacggaggttggaacaaaggtaacactcatgaccttgatcttattaaccccaatgattcatttgagcactctaaaataacgcttctcaacctttaacatgcatgtagatcacctgcaaatgttgtttaaatgcagattcttattttctaggtttggaatgaggcctaagattttgtacttctgacacgtttctgagtgatactgattcttccagtccatggaccacagtttgagtaataaaactctagttcactggttctcagtacaggatgcacatttgaacc

SEQ ID NO: 130305 - DNA, 264 bp, Homo sapiens
ctcctgacctcaagtgatccgcccaccttggcctcccaaaatgctgggattacaggtgtgagccactgcacccagccacctttctctttagagctcactctagtcattaagaatctcagtctcaatgtttgatttgtaagaaggcctcttgctccttgccaggtgcttcatcagtccactcttagatacaaaaaaaagatcctgctgtttctttatggtttccactgcccttttctcttaaacatcatactaaagtcaggcaca

SEQ ID NO: 130306 - DNA, 268 bp, Homo sapiens
acccacagtatgccagattatcagtaaggtgataatgcttgtatattatacctgcttggcaccatttgaatgaggttccctcaggccacttaaggtttcacttcctgttacttgcacctgcactaatttcagaagcaaataaaaaacccagcaaaaccgtattttaggaccttattcaaaagcaaacagacaaaaaccaaagcaagtcaacacaaaccccaaaacacagcaataaggtaattaacctgatgttccaaagctcatgcca

SEQ ID NO: 130307 - DNA, 387 bp, Homo sapiens
cgtctctactaaaaatacaaaaattagctgggcatggtggcacaaacctgtaatcccagctactctggagactgaggcaagagaatcgcttgagcccaggaggcggaggctgcagtgagctgaggtaagagggatagcgagaagaattctttcaataaatatttttggaaacctatacttgccagacactgttttcagtgtaataaataaaataggcaaagtgcttgttctcctggagtttaccttttagtgagggcaaacagataataagcagatacatatacaatttctcaggtattcataaatgctgtaaagattaaagcggctgggtgcggtcctcacgcctgtaatcccagtactttgggaggccgaggtgggtggactact

SEQ ID NO: 130308 - DNA, 314 bp, Homo sapiens
tagcctcctggtagaacttcccaactgtgagagggtgaatcagctgtgacaggcagattggtcctcttgtcctcttggcccccttgggcagtgatgttgagggacaagaggggtggatcttagtgtgtgctggtctgcatagaggccaagatagaggcctggatgagacagctccttaaggaggattctcggttcttttgcctcccccaagaggggagtcctctcctgactcactggcacaattagtcttgagaattcaaatacaaggcaagcctgaccttgcgggtaaaaagatgacaccactgacccagtat

SEQ ID NO: 130309 - DNA, 472 bp, Homo sapiens
cttgagcccctcaccgctagggtgacaccgctcttctcaccatgtgaaatccaagggtcgagcggacagatttcaccactgtcttcttccttgggctgccagaactcaacactctgggggttctcctcttaccgcactagttgtccctgacccctccaatctctaatatgggggtggtctgggatcagccactggaccctgcccttttctgggtctgcttgccccctaggtgatctcacccagccctgtggctttcagtgttatctacatactcccaagttaaaatctgtagcccctactgtgtatgtacctaaactcactctaaccacctgcctactcaacatctctccctggacagctaataggcatcagaaaacttaacatgcctcgaactgaacccaagcttccctccaaatgggctagtcccatgatcttctcatctcagtcaatggtgactctgttttccagttgc

SEQ ID NO: 130310 - DNA, 190 bp, Homo sapiens
aaaaaaaggctggtgtcaggcagctagcattatttctgaaaattactgagaacttaaaagacattcagaacatctatgcaacttgacagagttcaaaaaattgtcattggaaacagagacaatcttataaccaacatttaggcaagtctgtgtttagaatatggttagttttcaaggcaagtatgtttca

SEQ ID NO: 130311 - DNA, 859 bp, Homo sapiens
gttattagctggaacattctattaggaaaagttttccctcatcaattgttttgttacgcagaggaacagttaatgtagcaagggcaggataaatgcttgatttttgacctttatttaagaggttttaaaataataagctggtctctgtcatcctccaaagggtgacagatgagttctttttggtgtgccttgaaatatttaatgtgctttaatccattccaattagtagctttatcaatagcccatctttggctagtggaggcctctttaagttgaatctcagaccctttcacgtgatgctgtctttgttaggatgcttgctttatgacatgactagggttctaggtccatcccttacacttcctgccccatacttggaaccggtcatatgtataataagcttcagagatgtgatacttagagatcatgaagatctgggtgctgtgacatatatttattgaacttcaacaatgtgcttgtgtttgcattctgtttttcccactaaaattatacttgggctaatctgttgctataggaatttgactagacagttgaaggggtgactgtgaaagatcagatgtcttccttttgagtcctgttcaagtttgcttgaacatttgatggggtccagctctattttaaaacttttcccccccatttcagccttttgctttattgtcggtgttttctacattgaaatggaagcttctttgttttcattctttcttttcctttttccccttcggtagttaacgtcctacctagtgactttgcctttaggcaagacctcaggctgtcactgggagaggaggttggaagctcagttgtcagagtggagtgctgctggtggtgtatcatg

SEQ ID NO: 130312 - DNA, 674 bp, Homo sapiens
tacttcccattgtcttgattctcattgtattttacttttgaatgatttggacatctttcccagaataataggggtgctggaaataataatagtcttcctattaagtgctaaaatatggtaatagtaaaatattaatagattaatgataaaataacaacttttgtttactgaattcctgcaatacgttctgtattatgttccatatatgaatcatctcatttaattaccttaagtgagaaggcatgtgattaagcattcaggctttgaagtcagacatcctgggctcaaattcggtctcatttgctccataggaacctttatgacttgaggaatttaatcatttgtgctttaatttctttatctataaaattggggtagttataatatctatcttacagtgatctcataagtataaaataaagtaatttatctaagcatatagagtcatatctggtgcatagcgagagcccagttgttagcaataataattaactcttgaagcagtggtctcatccattataaaaggaggctcagaagagttgtttcttgactaatattacacagcagtaagggtggagctaaggttccaatgagaagcttctttctgttatatagcccctacatgtatacaccaaaattactaggatgcttttgcaattaactccttcaaaatt

SEQ ID NO: 130313 - DNA, 265 bp, Homo sapiens
ccctgcctcacactgtcaaagccgaggaatgtggacagaggatatgcagccacgggactcacaaaggcagccctggcttcaccatggagggccggccctggggctgcaggtacagagtggacgcccacctgggagcttttgcacgggaagacccatgcaaaagtggacctgctggactgctcagtcattcctcttgagctcgatggccttgtggctcatggcttggagtagggagatgacccaaagacccttcatgattttttcc

SEQ ID NO: 130314 - DNA, 192 bp, Homo sapiens
ttatttccactttttggttactatgaataatgttgcactcataaacactgacacattttgaaacagtgaaaagttttgtgtgtaaatttttgtgtggatatgtttcaatttcttttgtttatatacctgggcatagagctgctgggttgtatgtaactctatgtttaactgtttgaggaactaccaggattg

SEQ ID NO: 130315 - DNA, 369 bp, Homo sapiens
aggcataatactcggtactagggacctaaattatgcttaaaatatataactgaacaccaaaaaaaaaagactgacaggtaaaaataccaaattactaacagctgtgggatatggagtttttttcttccttgagttttccaattttctacaataaactactctatttttatctttggggggaaaaatttttcctttttactgctgccaattaagaaaaaattcccacacagcaaattgatttagtgatttgaatgattaacaggcttgccttctaaaaaagctcctaaactaggcagatttctcaggtctttctttcatgcctgtacctgtttgttaccagtgctatggtaagatatgggagatgtatgg

SEQ ID NO: 130316 - DNA, 153 bp, Homo sapiens
caaccccaactttgcaaaacttccattttttgttcttaactatgctaaagtactcacaatgcattgcaattgtttgtaagcctgtctcctctacaagattctgatttcctgttttgttatgttcatctttgaattcccctactgcttagtatg

SEQ ID NO: 130317 - DNA, 717 bp, Homo sapiens
gtcacatggttttgctcttgggaagttccccactgggtttgtagtagaaacagagaaaaaatccatctgttttttcttccacctcaattttctatccaccctctcatcccctataaaatcattcttctctggttagtcacctttttctcttccttgtgttgataaaaatttaaatctttagtgccatactgtcaaaatcagaacactgcctggtacacctttgtggcttaggaaaaggggatgggagtgttacagctcccctaaattggtcaggtatactccagctttattctaggatagcctttgagactacagaattgaattcccttagtagggaatcaaatgttacaatgtattctaggaacagagagctgacagagaagtggtaagagtgcattgtaagtgtaagaagtggagggtacttatcagactttataggaatgggattgtcaatatcacttggcttagctggagtccgtactgtcagttcttggcctggtagaactcagtagcctttatggtgttggaagtgggtaggtacaccctgtttcttcaaatatgttgatattgccctatatagtggaaatttataccaaaccagttaaaatagtttacatttggcctggcgcggtggctcatgcctgtaatcccaaagtgctgggattatagggcgtgagccactgccgcccgtgcacttctgaatttttgaagggtagg

SEQ ID NO: 130318 - DNA, 1007 bp, Homo sapiens
attcctgccttcacaggccctcagggtctgggaccccacgttgggaatcaatggtttagacatccagcatcctattttactgaaggggcaagcccagagatgggagatggccagcccaaggtcacacagcaagttggtggcagggtgagaccagaacccggttcttttgagggtcccaccagaatatccccagccctgatcctcccctccatgcccctggaactctaggaatcactagccatgcctgaggggctaatctccctctgtcagcacaattccgagtgattcttcccctccctgtcgtctcttcctccctaacgggccctcacccctgtcctcttctgtttccttttcctggtcccacctcctggtatttactacatctgtgccatccctcatccccctgacccccattcaccctccgagcttcccccaggagggggagggggagggggccccgagctggggcctctttactgagactcttttgtacaccacaaactttttgtatatttttaattttgctgcgacatgagatattaaaagtcatttcagtacgtgctgcttgtgtcctattgttttggctgttctgggccaggggaaggagatgaggaaggagggataggtagggtaccacttgccacaatctctgtggctcaagagagaaaggcctttggctgggagagggtgggacattacacaacatctcctgtttattgggcagcatttcaatcaatcaaccagaatcctcaggccaaaagttctacagattatctccaaactcattttacagataaagtgggtggggggagataaagggtggggatacttgtcagagatcacagaatgagtctatgacaaaatcagggcccagactgaagttcctaactccactacagccaatacttattgagaacctactgggtgccaggcagttcttggcatagtgaacaagaaagatataaaacaggcaaggtccctgccctcaaggagcttacatcctatcc

SEQ ID NO: 130319 - DNA, 600 bp, Homo sapiens
  misc_feature (455)..(456): n is a, c, g, or t
  misc_feature (462)..(462): n is a, c, g, or t
attcctgccttcacaggccctcagggtctgggaccccacgttgggaatcaatggtttagacatccagcatcctattttactgaaggggcaagcccagagatgggagatggccagcccaaggtcacacagcaagttggtggcagggtgagaccagaacccggttcttttgagggtcccaccagaatatccccagccctgatcctcccctccatgcccctggaactctaggaatcactagccatgcctgaggggctaatctccctctgtcagcacaattccgagtgattcttcccctccctgtcgtctcttcctccctaacgggccctcacccctgtcctcttctgtttccttttcctggtcccacctcctggtatttactacatctgtgccatccctcatccccctgacccccattcaccctccgagcttcccccaggagggggagggggaggggnnaaaacngtgtcttttgaagcccattctttgtctggttttaaaaacaaaagtgaatgccgtcatgttccttgatgtgtgtttttggcacatatgtttgttgaaatgtttatttactgcgccggtactgcaattaagactcaacat

SEQ ID NO: 130320 - DNA, 344 bp, Homo sapiens
tgggtggctcacctgaggtcaggagtttgagaccagcctggccaacgtggtgaaaccccgtctctactaaaaatacaaaaattagccaggtgtggtggcgggcacccataatcccagctacttaggaggctgaggcaggagaattgcttgaacccaggaggcagaggttgcagtaagcagagattgtgccactgcactccagcctgggcaacaagagtgaaactccgtctcaaaagcaaacaaacaaacaaaaaaccttgtgtgggtgaatcaaacacatctgcaagcctgattcagcctgtagcccaccagtttgcagcctttgtttagatccgtagtggaga

SEQ ID NO: 130321 - DNA, 393 bp, Homo sapiens
acttgtacaagcatatttatagcagtgttgtttgtaaaaatatgaaattattattaaggaagagtagtaaaccaggtcagatttatacaaggaaatactagaaagcagttaaaatggatgaactgtagttacatatgtcagcctgaattaaacaacgttgaatttaataggtgtgttgagaattacaggtacagtatcatacaatttaaatgatattaaagaacatgcaaatgatactgtatttatgcatttatgtatagtgaaagtataaatgcattcattcacatgttgaatactgtatttagataacaagtgctatgtctagagaaggaagagaatgagatgggggagataaagcatcagagatttgtattctatggatatgtatttaag

SEQ ID NO: 130322 - DNA, 533 bp, Homo sapiens
aggctggatttactgtttctcactcaggtctgaatctcattcccatctatagtaccactcaatagggaggaagctaaaatccacagggagtccaagggaaaccagccatgaccccaggtccagctcagtgcagcaggtcctgaggcccagcaccggacaccaactatgtaatggcagaagttaataatacatatgtgagtgattccttaactgaaaccacccccaaatccatttcttctgcacataaaccagatagtccacaatcttaaaaacaaaacaaaacaacaacaataaaaaccagtaaggatttcagggcaaaaaggctgtttcagctaggtctgtttagggaaggaaaatgcttcacagtgtaaaccaaggaatgattgaaaagtctagtagcaatgctgcaaaagccaggaaaataattaacctcactgggtctaattttctcacctctaaagtgaaatttgccttagctctctattctctagcacaataattgcactagtcccccaaagaagtacacctatatg

SEQ ID NO: 130323 - DNA, 344 bp, Homo sapiens
aattaatgctcaaaaatcagttgcatttcaatacaccaacattcaagctgagaaccaaatcagaagctcaatccaatttacaatagccacacacaaaaataaaatacctacaaatacattcaactaaggatgtgaaagatctctacaagaaaaactaaaaaacactgatgaaataaattgtagatgacacaaacaaatgaaaaaatattccatgctcatggataggaagaatcaatatcattaaaatgactacactgcccatagtaatctacagactgaatgctgtttctatcaaattaccaaaatcacttttcacagaattagaataaataattcaaaaattc

SEQ ID NO: 130324 - DNA, 327 bp, Homo sapiens
atgttgcccagggtgatctccaacttctggtttcaggcgatcctcccacctcagcctcccaaaccactgggattacaagcgtgagccaccatgttggcctcttaaaggttttcttgatccatgcaaagcaagtgcatgtcctctggtcacttctgggacttccctcttctctcgtctaagctgagcaccctgttttctgcaatcctgagcccttccctcttcctgggctccccaaggggagggcagggaaacattcttccattccactccgtgccgttccatcccttactacctctccctccctctaaatgtttgcttacctggtgc

SEQ ID NO: 130325 - DNA, 285 bp, Homo sapiens
cgggatgcctctggggtgctgggcctggttaagtgcttgtgcggccccagcaggtggaggggtgactggaggccagtgttttacagtagtgaaaataggtcataaaggcaacccacatgctggatgaagaagtagaaaaagcacttttaaggaaggtattttaacaactcagtgggaccatggaaagagtggcctcttattttgctttctggctttcacctggttattgaaaaaaagatagaagatggtctgtccatatgcaaaaatctgtaatcacccggcttt

SEQ ID NO: 130326 - DNA, 279 bp, Homo sapiens
ctacagttccattccttggacctatctacccgatgcccccacccccaaacctgggttccaataacttccctcttcactccttcagttctcggggaggcccagtttgcactgctgttgccagccagagagaccgtagctttccttatggtttccctacaacctttgtaaatagttcctttattaaactcttttcaaattacccaatttgtgtgatccgtatcttcctgacttggaccctgatatttttactgaatattgactagtaagtgtattgctcat

SEQ ID NO: 130327 - DNA, 348 bp, Homo sapiens
tagctgcctctagaggatacacaactcagtgggcaagctgcatagtggcccgtcagatacatattttaaaaaacagattgcatccaagagtgacagtcaacgtggagtctgtcatatatgaaaagatagcagttcagttcagaagagggtctaagtagaaagaacttagctgtttctgctatagaaaaacctttcttactggttatttttccgagtggtggtctttttgcttgtggctttggggtctatctggaagcttcttttctatcttgcctgagctagaggaatgttgccctgccatcccctcctagtctgagttcccccgcattttaaatcacaactcatcct

SEQ ID NO: 130328 - DNA, 292 bp, Homo sapiens
caggcaggagccatggccaggggtgcaggctggggttttaccataaaaaattgtgggaagccctggagaactctaagcagggaaggaagaggatctcactttttttttcttttttgagactgagtatctcactctgtcacccaggctggagtgcagtggcacagtctcggctcactgcaatctctgcttctcagatttaagtgattctcgtgcctcagcctcctgagtagctaggattacaggcgtgtgccaccacgcctggctaatttttgtatttttagtagagtcgggg

SEQ ID NO: 130329 - DNA, 232 bp, Homo sapiens
gaggttagggagtgggctagtgtgggagttcaagcatacaagcaggggctaatgtggattgaatgtctcaccagcaccaaatgagggtgacccaggctttcttcctaccacatctggatgtagggtacatagtagaaaaggaggaatgagattttattttatttattttatttcatttgttttgagaccgagtttcgctgttgcccaggttggagtgctgtagcgtgatctc

SEQ ID NO: 130330 - DNA, 359 bp, Homo sapiens
atctaatatagaatgagatttccgaggaatgagagtcaccaaggtatgtgggccacacaagagttcaaacaaggtgtgtggggcccaaaaatggtagaaggtgaggtcacttagaggagatgaaccggaaatccttctgggagcacaaataggtgagggcacttggagaagagggacatcaactattggtttttattggttaattttatattggttgctggggcatacatgtgaagaagtgacataagttcctcaccccaactttctcaatttctatatttagaatgtaagattttcttttaaacctaatattaacctaatatcaaaattaggtcaggtgcagtggctcacacctgtaa

SEQ ID NO: 130331 - DNA, 384 bp, Homo sapiens
agaggctgaggcaagaggatcactagagcccaggaagtcaaggctgcactgtactttagcctgggtgacagagcaagaccctgtttgaaaaaatatatatatatttgccctaaatggtggcgtgtgcctatattcccagcttgggaggctgacataggaggattgtttgagcctaagagtttgaggctgaagtaagctatgaatgcaccactgtactccagcctggatgacagagcaagattccatccctcaataacaaaaacaaggcaaaagacccaacagacatttatcaaaagatgacaaataaatggccagaaagccacatgtggtaggtagcacgtgcctgcagtcccaactactcgggaggttgagatgggaggatca

SEQ ID NO: 130332 - DNA, 596 bp, Homo sapiens
gaacaatccctgatcttcccccaagtccacagggctggggacctaggaatcggtaagaattgcagtgtacctgggcctagggtgccctgtagtacaaaaatggctgcagtgatcactggcttagggaactcgtcagcccactttgaattcctggaaggtcctctgaaggacaggtacaaacaagacctgactgcaaaggctggaataaataccttatccttcaatgcccagatactgacaaacatcaacagtatcaataacattgaagccaatatgacctcaacaaatggaccaagtaaggcactcagtgaccaaccctggagagatggagacgtgtaactctcagggaattcagaatagctattttgagaaagctcaatgaacttcaagaaaacacagagaaacaattcagaaatatatcagaaatttaacaagattactgaagtaagagaaaaaaatcaaatgctggagctggaaaatgcattagtgggtctcagtagaattgatcaagcagaagaaagaattagtgagcatgcaaacaagctatttgaaaatagaggagaaaaaagaaaagaagaatgagcaggaacacagaa

SEQ ID NO: 130333 - DNA, 220 bp, Homo sapiens
aaataatttctgattgaacactagattaagaggaaaaaataccacaaatgaaataacttgtatttttgttacgcaaaggattattctaaaaaataataagctgttcctctaagcccttttagaacacatggaaaacttcagaatagtgtgagggcgtcttacatgcacttctttctttggagattgtgataacccaagtagaggatttaggattgtgctg

SEQ ID NO: 130334 - DNA, 668 bp, Homo sapiens
gttcctaatgttttactaccttttgttttctgcagcagagtcacatttctctatgtaagaattaatatggaggcactagatttgggtgcaaaattaacttttctagaccaagacatttttttccccttgaaatcctcattgtaaataaaaactgtaaaactgttaatactgttatttttgagagactcatattcttttttgtctatacatatatttgtaattgcactatagttaatgagcttgttttagcaaaatgtgctctggaagtaagtaaactagaattctacaatataagaaaaagttggaaggatctccagctactcaaaatattaaagttgctttggcgtgctaaactaaattcagacaccaaatgaatcagataatcaaataacagtcaccttaagtagcatgccacttactagtggcatttaaatatttcttttaagatactagagaaaagcttaatcaatagagaaaattattggaaattaaaaataacttttaaatcaatgagtatgatacatcaaattaaatttttgcattttagttacctgtcttgtactctggtaaagataaaagtggcatgtatttttatttgaactttttagttttgtatgtgtagaaacaaacatccaagataagattattttgtggcttgtgctttttct

SEQ ID NO: 130335 - DNA, 391 bp, Homo sapiens
gtgagctcttcagacccacttgggcctgccctggccagacacgcgggatcccgccctgccagcaggagggcctaacatttacctttaagcttattacgaagggtgtgcgggaactctgcggagaatcaggagctccagcaagtatgatccctgttggcagattcagcgttttgatccccagcccttggatggataagctgcaaaacccacaggccacggcatctaggctcggccagcgtgggcgtcctggggcgattcagtggcttgcgggttctctgacccacttgcccaccaacagcagctgcagagagatcggcagcacgtgccccagatggtcgtgctttggagtcatgagcgctggggtcccagtgatgctcactgaacagcaact

SEQ ID NO: 130336 - DNA, 375 bp, Homo sapiens
agttatgaagattggaagggaaaaaaaactaattcacaagcagtaggattgtatatgtaaaaatttcaaaggaacctataggtaagttgttagaatgagttcagcaaagttgttggacacaagatcaatatataaaaatcagttgcaatttctatatgtcaccaacagttagaaaataaatttcttgcctgggcatgttggctcaagcctgtaatcccagcactttgggtggccaaggcgggcagatcacctgaggtcaggagtttgagaccagtttggccaacatggtgaaatcccgtctctactaaaaatacagaaattagccgggcgtggtggtgggcacctgtagtcccagctactgaggaggctgaggca

SEQ ID NO: 130337 - DNA, 331 bp, Homo sapiens
tggttcagagttaccgagagaagagtcactaaccagtgtccctggtctcaagaaacgcacgctggtctcttcaggaccaaggacagagcacaacgtgcgtggttgctatcacaatacttccaaagaaaggcaggatccccgccaggcgccgtggctcacgcctgtaatcccagcactttgggaggcccaggcgggtggatcacctgaggtcaggggttcgagaccagcctggccaacatggtgaaaccctgtctctactaaaaaaaaaaaaaaatacaaaaattagctgggcatggtggcgggcatctgtaatcccagctactggggagac

SEQ ID NO: 130338 - DNA, 281 bp, Homo sapiens
aaggtgggcagtaagaactctgccctccaaaaatttgaggttgtctatcttggttggtgttagtgattccctgagggactagcacagatgcctgcctttctttgacctgctctggcagatttaaagagacagagatccatttctttttttgacccagacatttaaagaaacatgtcaggtcactggcttgggttatttgtttccttactgttgagttttgagggttctttatatattatagttttaaaaaacctttcttagctatgtgatttgtaaatatt

SEQ ID NO: 130339 - DNA, 527 bp, Homo sapiens
gtgctgggattacaggcatgagccaccgcgcctggccacactgtctcttttaaaactgtttcttacatcatgatgtgtgagaacttcgcagccattaaaatatatgtagagcttcaaatgtgcctttaaagtttgaatcttttgtgattgtttcatggtggtaatactgggaacgtatttcttttaaaggcccaatacaggttccttccccttccttcctgggcatggaaatcatcattgccttcctccttggtaaaactcttctgacaaatgttggagtaaagtgttttctttttctgtttctttttctttttcttttcttttcttttcttttttttaagtctagtcaagtgaagcagtgggagtggagaaggaacaaagaaatctgtaagtagttgtgatcagctagttgtaaacaccactgcagtcagaccagccaggggtgaagtgttttctgaggatcctggaagattaatatagtgtctagaaacataaaccagttggcattgtacatgctagaacattct

SEQ ID NO: 130340 - DNA, 625 bp, Homo sapiens
aacgtgagataaagttagagatgtggccctataggcagaggaaccctgaaaaggtaggaagcaggggagggacaaaatcagaggagagtttagagaatgaatcacaagggggcgatactggccacagggagactgaggagtccagagcaatgacccaagaaagaaaggtcagatggtggcaacgagaatgaatggcaaagctcaaacctaatatctgttgtgaagaaattaacaggactttaagtgacagagtaaaatggtgatatgtttatggatgactccgcttttggtttaagtgatgagataaaagggtataccatgaattgagataaattaaaaaggaagaaaatcagttttcaaggaaggaatgaaaaatttcttttagacacgtggaattctaatacatcgtacaagtgggaaactcttggtagatggcgatctatataattgtgcacttatatgggaatataagctacagataaatgtgagtgtgtaagtatatgacatgcatttattagcataattttcttgggtaatgtttagccaccctggtttagaagtacagaaaatggatgcaactttcaaagtcagagtttggatcatctatgaagttccggggatgatg

SEQ ID NO: 130341 - DNA, 149 bp, Homo sapiens
cctgtcctgagctgctctgactagccagggctctcctccccacagtcatgaagcccagactaaccatgttcctactcttatctgggagggcctggttcactccccccaagttctagatttgagttctacatttcacagcagtgaggaaa

SEQ ID NO: 130342 - DNA, 914 bp, Homo sapiens
cagaccagaccagaccagagggatcggaggctcaggccccctgagctgggcctctaagaaccacagccacagagtcaggctctgcagacccagaggtaaggctgcctggctgccccccccagacactcctctccttgcctgcaggctgccctctcccatggccaccctagacagagacaccacccgtgatactctgagggagccagactttcacatgcaacggggcatttggggctggttcgggtcagtgtctacgggtggtggatttagtgaccaccctcctcccacttctttctctgcacgaggagttgggagcctgcctggtggagttgagtgatgcccgtcatgtgcacttgggtctaccaatgtgcttaaggccagatgggcttcctaagagacaagggtgggtggacctaaccaactatcatccccagcgatgttcaaacataaaatcttatctatgtgcagcatgactctctccaggtgacagaaagggctctagacagctgagaggacctgatcatgtagggagggacggggaggggagccaggacccaggagctgcatggctgtaagaggaaggtccttggagggtatcagcagtctcagtgtgatgtgacaactatggacctgtgggtgtgccctggggacccctgacccatcccaaaacactgtggaaagaagggcctcttctccgtggggacccgtgtctgtgggagcgggcacaggtccatgctgcaggccactacggctgctcggcaggagggccgagagtttggacccacatagctgcaacccaagctggcccataatcagcagtggggcccagcagcacaggaggggcggacggttagctttggaaaaaatgacttgattaatctgattcgccaaataaatagattcatgtgaaaaat

SEQ ID NO: 130343 - DNA, 319 bp, Homo sapiens
ccatgcaagacacctgacacctgtttacagccatttctttgagcacattaaaatgtgagctggagtgggtgccgtgcgctgagtggctcccctccagctatgccggatcactgcctggggtgggggtgcccaagaaccagccactgtctagactgcaagtgcctctgacctggggcaggtagggggtgctggagggtgtatgcgtgctctctgaagcatgaaggggttcagggagttcgcagcaggctggatcttttgagagagccacttgtggtcttgctgagagccctaagcaggtcagtgtggttgggtagaaagg

SEQ ID NO: 130344 - DNA, 501 bp, Homo sapiens
agctgaagtggcccacactatactaaagagataattccccagtatgaactccctttgacgattcagagtgaccatggtgcggtgttcatctctcaggtagtacaggaagtgtctcaagtcctagacattgaatggaaacttcatgcagcacagccacagcccaccggaaagactaaaaaactgaatcaaactatttaaagaacaattaggccaggtgtggtggcttatacctgtaatcccagcactttgggaggccaaggcaggtggattatttgagcccaggagtttgagaccagcctggccaacatggcaaaccccatctctactaaaaatacaaaaaaattagctggacgtggaggcgcatgcccttagtcccagctgcttgggaggctgaggcacacgaattgcttgaagccgggaggtagagattgcagtgagccgtgatcatgccactccactccagcctgggcgacagagtgagactgtctcaaaaacaaaaaa

SEQ ID NO: 130345 - DNA, 346 bp, Homo sapiens
tttcttacctgatactggggatctgccgagattggccactcattttgggttgatcttaaaactttgatagaatttaagggccccaaaaatgcctcttggggcctgtcctgctctgagcatggttgttccccttcactttgggataatatcacgggcccgacactgcctatgagaagcagaggctcacctgtcctcctgggcgtctttcggcagccatggtcagaacacatacctggctctgttttagggagagtaaaactagcaggtgggcacagctgcaaagtccccagctttgaacaggaccccaaaggggaaacagtcactagccttctctgtaccccacagt

SEQ ID NO: 130346 - DNA, 816 bp, Homo sapiens
gtttggatcgatagtaaactctttttttcctctactgtacttatcatagtacccctaattctgtgctttgggttgaaaaagttaagctctgtatgctacaggatgtgtaataaataaagcaaatgactttcaagtgaaaataagaattacatttgaaaagaaagaaccatgtctgtttaattttgtgaaaatgttttaaatatgtttctctggaggatgaaaaaaatttttttctttgtttctctgtgtataggggtgtttgtctttttattaatccttaaattatactattcttttagaaaagaaagccttcatttgtgtatcttggctagctttccgaaagcgtttacataattttaaaacatggtcaaatggtccatacatttcccatttcgttctcgtttaatatttaataatatggaattggttcacgttagttttactaccagatctacaaaatctagtttttgtttcaagcagtaaagtctcaagtttgtgtcagtttgatttactttgatatattagcatctttttcctaatgaattttttgtttaaaactgtttcctggtctaagtggtacatctgctcctcagtaactgaccagaaggcacatgaaagaagaaacattttcagtgaagaaaattgcatcagttgtcattttttacctctctgtgacaaggaaatgttgttataatcctgacgtagcacagcttttagttccagtttatagttttgtagccatctaattacatatagatatagttattgtgtcttgtaagcatttctcaattacttttattacacaaatctttgcat

SEQ ID NO: 130347 - DNA, 454 bp, Homo sapiens
  misc_feature (443)..(443): n is a, c, g, or t
  misc_feature (445)..(445): n is a, c, g, or t
cataggagtcaggtggttccctgggctactccatggtgcacaggatgcttcgttacactggtgcccaggacataatcacgtacacaagacacacagttacggggcagactggggatatacggcacaccagcatgcagcgttcaccagtaaaggtggtattccatgattattctaaggtagatgggctgtgctttgtttccattggcttagtccagggattggcaaactatggcccgtgagccaaatccggcccactgcttgtttttgtaaataaagttttattggaacacactggctgctgtagttgtaacagaaactgcatggccctcctttatgttttttgtttgtttgtttgtttgtttgttttctttgagacagagtttcgctcttgttgcccaggctggagtgcaagttagccgcgatcaaatcactgtactcttagncncgggtgaca

SEQ ID NO: 130348 - DNA, 772 bp, Homo sapiens
atctacttgacctcctcacagtctccctttctatagtgcaagctcgactagacagtttgacaatagtgatattaaggctctgcttggtgccatgcaatctgcatttggggtgccagctagccacaggactcatctggaaaaaaacaacggcccaaccctgagaactttgggattcacgggaaattacagttcccctgatgatgcaggaccggaccaggatttcactcatcaactggcctagattaaggagaaagaaatctacatttctgaacctggtaacgtctgagcatactcatggaagaaagagctggcctatgagcgtccattaagaacacaataaaatatcttcatgaatgatcctccatttggaaacaaatgcatttggatgagggaccatctctcgaagctaaggattaaaatatcgcttcagtaccacaaagaaattaggctgttccttttggagtgttttaatagttagctgagtgctcctcaggaagaagccacatacccggagcgtaaccaggagacagtcatggaaccgtaacgcagaccatggactgcagcagcttggtttggagctgggtcaaacctcacagtaaggctccatctcaggcctggctgcaaagtcaacatctctctgcatccatgttttcacatttacctttctggagcggcaataggaaaatgtttccctaaaagaaaagacagtgatgctttcatcgaaagaaaaagtaaagaactattgtgtgtgcctaaccaatcttacaggggg

SEQ ID NO: 130349 - DNA, 783 bp, Homo sapiens
atctacttgacctcctcacagtctccctttctatagtgcaagctcgactagacagtttgacaatagtgatattaaggctctgcttggtgccatgcaatctgcatttggggtgccagctagccacaggactcatctggaaaaaaacaacggcccaaccctgagaactttgggattcacgggaaattacagttcccctgatgatgcaggaccggaccaggatttcactcatcaactggcctagattaaggagaaagaaatctacatttctgaacctggtaacgtctgagcatactcatggaagaaagagctggcctatgagcgtgagtcattcaacaaatatttctgagtttttacagtgtgctagatactctttacatgctgaatgagacagcaaaactaagactgctcaggataattgagaaattatcgctttcttcctgtaggcatcccctgcttttcactaacacttttttcttcttgttggaagggtggatattatggctggagctgcagcagccatcatgccaacatgagggaaaagctgatggaattgtggagactttggccttgtgattcagccctggatgagttgtctccacattacttatcatataagagaaaaacaaaaaaaaaaaaaaaaaaaaacaaaattttgtggggcgggcgcgggccccgaaaaagtttttaaaccattcgtgtggggcggggggcccaagggtgttagtgaccattggccaacagcgggccaaaggaacctgggcagcaaacgggggggtttccaca

SEQ ID NO: 130350 - DNA, 760 bp, Homo sapiens
gcctgtgtgcccttactcagtttctcctaatgttaacatctgttttttattacagtgaaacatttgtcacaacaagaaattaacaatgatatattactattaactaaactgtagactttatttgaatttcattagtttttctactaatgccatttttctgttttaagacccagttgaggatacctcgttgcattcaatcatcatatctccttagtctctctgtcttctatttgattgttttttaaatcccctttcccctctttttccagcaaatggttgttttacattctctttctattcttttaaaaggggttttacattcgatttctagtcttttagaagttaccaacacactgtttcttagggtgtggcgagagagtcacatacgcggttgttgctgtagtactataaatggatacaacttctgaggagggaatttgatgtgcatgtcttttgatccagcagctccactccagggactcagtcctacagatttatatacttacatgcatttaccaaattattcactgtgtcattttttatagttgtttaataggatactaataaagaggtgctttatatatggataagaaataatgcccaatatatagttaaatgaatagggatagggggtgaaaaatgtaaaactgtattttactttagtatgccatgataaaaaggtttccttatcatctccctataccaaggggtagatttgttttctggtctaccctttcaccaaggttcagctcttgaagag

SEQ ID NO: 130351 - DNA, 482 bp, Homo sapiens
  misc_feature (453)..(453): n is a, c, g, or t
  misc_feature (455)..(455): n is a, c, g, or t
  misc_feature (458)..(458): n is a, c, g, or t
tatagcgttccaggcaggaaaacaggaagagtgaagaccaaaggcatttagggaagaacaaggaagtaagtgaaccaatgtggcaggaatgttcagagaggcaggaggaggtttaggaccaagccaggatgctccctacaaaccaagggaagagataagtagaagacaaataacacagtcagcaagtgtcaaatgctggggaaaagtcactggtggccttggaaaggtgctagcagagtggagaggtttgaaagctacaatagtcttaaaggatgcgaagtgaggaaatgaagcagcaagtgtaatctttcaaataatcagaattatctactactactactgctactactattactactactgtagatagcatgattccttcattcatgaggtagaagtgtttgttttatgaaaatttactgtttgaaaaacaaacatgattctaagtttacnantcntggaagatataccacaggaaatga

SEQ ID NO: 130352 - DNA, 547 bp, Homo sapiens
ttacagactgctctggctacagttaggtaatttatacgcacgtgggtgtatttactactagtcaggaacgtagaggagggcatcctttagtgaattttaaaattctactttagcaccttaaaatatcctgtaacacctgaattctgttatttcttttcttgctccttgagattctactccacacaactgtttctagggcacagtaggtagggattcctgagtactcccctgaggacacacctgatggaggtggcagggagtatatatttcattcagtgtagaattgattaaaaagtgtatgaggccgggcgcggtggctcatgcctgtaatctcagcactttgggaggccaaggtgggcagataacctgaagtcaggagtttgaggccaacatagtgaaaccccatctctaccaaaaatacaaaaattagccgcgcgtggtggcgggtgcctgtaatcccagctactcgggaggctgagacaggagaattgcttgaacctgggaggcggaggctgcagtgagctgagattgcgccaccacactccag

SEQ ID NO: 130353 - DNA, 2508 bp, Homo sapiens
atgcacaagctggattacgtgactccgctgctgctgtgtggagagggaggctgctgaacccgagctggtgtgagcttctcttgccgtaagtccacgggtggccaggagcacgtgttagtctggttaagagctctgctcagaagtagccgctgcagctgaaggttttcaggcgggctgaaggctgggccgcttcttcattcatttcagaaacttgaacagtgggccttctacacacgctgtctttgtcagcctcaggcagttcctccatggatgagacacaggggcctctggccatgactgtccatcttcttgccaactctgggcacggatcccttctgcagaggactctggaccagctcctggattgcatttgcccagaggtccggctctttcaggtgtctgaacgggccagtcctgtgaaatactgtgaaaagtcccattccaagcggtaccggcttccagggatgtccgtgttgctcttcctgcacgaaagcccgggagaggataggctatttcgcgtcctggactctctccagcattcgccatggcagtgctaccccacccaggacactcggggaaggctgtgtccctacttttttgccaatcaggagttctacagcctggacagtcagctgcccatctggggggtgaggcaggtgcactgtggctccgagatcctgagggtgacgctgtactgcagttttgataactatgaagacgccatcagactctacgagatgatcctgcagagagaagcgaccttgcaaaagagcaatttttgtttcttcgtgctctatgcctccaagagctttgctctgcagctctccctgaagcagctgcccccgggaatgtcagtggaccccaaagagtcttcggtgctgcagtttaaggttcaagagatcggccagttagtgcctctgctacccaatccatgcatgcctatcagcagcaccaggtggcagactcaggactacgatggcaacaagattctgcttcaggttcagctgaatccagaacttggtgttaagaatggcatcttgggagctggcatgcttcccctgggctccaggctgacttctgtctctgcaaagaggacctcagaacccaggagccagaggaaccagggcaagaggtcccaggggcattctctggagcttcctgagcccagtgggagccccacatcagacaggtgtgctggcacttcgtggaaaagccctggccggtcattccaggtcagcagcccagctatgggtgcccacctgcacctgtcttctcatcaccttgaatccggggccagaatgaaggtcctcaaccgggaaaacagctttcagaagcttgaggccgagacgaatgttgacaccggcttgaccatcataaattctgaacccaggcagacttattttggcggatttccaagggatttacagaccagccagccaccattctgcttgccagcctcttccttgggggtggctacctccaaaaacaacagtgtccttaaggaaagagtctctcctttgccacttgctggccaaagggaccttggtaccgggaagacaatttcagaatgtctccttcatctgcaagttcagggtgaagaaaaagaagaagatgaagaagaattctttatatagcataaaataaatgtggttttctaaaacacaagatcagataaaatgttctagaaatggagtactgacccagaatcagcctgttagttgttcatctgaggggggctgaatgctccccatgcacaatctgtattgattttatttcaaatgttcaaagtctaaaggtgctgggaatgattgtttatttgccgtcacagtcataagagaacacagccaacacacagggaaaaaaaccgaatgcttttgttccgtggagatgcactaacccagctggatgtgttgaatccagcacctatcaggataattgcattgtatgcaaatgaatcggtatgttatacaacactaattagtgtctgtaatttggttttaatttttacttaggttgcatagctcatccccctggacaatatggactgctatttactcttgaatgctttttaattttcatgtgacctcttttggtaactaggccttgttcacataccctccttgtgattttgtctttaaagttgtttgtatctggaatgagtgaaaatgcaaagtgttttgaaaattataaacagttaattttgttttcctgtttaatgagccaaaatactggaagccagaaaatcaggttgaacatgaatgctaggctctagggctttcctgctcatctgcttctcatttgtttctgcactatgtcaaagaggacagtggttcttgttacaaaccaaagaggaacattgagcacagtgggaaaattggactggttgatctggtcactggagcaggacttgggttcttctggccagattttgactcccagattcctttacaaaacgcactcattcattcatttatatatgttcattcaataaacattttttgaatacct

SEQ ID NO: 130354 - DNA, 344 bp, Homo sapiens
aatttctgtcattttttcctgcaggtgaagacctggttccagaaccagagaatgaaatctaagaggtggcagaaaaacaactggctgaagaatagcaatggtgtgacgcagggatgcctggtgaacccgactgggaaccttccaatgtggagcaaccagacctggaacaattcaacctggagcaaccagacccagaacatccagtcctggagcaaccactcctggaacactcagacctggtgcacccaatcctggaacaatcaggcctggaacagtcccttctataactgtggagaggaatctctgcagtcctgcatgcagttccagccaaattctcctgccag

SEQ ID NO: 130355 - DNA, 1003 bp, Homo sapiens
tgatttatgtctcagagttagtgccagtcatagaaaaaaaatttcaataggacaaagaaagcgtcagtatcatctcttgcctttcagttggtcagtgctgcttttatgctgttacctagtacccataaccaccgtcttgtaatacgtgatcactttctaggctctaaagttggctgtccccatcaaattctcttgtggaattgctcagcaagcagtttgagattggatagagctcattcagattttggtgttcatgactaataatttcgaccggaaacagcttgtgcttatagagttgtgttattatctaagttgaaatagatgccaccgcatacctaccagcataatctagcaacaggaaacatgctcattttggtaagaggtactctctcttctaacataaagacttttaaatctcagcaaacttatttctttcttgtggcaatcttgtttttaagaaagtacatggatttaagaaagtaaatattaatatgatcacttacactatattcaagagtagtttcatgtagtacttattctaataaaggtgtttttaaaaaggaaatagtaaatagcatctatacagcatttactgtgttcttgggttggaagactcaatattgttaattgatctgtatatcttttcagtacaactgatagtatacaatagtagaaaaatgtatttcttctatctgaatgcctctggtgaacttctctggatcctttaagacttcctgaatattttatacattctctagttatagcatatactgcatatattaaaatgatttactcatttttccactagattgtgagcttatgtagtatttgttatatggttccatgtttctcctcccttgttttggtactttcaaataatagtagacactggagaaatgtttactgcgttaaaaacaaaaacaaaagtggttaactttgagataatgtggctataatgtgtttatgaaataataattccatgtagaaattaccctcttttacc

SEQ ID NO: 130356 - DNA, 282 bp, Homo sapiens
cagtagcaagacacagggacatcccaccacaaaggaatgaatatttaggtacagtgaggtcaataaataagtcaccaacttactgaaacgcccagcaaaccaaatcacaaatcctttcaaagctgtgtcttctcatttctaaaacagaatatcacactatctggctacattggactattgtgagtgttaaaataagtgaacttagcatagcatatggcatatggtggaggctttaataacaacagttgtcatcatgtgccccctcccatataatctccgatc

SEQ ID NO: 130357 - DNA, 579 bp, Homo sapiens
gacttcactctgcagtaactgctgaactaggctgtaaggcctgtttgtgtgaataagataggacgataccatttgtatgcaaaagtttttcaagtgtctccttgataataggaaacactctggctaaatagccttctggttatatggttaaggaaataattgactagaagtggcatgaagaagcagacaacaaaagtcacttccatcagggaaccaagaccttcattaatccagagggaaaactagtgatttttctagtccagtgatgggcaattcgaagctcaaagtctaatttcagggagaaagatgaaaaacaacctgcatccagccgggcctggtggctcacagctgtaatcccagcactttgggaggtcgaggtgggtggatcacctgaggccaggagttcaagaccagcgtagccaacatggtgaaaccccgtatctactaaaaatacaaaaattagccgggcgtggtggcttatgcctgtagttccagctacttgggaggatgaggcaggagaatcgattgaacctgagaggttactgtgagctgagattgcgccactgcactccagcctgg

SEQ ID NO: 130358 - DNA, 311 bp, Homo sapiens
gcagctgcaaggccgaatatgaccactaacacatttttgtttagtctgtgcattttttaaaaagtttgacttgactgccaacattgggaaatcaaaagattttacataatgtgaactaatggaacttctgaaagaaactggaagatgtggcaacccaatctgtgttccggagctgagcagccattaccctcttctgaagaggcactctccaatttgttgaataccaattctgagacctggtggcaatcgccattatttcatgttgctgatattttccccttgaacctggccgtcttgctcgtgtatttaca

SEQ ID NO: 130359 - DNA, 429 bp, Homo sapiens
caggctggatcacggcttaccacaacctccgcctcccaggttcaagtgattctcctgcctcagcctccttagtagctcggattacaggcatgtgccaccacgcccggctaattttgtattttaagtagagatggggtttctccatggtggtcaggctggtctcgaactcccaaactcaggtgatccacccgcctcagcctccaaaagtgctgggattataggcgtgagccaacaccctcggtctgacaaaactctttatacagctgttctataagacaggttctaggaaatccacaaaagcctgagattagtgaaatgggtgaaaagaggtagaaggggctaatataaggttgccaatgttttcttttcttttttttttttttttgagacggagtctcgctctgtcgcccaggctggagtgcagtggcg

SEQ ID NO: 130360 - DNA, 254 bp, Homo sapiens
gctctacctatactgcctttcaggctaacgaagaacttcagccatgacagtgagaagtatcactcagctatcagagctgacttactgcttccaaactgctgccaatctggggaggcaatagcgctgggcggcgccggtatgaaaatatgagatgcaggctgggcgtggtggctaacgtctgtaatcccagcactttgggaggctaaggcaggcagatcacctgaggtcaggagtttgagaccaggctggccaac

SEQ ID NO: 130361 - DNA, 746 bp, Homo sapiens
tgctcaacgcgatttcccttcgcgcttctccgcaccgggatccccagtccctcaggttccgacagaccctcctgtcaggcccattctccgggccccctcagttgcagtgttaagatcaacagtgttaagattaaagccttgtgatgtgctagccactacgctgaggatatgccgtgtactaaaattcctcaggactcctcacagctgccctgtaaggaagcggccatggccgggttctagcgatgcgaggccgaggctcggggcgctgagtagcctagcgcgtcgccgaggagagctggcacgtgaaccccttgtcgtttgccgtcagaggtgttatgtggtggccctcattctccatgcatggagcagactctaggatctgcagttactgtatgatgagcccttctgagtattttgcttggctttgcacctggcgaggtaacattgagagtagttaatctctagactggaatccatctggaagaccactcaataacttgtgattagctggacctggtgatgcaagcctggagtcccagttacccggaggctgaggtgggaatatcgcttgagaccaggagtttgaggctacagtgagctgtgattgtaccactgcactccagcctgggtgacagtgcaagacctcatctcttaaaaaaaacaaacaactcaaaaaacctcatcattgagcacctatgatgtgccagcaactgtactcagtggtggggacttgacgacaaacaaac

SEQ ID NO: 130362 - DNA, 700 bp, Homo sapiens
cgctcttgttacccagtctggagtgcaatggtgtgatctcagctcactgcaacctccgcctcccgggttcaagcgattcttctgcctcagcctcccgagtagctgtgattacaggcatgcaccagcacgcttggctgatttttgtatttttagtagagataggttttgttatgttggccagcctggtctcaaactcctaacctcaggtaatccgcccacctcagccttccaggtgctgggattacaggcatgagccaccgtgcccagccaataagaatttttcctaatgtctcacttgcgtgtcatcctcgctatctagatgatagcgcagttgctatcagtaaagacttgtatttagttatgtatactcggctcctaaaacagtgtctgacacatagtagttattttataaatcttggttgtatgaagaccatttaagagaagaccagtttaattatccactcagttctgtggtggagcctgacaacaagttagggaaaaaagaactgtggtaacaaggaagccagagctttatgctaccagcttccttcaaaagtcttagctaaagtggagctgctaagaagtaagatgtttgcttcagtagtatggccagggcaaatagcagtatatatcacatatttattttaaagtttttcataagctattattttatttaatcttatcgagattgcggtgtttg

SEQ ID NO: 130363 - DNA, 158 bp, Homo sapiens
agaatgaaactctgtctcaaaaacaaaaacaaaaaaaaccctttgaaatcctgaaaaggatatgctgaggaagcagctttaattattatcctgacaaagctccaagaactagtagaaaattgaattctaggagttcgagaccagcctggccaacatgg

SEQ ID NO: 130364 - DNA, 372 bp, Homo sapiens
cacaggcctatgttatctcatcaactagctcagggccatctgagctggattaaatcctgagatgagtagcttctcaccccctggggataaaatctctgcccttcactactggtctggcctgaagatgtttgggagcagtggaaagagcagagctagagatcagaaagaacatcacctgctctcttgtcaccatgggcaagaacttaccctccccgggccttctttctgcatctgtaaaatggggattttgtttcttttccagctgtatgttgtgagctgtcaaaagagagcaagtctgcagcagcagcttggcacacatttgacactcaaaaacaaagacaaagaaagctgttattattaaggttctctgtc

SEQ ID NO: 130365 - DNA, 260 bp, Homo sapiens
tcaaaccatagtgctctgccagtgcctaagtgcctttatgtccctgtaacaggctgatgtccagttccacttactcctagcaaacaggatcccaatttctagaatgacagatacatccctatctcaagcttgccccacctaggtctacttcctcttattttcccacccccacttccctacagccccacaacagtatatgtattttgggtaaagtagacagatactcaaataggagtcagaagaccttggttctacctcta

SEQ ID NO: 130366 - DNA, 185 bp, Homo sapiens
gctgcagggtctggggctgcagggacagagaggacgcaggacccaagagacatttatttggaactgaccactgtgggaaatgacttagagctttctggcttggcctaccaggaagaggggaagacagatgggaatgcaggttacatggtgctagagactgaactgcgtccccctggattcatgta

SEQ ID NO: 130367 - DNA, 418 bp, Homo sapiens
gggaggcgtggcagatgcctgggagcaaagtcctcgagaagaggcctccttgaggacaggagtcatttgcgattggaatgatgatggagaatgggggtgcagaagcttctgggtttgtgacttggcagtggtgggtgaaggcgttcctggaagggttattagatccagagaagggaggagagctgtgtgggtgagaactgggaaaggaagatttacagacagagaatctgaggactgagagagttggctcatggagcaggaaagcgagtgtaccagggagacggtgagacccacggcccaggcctcttggccttctgcctggctcctgctcggctgcgcagatggctgtgttctcagaggctacatctcatgcctgcgttgtcttcctctccccaggacctttattgggcttgaggtc

SEQ ID NO: 130368 - DNA, 370 bp, Homo sapiens
tctcccaccatgccctacaccctatctccaacactggggattacatttcaacatgaaatttgggtggggacaaatatccaaactatatcaacaatctacttaaatgttaattttgagttacactagaaaaggaactctgctggccgggcgtggtggctcacacctgtaatcccagcactttgggaggccgacacgggtggatcacgaggtcaggagatcgagaccatcctggccaacacggtgaaaccccgtctctactaaaaatgcacaaaattagccagccgtggtggcgggcgcctgtagtcccagctactcagaactaataatttcctctaataatttagcatggtcataggatacagtagggaga

SEQ ID NO: 130369 - DNA, 365 bp, Homo sapiens
tgctaacgggcgggcagaagccggccaggtgaaaagaatggggcagaaactgggggacagaggaggaaagggaggagaaacatgtggatgggggtacagctgcctcccagcaagtcagagcacagggtccccccagcacttcctgggttactagggtgatggcaggtgaatacagaatagcagggccttggaatgtctgccgtattataaggttttttgtttttgtttttgtttttgtttgcaggtaaaatatcctctgcctagtcttcccaggatggagggtgttgcagattgaatggtctctcctccagattaatatgtagatgtcccaactcgcaataactcagaatgtgaggtttttggaa

SEQ ID NO: 130370 - DNA, 323 bp, Homo sapiens
ccccaatagctgaagggtaaacggaagttgagagaatagaaaaagtgaggagtgttccgggcagaaggaatagcactggtaaaggtcccctggcttgagggaagttggcaaataggagcttacagaaaacctgcagggctggatcacacagaatgcaggacagtgtggcacgagggagaatgctggcaagacaggcagggatcagaccgtgcaggggcttgcgggctgggtgaaggactttttttcagtcttaaataattgttaataaaaacaccaaataggaaacaacttaatgtctgtcagtttgttaagttatggtacat

SEQ ID NO: 130371 - DNA, 419 bp, Homo sapiens
agaaaaacaaaagcaggtagaaaaacaaaaaactccccccaagaagctgcaatcacaaaacagccctcacacagacttgcagtccaaagttgtactacctgggcgatcagaaaatactcagtgctcctactgatggcaggagaagggcaaattagttttcaaaacctcaaatctttggtttcggataacctagaagagttagacatgccagcaactccactcctagtttataccccacagaaattcttgctcatgtgttccaggagccatatgtaagaatgttcctgctggacgtggtggctcatgcctgtaatcccagcactttgggagcctgaggcaggcggatcacctgagttcaggagttcaagaccagagtgtgttgatcctttctgttgccctgttgccaagaaggccttggt

SEQ ID NO: 130372 - DNA, 349 bp, Homo sapiens
aatgtaacataagattatatcaggtagacttaacattaaaaaatttacttttacatcacaagacaaatctgcagccacaaggtggcaatgtgccatagacattgaacaaaatgttccataacagctactatttaatagtcctagtaaatgcactaagaatggatgcctaccctgtgaagcaatcaaacaagttagggtccattctacttacttattttctcttaattatgagtgacagctgcataaaatacaaatatttctcatttaaggttcatcagcatctgctacttatttttcacctgatgttaaattttttcagcttgtagaattacaattaattactctgggg

SEQ ID NO: 130373 - DNA, 451 bp, Homo sapiens
ggattgtcaggccaagggtggggttggggttcccacagaaggtaagaaactgagtgggacagaccatacccaggaacccagagagtctgggaacagtgttccaaccatgagccactgtgcatgtcatatgatgatatctattccacagtaggtattttagtcattacattcttaagaggaaacaccattggctggcttggaagctaatgtaaaatagatgcttcctaagtctgaaaggctaactattgagcctgttcagccaagctggaggtgctaccatctagcctgagcaactcctgcaattactcgaataatcccttagataaaaaatataggtctggctatgtcaacccacccatgtagagtaacagcactgctcttggcacagagctacacttggggcggtgtcccaggtaagataccacatagcactaaagtgaagaaggtagca

SEQ ID NO: 130374 - DNA, 440 bp, Homo sapiens
ctgctccaccctcaactgtcattggccaggtgtagggacccatatagtgttatatcaagattgttgccaatctagagttaccgaggcagacgggcagactgggagcaaggtctggactgcaaccttctgtgctgagcccagccttagggtggtcagggtggatgagcaaggagatcctggccccaggctggcctggcttcaagctagccaggaaggagaggaaaggaggcccaagaggcgttcgacctgcctgaggccatgtgtgggactctgtcctgcgttttgtcagcccaggctgctctcctaagctccgatgaagtctcttccctgggcctggtgctccacgtctccctgtctcttccctggggcctggggctgagtcaggcctgggggctggtgggcactgaggtgacaggtcagcagggctcgaggagatggtg

SEQ ID NO: 130375 - DNA, 647 bp, Homo sapiens
cctcaaggtgggccgaggggtcgcgcctccggtcctaggccgctcccgggtctccgcgctccctcctgtgggagaggcgggcgcacacacgccttccgggtctctccattttcgctgcagaagcgcagcagggaggtctagcttctctctccccgccttgccacgcctcgtgggccccggctctccccagcccagactctgagggcagctgagcctgccccgcgccccgcccgcaccctccacatcccacggcttggcttgtgcgtgttccctccccgccatctcacacccctctctccttgttgtctccctcccccgagcaatttcaattacaatatatacaccaacaagacaatgttcaagcagtaactactactaatcaacgcccataatcatacaaagcccccgcaccaataggatcctcccgaatcaacctgacccctctccttcataaattattcagcttcctacactattaaagtttaccacaacacaagcccatcatactctttcacgcaagaccaattcctacctccatcgtaaccccataaaacatcaccaagacctcaaccccgtgaccccatgcctcaggatactcctcaatagccatcgtgtagtatatccaaaagacaaccatcattccccct

SEQ ID NO: 130376 - DNA, 532 bp, Homo sapiens
ggccaacatctaaaacctttacttttctgaggagacaagctataaatctatacggatatttctacaacgagaattcactattacatatgaaccaatataatttgatgtcaaatattcacaattaggttgaaaaaatcccctacttggccgggcgcagtggctcatgcctgtaatcccagcactttgggaggccaaggcgggtggatcatgaggtcaagaaatcaagaccatcctggccaacatggtgaagccctgtctctactaaaaatacaaaaattaactgggcgtggtggcaggcgcctgtagtcccagctactcaggaggctgaggcaggagaatcacttgaacccaggaggcagaggttgcagtgagctgagatcgcgccactgcaccccagcctgacgacagagtgagactcagtctcaaaaaaaaaaaaaaaaaatcccctacttatgttaagagtaccaaaaatagggccaggaatgatggctcatgcctataattttggcactttgggaagccgaggtgggaa

SEQ ID NO: 130377 - DNA, 361 bp, Homo sapiens
agcagagattgaaaaggatgggtcaaaggatatctgtaggtacaaatttgagagatagtgccaaagagtttttcaaagtgattatacctgtttactctctaaccagcagatgtgtaagaacttcagttcttctactttgccaataccttgtacagtttaatcttctaaaattgtaattttcttcctcgtgtctattgatatctcattttggtttacatttttatttccttagtaactgagactgagcaccttttcatatgtcattgaccagtagcctatgttgtgaagtgccagttcaggttctttgcctggttttcttttgaatcatttgcttttttctcattgatttttaggaattatt

SEQ ID NO: 130378 - DNA, 810 bp, Homo sapiens
taaacatttatagttttttagtttaaatttctaaaaggaactctaaaccatgtataagtaacaaagcaaacagaacttgaaataattaccaagtaagcagttaccgagttactaaggtaacctaccaggcaagttaacattgtaagttaccagataggtgtttaaaatccatctctggccgagcacaatggctcacacctgtaatcccagcactttgggaggccgaggcaggtggatcatctgaggtcaggagttcgagactagcctggctaacatggtgaaacctcatctttactaaaaatacaaaaattagctgggtgtggtggcgagcacctgtagtcccagctactcgggagaatcgcttgaacccaggaggcagaggttgcagtgagccgagatcacgtcactgtgctctagcttggatgacagagcgagactctatctcaatcagtcagtcaatcagtcaatcaataacaaaatccatctctgctccatgagacatacatgctcttagaaaagtgaatttgccggccgggcgcggtggctgacgcctataatccgagcactttgggaggccaaggcgggtggatcccaaggtcaggagatcgagaccatcctggctaacacggtgaaaccccgtctctactaaaaaatacaaaaaattagccagtcgcggtggcgggcgcctgtagtcccagctactcgggaggctgaggcaggagaatgggtgaacccaggaggcagagcttgcagtgagccaagatcatgccgctgcactccagcctgggcgacagagtgagactccgtctc

SEQ ID NO: 130379 - DNA, 400 bp, Homo sapiens
ttcttcagttatttcaggcaagagggtaaatccagttccttacttcactccagctggaggtctcctcctcattattttatatacgttttgtggaagattaactttacaatttagtttttaggtaacagaatattcagacaggactgcgactccattcatggagtaattatcgtagctcagagatgaatattattactctctcccagagacggatgcagtgacttttgggactttgtgtgtctcttttctcaaggagagactaatagcatctttatttctatgaagaatagttgcattgtgttagatagaaaagaatattttattttattttattttattttattttattttattttattttattttattttattttatttttgagacagtctcactctgt

SEQ ID NO: 130380 - DNA, 417 bp, Homo sapiens
tttctccaccagtctctgggaggtggaggaggagggaagaagagcagagtgatctattgtaacatcgacatataaataatgccacttcatttagaacataaacgtggcgatggtcggttttggtttaacgtagctcttcaaaatagctcctctcttccttcacatgagtatctgggtgaaggtaggtgagcaggaaacagtcaagactatgttaagaatttgcatatggctaacaataccgtactgtgtatttgttaagatgaccgatctcatgttaagtgttcttaccacaataaaaacatccaaacaaataaataataaaagaatttgcctgctctatgaaacagtttgcaagctgttgctaggggcagccttatttatctgtatgtaaatttaagatgggggtctgcactggaa

SEQ ID NO: 130381 - DNA, 394 bp, Homo sapiens
tccaggaacagtagctcacggttgtaatcccaatgagactgaagtgggaggattgcttgaggctgggagttccacaccagcctaggcaacatacagagactccacctctacaaaaacagaaaaattaatgggtatggtggcgagcacctgtagtcccagctactcgggaggctgaggtggaaagtttcctagatcttgggtggtcaaggatgcagtgagccatgatcacactactgtgctccagtctgggtgacagaatgagatcctgtctccaaagaggggaggggaggggagggaaagcccacctctcactcaccacagcaagcgggaagccaactgcagagtcccatggtcagccatgatgctcagtgggtaagacagtattttgtaaagg

SEQ ID NO: 130382 - DNA, 299 bp, Homo sapiens
ccataaaagaacactgggccaaatgatgtgggatgcccctctcttccactatgaccaaggaaacctgtcagtgctacaaaaaggacctcaggagccacttttgcctttgcctgatgggaagaaaaagggaacggtggattagaagctcaccaaggctgtgattcagatgttcccatcctaaagtgatctgacttggctcagatttttataacattaaataagtaccagtaacaacttgtgtaagtcctgaaatgtttcgtattgccgcataatgaagtacacaaacttagtggcttcca

SEQ ID NO: 130383 - DNA, 744 bp, Homo sapiens
attctgagaagaggtatataggttttaccagactgtcagaggagtacatggcacaaaaaagctaaagaactcctggggtggtgggctcaagtcctgctcagtctcctagccgtggaactttagaatagcaacatctgagactcagttttgtcatctgcaaaatggtttaagatgagtgatgattttggtgaagtgggtgagaatctcagtcaagggatgacttcttcttcctctggttacattaaaaagtgtgacgccttctttaaagtactttgcttttaaattaatgaagtagaatcattaagaaatcacccgaaatcttcaaatctgtttatttgcatttgtcttctcagtcaacagcagtgttgtaaaatatactaaatttatatttaaatatatgtattaaatatataaagttacatacactaacatttttacctttttagttgttgcattttaaaatattttgtagtctctagttttctggtaaggagataacattgtattccttactcatacttttccctatgatataacatcttttgagttttttttttctttttgtttgattgtttttgtgatgtgtaaaaattcaggagtggagcagcagggaaggaagggactgccaaccaggcagttctggaacattccaggtgttttttctctagtctatcacttttccttttaatgaaaaattcatcactacagtcccaatatgagtaatcttcctatttatttttatgt

SEQ ID NO: 130384 - DNA, 372 bp, Homo sapiens
aatcctagtgaaacagattctgtgtccatcctcattttatggatgaagaaactgaagctcaggcaggttaattattgtcttagtccatttagcattgctataaaggaatacctgaggctgggtaatttctaaagaaaagaggccaatttggcttatgggtctttggctttacaagaagcatggcactggcatctgcatcaggtgagggcctcaggctgcttctactaatggtggaaagtgaaggggagccagcgtgtgtggagatcacatggcgagagaggaagcaaggtgtggaggcggtgccaggctctttttaacaatcagttctcccggtaatgaacagaggaagaacttacccttgagcgaaggcac

SEQ ID NO: 130385 - DNA, 661 bp, Homo sapiens
agatgttctgtggggaacaaaatagaaaccgacaaagctcaagtcacacagttctgaaaatgaaaggaagggcttcctctcttgaatacctgcagtatgctctgccgtcacaagcataaaatatatcatgatttacataagattttcttcttatatctaaaaatgaaacccttctaagttattctttcctggcgccctgtgaggtagcccactattacaacccagatgtgtgactttctcaaggcataaaggttcaacagcagcaaatatagcaaagttaaaaatccttgccatcaaagtcttcattctgtgccctgaattaggctttgcctctcttcatctaatatttggcacctcaaaagagacctgctgtaggtagccagaggtccagactgtctgcacctgcttccctcaatatagcaaactatttttcttaaatatctgggattcagaaaagccccaaatgaaattaattgtgggattttctgtgttttttcttattcctgtaggtatttataaagaaatacaaaccttatgttttgtgctcaagaacctttgattttcaagtcaattctgacagagcaactgacttaattacttgaatgtttatatactaagccacaaaaatgttttgtcccccaccctccccacctctctttgg

SEQ ID NO: 130386 - DNA, 489 bp, Homo sapiens
aggctgaggcaggataatcgcttgaactcgagaggtgtaggttgcagtgagccaagatagcgccgttgcactccagcctgagcaacaagagcgaaactccatctcaaaaaaaaaaaaaaaaaaaaaaaaaaagaagaagaagaagagcttggtctcctctaaaacagggaagatggatagtctccatggctctcaaagcatgttctatgttttggtctaaaaggcaagcaaccacaagatgtagaagctatgcttaatctatttttctaacatgtcctaaaacatagaaaatattttaaaaactaaggccagtatttaaaaatatatctgaagcagtgttttcaagattcgtatttcaaaatactctgagatattaagataattgtagtacaattctacaattaaatattctgcaagcattaaagcttatgaggcaacagtttattgacctgggaaaaagtttacaatatattgctaaatgaaaaagag

SEQ ID NO: 130387 - DNA, 245 bp, Homo sapiens
tggtccaggggtttgaatgagtgtggggagcaggcatcgactagagtagctggacagtgaggaaggcaaggtcatggagaacttgagcgtagatggctattctgaaaagtgtggctatgaaaaaggggaacagaggaaaggggcgggtgagaggcttgtttttgtacaggggtatgttaaagttggaaaagcttagacatgtttaaatggtgatgaaatgggtacgggaaaaagaggaacataag

SEQ ID NO: 130388 - DNA, 718 bp, Homo sapiens
tgcacttctccttcttgccatcatgtgaagaaggacgtgcttgctacccttccaccatgactgtaagtttcctgaggcctccccagccttgcagaactgtgagtcaattaaacttctttcctttataaattacccagtctcaggtatgtctttattagcaacatgagaacagactgatacaccgacatactctcttatctgtttctccattctcccctcctcttgctttccccaagcccaatcttaactgctccctaagagaaaaagcatacctctgagaaccttccagcacctccagcactgatccagtttcttagatctttgtttcaacttcagtgggagataaaggagagaaataatctctcaatggagagtgaaaaaacgagaagagaatacccaaagaataatctgatgtaaagatataactctaccatgctgttttcatattttgataaagacgctggaagaaagacataatttcctactaaaagagaaatgagaaagtgcaatgataagtgtagtgaagtcacagaaacaagtagggactgtggaggacacatgcctgtctaaagagggcagcagccatccagccagcctgggactgcagtgcggtaatgtgagcccagtgttcccagatctcctaattttttgagagatgccagaaatctggatttttatgtgaaagcatccaatttcataatgttggctcaggaaagtt

SEQ ID NO: 130389 - DNA, 347 bp, Homo sapiens
ctttgataaggggcagctctttatccctggtttgttggggtttgttgattcagtgactgggctcccacagaagccggggatttcgtggccacacggggcaggtacagctgacagatcagcttccctttcctgctccaccacgaatgactgcgaatcagaggccccctgcgctgcccaagttagtgcctggggtgagcgttgtcttatcctctcctgagttggtttgggggcttcaaggcctggccttagtagtccccttagggaagccctctgtacttcagcctctgaagctccccctttttaaatccccctggagccggacacctggccatatgttctgaggagct

SEQ ID NO: 130390 - DNA, 167 bp, Homo sapiens
tctaaaggagaatttattccactgcctcttgcaatgggcttttcttcctgaaaagtgttacctacaagtaaataggagaaataaagagataaagacagttctttaaaaagaaaagagcaagagaaaggaagccaaaaaaggaaagcaaccaggtcagcaggttgatt

SEQ ID NO: 130391 - DNA, 512 bp, Homo sapiens
tgagagacagagtctcgctctgtcgcccagactggagtaaagtggcacaatctcagctcactgcaacctccacctcccaggttcaagagattctcctgtctcagtttcctaagtagctaggactacaggtttgcgccactgtgcccggctgatttttgttattttttagtggagatgggttttcactatatgttggtcaggctggtctccaactcctgacctcaggtgatccacccacctcagcctcccaaagtgctaggattacaggtgtgagccaccatgcttggccttgaaaacaattttttaaaagaacaaatgtatgcataatatatagaaagcaaatgcaacacattgacaacaatcaaatctaggttaagagtatgtgtgactgttacattggtgttaaaatttttctgaggttttaacttttccaaaactaaaaaaagttgacagggaagaattttaatgctgacaccaatgtctgggaatgaacaatacatagtttataaaag

SEQ ID NO: 130392 - DNA, 505 bp, Homo sapiens
  misc_feature (176)..(176): n is a, c, g, or t
tcccaaacaccgcaatctgccttttcttctgccttctgtgataggttaaattttttctttctttaagacagggtgtagctctgtcaccgaggctggaattcaatggaacaatcatggctcactgcagccttgacctcctgggctcaagtcatcctccttaccttggcctcccagantagctgggaccacaggtgcccaccaccggtacccagcgaaatttaaatttttttttttttggtaaagacgaggtctccctatgtggcctaggcgggtcttaaactcgaaggctcaagtgatctgcctacctcatcctcaagggatcttcccacctcggcctcccaaagtgctgggattaccggtgtcagccaccgcccccggccataccaccttctctttatctattcatctgttgctggacactttgattgcttccaaatcttggctattgtgaacagtgctacaacaaacatgggagtgtggatacctgtttgatacacttacttcc

SEQ ID NO: 130393 - DNA, 422 bp, Homo sapiens
ggttaagtcaaaacattagacaaggtcataatgttaattatttgaatatgttaaactgctgaatatacatacgttggtgcaaaagtaattgcaatcttttgcaccaacttaatatatacacaagtgtatatatatttgtgtggtggtaggactaattacttaaataatttttctcaactttgcatatacttttttcttcctgcatttaatctagtttcatttggattatgtctagtttctgtggaagtagcttcataaataatttaaatgatctttgatttgagactgactcttaaaaatggaaattgcatttatctgggttagaattttatctaggattttaatttaatagctgttatttttactttcaaattcatattttaatacaattaaaagttgggttttttaatttggggacagac

SEQ ID NO: 130394 - DNA, 450 bp, Homo sapiens
gcatcaagaaccaatatagatttgttgaatgaacaaaaactgattttacgtcagcttgtgagcctcacagaaagccacttcaaaagaagagaatttggctgggtgcagtggctcatgcctgtaatctcagcatgttgggaggctgaggcatccaatcacttgaagtcaggagttcgagaccagcctggccaacatgatgaaaccccgtctctactaaaaaatacaaaaattagccggggtgatggtgggctctaagatatttaatacctaggaaatccaagagaatcaactgataaactgctttagtaggtcagcagagaatagacgtgtaatgttcattgtataacaggggtaggagagatatggagtctacttctaattagtaatgaaagtccacaataccctgagatagccttaaaagaagcgtcggggccgggtgcagtggctcat

SEQ ID NO: 130395 - DNA, 631 bp, Homo sapiens
tagagaattatatctgccctctaccaaatacacaggaataatctgagtaatgtttataactgtgatctgagaactttttgagtcttttgcaaatctgtaaacacagagtgagaatgagatatgacagtgtggtaaaagaggacttttgagatttattaatatttagaagtacaagggggaagaatacttttatagtatgattataatgttaaagatattcttcctttagttttataaaatgtggcttttgatcagtaagtggcaacttagaagaaaagtctatcctaagttgatttgctattccttgaccttaagaactatagaacactttattttctcctaagaccacttttttgtttttattttactccattcattaattcattcagcacataataacgaagtatgtacttggtggcaagcactgtggtaggacctggggatatgaagttgaagaagacctgggccatatctctaaaaaccttgtgaggggaaaccaagggggaaaaagtttctactattttaaataattagaatagattttattttatagttaaatttgaagaaaactacaattttagttagatttactatgccatctttactcatttgttcactcccattcgttcat

SEQ ID NO: 130396 - DNA, 201 bp, Homo sapiens
caccagttgatggacatttggattggctacagattggggttgttgaaaataaaggtgttatgaacatttttatacaagcctcgtgtaaatgtgtaaataaatgatttcatttattttaggtagagacctgggagtagaattgctgggtcaaatgctaacccgatgtttaagattttagaaactgaaactgtttttcaaagt

SEQ ID NO: 130397 - DNA, 154 bp, Homo sapiens
tctgcctgccttggcctcccagagtgctcagattacaggtgtgagccaccgtgcctggcctattatagatactttaaaacaagtgttactgaaatataattcacataccatacactttacttataacttttaacgcacatttttcacttaatat

SEQ ID NO: 130398 - DNA, 724 bp, Homo sapiens
aacctgtggtaaaacgattggctatgagcatttaatcctctttgaaatgaaatgaatactaaacaattctgggaattaggaaaaccaagagaatgtgaatgtataaatctaggcagtttcacaattataattaacaaaaatagggaaatgagggaggggaattagaagggtgcatgagaatgctaatgtcttcatcttttgttgaaggcaggatgtcagttggtaccgtctaaattaaaacatgtagttaacaaattattctagcctcttaattttttttcaaaattctcttttaaaaaaaatttaaagtgatcttctgagaaatacatctgcagttaaaaagtatttttaaggttcactttgttttttctattaattttaaattgagttaaacttaatgctcagtaaattaagattaataatcatacgagtttgtttttttaatgtgtatgtttctatcgtctgtatacccttctgtgtacttgtgtgtgggcacatgcacacacacacactcttctagattactgtctgatttgatcttctaatattgatgattatttctgttttggatttaagatagctttttcttctttttgctttcatttttatactattcttcattgttttaagtctctatactgagaatatcttattttcattaaagtaattctgactgtttaaaaaggtgaggggttggtaaaggagattagaagcaaacgtgcca

SEQ ID NO: 130399 - DNA, 463 bp, Homo sapiens
tccaaatagctgggattacaggtgcccgccacacgtctggctaatttttgaatttttttagtagagacggggtttctccatgttggccaggctggtctcgaactcctgacctcaggtaatccgcccgcctcggcctcccaaagtgctgggattacaggtgtgagccaccacgcccagccttgatttatatttttaaatgatcaccctggctgtcatgttgagaatgggcagtaggggtaagacagaagctgagtgcacagaaaggaggccgtggcaggaatccacgtgagtcagggggcctgcagcaggagggagcagtgcaggtgctgagaagtggttggctttggatctgacttgaaggtaaagctgatttgctgatagattggatgtggggtgtaagagaaagggaagactcaagggtgactgagttttctggccagcatagctgtaagaatggagcgtc

SEQ ID NO: 130400 - DNA, 428 bp, Homo sapiens
aatctaagtgctaaagtttgttgaattgagtggaaggaaaataaaggcccatagttatggtattaagtagacctcaattaaattgatattgctgtcatttgtatgttataaccatgattcaaatactggggaaagaattatatttcatgtaaaaagcttttacagatgttaagatgtagagtctatcctctaggcttaaaatagcttctttcataattttttaaacatatgcattttcattcaggacagcagggggcagctttattagcaatgttgatcagttaaacagtaagttatcgtaaacatcttgtactgcacattttaccctaatcgggtggagtcaacaaatatgtaagtgatatctctgtttatatattgtcaatagtatttatttgcttaataaagctcccgatgtggctggtaattgg

SEQ ID NO: 130401 - DNA, 615 bp, Homo sapiens
aggaggggaacaaaatagatgacccaaagcactgaaattcctatttaggtgaaaactcagtatgatcagggcactatgaccctaactactcttcatctcctcatctcacttaccaaatgaagatattgagagcactaacctgacagaagtttgaagaacaagaaaaaaactgagttatgcataatgtgtttcatatgattatctagctttttttattctttcttaaggagccagataaacacgtagttaacgaattatgatatgaagtaattcataatgtatgatcttgtcccttcctaaaatcccatagtacacattctctgtattcctctggggcccatctaccattttctaccagaaatttccatggtttatgaacttgcatcattgtctctatttgtcttcaatgttatctctggaggtattcacatattttggagtaaatccggatttaaatccagattttatatttattagctgtaaaactttgggcaaattactcaacctctctgagcacctagcaattttctattttataggattatatacaataatgtattgagatgtctagcatttagcaaattctgaattaaaattgaatttgaatgcatgagt

SEQ ID NO: 130402 - DNA, 622 bp, Homo sapiens
tgttctcaatgccactaacataactgctcactataaagtggttaattttagggtaggtgagtttcaccgaaataaattattcttaaaattgacatgcacgcataaacagtattctgaggaaggtgtgcaataatttccttgctgcagaattgaaagtgctgttagtgactaaaaacatatggtaaccagaaccttcacaccgtctccccaaccacccatcagcatcaacagttgggaaaactgatgaggtacaaacatatccagactttgtaattatccgtggaacatcacaagcatatacaatgccacatagtaatcaatctggttccctctgtttatgagtatttgctttacaaatactttctagttcaggtatttcccattcagcagcgacacacacaaatgcacatgacaagctggtggcctcctgtgcctcttcattaccctctcaggagcctgggtggttttattttcttagggcttctctaatactttgaaaacgtcaaataaaaagtaagtgactcaaatttctcccagaatttttacagcatttctgaagacaggtttatttacctatacggaattctgattacctaataagaaatgtatcaccacgcctaga

SEQ ID NO: 130403 - DNA, 295 bp, Homo sapiens
aggagggactatgtttatcttgttcacctttgaatccccagaacctattaaagtttttgaaactgagtaggtacaccataaatatttgtccaaataataaatgaataagtaggcgtagagaaacggtgggtgttcctgagtagtatgagcgggtgtagacatgagtgtgtgcatggcaggctgtgaggttctgtgtagattgcatagtatacctgtgtgtggagcagtggaacatgattgtgagggtgggttgactgtctaatatcagggaaagaggttagtctttttctattgg

SEQ ID NO: 130404 - DNA, 465 bp, Homo sapiens
tctttcctgcataatccctattcctaccaagtaaaacataaaatgcttttccgaatcaaatgctgaaacttgtttctctgagcccacagcaaatattctctgtgtttgtattcagagaaatgttatggacattccactgagtgagtatgctttaggtttttatagggcatttaagagtctaaaactagacagatctgataaaactattataaacaaatactggatccctaaaaaaagtttttaaatcaagcaaaagttaagttgattagaaattgtatattcacggtcatggattataggttactcaattttacaagtgttcaatatttttataaacttcattagaaatataatagttatctgccgggcgcagtggctcacgcttgtaatcccagcacttttggaggccgaggcgggtggatcacttgaggacaggagttcgagaccagcctggccaacacagtg

SEQ ID NO: 130405 - DNA, 547 bp, Homo sapiens
gatgaggcttagagttctcatttccctcctggttgatgaaacatcttccttgaacatctaattcagggattggagcaggaggtgggagggatggggaaggcccaggggttgttagcaacagcttactgccatgataaggcttggacaagaatcgtgagataaagcaaatttgtccaagactttcctcctcatagtcagataaatccttccataaactcacctctgaagtttccttatatttaccatcattcagtatcatccagtgcccatcttctccctctgtgcatattttacgttcgtatttccacatgacacccatttcaaagaaagaactatagtatcccggccctcccacaattctgccacaatcccaagtcaataaaggtttcttgggctcctcgccggcttctagaggtgatattaaagtaggagatgaaagtttccctaggaaccatgaccataagaatgtgtaatttttaaaaaaatcatggatacataacagttgtattaatacacatttatgggttacatgtgatattttgataca

SEQ ID NO: 130406 - DNA, 451 bp, Homo sapiens
tcattgtgagacattcacatgtctgactgagatactgctgatctgtagaattaattatagttaaatggaaaggtggcttttgctcatgaagaaagtcgttagtctcttgataaacatttttaattatgattaactttagtcttcctccaaatactttccattagaaaaggcattaatgttctggttcattagaaatagagcaatccttttatttttggtttgcagtccattttgttcttgaaagatattggtccacttttttaaaaaaaaattggtggatgttgtgttgtaaaaaacatataagtttccttttgcaagtgcatatcagttttttcaaaggtaacttacactttaattttgtgtgttgtgtttgcaagagaatgcttcttggtttattcatgttgacaactgaaaagccttagacctaattaaaagaatttccatgagcacc

SEQ ID NO: 130407 - DNA, 319 bp, Homo sapiens
ctatggaatcaggcagttctccaacacagaggcccccacctttcctaccctaggctgcctctttctttggagcaaagattcgaggtggaatgaaagagattatccaaagaaaggtcaggattacacccaacattatcccatataaccccctcccaaactccctcctacagagaaacatagaacactacagaaaaaaattgcaagtatagggaagtagaggacagagagatacagtaggactaaaaattaaacagctggtaaaacaaattatggtttgaaaaggaagataagtagactgaagatattaaatacacaggac

SEQ ID NO: 130408 - DNA, 204 bp, Homo sapiens
aataagcatgttccacctcaccacatttcctccagaatagggtccaagcgcatttctgtgaacatattttacagtcacccgcttccctaacataacacaccagcccacccaggcagtggagagacatcgttaggagcaaaaggctttgctgtcccagaagtctggggttacacccgtgctctcctattcacttgtatgcttgag

SEQ ID NO: 130409 - DNA, 461 bp, Homo sapiens
agcagacgcgaggattacagattccagagtaaagacggggtttcgccgtgttggccaggctggttacgaactcctgacctcaagcaacccacctgcctcagcctgtcaaaatgctaggattacagcggtgagccaccctgcccagccaggaatcttgaaatttaatgtttcttaggttattgattagaacaacaaaaacaggaataattcatacttgaccagagaaaaatagatttagatttcatttcttctatgaaactctgatttttctcttatcctttataaattttgatccattttctctagccatgttgaggtataattgacaaaattcgtatatattcaaggcatataatgtgatttgataaatgtgtacattgtaagttgattaacacaatcaaattaacatgtctttaaccacacagttaccattttgtgtgtgtagggaagactcttaagat

SEQ ID NO: 130410 - DNA, 552 bp, Homo sapiens
tttcacacctctacaaattgcttttgtgtgatacactgcaccacaggacacttatccaaagagctaatgtaaaaacctcattttgagaaacaaaagtagtgtcaatttatatgtcaagagaatgaatactgcattccaagttgatacaggatctgacatttcaaatccaacataaattatttggaagactcctgtctttttccctgatctctgtattaacagcttttgtgaccttgaatgcaaatgaagtacaatactaaggatgttcttcatcagtatgaattagaagttttttaatgtatgtttctgtgatcatcagcttattttccaacatttattttttatctccctaaatcagtttaaccagcagcatgttgcgaatgtgactcatgtcatctgtgcctgtggttaacattatgttgctgcaacaagtccacctgacagattttttgagcctaggaagttgtccatttcaattaacaggatgcccaggacatttccctggcagaataataaaagctcacactggttctcctcctctctgaaaaagaa

SEQ ID NO: 130411 - DNA, 325 bp, Homo sapiens
atttcagacaacagatgttttgagtttagatcatttgaacaaacttgcagtgagaactctgtcagtagagaataaactgggacagggggaccttcaggtaatctcctcgagagctcaaggggttccaggagacacctgaattacaccaaaccagagctgtctcacagatgtgataaaagctctaaacagtctgggtattgtcgctcactctgggagcctaggtgggaggactgcttgaagccaggagttcaagatcagcctgggtaataaagtaagactccatgcctacaaaaatgatttttcttttttttttttttgagatgga

SEQ ID NO: 130412 - DNA, 649 bp, Homo sapiens
gattcctatctagtagcatgtaattgaataaattccagtgcattaaagactcaaattttataaagtcataaaacctgtgtaaggcatattgatttaaagtgatcactttctccaacccagcaaatcagctgctaggattctttcctgtggaaatatgatcatatagggctgggcatggtggctcacacctgtaaatcccagcactttgggaggctgaggtgggtggattagttgaggtcaggagttcgagaccagcccagccaacatggtgaaaccccatctctatgaaaaatacaaaaattagccaggtgtgatggtgtgctcctgtagtcccagctacttgggaggctgaggcatgagaatcacttaaacccaggcggcggaggttgcagtgagctgagatcacaccactgcactccagcctgggtgacagaatgagactttgtttttttaaaaaaaggaatgtgaacattcataagattatatttattatataattttaagagcaaaaatttagaaccaatctatattaaatgtcctttaatagggaatgtttaaataaattctgtatagacatattatagaatacaatacagatgttaaaagagtaaaatagatcaatattaactgacaagtaaagatttccagg

SEQ ID NO: 130413 - DNA, 340 bp, Homo sapiens
ccttcaattgtcagagagtcattatatcataccacagtagaggctcttgttctcatagatgaagagatggcatgagaagttcaataacttactcagactgatctaccagaaaatagtggagcagtgtctggagtctaggttttcctcaagttcagtgattctcagccactctatacttgttacctctagggtagcatgaatcttttttgatcattttcaatttgggagataaacatgtaattttaggaaagatttttaggttgggatatttatacagtagtgctgtggaaatttttaacttcttttaaacatggttatattattaaaagtatctgaaatt

SEQ ID NO: 130414 - DNA, 457 bp, Homo sapiens
ctcttccggtccctccccggtctccctctgtctcttttcctcctagtctgccttttgctggctctctctggcttcccccacccatctctctccctctgtgccagttgtcagccctgccccaccttctctctcagctcatgagcttccacagtttcagctcgccccttgatgcactgatgactcccaaatctgtatctctagccttgacctctctccttaggcccagaccagaatttccagctgccagcaacttgctgttaattggatgaccaccaagcccctcaaactcaatgtgtctcaaaccatactcattatctgttctcataaacctgctccccaccccctatgcccagtaagcagcgtgtttcctagcttacttaacggcactaccgtcccctagcctggaaatttccgccttgtcatcttcaactccttctctcccctgccgcccatattc

SEQ ID NO: 130415 - DNA, 800 bp, Homo sapiens
ataagttgttgtaaccatttaaaaagtaactaaacaacatacatcaagaatcccaaatatggttataatgtttatttaacccagtaattcaagaagtgattctatgagaagacagatgcacatagattttttttatccagttgctgtttaccaatatttatagtgtaaacaaaaaaggaattgtgttgtatttatatatattataaaattatgcattatattatataaaatataatgcaatatgggaaaaacagctgatgatagaagaagtgaaagaacagaaccacaatctttatatattacactgtataaatcttgtatacatggaagagactggaatgagataagcaaaaagaatcatctccatattgtgataagacagattatttttgtgcattttaaaatttcccacattttatataatgagcctgtattacctttttaatcagaaaaagtaggcatatgtttttagaaaatacataacatttttcataaaataagttttacacacaatttagagttgatatataagtactgtttttactcttgattttcctgtttctattttcttaaaaatatcattttagcttccgtgcttttttggtaatctgcttatcagtatatttgcaacatttcccccaggatatgaatatttttgtatcgactccttcactaatgggtaattttttctcctatcaacatgctatagtttacttaactatttccttattattctatatctattttctcaatttctgttcttacccacatggctgtagataagactttgaatatatttg

SEQ ID NO: 130416 - DNA, 420 bp, Homo sapiens
tgtgtgcgtgtgcatgagtgcatgtgtgtgcaagtgtgaacaagtgcatgtgtgcatgaatgtgtgcaagtgtgtgagcaagtgcatgtgagtgcacgaatgagttcgtgtgtgagcaagtgcgtgtgtgcaccagtgtgagtgcatgactgagtgtgcaagtgtaagtgtgcgtaagtgcgtgcgtgtgcatgagtgtgtgtgcaagtgagtgtgaacaagtgtgtgcgtgtgcatgagtgcatgtgtgtgcaagtgtgaacaagtgcattgtgtgcatgaatgtgtgcaagtgtgtgagcaagtgcatgtgagtgcacgaatgagttcgtgtgtgagcaagtgcgtgtgtgcaccagtgtgagtgcatgactgagtgtgcaagtgtaagtgtgcgtgagtgcgtgtgcactctcatga

SEQ ID NO: 130417 - DNA, 112 bp, Homo sapiens
ttcactggaattgactagaggataggtgtactgttactatccccctttataggtggggaaaccaaggcagaaaggtcacctagctgggaaacgatggggctaataagcagtg

SEQ ID NO: 130418 - DNA, 390 bp, Homo sapiens
  misc_feature (14)..(14): n is a, c, g, or t
cgaggctgaggcancaaatcgtctgagcgcagctgagacattgtgagacccatctctacaaaaaatacaaaaatgaactgggagtgggcttcgcagtactgtggtcccagccactcaggaggctgggagaatcacttgtgcctgggagattgaggctgcagtgagccattgatatgggtaggctttgtcttcccacccaaatctcatcatgaattgtaaaccccataatgcctatcatccccacgtgtcaaggtagagaccaggtggaggtaattgaattatgggggcagttacccccatgctgttctcatgatactgagttctcacaagatctgatggttttataaggggctttttcctctttgctcagcacttctccttcctgccacc

SEQ ID NO: 130419 - DNA, 256 bp, Homo sapiens
aagattatccaatcaaagtattccttagatgtttcaatatcagtaaatgatcgtgtactttgtgtttgaacacctccaatagttgtgaatctatctctttaaaggagctcattctgtgtggaaatatcttacagagttaacttttcttcatttgtagttgaaatcatctcattgacacctatctcatgctgcgccttagctcagcgtgtgtgtatcttaataatctttgccaaaatcaaagcaagtttcactctgg

SEQ ID NO: 130420 - DNA, 616 bp, Homo sapiens
tggaaaaacaatttgcgcaaggctcaagaagatgagatggtcttataaacagtaattgaaatatgtatattttttaaaagtctgtttcaaatttcaaaccttattttaaaaactatgtgaaagcctcttgtgaaactcaactgaagtaggcatggctgagtccagaggagcagtgtggaggattagaaaaataaacaggcaggagtcagacagtcctggattcaaatcccacttctaggccttagagaaataatataatagtaggggataataatattcaccctgaagagtgctgtagggatcatcaatatttcatataaagcatgtcatatgggcagtgctcaatgaatggcaatgcttttgcccaggtatagaacttcttagtataaaagttttgtctttcagaaaattaacaaagatattcaggaccggaattcagctctggatcaagtagacctgatagatatctacagaactttctatcccaaaacaacagaatgtacatttttctcattgccacatgtcacttactctaaaatcgatcacataatcggaagtaaaacactcctcagtaaatgcaaaagaactgaaatcataacaaacagtctctcagacc

SEQ ID NO: 130421 - DNA, 429 bp, Homo sapiens
caagaaaaataaattgatatttaaaatgtatgtagcatagtgcttggtataaagtcagtgtccaatagactgtagatgctattgtgatcactgtaattattattattttttattttactttaacttccaggatacatgtacagaatgtgcaggtttgttacataggtctacatgtgccatggtggtttgccacacctatcaaccaatcatctaggttttaagccctgcatgcattaggtatttgtcctaatgctctccctccctttgcccctcacccctcaacaggccccggtgtgtgatgttcccttccctgtgtccatgtgatcactgcaattactactgttattatgtaaaattttctgtgcttcttagacatctacgtttggatgtcaggtagactgaagtttagaggagaccctgggcctggtg

SEQ ID NO: 130422 - DNA, 753 bp, Homo sapiens
aatgtggccgggtgcggtggctcacgcctgtaatcccagcactttgggaggccgaggcaggcagatcatgaggtcaagagatggagaccatcctggccaacatggtgaaaccctgtctctactaaaaatacaaaaattagctgggcatggtggtgtgcatctgtagtcccaggtacttgagaggctgaggcgggagaatcgcttgagacaaggaggcggaggttgctgtgagccaagatcgcgccactgcactccagcctggcaacagagcaagactccgtctcaaaaagataaataaataaataacatataaaaggtaagctgatatataaaatgtgatcgtttgtaaaacataccagttgtaaatggtaatagaaaaaaatcactagtttcttggctcttaacataccacagagtttttgtttttttttttcctcattcacagcgaagagtaatgacctgcaaagtgataggctttaggtaaaaaagtaaatgtccatttttcattttctgacatcgtctgaaatactagaggataaatgaaacatgttttaaaataatcccgagaaaaaaggccctttgagttgttgcttaaaatggcatctactgaacagtcagaaaacatgaattttttatgtaacaggtgccatgctagctgggcccaggggagacaatgatgaataaaagtaattgccttctaaagcatatcaaatccgtgtaaacacggccataggccattggatgagtgtcaca

SEQ ID NO: 130423 - DNA, 346 bp, Homo sapiens
ctaaggatttttttgttataatagcattgtagccatgttcttaaaagagctcttattttttacaggtaatatcaaaatatttaagaatgaaatgatgcaatgcctttgatttgctttatttatttatttttttttgagatgggagtctcactctatcgcacaggcttgagtgcagtggcacaatctcagctcatagcaacctccacctcctgcgttacagtgattctcctgcctcagcctccccagtagcttggattgcaggcgcccgccaccgcactcggctaatttttgtatttttagtagagacagggttttaccatgttggctaggctggtctcgaactcct

SEQ ID NO: 130424 - DNA, 471 bp, Homo sapiens
tggtgcgaggtggtttatgcctgtaatcccaacagtttggaaggcagaggtgggcggactgcttgaggccagaagttcaagaccagcctgggcaacatagcataaccctgtctctatttgaagaaaaagaaaacataaatctgtttctggacataaaggattattagaatcaaagctacctattgaacaagttatgcaacacacacccaaatactatttgctaccagaaagttataaatgggtatatacctgcgtcacattgccaacaatataggcctacctgattactgcactcacacttgtctgtggtcaaagggctaattactatctaggcatttccccctttgcttttaattcaggccagagttcattttcaccactcagcacacttttcatttctttccctctccttacagaattgggctgcacatggaagtaaggtcaatttaatactttagcacttggtatacc

SEQ ID NO: 130425 - DNA, 235 bp, Homo sapiens
gcagtcttgctgatccttctgcaaataagacccctctgaggccaaccatgtacgtggaaaggagcatgtgctcctaagttttccaggaggggaaaggaccaagttcatgtgggacccagctcagagcacagctcacccccggggcagggcagctcatgctaccattcgagcgagtggtggcctcagtgccagactcagcccagcgccaggaacccaggaatccctctcctcctgc

SEQ ID NO: 130426 - DNA, 501 bp, Homo sapiens
gggtgggacgacggcaggtgtactgggattgacctggtctgaccatcaaaatgaaggaggaagagaaagatgggtgaggaaagcaggaataggggcagtcacaggaagctgcttgcaggaaggaagatgatgagacctgagcatgtgattccttttcctgcagacagaagcggccagggtgaggagggagataatgcaagagcaatggcagcagaacagcactcatgctgtgaatggcagtgcagtgtcaagcacactgaataccatatcccttatgtattagtccgttctcgcactgttacaaagaaatgcctgagtctgggtaatttaagaagaaaagaggtttaattggctcatggttctgcaagctgtacaagaagcatgacagcttctgctcggcttctgaggaggcctcagggagctttcaatcatggtggatggcagagtgggagcaagcatctcacatggtcagagcaggaggaagagagaaaggtgggaggt

SEQ ID NO: 130427 - DNA, 648 bp, Homo sapiens
tctttattatttccttttttctcctaattttgggtttgctttgttcttgcttttccagttccttgagatgcattgttagattgttaatttttaatctttctactttttcaatgtaagcatttattgatataaatgtccctcttattactgcttttgatatatcccacagattttgctatgttgtgttcgatttttatttgtttcaagaaatttgaaaatttccatgttagtttctttgttgacccaatggtcattcaagatcatgttgtttaatttccatgtacttaaactggactttacaccagtttaagtttttcttggtgttggtttctagttttattccattgtgctctgagaagatgcttgataggattttgatttttaaaaatttgttggctgggcgcagtgtctcacgcctgtaatcccagcactttgggagaccaagatgggtggatcacaaggccaggagatagagaccatcctggctaacagggtgaaaccctgtctctactaaaaatacaaaaaaaaaaaaaaaattatccgggcatggtggcgcatgcctgtaatcccagctactcaggaggccgaggcaggagaattgcttgtacccaggaggcggaggttgcagtgaatctcaaaaaaaaaaaa

SEQ ID NO: 130428 - DNA, 323 bp, Homo sapiens
tttaaagaagagctatcttggaccagttatgctccataaatacagcatataagcattaaacttaaaagagtctagtatctgaaacagttattgtctactcaccaaaagaactggaatgattataggcagcccaggccaggtatgtaatgtgggtgttaagactctgtttacaaaaaccaatgtgggaaggcatggaatttccagactgagtgctacttgtgtatacagttcctcaatttgtattctataggaacccaaagtttgtttgtttgctgcgggagcaaatctcgcaatgcagcaaagctggacattccatagctcct

SEQ ID NO: 130429 - DNA, 243 bp, Homo sapiens
tttagtagagcatcagtcaccatccatatctgggaacaatgattgtaagaaacagaaacccatttgcatgagcttgaggacaagaaacacaccttatctctaacaggcaaactcatgggcacaagaaacaaatgagaggccatgagagaatggaaactgcagttacagaaaccaaaattcctctttcttgctctcagaagcccatggtctctttttttttttctttttttcttcttttttttt

SEQ ID NO: 130430 - DNA, 517 bp, Homo sapiens
ctcctctctcggcctgctcagctcttcccacaattacctaccctcatcctctgcggatattactcaaataccctcttctcaagaatatcatgtctaaaattgcagctccctgacctgtccacattgcctctgccttatatttcttctttttttttgagacggagtttcgctcttgttgcccaggctggagtgcaatggcgcaatcttggctcaccacaacctctgcctcccaggttcaagcaattctcctgcctcagcctcccgagtagctgggattacaggcatgcaccaccatgcctggttaattttatatttttagtagagacagggtttctccatgttgaggctggtctcgaactcctgacctcaggtgatctgcccacctcgtcctcccaaagtgctgggattacaggagtgagccaccgtgcttggccttattgtctcattctagaattcactaaggatacggggtcctctagagtctagctgagggaatgacagcttgtaagtgaccgtg

SEQ ID NO: 130431 - DNA, 193 bp, Homo sapiens
tcggtaccgagatagtagtgagggactcaggttccacagcttgtgatgggagaaacaggtgaatgtctcaggctccagatcagtgaacacagcggggatttggctgggacttcagtgttgcgacttggctcacagggtcactgtggcccttccacagaccaggattttcccttccctctgacaatgtcacctg

SEQ ID NO: 130432 - DNA, 407 bp, Homo sapiens
gaagtaatggtcttctcagctttttatatactaagcagaaactaaaaatgtaggtgtatgttctcaaattcaggatgtggttactatttctgtcagatatattgaatctttacagattgtactggagttgattttgagcacatctttcataatttttttaaactgaaagggagatagaattttctattaaatacttcttgagactttgaaatagaagttatcttgaatttaaagtgtctcacacgtccctgtgaagagaccaccaaacaggctttgtgtgagcaacaaggctgtttatttcacctgggtgcaggcaggctgagtccaaaatgcgagtcagtaaaaagtgatgggattatcattagttcttataggttttgggataggcggtggagttaggagcaatg

SEQ ID NO: 130433 - DNA, 208 bp, Homo sapiens
aatcaatattcaaaggtctaatggctatgaatgattcaaatatgataaaaaatatttactcaaattctagaagctctgtgaatcacaagtagaaaaaaatggaaagaaaataaaacttagcacatcatagtaaaactgatgacaaccataagaagaaaatcttaaaagcagccaggaggtggaatgggggaaagtagccaagaaaaat

SEQ ID NO: 130434 - DNA, 574 bp, Homo sapiens
gttaatattttgctgtggcatagaataggaagctatgcttgtgacctgtagggatctagtttaatttgtaatattggccaaagtgtttttttgaaacggtcacttggattgaaagaaataagcttcatcttccagtgcatatgaacattagaaattgcttaatttgacactgaagaccccccctctatcattcactttatcttttcattctcttcttgattaccaactttgttctaaatgtaacacatcgtatggttgcttaactgatgcctgccctttcttctcttttcctgctttgttaagatatttattgagcacctgtcacagacactggggatacagtagtgaataaaacagacagagacccttacctggaggataatactgctgagaaaaataaagcaagggggtttggatatcagagtatgtgaaagggggaacagttttcaaattgggtggtccggaaagttcttgaggaaggtgacatttgcgaaaagatctgaaggaggtgggcattagggccatgttggtctcccatctgtctaaatcataaagtcataattaatatggtaat

SEQ ID NO: 130435 - DNA, 712 bp, Homo sapiens
cggattgcttgagctcaggagtttgagaccagcctaggcaacatggtgagaccctatctctatgaaaaaagaaattaattaaatttaaaaaaaaaaaagaatgggactctagagtcaaaccatctcaattctctacctgtgtgatctcaggaagttacttcatctttctatatctcaatttcctcatctacaaaatagggataaaaatagtactttatatgaaatacacttatccctggtacataataataaatgttagctataaataatgatatttttcttgctttggcagtacatatattaaaattggaatgataaagagaagattagcatggccccgtgcaaggatgacacacaaatttatgaagctttccactttaaaccaattttttaaaagaagatattatcacttgtttatccatacccagttctgtcaaatcctgacattttgttatatttacattgaatcattttatatcctccctcttattgatgggcatttaagttgctgatttttcactattacagtgattcagttagttccatgcctagaatggaactgctaaatcatagaggagctgtgtcttcaacttcactatttccaaattgttctctaaaaaagttataccaatttctattcccaccagcagttagagtttctattgtctgacatcttctgtaatacttgaaattgcctgacttcataatttgg

SEQ ID NO: 130436 - DNA, 345 bp, Homo sapiens
ctggatttgaagcagagtcctccctgctcccctcgataatagggtcattcactggccgatggcccttgatgccagttggtctgagtggtgtgaggggcccagcatggccaggcggccgtcccagcttccagtttagcagaacccctgctgcctcctgctggggacccattctcccatgggaatttaaagcctctaatccagagcctggagtattggtgaggagcagcagaggtgcggtgagcaggcactggatgagggaggggcctttgcgtgttttcccgggctccgggcttgttcttctggctgggggagaggcagcacatccagcagtgtcactggcacccg

SEQ ID NO: 130437 - DNA, 510 bp, Homo sapiens
cacaggtgtgaagaggcaacccaccccttcagtccaggatctcctagaagcagttgccaagacaggatgtgcaggaaatatattagaagtgtctgtgacaggaaatggggctgggagcacaggtgtgatgctgcgtaagggaaggaggaaggaaggtttggtgggtggcagcgtcgtcttagattgcaaatgcaattctggggaaaattcagcaagcctgttgggggctactccagccgaagttacccttcttcagaggggtcctcaggctcccaggaccagcctgccttcacatccttgatacagggatgctaagtcatgactggatgcagcccatgggcagcacagcatctgaatgctaggaggggccctcagccaatcagctctcttccctgggtatggtggcttatgcctgtaatcttagcactttgggaggctgaggcaggtggatcacttgagtccaggagttcaagaccagtctgggcaacacagtgagaccctgtttctaaa

SEQ ID NO: 130438 - DNA, 508 bp, Homo sapiens
gctatgtaactcacttgttatctctttttctccccacattagaatgtaagctctatgagggcaggaactttgcccatttggtttgccactgcattcccagctagaacagtgctggcacgagacgctcaataaacttgagtgaatgaatgaataaaaattttcaaattatgtcaatatacagcaaattcatcaccatcatataagcactctgctctcagatcatgccccagcattttcttctctttgatatttccaactattctctcttcttgatttccataaacatgttcaaaatcctcccatgaggccgggcgtggtggctcacgcctgtaatcccagcactttgggaggccgaggcgggcggatcacgaggtcaggagatcaagaccatcctggctaacacggtgaaaccccgtctctactaaaatacaaaaaaaaaattagccgggcgaggtggcgggcgcctgtagtcccagctactcaggaggctgaggcaggagaatggcgt

SEQ ID NO: 130439 - DNA, 330 bp, Homo sapiens
cgagtggttctcaagcgtgtatttccatcagtgtcaattaactgtggaacttaaagttgatatccctgggtctccagctgcaattctgattcagcagatctagggtggagtttagactttgtaaaatttttaaaagctccgcaggtgattcttaaacataatcagagttgagaatttctaccctagatagatttaaattgtcaggcttaagaaggaaaccgaggatttggggagttgctagagactgtttgatcccttacagtttagggacttagtataatgggcactctgtcttccacctggctcccaatctttgtgtgtaggtgtaac

SEQ ID NO: 130440 - DNA, 341 bp, Homo sapiens
ctttaccttcttttttcttttttgccatttagtcatgtagtcatgacttgagtattccaggtgctattatatattacttcttttgagaaaatacatgtatttaactgtctaacatgagcgtttccttagtatcaaagtattaatattgcatatagtaacattttaacttgtgtcaggatgccatagaatattgaaacattatgaaataagaaggacttctgagtcctttaccttgtgtcctaagaaaggtaagaaaatagccttaatttggccgggagaggtagctcatgcctgtaatcccagcactttgggaggccgaggtgggcagatcacctgaggtc

SEQ ID NO: 130441 - DNA, 438 bp, Homo sapiens
ttcatcttgtccataaagccttttctgatttgtccaacctttgtaatgatcagtttcttactcctcctgccttctattattggaacagagaacgttctgcttggataagctaatgctctgtaagccaagccttcccaacacttgctaccatcagccgaacctctttgtatccataggcaggcaatgcaatttttgttttatgcctgggaggaatattgtgattagaagcagggtttatgaagaggatagaggatgggaagaataacttgattcctcatttttatttttttgcctcttttctaagattgtagggaattgagttttataagatttggtgtaactatttgacttacctggatataagctgatctgctttgggccccatataattgcatgtgacaccaaatgggaaaagaggatgaatattctccttcccct

SEQ ID NO: 130442 - DNA, 643 bp, Homo sapiens
taaaatcaggattctaattaggattacatgatattcctgcattaattgtgagaaaactgataatttagttacaagacttgccatgaggttacatggggtatctttctgtattcagattctatgtttttagtggtttatggttttcttcacataggacctataccttctttattaaaattatccctatgaattttgttttgtcagtgtgaatagaacgtaggttttcttcatttcagaattctgtgtagttgtcactaataaagaaaagctatagacttttctaagtttattgagacacctaattaatttctttcatttggtactttggtttaactagggtttctttcattttctaggcaaaatagcaaaaatgcaatttgtaatttttcagtgtttatgtttactgccttagatgaaattcccataagtactgtaatctactttgattacataaggctacatcttgatgagttttaataaatatatgcacttgtataaatactatcacaatcaaggccaggtgtggtggctcacggctgtaatcccagcagtttgggaggctgaggcaggaagattgcttgagcccaagagttccagacaagcttgggcaacatagtgggatctcgtctctacaaaaaactat

SEQ ID NO: 130443 - DNA, 366 bp, Homo sapiens
aaatacagttatagtggaacacagccacaccccttcatttgcatatcgattatggctgtgtttgtgctacaacgacacagatgattagtgacagaaactatatgggtggcaaagcctgaaatatttaatgtttgcccctttactggaaaaggtttccgatccttgttctaggtattgagaatgaaacaatgaacacaataaggtgatattcctacttttattatagtcaaggtaagacagacacgacacatataaataaatatgtacttacctatacacatatgcacaaaacatctgtggtaataaatgtaaagaaaaaaatacagaaatgtaagacagagagaaagcaggaatggggggagagga

SEQ ID NO: 130444 - DNA, 334 bp, Homo sapiens
ggaaactgagaaacagagaggttaagtaacttgcccaaagtcacagctaataaatggcagagcagcaatttgaacccaaatctgtctgattccacagcccacacccttaacctttatgccgatggttggaaaaagctaccactctgtacattaaagctaaatgctacatgtagagacagaggatagaccactaacctcagtggacttccactgccaaacggacctcccagttgttgaggtaatgtcaaggcctggaattagcatgtggaacgattgtacttttgaaagaaggtataattgtctggtgatttgccactaaaaactaataaaaact

SEQ ID NO: 130445 - DNA, 471 bp, Homo sapiens
cctctgcctcccgggttcaagtgattctcctgcctcagcctcctgagtagttggaattacaggcatgcgccaccacacccagctaattttgtatttttagtagagacggggtttctccatgttggtcaggctggtctcgaactcctgacctcaggtgatctgcccaccttggcctcccaaagtgctgggattacaggtgtgagccaccgtgcccagccagaatctgtcctttaacaagatccaaagggaatgtacattaacgttggagaagcactgtactagactaccctctttttcttttttgtttttttgagacagagtctcgctggagtgcagtggcaccatctcggctcactgtaacctcctcagcctcccaggttcaagcaattctcatgcctcagcctccagtagctaggattacaggtgtgcgccaccgtgcccagataagttttttttgtatttttagtagag

SEQ ID NO: 130446 - DNA, 348 bp, Homo sapiens
cacaccccaagtgacacacagtcttgcatctgaggaatgggctccctgtccctcactctgcctgtggctattgctaggtaaagggagagggtagatggggacttttaaaaaagggaactaagagcccgtgacacatcctgaaggatcgcgtccatctggctcagcaaagaaggcaggccgagggctcagagcgtgactcagacatgtctccttgaaccagctctgctcacaagcttctggaaataaccccatggccaggcttttgctgtactttgagaatggctagagatggggtctgagtgtctctgaggtcaggataatcagtgtgtacatagaagtgggagtctt

SEQ ID NO: 130447 - DNA, 682 bp, Homo sapiens
tggctgacaaagctaacatgagccttcttcctgttccatacacacaaaataaatgttggacaaaatatactttttaaaaaattaagattcatcccaaaagtaaagaaaggaagccccccgggcttaaggaatgcagatataagttgtaagaaatgcaaagccaagctatgagttcagaagctggtgtcatgatgactccaggtagggggtcaggtggggtgggatacaagtagagagaaagcctgagcaaggaaaaagtgaaagataaagtgataggaataaaccccaaagcatcagaaattacagtaaatataatttgcacattaagattcagtgatagtttttatttttattttcatttttgttgttgagatacaatcttactgtcacccaggctggagtgcagtggcatgatttcagctcactgcagccacaacctccagggctcaagcaatcctcccactgcagcctcctgagtagtcaagaccacaagtgcatgccactatgcccagttaaattttttgtatttttggtagagatggggtttcaccatgctgcccaggctagtcttgaattcctgagctcaagggatctgctcaccttggcctcccaaattgctgggattacaggcgtgtgccaccatgcctggccctgtgataggatatattaaacaaaattcagt

SEQ ID NO: 130448 - DNA, 367 bp, Homo sapiens
cccaacccacctctgcctttgccagggactacaggaccgtgatctacatacaaagaaaagcccagggatgggggtttcaaggggagccaggggaagagttccaggcaggaagcctctccttgacccaggaatacaaaccgggttggaactgctgccttcaggtcaaagctgccaaaacaaagttaaaggtgtaaaaacaaagtgagaaggtcacacagctatgggcctctctctctggaacccaggggtgggggtgaggcgtgtgtgtgagaaagacttgactaaaaagcacttttcaaccattttaaccgcagatgtccctccactgcgatgaaagagcgtgagaagggtgggtgcccagcattcg

SEQ ID NO: 130449 - DNA, 320 bp, Homo sapiens
aaaaccaggtctgggcagacgcatccaggaggagtaaacataatcacatgtgacagccttctcaatgccttctagacttcttgatggctcagcactggagagtcttttctgagagaccatcatcaggaagggtcaccgagccaacaatcatcaggatccatcagcagttagtcaaactccacagacttctgggggatggttcaagctagagcagagttcagataagcttacctttgcttagtctctgtaagcctccatttcctcatgggcagaatgggagtcacaatagtatctgcttcatagggttgctatgtaaggtt

SEQ ID NO: 130450 - DNA, 993 bp, Homo sapiens
tagaatgcagcttgagatctagtgtctgatcaaagaacttgaacttgacctggagggctctggggagccatggaaggtgctggataaaggaagggacagtcatatatattttagagatgactgtggaaggctgcctggaaggagtgaacaagagccaggagaccagggagggagtttgtggggcaggtctggagatggcaagggagggatcctgcttggatgaaaggtcttcagggactgtctcaggttacactcaggtgccctcagagctactgtgttcagggttcttgtctccaggatgaaaataaggaggagttgtcagacaaggacatatacatggaggctggcatcttcatgagtgccaatcgtggtcctggtgtggactactgtgggagcaggggtctctccatccagggacatggtggatggaccctacatcactccattctgcccttcctttccctcccattctcctgagggactcaatgcatgggcactgtccaacctctggtgctgaagcagccaagagacccaagcctgccttgctgccacttaggatatgacagcacagccagtggcctctactggatcctggtacccctcagaagacacccagacactgggagtgctgccacctcgtggtgcaagagttctgagggacggcaattctgaagacattgaatgccgttttgcacaccctggtcagaatgaaacattccttgggaactcgggccgtgagaagcatccttcctgatcacctgactgtagaaacatccttatcgcaccctcccgggcaaaggcccaacagcctgactgcaggaacatccttgccatatcctgccgggcagcaagctctaccgcccacacccctccttcccagtcccatgatcaccccagcctgtgagaggcagttggtgctggcagtaagctggtttcctcctctgcagggttttgctagtaataaaggtgttgctgttgaagccgtcaaaagtc

SEQ ID NO: 130451 - DNA, 770 bp, Homo sapiens
taaattactaattctacttcaaagtgccacacagccttcatgtgataaaatgaagcaattggtaagtctaagcattgagaaaaaacattatttttcccagctccattgcaacagttgggacagtgttttctctgtgcctatagaaacctcagctagtgtgccgaggagtctggtccctttggggaatgtggcagtcaggttctggcagggacctcgaagtggctggtaatgtctttcattaccaccaccacgtgacctggtcttacgacctgttagcttccttcatcaggcatgagcaccaggatggcaggggcctcatctgtcctgttcctcctgtggcctgggtcctagcaccatgtctggtacagtgtaggtgctcaagggaagtttactttatagaactgtctacctgggagatgttgctgttagtctaacctgtaccattttgtaaacctgcagccccgttttgcacaccctggtcagaatgaaacattccttgggaactcgggccgtgagaagcatccttcctgatcacctgactgtagaaacatccttatcgcaccctcccgggcaaaggcccaacagcctgactgcaggaacatccttgccatatcctgccgggcagcaagctctaccgcccacacccctccttcccagtcccatgatcaccccagcctgtgagaggcagttggtgctggcagtaagctggtttcctcctctgcagggttttgctagtaataaaggtgttgctgttgaagccgtcaaaagtc

SEQ ID NO: 130452 - DNA, 894 bp, Homo sapiens
tttgtcatgtttcatctgatagcaaaaatatcagatcggctgcacagaaaaatggctcaaagtgcttaatgaccagaagaaatctgggagtagcaagaaggtgtggggctgggtatggtcactcctgctggatgtctagaaggtgaaaaccaaggacctaggaaaataccagatacagcctttccaccgtcatccagagcaggacaaacacgccaggtggtgtcaggagcccaggtctccagctggagggaatgtcaaccctgcagtgggagcccatcatgcatcctaggcacagatgctaacgtaggcaccgcaggaatcccagtgaatatattgccaccatcttggagctcagtgccctcatagtgtaacagcaccagcagatctgcctgtgcacagacttcctgtactacctcactcctgaggggagatgcttctgcagggcctgcgacctggtgcacaactttagacaccatcatcctggagcggcactgcaccctcactagccagggtgttgatgacttcctcaatgccaaggccacgttcaagattttcgacttcagtgatgcgtttgtgctgagcaagccgttttgcacaccctggtcagaatgaaacattccttgggaactcgggccgtgagaagcatccttcctgatcacctgactgtagaaacatccttatcgcaccctcccgggcaaaggcccaacagcctgactgcaggaacatccttgccatatcctgccgggcagcaagctctaccgcccacacccctccttcccagtcccatgatcaccccagcctgtgagaggcagttggtgctggcagtaagctggtttcctcctctgcagggttttgctagtaataaaggtgttgctgttgaagccgtcaaaagtc

SEQ ID NO: 130453 - DNA, 947 bp, Homo sapiens
tagaatgcagcttgagatctagtgtctgatcaaagaacttgaacttgacctggagggctctggggagccatggaaggtgctggataaaggaagggacagtcatatatattttagagatgactgtggaaggctgcctggaaggagtgaacaagagccaggagaccagggagggagtttgtggggcaggtctggagatggcaagggagggatcctgcttggatgaaaggtcttcagggactgtctcaggttacactcaggtgccctcagagctactgtgttcagggttcttgtctccaggatgaaaataaggaggagttgtcagacaaggacatatacatggaggctggcatcttcatgagtgccaatcgtggtcctggtgtggactactgtgggagcaggggtctctccatccagggacatggtggatggaccctacatcactccattctgcccttcctttccctcccattctcctgagggactcaatgcatgggcactgtccaacctctggtgctgaagcagccaagagacccaagcctgccttgctgccacttaggatatgacagcacagccagtggcctctactggatcctggtacccctcagaagacacccagacactgggagtgctgccacctcgtggtgcaagagttctgagggacggcaattctgaagacattgaatggtgggtgctgggcctcatggctgttccccagcccctctcattggctctgctccaggtggagaagggggatgatgtctctgtcagttctgctgttttagcctagaaggaaaagaagcagagcccagaagcagggcctggtacccagcctgcctaacaagggagaatttgtaggctttgtggacagaaagatctgggactccatgtcacccactaacttgctgagacattagtaaaatcagttttcttttctgaactatgtttct

SEQ ID NO: 130454 - DNA, 349 bp, Homo sapiens
ttctttacttatcggaaaaaagagtcttcggatactggccccgttttgcacaccctggtcagaatgaaacattccttgggaactcgggccgtgagaagcatccttcctgatcacctgactgtagaaacatccttatcgcaccctcccgggcaaaggcccaacagcctgactgcaggaacatccttgccatatcctgccgggcagcaagctctaccgcccacacccctccttcccagtcccatgatcaccccagcctgtgagaggcagttggtgctggcagtaagctggtttcctcctctgcagggttttgctagtaataaaggtgttgctgttgaagccgtcaaaagtc

SEQ ID NO: 130455 - DNA, 802 bp, Homo sapiens
agtgcttccagggtttcatatgtgttatggagatgcttcctctctccaacctcaccgtgcaggaatcccagtgaatatattgccaccatcttggagctcagtgccctcatagtgtaacagcaccagcagatctgcctgtgcacagacttcctgtactacctcactcctgaggggagatgcttctgcagggcctgcgacctggtgcacaactttagacaccatcatcctggagcggcactgcaccctcactagccagggtgttgatgacttcctcaatgccaaggccacgttcaagattttcgacttcagtgatgcgtttgtgctgagcaagccaagagacccaagcctgccttgctgccacttaggatatgacagcacagccagtggcctctactggatcctggtacccctcagaagacacccagacactgggagtgctgccacctcgtggtgcaagagttctgagggacggcaattctgaagacattgaatgccgttttgcacaccctggtcagaatgaaacattccttgggaactcgggccgtgagaagcatccttcctgatcacctgactgtagaaacatccttatcgcaccctcccgggcaaaggcccaacagcctgactgcaggaacatccttgccatatcctgccgggcagcaagctctaccgcccacacccctccttcccagtcccatgatcaccccagcctgtgagaggcagttggtgctggcagtaagctggtttcctcctctgcagggttttgctagtaataaaggtgttgctgttgaagccgtcaaaagtc

SEQ ID NO: 130456 - DNA, 301 bp, Homo sapiens
catgcttcctgggtgacctcatcccctcccgaagtggaaaccaccacccgcgtgctgatgactccagatctgtagccctggccccaccaagcccctcagctccagatgcttgggtgcagctgccttctgggcaccctgcctgtgtgtcccccaagggttcagttagaggtatgtgtgtgtgtgttttcttttggagacggagtcacccaggctggagtgcagtggcgtgatcttggctcagtgcaacttctgtctcccgggttcaagcaattctcctgcctcagcctcccaagtagctggg

SEQ ID NO: 130457 - DNA, 136 bp, Homo sapiens
acccccgcccacaatgcggggtgtcgtcaatgtactttaaagatgcccctgctgtagtacatgttgtatttttatggcttgtttaaaaatcagcatatccggccaggcatggtggctcacgcctgtaatcccagca

SEQ ID NO: 130458 - DNA, 421 bp, Homo sapiens
gcactcctagagccactccattatctacgttaacaaaaagatgaaatggtttttctagagagggtagggccaggacaggagcagttatgagtctttccttttactccccaacctgatcaacctcttcagaagtccatatgaaaagatcaggttctcctttagttagcttctcatatggaagtttactttttaatgcatatgagtcaatccataaatggcagtatccaactaaccctaaaaatttcctgagttcttgcttggtttgaggcaagggcaaagacacaattcctttgacccatttgggtcctattcttcctttgtctgcatttattaaatggcctaagtatttaacttcaggttctacatattgaagctttctctttgagacccatacccttcaaactgtaagtggttaagaacg

SEQ ID NO: 130459 - DNA, 988 bp, Homo sapiens
aaagtcgtattgtgcagagacagataaatggaaagctaagcaaaataatgattccagaaatcaatcaataaacaaacacatatacacatatatttgatatatgactattgccattgtagactaacaggaaaaagagaagcaattcagaaaataattaaaaattagttatacatatgaagaaacatgaacttagattaataattccttccttatattacatacaaaaataaatgctatatttattagtctactatgtaaaccaacattagaaagtttttaaagaaaatataatagtatgtctttacaacacaagatatgaagagcattctaaataaaaactccaaaagtgaatcataaaaatgattgataattttgattatattaacataaacatttatttcctgaaataaacattcttcctgtgcatgcacatgcatctgtaaatttaaaataaaaacaaattcagtacaatatttatttgtaataatactagaaatcttatgtgatattgttctacaagtactagacattttatattaagaaagcattgcaataaggtgtataaatattgatacatgggaagatataagttccgtgtctgtagctaatatgagcataaagctgtagatcatgagagaataaagaatattagaaaactgacactgttgataagccaattctctttaaatgtaagacagtcacaaaataaaacttttcttgaattattggaattgcataatttctacttatagaaaattattaaatatcttctggaacagttaagcatttatgatagcaggaggtttatgaaaaaataattttgaagagtcactagatctttcagatagagttagcatgctttacttattaaaactggataatattgtcacaaaataaacacattaatcaaaaagatgtatgtagatgaattttatgataaagctaggatttccaatcattaaagaaataaagatgaattgttcattga

SEQ ID NO: 130460 - DNA, 614 bp, Homo sapiens
tctatacagaattctgtagcctcgggatctagatccctttatctccactaagtacaataattccttctagttaaaaaattctatgattctaactaatgaaagatttaaaaatacagatactatttaataaccttttctttatttttctcaaaatgtctttcagatccactgttagtcacttttggtttcttaatgttcactcttttgactcttacaaacattccaagctcatgactcttgtaatgaggaagagaaaagtattttatggttttagttgaagtgatcacttttgatgaaattctgtgtagaagagtaccattgacagtatgaagcatatagacaacttaagtttttctttttaaatgtttaaaatttctcaaaatacttggcgtatgaccaaagtactttgaattttgtttatctaaatctataagtattcaataattttaaacttgtctttcctcggggaaaaagttaccatttgattgatagtgaagtagaatataaaaggtaattaagtcctctgaaatactttttattgtttttgaaaggacatatagaaaattattgctgaaatagataaaagttgtaataggttgacttttgtttggggg

SEQ ID NO: 130461 - DNA, 421 bp, Homo sapiens
agttttaaaactatgagaatgtcattttaatatttacttctgtatttgaagaacaggccacaattagattttagcaaattcagtgtgaattacaatttgacatttctcatgcttccagtctgtcttttcttttttgtcattaaagatgttatcctgttgtacagcccacatagtatctgtgggcgcaaagtactgtttgagttgtttttgtctttgtagtgaaattcaggttgcttttccttggcattcattccctctacggtcattcttccaggattgtctgtgttttccgctattgaaggagaggcaaacaagtatgtatcaagagcttctgcaaacataggtgcttcccacctatgttccacagctgccaccttcaaattctgcctcaggtgccccgatcacttttgccctggatctt

SEQ ID NO: 130462 - DNA, 121 bp, Homo sapiens
cttctaaagtttttgaatctagcctaagaatcctgaatggcacttctggacccactcagggcctaagggaccctgacacactaaaggaagaacacaggcttggctggcttttccacctgct

SEQ ID NO: 130463 - DNA, 739 bp, Homo sapiens
ccggctaattttttttttgtatttttagtagagatgggggtttcaccatgttggtcaggctggtcttgaactcctgatctcaagtgatctgcctgcctcggcctctcaaagtgctgggattacaggcgtgaggcaccgcacccagccagcctacctgtttgttgactaaagtgaatggagttatacctggcacctgctgttgttactaggtcacttacctcacctggccactctttttaaacaagtgctggagtgagaggacactacacctcctgccttcattaccacttttgcttatgaattttcctacttaggaattcatatgctgtcaaatggcttataaatcactcattcccatacatgttttaaaaagtgggaactaatatatatccaagttactaatatgtacttatatatcttttatgtaattcttccccaaatttggggtagcttttaaaattaaggcaaaatagaagattgaaactgtaggtatcataaggagatcggaaactatttaaggaaagacacaaggaagctcagagggaggcaggggcacacaaagtggctctgagttcctggtaggaaggccgggaaggggaacagataggactcatttgtctgataaaatgaaccataaagtttgaaaatataaacttttacttgcactgaattctgagaaaaatttattacagggattcttatatagaaacaatggatatgtaatagataatgccttcag

SEQ ID NO: 130464 - DNA, 424 bp, Homo sapiens
agtctacatggggttacctctgcccccactgtggctggcccagcacctgcattagacatatcttactggaaggatagaactttagagaacactgatatttgacaggtagatagaaaaagagggctatcaatgaatcagaaggaatattaattaatgaggaagtaaacaagtgtcttgtgaaggtttaaaaaagaagaaggtacacaatttatcagaagttgaagagaggccaataagaggggaatgaagaaagtctgtttcagttttggcaaatgagtcgtgattgactttggtcatggttgccactgttcattcgggggaatatagaccagggttgaataataatcagacgtgagaaaatggacatagtttgggggaaattttaaatgtttctgctttcagtaactaaaagcaatcagaaact

SEQ ID NO: 130465 - DNA, 386 bp, Homo sapiens
atgtttttctatttaccagtataagtgtgcacatttgtgtgtgtgtgtgaatgaaattgtgtggggagttttgcaagagagatggaaaagggagaggtgttagcattggagctgatgacagagataagaaaagctatggcaagaagagaggcagtcttttgccatgtcagtgagtcattcagttggcatctagcttcaaatttattgatttaaatccaaatatcctaattaactcttataattttgtacagatggacagatggaagtacagtttagaaaaggctgatggtgaccagctgttcaccagctctgctgagcaaactgagccaagctctaatgtgaagacttcaggttagtaataggaaaagttcacctgtggtgaggtt

SEQ ID NO: 130466 - DNA, 303 bp, Homo sapiens
ccctttgcttttcactctgctctgggtatctcggctgatgaaatacctgtctcttcatgcatattgttcagcttttccactactgcctttgacatactaatctattctattgaacatattaatcatagttattttaaagtccttacctgttaactgcaataatactgtggctctaatttcatttcctatttttttctcttgattatgggtcatatggacatgactctttcacatccctggtgactttggattgaatgaatgttggacattgtatattaaaaacaggagatgtattcatctgtt

SEQ ID NO: 130467 - DNA, 412 bp, Homo sapiens
tgttttgaggtttatttgatactagcttcctacagcctcaactagcatgtatgatgcttataaattctgtacaaccaatgaaaaaaaaactaatttaaatcatagtgtgaaaatcaggaacaaaatactaatagtttgataaacaacataactattcctttctctctccctgtgttggagacttccttaaatcaaacaaaaccacagtttaggtgtgccagactataaaaatcattgctgcttaatgttagttgtgctttatataacaagccttatctgcttctcacaaaagttaccacccagaggaaggtttatttgcaagaatactatacaattttgcagcagaatattagagaatgttctgggtgttacttcaataagaatttccagcaaatcattttctcctaatact

SEQ ID NO: 130468 - DNA, 191 bp, Homo sapiens
agtaaaatttctcccaaagtttgtaactcattgtttttcatttagtcactcatttagcacatttgctcatttaataatcattccattgcatccatcaaatctgtttttgaagtaggaaacataaataagaaataaattgcccactcacttagctaagtaacacacgttaccactatatgtgtagtatattt

SEQ ID NO: 130469 - DNA, 482 bp, Homo sapiens
ttatttacttcaagagttaagagtggcagtctggggatagcaccaggagatatcagctgtgatggcttggagaaacagtgtaaactggcagtgtaaacaagagcacggcatgtatgagtagttgagaacggtgaataagagtatgactagacagagatagtagggaagacaagttttttggggcacagtctaagatggtctggtgtcaaatgaaactggggcctaataaaaaggagcatctattcaggagctcaaatgggctgtaccctgtagcattctgaggacaggtctgacttctgagaagggaaagtggtaaaatattgtccagtccatttttaagttggtggctgagcttggtgaggtgtgtttttaaaagacctttagtccgttctacctttcctgaagatggaggactgtaagggatataaaggtttcactgaatactaagagcctgaaaaactgcttggctgatttcactaata

SEQ ID NO: 130470 - DNA, 313 bp, Homo sapiens
acaagatacaaagccactaagtcagcgttcagcaaagactgatggatgaattgtcacccagcctaaaggactggcccagctaccaactgcccctgcccagcccaagagggcaagaacacaatagaccgcacacccacgtctcatccccaggcgcacaccacttcaaaggctacagcaagcagacaacataacctgcctcttctgcggtgtctttcattcagttctgtttcttcatgaagtgggaaggaaacaagtttgggcccacctgagattggggtgtagacggaaggagtggggagagatgcaaacgaca

SEQ ID NO: 130471 - DNA, 500 bp, Homo sapiens
ctggagtccactctgtcactgaatatcttcaacctggttctttaaggactgacatattcttgagttcctaccatgtacttgagttcctacatgtacaacgtgaagcagctatatgaaaagtggagtgactgccatcagttgaagcagaaagaagtctttataaacatgggatttgaactgatctttaaaaagtgtgttccggcctcttaaaatcatcctcctggggagttctcccacttagaagtttcttcagggttggtaacacatggaatgtaatgatttcatgtaaatttaggaaagaaaatttccactttgttttcagtctctttagagtccagcactttccgagctttagggataacgtctttggctagggtaactttaaagaataaacacagtaaggctgggcacggtggctcacgtctgtaatcccagcactctgggaggcctaagcaggcggatcacaaagtcaggagatcgagaccatcctggctaacaag

SEQ ID NO: 130472 - DNA, 157 bp, Homo sapiens
atgcttaaagtaaggagcaactccaggacaccaaggcaggcctcgtctaccgacaatactcccaaactcaagctgaatgagcaggtgttaataagccatggattcactgaggcgagcacttcagagcccacacacagcgattctcctgcatggctgt

SEQ ID NO: 130473 - DNA, 459 bp, Homo sapiens
gtatcttaaacagaataagtacttattaaatattcatttccttgaaattcagttgttttcccactttgtccctctgcagttttcttctcttcctctttttgatcaaggcctagcactgagatgacattatcagcctgcctctctggactctctgtgtcctctagagagaataaccagtgaaagaagacttggcatcaaggacagatacttcttcagtttttcttagtcttttccctctcaatttacagtccatagtgagggagaaatgaaagctacacacagaagcattttgtcattcatgggtggatagcttaggaagaaaattggtctccaaggaaaaggtttaaaacagacaaacaaatgataagtacttgccagaccaaacttaaaccatcatgcaaaggagtaatcctgaaattacttgggataaatgccagcctttattggatgctcttttaa

SEQ ID NO: 130474 - DNA, 948 bp, Homo sapiens
tcagcaatagacccagcagccaatcctgttttaacatcgaatgtttaacactcaacttcagaccttgaatgattgactgaaaatggaagctcccatgttggggttactcaaggtccttattggttcttcagcattttgtggctataaatatttttaaataacagttgtattgagatataattcacagaccataaaattcacccaactaaagtatacattttaaaagtttttaggccgggcacggtggcttacgcctgtaattccaacactttgggaggctgaggcaggcagatcacctgaggtcaggagttcgagaccagtctggccaacatgatgaaaccccgtctctgctaaaaatacaaaaattagccgggcatggtggtgcacgcctgtagtcccagctacttgggaggctgaggcaggagaatcacttgaacctgggaggcggaggttgcagtgagtcaagatcatgccattgcactccagcctgggtgacagagtgagatcctgtctcaaaaaaaaaaaaaaaacaacaaaaacaaaagaaaaaaaaaaaaaaaaaaacaaaacagagaaaaatacattacaagaaagagcgagagaaaaacaggaggcccacaaaaataagcgaaccatcaagcgagtaaactcacccgaccacgaggggggagaagaacactccacaacagaaggggtgggtacgaacgcatgtcaagataaacagtcaaccgaaccaacaagaccatcttccaaaagagcgacagaaacatggcgcgacagggatacctcagcgggacgtgcgtgacgagtagaaaacacagcgccggcctcgtctgaaaacgacaccacggaacgaaagacacacacgaacgacaatgagcgagtatcgagcccagcggggaaaaaccatcaacagtgtgcgtgagaacaccacacagggggcgctga

SEQ ID NO: 130475 - DNA, 726 bp, Homo sapiens
gaagccaaaaggccctgcagcaaatcagcaatagacccagcagccaatcctgttttaacatcgaatgtttaacactcaacttcagaccttgaatgattgactgaaaatggaagctcccatgttggggttactcaaggtccttattggttcttcagcattttgtggctataaatatttttaaataacagttgtattgagatataattcacagaccataaaattcacccaactaaagtatacattttaaaagtttttaggccgggcacggtggcttacgcctgtaattccaacactttgggaggctgaggcaggcagatcacctgaggtcaggagttcgagaccagtctggccaacatgatgaaaccccgtctctgctaaaaatacaaaaattagccgggcatggtggtgcacgcctgtagtcccagctacttgggaggctgaggcaggagaatcacttgaacctgggaggcggaggttgcagtgagtcaagatcatgccattgcactccagcctgggtgacagagtgagatcctgtctcaaaaaaaaaaaaaaaaaatttttttagtatatccacagagttgtgcaaccatcaattttagaacattttcatcacaaattttgtgcctgtaatagtttcctagagctgtttcttaacgaagtaccacaagctgggtggcttaagacaacagaaatgtattcctggccgggtgcagtggctcacgcctg

SEQ ID NO: 130476 - DNA, 714 bp, Homo sapiens
tcgtgtagtagatgttattaaccgcattttaaatagatcaggagagagcaagagaataagggcacccaaataggtaaattcagtaggcggctttattggacctcatgtttgattctttactataacattttccccaacctgggcaatgtggcgaaaccctgtctctacaaaaaatacaaaaatgagcctggcatggtggcgtgtgcctgtagtcccagctactggggtgggaggattgcttgagcctgggaggtcaaggctgcagtgagctgcaatcgtgcaactgcactccagcctgcacaacagatcaagatgctgtctccagaaaaaaaaaaaaaaacaaaaaacaaaacatcttgtgggggggcgcctggcgcccctgagaagaagagtttttcaaaaacacccattcgtctggttggggggccgggaggcccgccaggtagggttgacgggcggcaccatggtgtcacgaagctgtggtcaccagaagagagaaacatcccgcgcccagaggaactgagggtgtctggtgattatctcccaccccaaagaataaaaaaaagagcgccgcgggcgggacacaccggacgcgtttctcgggacacaacttccaagaaggggtcccaagaagccccagaccggcggctcaagccaacgagggacgtcccaggggagacgacgaaaaaaaaatagcgcagggcgggaggaggt

SEQ ID NO: 130477 - DNA, 303 bp, Homo sapiens
gttttctatgcacatattatgtcatcttcaaacagggaaaatttgacatccttgccctttatttctttctcttgcctgatttctctggccaagacttccagcactatgctgaataaaagtggtgaaggtgggcatacttgttttgttccagttcttagaggaaaagctttcagtgtttccccattttgtatgatggtggctgtggatttttcatgcctatcctttattttgttaggtatacttgttctatatatttattttgttatgtatgcttgttctatacctactttgtttagtgttttt

SEQ ID NO: 130478 - DNA, 539 bp, Homo sapiens
aaatcccgttgactctgaacttcaaaatatccagaatctagtgagttctaagccaccacagactcttgtctctctaataacaagtttcttatctctctgcttccaccttggctctcctgcagttgattctcacacagcagccacagtgatccttgacaagctttggtcagattatgtgatgctctgcctagatctctctagtggtttctcacccactcagattaaaactcagtatttgtctcgtggctttgaataaggctttattttattttattctattttatatttatgtttatttttattttttgaagctgggtcctgctctgtcacccaggctggagggctgtggtgtgatctcagctcactgcagcctctgcctctcaggttcaagtgattctcctgcctcagccccccaagtagctgggactacaggcgagtgccaccacaccctgataatttttttgtatttttattagagacggggtttcaccatactgaccaggctggttttgaactcctgacctcaggtgatccacctg

SEQ ID NO: 130479 - DNA, 611 bp, Homo sapiens
aaatcccgttgactctgaacttcaaaatatccagaatctagtgagttctaagccaccacagactcttgtctctctaataacaagtttcttatctctctgcttccaccttggctctcctgcagttgattctcacacagcagccacagtgatccttgacaagctttggtcagattatgtgatgctctgcctagatctctctagtggtttctcacccactcagattaaaactcagtatttgtctcgtggctttgaataaggctttattttattttattctattttatatttatgtttatttttattttttgaagctgggtcctgctctgtcacccaggctggagggctgtggtgtgatctcagctcactgcagcctctgcctctcaggttcaagtgattctcctgcctcagcccctcatcctgtgtaactgggatcacaggaggatgccaccatgcctagctaattttgttgattttttggtagagacacgatttcactttgtttcccgggccggtctctaatttctgggctcatgcaatcctgccttgcctcccaagatgctggattacacgcatgagtcactgtgcctgacctaagcttaagatcctggagt

SEQ ID NO: 130480 - DNA, 377 bp, Homo sapiens
gtcttggcctgccgcctgtcttttcttcccaccctctcaagcagcagtgccagcccccagctttgtcaggaggtgggatgtggatgccgcacagacctaagtggcctttctgtggctgggaaactggaccaagaaaggcaggtcgggggacaggcaggggagccatctgtgcagggtggcagtggtgagggtggaggatggggacagcgagggagggcaggagaagctctggacggggcaatgcggctgtgcagagaggatcaggatgagggagctagttctgactccttcactaactagccaagttactgtgggcaaggcgctttcttctcctctccaggacttagtttcctcatttttttttttttttttttttt

SEQ ID NO: 130481 - DNA, 449 bp, Homo sapiens
atcaagttcctaggaaccttcaaagagacttagactcccacacaataacagtgggagtcttcaacacctcaccaacagtattagacagatcattgagataaaaaattaacaaagatatttaggaactgaactcaacactgggccaaatagatccaaatggacatctatagaactctaccccaaaacaaaagaatatacattcttctcatctgcacatggcacatactctaaaactgaccacacagtcagacaaaaaacaattctcagcaaatgcaaaagagcggaaatcataccaactactctctcggaacacagcataataaaaatagaagttgggactaagaaaatcactcacaaccatataattacatggaaataaaacaacctgctgctgaatgacttctgagtaaggcagaaaccaaagaagttctttaacattagtgagaaca

SEQ ID NO: 130482 - DNA, 465 bp, Homo sapiens
taagtatgtccaaaaacaatgtcagcaattacctgaaaaggctattattaaaatgcttatcccttttccaaataggtatctatagatgccagatagtcttcatttatttcaaccaaaacatacaacagactcaacacagaagcagatgtgagaatctagttttcttctcttaagccaagcatttttaaaagatttgcaaaaatgtaaaacaatgctactcatctcacaaaatttttttgttttggaaaatatagttatgtttcataaaaatacattgtggtaacatgtaataggtttataatttttgatgaataaatgaacatttcaaagtttccaaattttaattcctaatatgataaatgttaacagatataactttcataaataagaggtcttgagggtcatcaataacttttaaaattataaaagttactaacaccaaaaagtctgagaaccactgttaca

SEQ ID NO: 130483 - DNA, 175 bp, Homo sapiens
tatggatttatttgactagtcctctacagatattcatttaaccatttacaattttttgctattacaacaatgctgtgatgaacatccttgtatgcgcatcttctgaatgatactctagaagtaaaatttctggcccgtcagtatggccaagctaccttccaaaaagacttcaatt

SEQ ID NO: 130484 - DNA, 340 bp, Homo sapiens
catgttgctctgttttcccagcttgctgctcctgttggtgcagctgccaacgccccagggctgcagggttggggtgcagggacgccgaggagctgaagagtagcatttaaaaagtttgaatttttcagcttccttccctccctgcacattcccaaactccacttgccagcccggctgccagcgctccccaacatttcttccttcttttctcgactctcccgctctttgatctatttctttctttggcccccctcccccctcacgactttttaaatgaacctcattgttgggaaccagctctcgactgggttcctgtaatcctctcggtggggtggttgca

SEQ ID NO: 130485 - DNA, 290 bp, Homo sapiens
ttttcttgatagaacttctgttcgtttgtttgtgtgtaagttacgtttgtttgtttaaatactgacaggatctcactatgttgcccagccaggttggtcttgaactcctgggctcaagcagtcctcctgcctcagcctcccaaagtgctgggattataggctgaaacttagtgttcatcctctttcttaatgaattatgccaaatacttacttgagccttttggaggtggctgggaaggactgcctgtgtgactaagacagtgataatggagtagctgcttcctgatgtc

SEQ ID NO: 130486 - DNA, 380 bp, Homo sapiens
atcagagcatacctccactgagcctttaattgaaggtcaactgagccaaattgctttggttcaaatcctggttctgcaccttttagctatgcgtgatcttgaacaagtcattgaaccttttggtgtctcagcctcatcatctgtaaaatggagataggattgttaggactgtgaattaataaacagaagtcattaatgtgtaccacatggtaagcacttaaaatttttaattgctattattatattcaaggaacctcaactttaatatctctttgccttactctaagacttctatttctcattgtcaagatttgagagtgttagggaggggagtgggaactgtagtattaaaaaaaaaattgtgtgtgtgtgtgtgcgtc

SEQ ID NO: 130487 - DNA, 835 bp, Homo sapiens
ggattagagccaagtgtgaggatagatcccctcccactgggccttaaccctgcttccaggtgctgagtttgacaaggtttacaacagaacctttcatagcatgcacattacagagctttaggaattctgccttcgagaatagttcatgtgttcctttcttctaattgcagtttttccactactcccaagggcaacgtgtaccttgggaacttatccaccatttaaagacacgaatcagctgggctggcagaccttgacaagaaagatgcatcaatcaacactagaaaacatcatgcagtcttatacacaatggcacctatatctgtgatgtcaaaaaccctcctgacatcgtcgctccagcctggacacattaggctctactgctcgtagacaaacaggtacttccttgagtatccccggcagtcaataatgcagtctcctcttatctcatgtccggctggaaaacatgagtcgcatactcacggcggcgcccggagggcaggaatcccagccatacagccgtgctccctgtccgccacgacactgcggctctaccaacacacactcggcgcctgcggaaaccgtcgctcatcctgacccacaagtggcctgacttctccatccaccatacctaacagactggcgcccatcggcctaatccccacgagccacgactcccccacccgcccaccccacaccaacgaccacctccaccactgccgcaccgtgactgcgcaccgcccaacgacggacaccctacgcgctcacactccccacgcacaccccccacaccagccagccaccccacccaagcccagcacccaccgacaccccg

SEQ ID NO: 130488 - DNA, 256 bp, Homo sapiens
gatcactgaggtcgcgagttgagaccagcaagaccaatgtggagaagcctgtctctactaaaaatacaaaaaaattagccaggcgtggtgactcatgcctgtaatcccagctactcaggaggctgaggcaggaaaaccacagtggataagatctgctgtcaaccttagcttttctgattacacaaagtgcaataacatctattttttttaatccgaaggaatcctctgacaccaccaagcatcctgcccactcctc

SEQ ID NO: 130489 - DNA, 791 bp, Homo sapiens
taacgcattattttgcatccttccacttggcaaagtgtgttagaagtgattctgaatgtggttggaaacacgtttatagtactcagcaaatgcaatctaataaccatattattcaccagttttggaaaggaaacaagtattttatggagctatggttatcatcaaaggaagaaaaaaccctttttaatagaattttaatatgggttttcccccatttatagcatgtactaggtatcactaagattacactgttacaggtgtctgtggtactttgtaatgaagctgaatttgtcaaagagaataagactttcattttccattgagcacctgttttcatcttgaattttcagaagcagtcagcgaaaagtcaaaggtttctttttattctggccccatggggaaagatttgccatttgatcagcacagtctgcttttctgtctctacttggagtttgctatggccatatggagtcactcctctgaacactgatctctgcctcttgcttttatctaagggtgatatgcaaaggtgtatttctaccaacaaaccacacatttcactgttttgaaggaaccagtaatgcagtgacattcataaagatacataccattctatagaatcattaaatcaaaaaaaaattctacgcaggaaaaaaaaatagatggcttttgcagagaaaccaaagcatgcagaaatcaagatggttacagtaaaaccagttatcacttcagtgcccaaagtgttttcacatatgctagctgtctgtctgacagaattaggaatctgaaga

SEQ ID NO: 130490 - DNA, 371 bp, Homo sapiens
tactgaagtcaaggggaatctcactgactcctcagactagcctgtggggtagattatcatctccattttacagatggggaaagtgaggcttagagatgttaagtaatttggccacagtcacacaactatggggcggcccaattgggattaaaggccaaatatgtatcacccccagggtccttacttaatgactatctacctttgagtaaaactttagaatttcaatttatacactggctttgtatagtacagctatgacgaattcccaaaactttttgaagattaacatgtattatcttgtgactgttaaatgcatcattatcttctcttttgcttggaatcttcataaccgcaaaaagatataatcctac

SEQ ID NO: 130491 - DNA, 332 bp, Homo sapiens
tatggtgccaaagcatcacatcacagattatatatcaattaccacaggaaaactgtatgtctacaatggggagatttggcagtcacctccttctttaatcaagtgttaaaacgtagcatcacaaaccacagggtaaccaaccattaagtgcctggtgagctgatgctatatgaagtacacagtactgcctatgaaatattcttgcccaaaatgtttaacctgaacatgcctgtagacctaacttcttgtctacaagtaatatatatggacaaacaagttaaattatatcacaagaaaagagagacatctaaaatgtgggccagctagtcgtg

SEQ ID NO: 130492 - DNA, 786 bp, Homo sapiens
ggtcaccagaaagaccaacacaggattagaggttggaacttccaaccctacctcccaacctccagggagaggagaggagctaaaggttaagttgatcattagtggccatttaatcatgtccatgtaataaagcctctaataactaaaaaggatagggtttggagagcttccagataactgaagatgtgaaggttcgtggtgggtggtgccccagagagggcgtagaagctccatgctccttcccacgtgccttgtcctgtgcacctttttctctatatcctttgtaatagtctttataataaactggtaaatgcaaataaatgtttccctgagttctgtgagcccattaacaaattaatcaaacctaaggagatggttgtaggaacctcgatttatagctggtcagtgagaaacacaggtaaaataattttgaagcttacaattgatatcagaagtggacttcagtcttcttagactgaattttcagcttgtatgatctgagttatttccaggtagatagtgtcagaattaaattagaggacacccaatgggagtatgctatcaaaattactgattggttactggtgggcgaaaagtagtatgtgaattatatctcaatgaagttgttacaaaaaagtacagtaagccaatgtaagtaaaaaaagattactaacgagaaattactggtatcagaaatgaaagaggagactgtactctaggtcccatatatagtaaaaggataatataagaaaattatggaacaacttcatgattaataaccttcca

SEQ ID NO: 130493 - DNA, 583 bp, Homo sapiens
gctacatccccagaagtggtattatcttatcaggatactgaaaatctcaaaacgctacaattcaaatttttaaacctaaatcagactttaaattcatcccttactgaatttttttctgttttctttttaatttgcactcctaattctagacgactgaaccttgatttgtctgcaaaaccagcaattcctctcacttctgcgccactaacaaatctgatgagcgcgccttctctgtcttcaccgccaacactgggaaaatgttgaacagatcaaggccaagaatagaaccctactgtactcattttcagatctccttccaggctgcctcagtgccaataattaacagtttcacataggattgttaaattaataacaccatccagcccacgtcttaccacttatgatttaataaggaccatcatacctcaaaaaactgttaaatactttactgaagccaaaatgtaccatagttgctgcactattctctggcctagtaaacaaaccaccatataagacaggaaatagatttaatttgatacgattcagctggcttctggttatccttgcatccgatagccacaca

SEQ ID NO: 130494 - DNA, 184 bp, Homo sapiens
aaataatcactgctcgataacatgattatgagacaaataatcataaggcagaaatatgagcagggattatatgggccaatcagaatggattttggctgtaacctcagatcaggggtctgaaagtccactatggtgccagagaataaacttttagttgcttgattttggagtaatggggaatggg

SEQ ID NO: 130495 - DNA, 343 bp, Homo sapiens
cgccggttctagaggatccctgcttacctgggcgtattctatctacccagctacttattttattttatttttttgtagcaatggagtcttgctatgttccctaggctgatctcaaactcctgggctcaagtgatgccgtttcagcctctccaagtgctaggattccaggcgtgagccaccatatgcccagcctcaaaaattttgtttaagacctgtaagaagaggacactttttgtctagggttgtttgagtttagtgccactgaaaatcagaatggagccacagactcagaagtgagaagacctgagtttgggtcttggctcaaccttgaccaagttattta

SEQ ID NO: 130496 - DNA, 443 bp, Homo sapiens
catggcctgcatctacttctcacatttctgactgcctaccaggttccaggcactgttctaggcactgaagatgaaaagatgaataatatggagttcccatcttcaaagaagttacaattttaaggaagactggcaaataaaagttaccccacaaaataataaaaatacaggggtaaaactagggcatagttatattttggctggtctctttacctctgaggttcttttgctttttatgtaattggattttaacctcagaagactgtaaggttaaagatgataatgtataaaatcagtactctgagtaatgatcaaaattttctgttgccatccacacatttgagtgagatgtagtgagtgctagaaaataaagcagttcgtatcaaaaagggtgtgttgaaagaaataaactaatccttgagaaacactgtcatgcaatctca

SEQ ID NO: 130497 - DNA, 380 bp, Homo sapiens
tgaatcctcacctgagtttccatctcactaaaatgaaatgctgaagtctttattgttgcctacacatctcaagatgtaccccttctatatgtcttactactttcccttttccttcacttcactccagtcatgcagtcctccttgagcatttcagacttgctcctacctcaaagcctttacacttgctttttcttctgcctggaatgttctttcagattttcacataactagttcgctcacttccttcaggtcagattaaacattgttagtagagccttcctcaataaccttatatattacccttcctctagtccacacacactgcctgtcattttcagcttgctttatttttctccattgcacttatcactacttgacat

SEQ ID NO: 130498 - DNA, 761 bp, Homo sapiens
taactggttaatttttgtatttttagtagagatggggtttcaccacattgatcaggctggtctcgaactcctgacctcaagtgatccacccgtctcagcctcccaaagtgttgggattacaagcgtgagccaccgcgcctggcccattcaacagacttttaatgagtgcctaccattgtgtcttagcagtatggcaagcacaagagaccttggataattaaatttttattatttttttattttttgagatggaatctcactctgttgcccaggctggagtgcagtggtgtgatctcaaaaaagacaaaaaaaaaaaaaaaaacaaaaaacaaaaaaaaaaaaacaagtaggcgctatgtgcaaggttctgtgccaaagtctattacattggaatccgatatgatttgctggctttcaaggaaatcacaaattcacactgtgtagtacggataccaatatttatctaacattagtaaacaacactcatttcatttccataactacttatttggacgcattcctgtgtgtggttccacaggacacgaacacttagcatggcccaatttaaagaaacgtaccggctgacctggagctgggatgtgggtgcccattcggccacaaaacctcttcacaaaattgaacaccggctgggcccaggtggttccacggcttggtaatcccaggcaattgtgggggggacgaggccgggtgaacacaagaggctcaggaatttcgggccccgcctggcccaacatggtgac

SEQ ID NO: 130499 - DNA, 613 bp, Homo sapiens
gtgagccccatgttcttcctatatttcttcccaacgtagtttcagaattgtgggacaaggagtgagaatccagagtccagtaatatcattgagttgaagagacagactgaagtttggagaggccgcagatgtagaatttgctagcagagtaatagacgggaaagagctatgcagagaaagagctccagaattctgtctcctgaatgttgactgaatactaatccatgcatgtgtaggatgaaacttcatgtaactatggaaagaactacagagtgaagaacaattacagggagttgtgagccaaacaacactcaaaagtaatactttgaacaggcttgggcaaccagcagccagaatggatagaccttgttgaataaatgagacattcagtgaaaaccccagatgcttcacatcttcgtactgggggtaaacgagcatagagtaaaagctcccaaagatctgccccaaaaaacttaaaagcaagcctaataaagatcaagctgatctctaacaaacttaattgcctgacaaaacgaagttaactctttaaaagaatacaagaagatatagcttatacaaatgtaaaattcccaatatacagtatccaatttaa

SEQ ID NO: 130500 - DNA, 668 bp, Homo sapiens
aaacaaggttgagaattcttacgctttttaaaaatataggtaaattcaaaatcttttaattttgatggtgattacatgtaatacagatttgcagaaaaatccataattatagaattggtgctgactcactttccagtgacctgataactgtctgcatcatttaccattgtgaatgaattacccaagtcagttttcagacaaatttgcagaattaaccttagtaactgttgaacacattgctgctttaaacaacatattgttacattttttaaaagaaaaaaattaaatttgtaccttgattctgtaaaccatactttaatctttcaaggaggaagaatgcgttctctgtagaaaatagattaaatagaatcttctctcctagtgatttaaattggtttaattaaaaacaaattctatatctgcaagagaaacagttgctcatctaattcaaaaagtaactgctaattgagaagtcatttatagtctgtcttaccatacattatctgatttccttgtagtagatatacattctgaattgcttttgaagtagcatcagagtaggtagtaaatatgtggtaggtgttagtttgggattaaaatatgtaacaattctgcaaatgaattatataaaatggtcatattgagggactacacagtatatgaaggtc

SEQ ID NO: 130501 - DNA, 572 bp, Homo sapiens
ctgcccaccttaaccctcccacagctgggaccatggctgtctccctctgctgctgtcccctgctccatcctgggaccctaaatgctgggagaggctgcattctgaaaagtcagtcaatttatccatcaacaacagaacctagatccgacaaatactgattgttttaaaaaactttaagatattcaaaggcaggtacaatagaagatacccaaaaggggacagatcttcttaaagggacacgaatcttaagagacaggaaatgattctaaatggacaattaacaatttaaggcaactgggtcttttagattacagggaaagtaggcaaaccaggtgaaggagacctttcctttctttcctgccccagccccacagagcagagccgccgctaggtaaaacacacccaccctttctcctggcctccgacagctcctgaagcagcagcagcagctgccttcagcctaacttcctgaggatgagcagggtggtgtgtatggaggtagggttgaagctcagtatgtccgaagcagcaaagccccagtctgagatgtccccctgcctgccttatgccac

SEQ ID NO: 130502 - DNA, 238 bp, Homo sapiens
aatttatcaatacaacattcagatgacttgagagtaattcactgttcacaggtaagaggattaagtcagcattgcttctctgtattggtaaaggaaaaattgtatgagattctaacaaaaagtgtgttaaacataagttagaataggtaaaacattaatataagtgggttgcatattgtaagcaccatatgaagaaactcatcagaattttgatatctcttaagataaaatatatctt

SEQ ID NO: 130503 - DNA, 600 bp, Homo sapiens
gttttggataggtactggtaagagtgggcttgttctttgaagttcctttagtttctttagtcatttaaatgtcattgattttttacatcttgccttcttttcttaccttttgttaatacttaaatttatcttaaaagtgatactattttaccctctagaatcttaaaactttgtaaattataaagaattgcttagaaattaggtctttcattttattagctgtattgagtggcctttttgatgctaaacaatatctaattgcatctctgctctttgaaaacatagggctgctatactctagtgtctgaagtctacattaatgacaatatctcctggccttaattctaagagcatgatttcaatggatagtaattcacctcattttttatctaagtatataacctctttcttttctaacattggttggggataatttcaataacattttaaatactcagctggcataattacagttttattttaacaaattttcagtttattcttaaattcttagtgtataattttttcaggttctatgtaccttagcttttcctaaataacattctgagctctataaacatatggtatggatttatctgg

SEQ ID NO: 130504 - DNA, 257 bp, Homo sapiens
gctgggattacaggtgtgagccactgcgcctggccaatccactgtatttttgtaaaccagaagataagtctaagagcttgattcgatttaaattaaaagtttttggcaagaatactcagaaggtaatcttagtttgttctagttggtgataacccagtttgggcacttggttaagtggtacctatctgatctctccattgtaaatgcacgtttccccctttgcagttatgtgatctgtgggaagaatttgtttttga

SEQ ID NO: 130505 - DNA, 489 bp, Homo sapiens
tagctgcctcctgaggtgtaaaaccaccctgactgtatcctaggaggatttaggaggaccagatgtcctcataatgagagataggtttttccccccagataagagaattcctgctaccttatattaactacttaagagttctgtaaattcagagaaaggagaaagaatactataggccacctgtgataagggaagacttcccagaagtggtaataggacaatacttggacttttgtttgtttgtttgtttgtttgtttttgagacgagtctcgctctgttgcccaggctggagtgcagtggtgtgatctcaacttactgcaagctccgcctcctgggttcacgccattctcccacctcagcctcccaagcagctgggactacaggcatccgccaccatgcccggctaatttttttgtatttttagcagagacggggtttcactgtgttagccaggatggtctcgatctccttaccttgtgatccacccg

SEQ ID NO: 130506 - DNA, 738 bp, Homo sapiens
tgtacataattatgcaaaactataaatatctacccccaaattaaataaggacaacccccaagtcttgatgttttaaatgttaatgtagtagagcagaaaagtgagcaagccatgaaggcagatgctctggaaaaatcactcttgttttcatacgcatcgtaaaacatcaccccacaaaccacatcctgacattgctgacattcacccctcctatacatgctcagcctgagcctgtttggcttgagttgcctgacagtaaaacaggattcagagggaagatgaaagggagaaagcagtggactacagataatccactaaacagaaaatcaactcagggaagtctccgcttggggccatgtactttgggaacaggaatgttggtgtataacttgaggtctcatgagtttattcatccaacaaacacttatgaaataccgactacaagccaaacatcatatgtttagatgggtggagtcaagaggcactttttaagcagttagggaaggaaaatctcaggcaagggtacggtaagttgtatgtgtagaactaaggaaaacatcacagacatagtctgatggctgggaggaggcctcagattggcagtagaaaaactgaaagtaaaacaggattgaaagcaacgcttgaaagcaacaccatgaatataaagaagtaaatttgtcttcattcccctgtcctgggacttaagaaaaagagaatttggagctgatcttccactgg

SEQ ID NO: 130507 - DNA, 625 bp, Homo sapiens
tgactctgggccaatcgtgtcatctctgagccttcgttttctcaaatccggggccacagtcctacctggcctcacctccctgggttgtttggagcatcacagaagagaacgtgtttttgcaaaagtcattcgcagacgaggcatcccttctgtccccagcgccttctttcttccagcgcccgctttaaattggctaggtctgagcttttccagatgccagtggggaggggcgtgtgcgttagaggctccataaatacttgtaggaatgattttgtttgtttgtttgaaaggaaagggcaggaactggaggaagtattgcccagatttccttgaggtcccctcacactgagaaggcctgaatgagccctgcatatatatacacacacactggtgcctacgtattcacagccacgcacacactctcacatactcaggctcacacacacccatttatacaccggcaatcacacacacgtgtacatgcatgctcgcacacacactcacatagtgacaactatactcctgagagcgcttctcttttctttcataagaatactattctgatttcttctacctcattttccttcaaggaaactttcaactacttgaccacatcctgtgaata

SEQ ID NO: 130508 - DNA, 845 bp, Homo sapiens
gggctgaggcagtagccacaatcagcaaccctggccaccccagcaaaagagtggttatgcatgttcatgtgttctgaggacaaattccactgtctgcagctgccatcactgtgatatcccccaaccccatcccaagccacctgcctattgctgctccctcttattgccactctgccctccccattaacagggccacagtacagccactgttgcctccacgtgagcattcagccagaggcctgaagattaccctccccctgcctacaagagccatcacctgcacatactacaggggcctgaaggcagtacttcccagcctggatcaatcccctaccttcgtacctgagcacaccatccaagggcctggggattgctcagcctagtccactgcttttgacacctgagcactgctcccagggtctgagtttgggctttctcaacctgctgctatcaacacatctggcacccacccacatgtgccacttgtgggcctggggactgatatgcccagcctgtcacagccaccaccaacaacagagcagacctcttcggcccaagagggttgcctcaccactgctactgatatcacccacaccatgcccactgcccaggggctcaagagcctacccacctgcctggcccactgctgccattcctggtgtctgagcaagccatttggaggcccaataattggcctgccagggcccactgacaccagtgccagtatacaccaccctgaaacccaaagacagacatgttcagcccattgctgccaccactgggacctaaagattggcctacctgacataccactccccaacagaacttgcctccactaataactg

SEQ ID NO: 130509 - DNA, 490 bp, Homo sapiens
gtagctgggactacaatctcccatcaccacacctgggtggttgttttgtttctttttagttagtctcgcactgtgcccaggctggagtgcaaatgatgcagtcacagctcaccgcagcctcgacctccagggttcgctcaagtgatctttccacctcgcctcccaagtagctgggactaccggcacaaaccaccacacctggctaatttttctttcttttttgagatggagtcttgccctgttgcccaggctggagtgcggtggtgccgtgatctcggctcactgcaacctctgcctcctaggttcaagcaattctcctgcctcagcctcctaagtagctgggattaacaggcgtgcgccaccatgcctggctaattttttgtatctttagtagagatggggtttcaccatgttgaccaggctgatctcgaactcctgacctcatgatccacccgccttggcctcccaaagtgctgggtttacaggcgtg

SEQ ID NO: 130510 - DNA, 363 bp, Homo sapiens
agcacatttcccccctttttccaatctgtgtcttcttcagcaaattgtgagtggagatacatatatccattcaatctatacatagactgaatggatcccatagtagttgatgacatccagggaccaggcaccaggctattcctcaggtgcactgattaggacacatcatccattcaaatacctatgaagaaccctgtggtaggtggtgtgggggattcaaagatgaaaggagacattctcactacttccaggagctctggattgagtagaggaaccaaggtctgtcacaaacaactatatatcaatgcagagcagcacatatgagtgtcacaaggcaggaaccaaggtgccaagtagggaaat

SEQ ID NO: 130511 - DNA, 340 bp, Homo sapiens
caaaacccagaaggtttgctgcttatcagcaagtaaccatttagaaaatacaacaggaacatttatccattcacagaatcaataaaaataaaaacaaaatgctcaggcataaaccattataatggaaactgtattgacagcaccagtaaatacccttctcccttctgagtttaaaaccagtcgaagggggtgaaagagagggagaaaaacagacagaccagggattggatgatggagatcagagtatcacttttatttgttttaaaggctaggttgagcaagcaacaaggctttaatctgaagtggataaatgtcttattcatccttgagttaggcagac

SEQ ID NO: 130512 - DNA, 381 bp, Homo sapiens
gtggtttctcactaacaaaaaataaataaataaataaaataaacagaaaaaaatagctttgggaattgtcaccttcagtttgcacttctgggtctatcaggcctcaggagctgttagccaactgtttccctgaaacaacagcctcaggggtcaaacaggtttcagaattgacaacacttccattgtcctgcccaggggcacccctcagcaaggcgtaggcaactactctggccccagggaaccctttccaccaccctcctaggatccacagcacttctacctatgctgcgcaggggagcctctcagcaaggcacagatatctctggccccaaggcgcccctcccaccaccctcccgcagactcggggcggtcggctcgggt

SEQ ID NO: 130513 - DNA, 379 bp, Homo sapiens
gtaatcagacagggatttccgtcatcactgatattgtttcacattgttctaaagcagtgttgctcaggccaggtgcagtggcttacgcctgtaatcctagcactttaggaagccaaagcaggcagatcacttgaggtcaggagttcaacaccagtttggccaacatggtgaaaccccatctctactaaaagtacaaaaaattaaccaggcatgatggtgtgtgcctgtaatcccagctactcgggggtgtgaggcaggagaatcacttgaacctgggaggcagaggttgcagtgagccaagatcacaccactgcactccagcctgagcaacagagtgagactctgcccaaaaaaaaaaaaaaaaaaaaaaaagcagtgt

SEQ ID NO: 130514 - DNA, 396 bp, Homo sapiens
agtgtgccctgagttccttccttcctgaattgtatacccatgccaagtccctggcagcgtgctgggttaggcccatagaagcttcacgtgataggcaagtctcacccttacctttgaactacactggtttgtttctcttcatttttccattttgagctgccgtgagtcaggctgcaggcagctcatttacacaggagtcagcctgaaggaaggtggcttgaagtctactttcattttgtcatgggaggtgttttcctgtggaatcgctaatcaggcaggtcaaagggaaccataagggatctcactcatccctagatggaaacaagtacagcaaagccatctcagaaggagaccaaaaacacacaaaaacaactcccctgacagcatttcttaact

SEQ ID NO: 130515 - DNA, 208 bp, Homo sapiens
tccacgtgcctagatatgcatgcccatcttgttgtggttatgactgcagtgttcaagggaaacacgatgaatctggtggtgcggttccccctggggagtgggattaaagaggttcagaaaggggtgggcaggaggccactatccctttttttttgtatttgaaaattattctggccgggcatggtggctcatgcctgcaatcccagca

SEQ ID NO: 130516 - DNA, 427 bp, Homo sapiens
ctagtcttgaactcctgacctcgtgatccaccctcctcggcctcccaaagtgctgggattgcaggcgtgagccactgcgcccagcctaaattttctaatagccacattttaaaaagtgtgtagaaagaaacacataggctggctcatggtagtttacacctataatcccaaaactttgtgaggctgtggcgggaggatggcttgaggctaggaatttgaggccagcctgggcaacatagcaagataccatctctacagaaaaaatacaaaacttagctggacgtggtggtgcctgcctgtagtcccagtgactcaagaggctgaggtggaaggatcgcttgagcactgggggtcaaggctgcaatgagctacggtcatacctctgcactccagcctggatgacagagcgagaccctgtctctaaaaa

SEQ ID NO: 130517 - DNA, 746 bp, Homo sapiens
gaattgacatgataccagatcctacctggttttctgtgtaaaactacttgtctcagtgcagacttttcattttctttctttttccttcacttcactcaacctcatttactgagttcctgcttccttgattttggttgccaaaacatgtgatcccacaactactaggcgaatgggctggagttgcccttcacgcaccagaatgtcaggcaccaaaccctggcacctccaggcttcatcatgctcactgtctccgtgctcaagtcatctggaccctcagccatagttctctatcatctcctctgtgctgttttctaagttcacaactgtcttcccaagctgttcatcttggtgagcaatccacattccaacttcccatcatggtgaacaaggattcccaaagaagaaatgtccaagtaatttttacctcgttgtgtccttgttccttaggaaaaatatggcccagtgtaaccgtgatcttcatcttatctcttctagaatctgccactttgtctaggcccacagtcatggccctggtagaaatgcttgcatcttccactgagacggattctgcttcctgtttgcaagtgaccttgcctctagcattggttcctgacttgaatctttttgccagcattacatcctgtggctttttgaatttgtggccttttgaatcacagtctctgtgctcggagactctttagttactccctgtccgtagtctcttccagtccctctgcctcttgccc

SEQ ID NO: 130518 - DNA, 470 bp, Homo sapiens
gccctactttccacagggcacagggctccttcggcggccagaggagcggggaaaatgccacagggagaaggaagtctccagcgagctctgtaacaactggaatccagccagagcctcctggccagaactccggggagggcgcgaatccggtgcgttttgctaaggacttaaacttaagacctgaaactataaacattatagaagataacattggaaaaacccttctagacattggcttaggcaaggatttcatgaccaagtacccaaaaccaagggctaaggacatcaatagaaaattctcaaaagaagatacacaaatggccaacaaacatatgtaaaaatgctcaacatcatgaatgatcagggaaatgcaaatcaaaaccacaatgcaataccaccttactcctgcaagaatggccataatcaaaaaataaaaaaacagtagatgttggcatggatgcgatgatcag

SEQ ID NO: 130519 - DNA, 356 bp, Homo sapiens
gggaataggaagaatacagatatggatattcaagagacaatcatagggctgtggaaaatggtccttatgtgctgagtccacttctgcttgggaccacagaggagtcgctgttccaggtggagtcatccagtcagttgtcagaaatgtaaaagtctgaaaagacatcttaaaaagccaatcttaagttccacaatagtgatgttatttacaggagcaattggcaatgttgcaaatcttgtgatctctggaacaatggctattaatcatttcactacacctgtatcttagcagaattcaggcccctttcataatcttaaacttgtggccttgtattagttttataaaggcagtttagt

SEQ ID NO: 130520 - DNA, 1080 bp, Homo sapiens
ggaagacaacaacctactaaaacttaaggaaaaaggtaagtgcattctgcgtaacatggaatgggagataaaaaagcaatgctggctgggcgtcctgtaatcccagcactttgggaggccgaggtgggcggatcacgaagtcagcagttcaagaccagcctggccaatgtggtgaaaccctgtctctactaaaagaaaacacaaaaaggtggtggtgtgcgcctagtcccagctactcttggaggctgaggcaggagcatcgcttgaacccaggaggcggaggttgcagtgagccgagatggcgccactacactccagcctgggcgacagagtgagatgttgtctcaaaaagaaaaagaaagaaagaaagaaaaaagcaatgctcattccaagacagaagatataaaacaagaggggaaaatatgctagtgtccaggtccaactttccattaccgctgtacatgttattttcaatacagaagaggtaaaaggaagcctgaaaaggcaagattgctcctcatcccttttcctagtcctgcttaaaaactcgtcactcaataattatttaactagttagtactggttgtcatggaagtaacgaaaaacacaaactgctttgggaggtcgaggcaggcgatcacttgagctcaggagttcaagaccagcctgggccacatggcgaaaccctgtctctacaaaacatacaaaaattagccaggcgtggtggtgcacgtatgtggtcccagctacttgggaggctgaggtgggagtaccgcttgagcccaggaggcagaggatgcaggccaagatcgcactactgcactccagcctgggtgacacagcgagacccagtctcaaacacacacatacacacacagtgagaccaatctcacacacacacacacgtacgtttccagttatcagacccagtctcaaaaacacacatgcacacagcgagaccaaactcaaacacacacgtacgtttctagttatccataatttatctaagaaaacttatctaagtccctgattaggtaaaactcaagaaaaacatcctccttgaaaatactactttcaaga

SEQ ID NO: 130521 - DNA, 242 bp, Homo sapiens
gctataaaagtgggtaccttcagcccatagctcaagtctggctcctaatttcctccagtccaaggaacgataccaggatatgagaatcccatttatgcctacacttgtggaaaacacaacacagctttaaaatctttagtggcaggtgaggcgggaggattgcttgagctcaaggggtcgaggctgcagtgagctatgatcacgcactccagcctggatgatagagtgagaccccgtctcaa

SEQ ID NO: 130522 - DNA, 467 bp, Homo sapiens
gcagaagggaaaaatgtttcagactagtaagccatgactcagttaggagccaggattctgtctgccgaggtttgaatcctggctctatcatgtaccagctgtgttactaggtaagttacacagcttgggtaagttacttaaactccttagtttcttggcctggtgtggtggttcacacctgtaatcccagcactttgggaggccaaggcgagtgaatcacctgaggtcagtagttcaagaccagcctgggcagcatgacaaaaccccatttctactaaaagtacaaaaattagccaggcatggctgggtgcagtggctcacgcctgtaatcctagcactctgggaggccaaagcaggcggatcacgaggtcaggagattgagaccatcctggctaacacagtgaaatcccgtctctactaaaaaaaaaaaaaaaaaaaaaaattagctgggcttggctggcaccggt

SEQ ID NO: 130523 - DNA, 433 bp, Homo sapiens
atccatcacttctaaaagtatcctcatgtccctttgtaaccccttctttcctgctaccctctttcccatccccaagcaaacactgctctgctttctgtcattatagattaatttgcattttctaaattttatataaatggactcagtatgttttgagggaagaaatgtgactcttctttcatgtagtataattttgtgattcattcatgttgttatctgtattaatacttcgtacatttcccattgtatggatataccacaatttacatatccattcatctgttgatgaacatgtgggctatttccagtggggctgttacagataaaggtgctttgaacattagtgtacaattctttgtatgaacatatgcttcagtttcccttgggtttattctgtttcacctaggagaggagtggctggatcatatggtag

SEQ ID NO: 130524 - DNA, 301 bp, Homo sapiens
cacatgccatcttataaagtatcacttgggtgattctatgtgttcatcaattacatgcttgcaccaaaaggtagatatgcctatttatcattggtaatttatgggcctgccatattctaggtgtgtgagaggggaaatatgaaacttaaaaaaaaaaagctactgttgctcaaggtcacagcatggaggctcaatcttatttcacacacacaaatcagatcactgggcgctcgtaggagcaggtcactttcctgaaatagagagctgtcttggactgggacagtccccacaaggatataac

SEQ ID NO: 130525 - DNA, 251 bp, Homo sapiens
gcccggccttgaatgcctcattttcatctggaataatcccctatgaagccattagagtgagcccatgcagcctgtcactctgaggttcaattcaagtctcttctcctctaagaattcttttctgcctagtcattctcatctctggatatctctggttccttggcaagcattgtatcacccaccgccatgtccactgcatggggctgtctgggtcgccctgccgcacccagcacaagcagtctcgtgccaag

SEQ ID NO: 130526 - DNA, 279 bp, Homo sapiens
ttctggtcatggtgtaatattcctaccagcagggacctgatctgtcttgttctttctctttaatacctaaaaaagtgcttgggacaataaatgttggtggaattaatgaatgtcaggaaaatccacttcatctccagtcttccttctgccattagcaagctgtaagtaaccttcacaaactcatctgagctgctttggctacagtttctccacctgtaaaacaagatgtttgcagtacaaagtctttggttctctaagacatgctttctctgttaggag

SEQ ID NO: 130527 - DNA, 488 bp, Homo sapiens
taccaaaaatgctgcccatgtgccccttcctagcttcctgttaccagtcccacccaattatgtgaaccacaactgccctgtttctgcaggttcttaacaccccttttctcagaaggcacagtgtccacctgcctggcctgtaatcactggttaactgcagtcccacataaaactgacccgtgaaagtccacctttagtgccctgatacctgagtataattatatttgacattttagtgacagtcttaaagagaaagggtcacaaatatagctgtgagtgctaaagggcttgtccagtttacaaagtgcagtcacacatgctgctgtgcccttccaacaaccctgggggatgaccattagcatcctgtctcatcagtaagaaaaccaggcccctctctcaaattggatgtatccctcccgctactacacagataggacccagttcaatcacaacccctgcccaggccccacagagctgtatccattcac

SEQ ID NO: 130528 - DNA, 407 bp, Homo sapiens
ctcggcctcccaaagtgctgggattataggcgtgagccaccgcgcccggccgagaaactaatcttttgagatgaactctgagatgtggattttagcttgtttgcagccaccaccactctagttttggaagattttcatcaccccgaagaggcttatactcatttgcagtcagtacccacccacctcttccacccagaccgtggcaacgactccccatctctctagctctggatctgcctcttgtaggccggtcacgtagaccaatcttgtatgggtgtccagttgaggataatgggttggtcctggttgtctgcaatgtgaatcttaccactgaagggtggtccctggagggaagcaggaggctgggagaactgggcggaacatcctttgggaatggagtggggcgg

SEQ ID NO: 130529 - DNA, 448 bp, Homo sapiens
ggtttttttttttcttctcagagttcagaaaactgataggcagtgaggttgaatggctagtgcagaggttgcagtgagccaagatcgctgcactgtagcctgggcaacagagaaagactccatctcaaaaaaataataataaaatagattttgtaagaactgcttacccctttgaaactcacagttaaatcataaccttaattggtgcttgttggtttcacctgtacagttacttttaggaaagtctgaaaaccagaaatattggctgcttggcacagctaaagcaggtaatggggaatttaaaagaattttcttaaagtacattcagcttaactaaaagtgcatacccagattttatacacacacacacacacacacacacacacatatatacatttttttttttttttgagactgagtctcgctctgtagccaagctggagtgcag

SEQ ID NO: 130530 - DNA, 339 bp, Homo sapiens
agccagttgtggtggcgcatgcctgtaatcccagctactcaggaggctgaggcaggagaatcgcttgaacccgggaggcagaggttgcggtgagccgagatcgtgccattgcactccagcctgggcagcaagaggaaactccatctcaaaaaaagaaagaaaaagaaaaagacagatagttgccccttgggggccgcaaggaagaagctgtcctcaggaaggaaaaacacggagatgggggagctcaccaagaagtgaaagggcggttctgagcctcgtgttgaggactgtagacccatgaattgcagattctgcacacacaactctagtcataacaga

SEQ ID NO: 130531 - DNA, 557 bp, Homo sapiens
gacatagtaggttctcagtaaatacgtgtggagggaatggatcaatgaaagaaagaaagccttattgcacatattgtacataattaatatttcagataccataattatatacacttaaaaaattcagccatcagaccatatataactttcctgattaaaagtagtggatgctggttgctttaattctggtgagattcttatgttggataaatggaacctatgttgtctgtggtccacatggtcttttgctgcaacgagagtcttggatatgaagaaaattttaaagcgtgatagaatcagaatgtatattttccccattcttaacagatcaaaatgtgataaagatgttatttgttcccaatatataatatgatttgattgatagctattttctagagggcttcttttgaccttgtttaagatactacttagtattaagtcagatctaatgtgcagtggagtgctatataacctaaagatgcaacaatcctgaaatcactcattttccttttctgactgaattaagggagattatatgaattgtttataaaataggt

SEQ ID NO: 130532 - DNA, 242 bp, Homo sapiens
cagagtccaaacagtgcccagagtccaaacagtgccctggtgagatagaagcaattaaggagagattgagagtaaggaaggagttacagactgtaaactactttttgaggagtttgcaagagaaggcaaagaaagaaagaaagtggatattagctagagaaaaatgaagtagggtcaagagatggtttgggaataaaggtagagaggttggaacctgttaacagaaagaaatccagcataaa

SEQ ID NO: 130533 - DNA, 354 bp, Homo sapiens
ccaagcaggacaagtctttttctttactgtcgcttgtcagaaggacaagtctttttttactgtcacttcttcgccttgtttgggttcagtccccaagaggatttggaaggaaaatccgttgaccactaagctaattaacaatgaagagtttttgtccttgagaactaatcactgttaaagtcactgaagtaagtggctgatacctctctgctttggatgcacagacagtgcctttgtgtcccctgagtcacctactgccaacaaaggcacagtcagagcaagacctgagagtctatccgttccccgttggggaatgtcctgggcttaggggttctgtagtcccaaaatcagggc

SEQ ID NO: 130534 - DNA, 182 bp, Homo sapiens
catttagttcccctaattagcatactaagcaggaatgatttacaaggctagctagcaaatactttggaccatgaagtagaggaatagagaaggtgaatttctgtgcaatgctgtgggaatcagggagcagagggttgagtaaagcaggtacatggcagagataagcttttgttggtgaggag

SEQ ID NO: 130535 - DNA, 497 bp, Homo sapiens
tgcttttacagtatataaaacacttaaaatacagttgcttatttcatttcctcagtaatcctagagagtatttcctgcatcttattgatgaggaattgaagctgggatagcttctctcctgactcttgaagtccgaaaacaagtggacggagctgtagcactaagcctcagcctgctcgtcttcaacctgctcctggctgcagagtcttgattgactctgcctgtctccagtgtgctttcattcccttcagtgggtaacttgtcagacctcgtcttgtttttgagactttggtttctgtcttgccttcttcctaactttggtattcttagttccaaatcctgaataactcctgtaatgggcctcccagtagggggggttcctgtatttatattcacagatgtacgtattttaatagttaacatctgaaatcagtatacatcttaaagttgccatggaagttcatttcttcagtgtctgcctctgctcgtcacttgag

SEQ ID NO: 130536 - DNA, 348 bp, Homo sapiens
gtgctggggttacaggcgtgagccactgtgcctggcccatcctacaagttttgatttgtaatattttttattactcgtatttaagtatttcttttgtaattttcatgtttctttgacctataagttaggtgttcttacatttccaaaaaaaaggtttttttaaatttattttttaaatgatttctaatttaattgcactttgaccagagaatgtggtctttgagataccagttctctgaaaatttactgagatttatttatggcctggtatgtggtcaagtttttaacatattaatgatgttttacctattgattcatcaattacgaagaaatatatgaacatctcct

SEQ ID NO: 130537 - DNA, 114 bp, Homo sapiens
tcactaaggtctctgacaatttcaattctatgattctaaaattcctgtgatatctccctaaagcagtgattagtccagccccctgcagggttccacagctccatgggtctcatg

SEQ ID NO: 130538 - DNA, 766 bp, Homo sapiens
gctttctttacaagtcatttgttgggcattgtttttctagagtgtttttatcaggtgcaagtgcttctcctaattctccaaggagcttctataaattaatttggtaatcgtgactgagagttctccttgctgttctaaggatataaccacaatagctacatgaattttttttaactgtttattgtagaatgtggatttatataaaatgggcatcacagtcatgtcaatgagaaaattttaagaaacaaatattttcagatttgcaaactttaattttttgcttctaaaatatccctaagaatctattacatagctttcatgattatattagaggaaaagttcttctgaaactaggctttaaattctaatatgagaggacggctgtcctcccgcttcagcctccagaagtaatgggattagaggcgtgagccaccacactcagctaattgttttatttttgtagagatagggtctcgctatttttgtagagataggttgcccaggttggtctcaaactcttgggcttaagtgatcctgccacctgggcctccgaaagtgctgggattacagatgtgagtaaccatggcccgctgataataaagatctagtagaattactctttgttctctttcttagaaatatagatatcctggctgggcgtggtggctcatgcctgtaatcccagcactttgggaggccaaggtgggtggatcacctgaagtcaggagtttgagaccagcctgaccaacatggtgaaaccccgttt

SEQ ID NO: 130539 - DNA, 292 bp, Homo sapiens
cgaggtgactctacaggatcttgcgtgtgggcatccctattttacaagcacaggcaagtggctgccctgctctgtcctctgtacccagagtcaggttgtgcagatgccttgagctactgcccaggcaaacgccctgttaacgccattctccagatgcaaatgatcactctctcttgctcttacagcccaagaggcgagcaggccattgaagggacccaaagtaaactactggctttaaccaagaatctcatgcacctgggcaaagatgcccctggcacccagcatggcccag

SEQ ID NO: 130540 - DNA, 231 bp, Homo sapiens
atatgagtatttaaagaatattaatgatttttaagcaagatgactggggaaggttaaaaaaaaggaagattggagtgggaaaattgtataatggcagcactggtttataaaagtaaggaagactggaaaatgggaaacatttatacccaaggaataacagagataaagctgggctggtaattaaaataaatatagacagggaaggggagcttgggaaggggaactaattta

SEQ ID NO: 130541 - DNA, 250 bp, Homo sapiens
ctgctccgcccctctctgttcacgctggaagctgacttgctaggtcttgtatctatgagccaggtgccgggcacctattagcttcctgactgcactccagcctggatgacagaatgagactgtgtttcaaaagaaaaagtagtcagtttacaaatgttattggcggggcgtgggatggaatgaggtggtcaggtaacatttcattaaaaaagtgacatttgagccaagatcaggagagagtgaggagctg

SEQ ID NO: 130542 - DNA, 205 bp, Homo sapiens
attctgagatctaagctgacagaaaagtcccatctggagggttactagtctccatggaagaagaaagaaaactccgaagggcaaggaaatgacctgcctacaagtggtatacagcatatctgctcacgactaactggccaactcgtcacatggccctatccaaacacaaggaagcttggaagaacaatcctagcacgtgcacttc

SEQ ID NO: 130543 - DNA, 343 bp, Homo sapiens
aggcctttagtactgtgggagaatgaatttgttgttttaagccaccaggtccatggtcatttgtacagcagctctaggaaaccaaaggtttcttgaataaataataccaaagagagggcaggcacggtggctcacatctgtaatcccagcactttgggaggctgaggcaggagaatcacttgaaccccggaggcggaggttgccgtgagcggagatcacaccactgaactccagcctggacaacatgagactctatctcaaaaacaaacaaacacaaatcttcgaatacttatgttaacaaagtaaagcaaagaggccaaggtgggaggatcgcttgagccag

SEQ ID NO: 130544 - DNA, 227 bp, Homo sapiens
taacagccagttgtgggccccctcctacgtgactttgctcaagcccatattgaactcttggtcacagggaccaggggttcctggacccctggcccaagtgacaactacccatagtggcagacaagcagcagccacccaaacattttgcccaaatatttttcctcagtctctgtggctgctgggtagattttctggcacctcagtctggacaacgctgttcatgcttt

SEQ ID NO: 130545 - DNA, 250 bp, Homo sapiens
caaaacttaatattgacaaaaaacagcaaaggggggatgctcggggcacatatatcatcatccgtgagtacacagggttccagattctaaaaattagacaatgaacagaacaagttgatttccaggtggttaaataccagggttttcagattgaaccctgaggcagtggtaagaagaacagatcctccttaaatatagcaaaaggagctgctgcaggtcccagagtacaccaagaaaacaacagcttcta

SEQ ID NO: 130546 - DNA, 313 bp, Homo sapiens
agagctgtctcagattttctgagttcacagaagcaactgtcctgaaagaccagaccccactgaccgtagaacttctgcttccctccggagtcagcgtctcacccagaaccctccgtggggatggagggagaccaggtgatgcctgtcacttacgtatgaatgctctggggacaacatgcacccagatccccgggaggacgccttaccagtgtgtcacgcctgaagtcagcacacctttccgggaagctctcgggaaggtttggggcagcaagaaaagatcaactgcataaagggggagactgtatcccatttt

SEQ ID NO: 130547 - DNA, 505 bp, Homo sapiens
gatgatgagatgaaatgagatgaaaagatgaaatgatgagatgaaatgaaatgatgggatgaaatgaggtgaaatgaaattagatgaaatgtaatgagatgaaatgaaatgacataatgaaatgaaataatgaaatgagatgaaataaaataatgaaatgatgaaataatgaaatgaaaatgaaatggaaatgatgagataagaaatgatgagatgaaatgatgaaatgagatgagataacaatgagatgaaatgatgagatgagatgaaatatgagatgaaatgacataatgaatgaaacgatgaaacggaataatgaaatggaaatgatgagctgagatgcaatgagttgaaatgagatgaaatgatgaaatgatgagatgaaatgatgagatgagatgtgatgaaatgacatgaaatgatgacataaaatgagatgaaatgagatgtaatgatggaatgagatgagatgaacatgagatgaaatgatagatgagataaaatg

SEQ ID NO: 130548 - DNA, 407 bp, Homo sapiens
tagacttgaaagattttctgcttctgatctcaatattattttgttgaaagtattcatggtatagttttgactttttaagtgcaacgatcaaaggaatgactttaataaattctacaaaatagtattaaacaatttaatatatttaatcaaatctaagtgaccttgttcaaggtgtcttccctttcattgatctatttaatttttagttctttgccttgaagtcatatttcagacatgtgcacagatacttctctttttcctctgtggcaatgacaacattaggacatgaaagaagacattagacatgaaagaagacaggaaacagtttaaagccaattttattttcaagtccccatttgatagtcattctcgctgactgttctgaaccatgagaaaatgcccaagtg

SEQ ID NO: 130549 - DNA, 325 bp, Homo sapiens
gcaagcaggtgcaaggctgcagctagaggggctgtctgagcaaagaagacctaggctggtggcataggaagacaagagtgccgacaccaggcccagtgaatagaaaacgagttccctttccagactggggttgtgagctctgctctgttttatgagcagaaggcacctgcaatgtcagaagtggaaaccatgggaagtcccccaacacccactcaatcagagctctgagctcatctcctgtaaccttcccagccccatctcctgtaaccttcccagcctggccaacatggtgaaaccccgtctgtactaaaaacttggacctcat

SEQ ID NO: 130550 - DNA, 294 bp, Homo sapiens
acaacccaccagtgcctggccaggtgagcatgtgagctctcctttggaagggtcacggactagaggagaggaagttctgctgaggtgggaaggcctgggccagacagcagagagccctgggctcctccgggcagaggagactccctgagcgggtgaaactaaccatcgtgttttaacaagctattccaaccctaaaccagttctcccaattagtttcttgacacttattgccagaactgtattcactgacctccttcgcttcctccctcctccttccctcaataatgaatactt

SEQ ID NO: 130551 - DNA, 142 bp, Homo sapiens
acaaacaacgtgagaatgagaaaagcagcccctgacgtctgaaagctagcctggtactattagcaaggcattgatgttggtgggaggctgacttgcactcataaccaggccttgttgcaaaacataaacaatttcaaagaac

SEQ ID NO: 130552 - DNA, 265 bp, Homo sapiens
ggtttgtgccccggcccaggcctgacgccgaccgtgcccatggctgccgagcagaggcgggcggcttctcccttgtcccctgcacagcgtccggccctgtttggcctctgctggggttgggatggggctgcagccgtcctagggacgctcaggctgaggctcgggacctccatgagcagagtggggacaccccaaattccagtgtgtccagactcagagaccccacagtgggtgtgggccgaggctccccatgccagggttggca

SEQ ID NO: 130553 - DNA, 440 bp, Homo sapiens
ggtaataggcatcctaatgggtgtgagaatatctcatagtgcttttaatatacagttccctgatgactaatgatactgaacatcttttcatatacctgttggtgatttttacgttttcttttgagaaatgtctattcagatcttctgcccattttaaaatcaggttatttgtttttctgctattgagttttatgagttctttataaattctggatattaattccttagcagatgcatagtttacaaatatgttttctgtgtctacaggctgctgactcattttgttgttttcagaagctttttagtttgatgtagtcccatttatatatttgtgcttttgtggcctgacctcttgatatgcaaaaaatcattgccaaggtcggtgtcccagagcttttctccctacgttctcttgcaggacttttatagtttctgatctt

SEQ ID NO: 130554 - DNA, 967 bp, Homo sapiens
ataaatggaatgatccatacttgagtgtgaggataaatattcagccaggatcataaaggacattccatttgaccctgtcagaagatgaattcctgagttcagtgaatctcctgggacattttatattcctagcttaaatgctagccaaaaattataaaagcttcttgcaaaaatattattgtaaatctagtgacctaatttatgacttgtttttgtttgtctctcttatacagactttcttcattataggcttgtttttaaagtgaaattgggaagttgctcttaagaatgttttcaacctttctttctctctttctctttctttctttcttttcttttcttttcttttctttccttttccttctttctttcctttttttaaatttgagacagagttgtgctctgtcacccaggctggagtgcgatggtgcggtattggcttactgcaacctccacctcccaggtttgagtgattctcctgcctcagcctcctgagtagctgggattacaggtgtgcaccaccatgcccagctaatttttatagtttttttagtagagacagggtttcaccatgttggccaggctggtctcgaactcctgacctccagttatccgcctgtgcctcggcctcccaaagtgctgggattacagatgtgagccaccatgcctggcctcaacatttttttcttacagtgttttattcagaagactgtctcacacatggtccaatgtatttttgttacctcaaaaattacagtatttgtggaaaacaaaagcattctttcgtgcatcattgtgccctttaggaaggctcagatagatagacatcttagagtttatttaatacaaattgtggtattaggacacagagtagcagttccttctttttttcaaaattattcaaaaatatagaatgaattgattttccctccagatatgtaattttgtaattattgtgtttctgatg

SEQ ID NO: 130555 - DNA, 498 bp, Homo sapiens
ggctggtgccacattcacagggacaacaggacaacacaggcagtatgtggagggcaggggaactgggtttctcactggtgaaaggagaatagtaaacgcgaaaggcagaaaactaggatgaaccttgtggcatgagcctggattaaaggtagccaggtgaactcctgtcaatgtatataaagaaatataaacagaaatgtggaatgtacatacaaccttagcttggtccaataggagggcatgaaaacagtgataccccaaaagcaataggcactcctagtgtccaaatatagggttctgcacaccattcttcactaaaagaaaccaggactcctaggagaaatgacttattccaggactgaggcagtcaaagtgcaagatgagccgagaatatcttgttacaggagaaagtgaggagctgctcacagaatgactaaggtcatgttaaaaggacagagatggcttgaagcagctctcagtagacaaactgagacaata

SEQ ID NO: 130556 - DNA, 720 bp, Homo sapiens
  misc_feature (469)..(469): n is a, c, g, or t
ttatgagatcttggtttcaagtctttggaccagttttctgagccacacttctttatattgctgtggcttaaaataaatatcacctgtttcctaatacctcatttaaactgaaaaattgatatacatctagttgttccaagaaaatttagatattcaaaaatatggtatttaagatacctataattatgtaaatcatattgcccttgatatcttttcatatccgtcttagctaaaaatagtacttaataatttatggtatattttcaaagagctagacgagaggattttgaatatactcaacacaatgtaatgataaatgtttgaagtaatgaatacactaattactctgatttgatcattacacatgtatcagaatatcacactgtacttcataaatatatacaattattatttgtcaattaaaaggaaaaagttctcaccaaaaagtgataagtacatgagataatgntgtatgttaaatagcttgttttagacattccacaatgtatacttatatcaaaacatcatgttatataccataaatatatcatttataccataaatatgtccaatttctattcatcaaataaataatttttaaaaaagaaagagaaaaacagcttttcttcccttttttaccatatgaaactctctacctaaataatctcatctgctctcaaatgttcatatttatcaagaatacttggggcatttttaaaa

SEQ ID NO: 130557 - DNA, 529 bp, Homo sapiens
tcagcaccatggaggatggaaaaactagcgttggtagaagagctggaggctgacgagtggcggtctaagtcacatcagacagctgcgtgtggatggaaggagacaacacacggagcacatcacattatgtctgtgccgcttcgtacaggagatgcttcaaccctatgagccatttgactatgtgcatgcgatagggtgggaagtatcagtatgatgagcattttatgctagagagcagcactggggcagagcaggccctctgtaaatcagtgagtggatgctgtcaccgagtgcacacttattttgttacttggctgcagctgccataacaaagtaccacgaactgggtagcttcaacaacagacatcatcttcccacagctctggaggctgcaagtctgagatcaaagtgtagacaaggttgattccttccaaggtccctgtgggaaggatctgtccccagcctctccccttggcttgtagatggcaccctctccttgcacctcttcactccatcttccctctgtgca

SEQ ID NO: 130558 - DNA, 400 bp, Homo sapiens
ctcctctttctaacagaaaatagctgctgccccactcctgtgccaaaatctgctccaagggatcctatcctagtcagaaggctgtactctgaatgctgatattagctacaacaccaaggcttcccactatacaaactggatcctcaaagtcatccacaccaaatgaactctctattctttctcccagtagcctgagaactgggtttaccagccttggcccttcctttccttctagcctcaaaacaggatgggaacagagtctttggctgtgagaatgggctcaataacaaaataaagatgacagaagagtcagtgacttcaatgacagagcgatagaaattaccaatataaacggagagaaaagagattttttaaaaatgaacaaatccccaaggacctg

SEQ ID NO: 130559 - DNA, 287 bp, Homo sapiens
ccaccttggcctccctcatatggcagattgagttgttgcagtggggactatagagttgacaaagccttaaaatatatgctctctggctctgtatctaatcaagccagattagattatgtgggggaatatcaaaggaggtccagtaaagaaacttgagttcatctgtcaggagagagttgaacatgacgatgaacagcatatgatggaccagtgcagtttaacaaacatcagtttagtgcttactgtatgccgggtcctgggcacacagtgacagaagcctcagttct

SEQ ID NO: 130560 - DNA, 427 bp, Homo sapiens
gcacagcatgactagtttgtctgctcaggatttaaactaaagactgaaaacacagtgttggctagactgcattcgcattaggagctcatgtttctaaactcacatgattgtggcacagctcacttgtgattggggctgagaactaaagactgaatttccttacttgatgtcagctaggagccactcccagctcctagagactacccacattccttgccacacagccccctcctccatcagaaacagcaatggaaaactccattatgttttatccctgtcacacttcaaatttcctttgccaggaaatttgtccctttggagggctcatctaatgaggttagccttattgaggaaaaatctctggaccttgaagtcagttgattaaggatcctgcaaaagcccttcgcagtagcacctagattagcat

SEQ ID NO: 130561 - DNA, 506 bp, Homo sapiens
ccataattccatgcttaggtacatacctaacagagagaaaatgttatgttcacacaaaaattagtacaagcatgtatgtacaagttatagcactattcattactcataatagaccaaaactggaaacaacccaaatgtccatcaactaataaacattattcagcagtaaggaatgaaatacatgctatattcatgaacgaaatgtaacactatgctaagagaaagccagtcaccaagattgactccatttatatgcaatatccagaaaaacagacagtaatccacaaaacagataataaactgtggttgtcaggaactggtgggaggaaaacagggcaacaactgctaatgggtatgggtttttctgagggtgatgaaaatgttctggaattaagataataatgaggatcacacagaccttgaatatactaataatctggcattcaataattgtattgaaggccaggtgcagtggctcacgcctgtaatcccagcactttgggagg

SEQ ID NO: 130562 - DNA, 330 bp, Homo sapiens
ctgtgggccttcacgcttggcactggtgcgtcgctttgacgtggtttgtgactgggcaatccctggtcgtccttgctttattttgtgatatagctatatttctccctcctgactgttaacaggaaaacttccttctagattggctaatgggtatgcctcttaggaagcctctttcatatcacttctcctccacaaccttaaataacttttgacacaggacacctcatatctgctgtatgggattccatagggactacctgtcttgtttaattaaagacctgccatgcttttctactcttcctttgcttttcctcaaatactgggagagag

SEQ ID NO: 130563 - DNA, 663 bp, Homo sapiens
gaaatcagaaaatctcaaccagaactttcaaataggctaactgctaaccctgatcttacggcctctgagcttcatttaatgggaaacagtacagtgttgagaggtctgatttctgcttcctcacagctggatactgacagtgtgcacaggcatgatgttggcagtggcagagggatgagaatcttcgtagaccatacaaacccagccccacattgttatgtaaggaattgtccctgacctgtgccttgcaataggaaggggaggcttcacaccatgatggctacgacatgagatgtgctgtctcagcaggcctggtatgaaatcctagttccctcaccatgtgtgagattttagaggagtgactgatcctcagttttctcattcatataatggaacaacctatgagaatattcaggaaatttgtaaaagacactatgtctaatgtatgtccagcccatagtagaggtttaataaatgccctgtttctttgatgcccacagttctcttttgaagtccagacatgtaagagtgtggtcaacaatatttccttgtcaaatcctcacctgcagagattaccagggtgactgagaccttgattttttttttcatttatgtattattaatagttccacttgaggcttgccacagtggctcactcctgta

SEQ ID NO: 130564 - DNA, 357 bp, Homo sapiens
tatgtatacacctgaatgacccaagaactagataacataaattttgtaaaaaacaagagtaccacataaaatagtgaatataaaatgtactattttgtagcattagttttctattgctgcatagcaagttaccacaaatttagcagcttaaacaatttatattatctcatagtttcagtgggttcggcatctgagcatggcttagctgtgtcctatgctgtaatcaacttatgctcaccaggctattatcaaagtgttggctgggctccattccattatatgtcttgagaatcctcttccaagctcaagtggatgtgataaacttcagttccttgcagtttagggctgaggcactta

SEQ ID NO: 130565 - DNA, 482 bp, Homo sapiens
gggctgcagtgagaatgtggcatcactccataggactccggccagagagacatcagacaatcccaaatggaggagcattctgcaaaatgactgccagtaattttcaaagctcctggctgaggaagtgtttcaggctgaaggagactgaagacacagaactaaatgcaatatgtgattctggactggaccctccattctcaaggatgcagttgggacaaccagagaaatctgatggggtctgaggagcacacggcagtgatgtgttgtcacatgctgcatcatgacagttcagtcaacaacaggccacatatgtgatatgcttccataagattataatggggcagaaaaattcctaacacctagtgatgtcacaaagggttgtaaagtcatagtgcaactcattattcccaagtttgtggtgatgctggtgtaaacaaatttactgccagtcatatcgaagtagagcatataaggtcatgtta

SEQ ID NO: 130566 - DNA, 748 bp, Homo sapiens
tgactgaatatctcttaactggtttcttcacttttaaaatgggggaaatcatatctactccatagagttcattgattctacaaatcctgcagtgccaggccctgagctgggtggtgggacgagacagtctttgatgtcaaggatctctgggtggatatgaaaattaaagagataaaatgttcaaagtccaaggaccatgagggatgcccaataaacattaattttatttccttcaaggaggtaacatgattctgcttttcttttctttttttcttttttttggtctaagaagtaattctcaaatttcacagcatggaacaaagagctatgcttctccccttatctagatggaaaatttgaggtacaggtactgttttgagttcaattgtgtccttcaaaagttcatatgtaccttagagtacccgctgtgtgccccagcacctcagaatgagaccttatttggaaatggggtctttgcggatgtagtcaagttacaatgagatcattaggttaggccctcatccagtatgaccagggtccttataaaaagggggaagtttggacagagacgaatgcacagggaaaatgctgtgtgagagttggagttatgctgccacaagccaaggaaatcaaggatggctggctgtcccccgaagccagggcagaagcaggggccagattctcccttgtggcttccgaaggaaccagccctgccaacaccttgattttgggcttctggcatccagaa

SEQ ID NO: 130567 - DNA, 343 bp, Homo sapiens
aagctggcagcatttccaggtcaaaaaaccctccccaaccctcacacagccctggtttgctcgtgagcttgtctatgatatgtgactcccaacagctgcacaacactgcgtcctccctgagagctgcagcagcagtcaccgtccacacggtcagcagggaggataggtaaacacatacaagatcaaccgcaaagtagcattcgtgtttctagctgggacccacagctgtctctgctgctcttctagtcttcggaagtgcctgtctcacatgcactgccaacatctacacaccctgtcacaagagacccccagaccacagccttccagacgtctccatctacac

SEQ ID NO: 130568 - DNA, 283 bp, Homo sapiens
ctgctccgcccctctctgaactgttcttcgttcccatcttaactgatttaaatctcttcatggatcatgagtgggagccttttgatgcaggggaggtgacagctctgggcactgggccatgggaattctctggttataagcctgggacatagggtgggccctccagggtctgctccctacagcttctcatccttctcagtgtgtgggtggctgccttggtgctcccctgcccacccccgcagctgtttctgacattcaggacatggcgggggcgggggtcacg

SEQ ID NO: 130569 - DNA, 431 bp, Homo sapiens
tcttgttgaaggccatgaaaatatttatcagttttgttaaaaatctttcaaaattatgttggcttcttttgctatctttataaacgtgttatatgctatgtataatttaatacttaaatttttgttactaaatatcttgccttcacttatgtttattattgtgaacaccagtttcaataaactgatgcttaataagctcactaaagtttagtgctaagttagcctcagccattcattttacagatgaggaaatagtgacccagagaaattgagagactttgctcagagtcaccgtgtttgttgttagaggcacagtgtgtgtgtgattacagaactttcatctgaatgctataatatgtgcctaaaagaaagcgctatcgcatgagttctggtagcaccttattttctttcttaatttcacagcagaatgc

SEQ ID NO: 130570 - DNA, 913 bp, Homo sapiens
tgcaaggtatgcaaaaggctaaaccaaagctttacaattatttgaaaaaaagtttatgcctattaaatcatttgattctgagcatctgttgatgtgctaatgctttccaacactgctgcaccatcttgtcaagaagtatttagggattgaaaaggaaagtattgcaaaaaaggcaccctgtgtgcaaattgtatttcttccctaaaatgatgtctatattttcaaacacaggttagacgttttatggagtgtgtgattctcaaaaacacagaaaacagttttccattggaagttcgtgatttaaacccacaaaaaaggaaacaaaaaaaaaacacacaataagaaacacaacattgcgtgcgggccgcctccggagccacgcagaggagaagctctcaaaacaccaactaccgtgagtggagccagggggcgcaaaaaggtaacacgcagcaacattggcgccaaaccggggcccccccgagcacatccaggggcaaaggcaaacggggagtggagatcacacaaccaaaaaaaaaaccgcggggaggaacaccagcaggttgtggaacaaaaccaaaaagaggaaacgggacggccacaacaggggacactaacaaagaggggacacagaagaagaccgaaataacaaagtggccccgcaggggggagaaagaaagacgagaaacgagcgataagaaacaaaagacagacaagaaaagacagcaagaacaaaaacagaggaatagagagaaagaaacaaaagactagaggaacgaagcaaaaaaaacaacaatacaagcaacagaagaaacaacagaactcgataaagaaaagagagaggataaaaaagagagagaaaaaaacataaagaacagagaagtaagtagcgaaacaaaaacaaaaagccgaacaa

SEQ ID NO: 130571 - DNA, 285 bp, Homo sapiens
agcctctcttgcagctggatatgaccatgtgactaagttctagccaaaaagctataagcaaaagtgtcatgtgcagcatttaggaagcctcccttaaggaagagaatgcatgctttgcccttttcatcctttgctggctaaatgagaataagatgtctgaaacccaggcagccatatgggactatgaggtagggtgccaagagtgctggtgtggcaagacagagggagcatgggtccccaacacaaggagccaccttcccagtcctgggctaccctccttttagg

SEQ ID NO: 130572 - DNA, 239 bp, Homo sapiens
tcagatcttgtcccctaaaaaatggagtcccggggggttcctgaagaaggacgtgccggtgctacatttactgtgattatgtgtggcctcctctctccagcacacttgactgaaatagaaggcatcttcctctggtggcttcccgcacatggtcagtgctcaggaagtggaaagtgtttgtcgtgaagggagcacactggcctgggcatgcaaggggcaggtggagtctggtttgggtg

SEQ ID NO: 130573 - DNA, 279 bp, Homo sapiens
tgcctgcaatggggacatcacagtgggtgtcaggcctgccctccgggaccttgaggtgaaagcagccaggggcacctccacaccagctcagagggagaagcactctgccttgtctcagccatggctactgaggggcctcaggttcaacagctgtggaccgactgctgcaagaacacccccctgccttggagtcagcccgcttgccactcccgctgccaccccaggggcccctccactggtgacctcgtggaggggcaggtgacaagaggcagggacaga

SEQ ID NO: 130574 - DNA, 908 bp, Homo sapiens
gcctcccaaagtgctgagattgcgggcgtgagccaccactcccagccaaaaattttttaattttaaaagtcaatgtatatcatttgtattttatagttagtgctttttttgtattgtttaaatttttaaaattcttccattaatctaaaatattttcatgtgtgctttctactaagagaatttaagttttgtttttgacattatagtttttaatacatttggatttggatcttatatcttgtatgatacagaactctaattttcgcctttaactacatgcataatcattttttccacctccacttattgaatagttcctaattttcccatcaatatcatgtgtttcttctggcatagccaaagtcccataaatgtgtgggtctgttgtagtttcctatttaattcagttaatttgtccaatttgttttattatgccttaattaccacagcttcacagtaagtctttatgtctgatagggcagcttcctctagtgtcttcagaaatttcctgactttaaaaaaaatccttattgttcatgcttttttaaagaattagctttacatgatgcaagaaaaagatctgttggaattttgattgtaattttgttaaatctataggtcaactaattacaatattgaatcttcttatgcacaaacatggtatatttctccatttattcaggtctttatttaatgtctcctaatgtctttttgtagtttttacttagagatcttacatatttgttattatatttactcctaggtacttggtattctctaagattattgaaaatgctgtcttctttttaattacattttcaggtatttgtcattggtataaagaaatgtatttgacaataatcttatattcaccttaaattctcttatttctaataaattgtactttt

SEQ ID NO: 130575 - DNA, 263 bp, Homo sapiens
ttcttctatggtgtctcacagttctcacatacaagttgacaatttatacttgttaaaacttttgtttgtatcctcttttatttcattgagcagtggtttgtagttctccttgaagaggtccttcacgtcccttgtaagttggattcctaggtattttattttctttgaagcaattgtgaatgggagttcactcatgatttggctctctgtttgttattggtgtataagaatgcttgtgatttttgtacattgattttgtatcc

SEQ ID NO: 130576 - DNA, 790 bp, Homo sapiens
ctggaggacagatacagactggtctttagagaatctcttcagccctctttagctttcagagtgccttttgctctttcttgcgttgaagaaactgacagtgtgagagaggctgacgctgcttttgattctcttccttgtagttcttatctcattcgtacaaactgtgaggtaaattcagaagtgactgtccttcctatccagttttatctttggaatattttagcattagtgatgtaattgtagtcagtgatctaagattttatttatgaggcaggtaacttgagtaaaatttttcatagaaaagttcatgaataacagggccgggcacagtggttcacgcctgtaatgccagcactttgggaggccgaggcgggtggatcatgaggtcaggagattgagaccatcctggctaacatgatgaaaccctgtttctactaaaaatacaaaaaattagccaggtgtggtggcacgtgcctgtagtcccagccactcaggaggctgaggcaggagaattgcttgaacctgggaggcagagtttgcagtgagctgagatggcaccactgcactccagcctgggtgacagagcgagacttcgtctcaaaaaaaaaaaaaaattagcaggtgcctgtaatcccagctactcaggaggttgagccatgagaatcgcttgaacccaggaggcagaggttgcagtgagccaagatcatgccactgcactccagcctgggcaacagaatgagactccatcccctccaaaaaaagtttgcgaataacatatgcttgtgtactc

SEQ ID NO: 130577 - DNA, 693 bp, Homo sapiens
cacggtggctcacacatggaatcccagcacttggggaggctgaagtgggtggatgacttgaggtcaggagttcaagaccagcctggccacatggtaaaaccctatctctactaaaaatacaaaaattagctgggtgtggtggcgggtgcccataatcccagctactcgggaggctgaggtgggaaaattgctggaacctgggaggcagaggttgcagtaagacaagatcgcaccactgcactccagcctgggcggcagagtgagaaaaaaaaaagaaagaaagaaaaagaaaaagaaaagaaaagaaaaaactatagatgaatgacttaagtgaataacaagtcaagtgagtaatgacaatatgtagaaaaatattccaagtagaattaataaattttaattatttgaatgagaaaatgccgccatattcaaaatgaaagtaaaagtaggatgagatcagcatatacaactgcatatatttcattaattaaagatgactaaagaggagactatcaatttgaaagaagattactaagattttgtttttttaaaacatactgaaccaaataaaaaaaaaataacagtaagacataactactaacagaaaattttttccaatgagaatacaagcttattaaccactccttttttcattaatgctcactcagcttctaccagccttctaataagaac

SEQ ID NO: 130578 - DNA, 282 bp, Homo sapiens
gctaaagtaagtaatgaatcaatgaaaatcctaataatacatcatttcttacatggataagtaaatttattaaataaaaactaagggtgaattttggagtaataagagacaattaagatattataatgtggtttcaccatctattttttaagctaaaaacttggaaaataagtatcttcagctttgttttgtattttttcccttctgattttacaaactctaggatgcgcttagtattgcttttctgattcatctctcttcttcatcttccaatatatataa

SEQ ID NO: 130579 - DNA, 487 bp, Homo sapiens
gggctcctacgtccctgggaaggtagtacagctagctaggacttacgttacagccagcccggatctattgaaagaaggaaggagccttaatgaagaccccccagctggggcccacctgagcatcagaaccaaggcttctgacctctgagatccagctctggaaggctcttcagcccccttaggaaggagctgatctaggccattgagggtcgggggcaagggttggttaccttcctgggaatacagcggcttttaggggttaagagaacaggcaggtttttcaggtccacagtggtgcgtcaggttccttctgcccaggggagggctccctggagttgaggcccagagggggaggaggaggaggctggcagctggggaaggagtctaggggcttatgggagctccgcaacaggatcttggatgggatgtggggagagcagcctgaggaactctgaactgtcctcaggccctgaacgcctgcctctgg

SEQ ID NO: 130580 - DNA, 734 bp, Homo sapiens
gtagaagttgcagtgagccgagatcgcaccactgcactccagcctggcaacagagtgagactccgtctcaaagaaaaaaaagaagtatactattttcatagaagtatacttattggcatagaaatatgtttacctgtcaggtatggtagcccatacctgtaatcctagcactttgagaggcctaggccagaagatcgcttgagcccaggagtttgagaccagcctggacaacacaggaaaaccctgtctctacaaaataactttttaaaaaaattatccaggcatggtggttcacacctgtggtcaggaggctgaggtgggaggatagtttgagtgcaggaggtcgaggctgcagtgagccatgattgagccactgcattctagcttgggcaacagagcgagaccctgtctcaaaaaatacatatatgtttatgaatattggaacatttaaaaagcagtaaatatactatgaagtacaattgaattttaatttcagaatattatatgcacacacatatactgtcagcaacaaagaaaaaaactggatagaaaattataacactgttattaattaaaattgttatacaaaatttgagaacaacttgggggttataagaacatgaaaagctgtggtttgcaaccttcatagggtcccaaagcaagatggaaacatcccaatgggaggttaacacttgacaatcttataacaaggtctatatatcaaacttattatc

SEQ ID NO: 130581 - DNA, 278 bp, Homo sapiens
atctgcccaccttggcctcccaaagttctgggattagaggcgtgagtcaccgtgcccatccagcatgtataattttaacgtaatggctaatcactcatgaggggaagaaatggctaatcactcatgaggggaagagatttttgaacatttttaaataatagagacagggtcttgctatgttgcccaggctggtcttgaacgcttggtttcaagccatcctcccaccttcgcctcccaaagtgctgggattataggcgtgaaccattgcacctggcccc

SEQ ID NO: 130582 - DNA, 312 bp, Homo sapiens
gagttggttctgcacagcaagggccacactgtcacgtttcttgaacaccatttcgtaagggccttccccaaacattgtggcatatatcacacagcccagggaccagacatcagtctgttcatcaatgacacagtgactgctcagggaagagctctagggctcagtaggagatggtgcactgctgggtcgcctagtccggcagggtcagggcctggtgggagcccttcatgtgaggcatgcttgattcatggcatccaagtgtattaaaactggctgcccctcgtctccaagcaagatagtggtgggcttcag

SEQ ID NO: 130583 - DNA, 506 bp, Homo sapiens
aacctcttatcacttccctcttcatgtgcagaatttaccttggctgagacacagtcaagaaagaagacaggtggccaggcacagtggctcacacctgtaatctcagtactttgggaggctgaggtgggcgggtcacctgaggttaggagtttgagaccagcctgaccaacatagagaaaccccgtctctactaaaaatgcaaaaatagccgggtgtggtggcacatgcctgtaatcccagctacttgggaggctgaggcaggagaatctcttgaacccaggaggtggaggttgtgttgaggctaggttgcgctgttgcactctagcctgggcaacaagagtgaaactccatctcaacaacaacaacaaaaaagaagacgacaggctgtgtgcagtggctcatacctgtacaccagcactttggaaggccaagtgggaaggattgcttgagcccaggagttcgaaaccagcctgggcaaaatagcgagatctcgtctctacaaaaaa

SEQ ID NO: 130584 - DNA, 417 bp, Homo sapiens
gggggttggatgcctcctgtcccctagtctggtgtcaggataccccactcagactttgagtgctctatatacccccatgtaccacgtattctaagtggctgggtcctgcattccatcatcccctccttttacagtcttgctcttcaatttcaaatggggcaattcctctatctatctgaattcatgggaatgttatccatagcacaccaatgaggtagaaccagctcacagcctagaaaaccttcagcattcgacgattgcatgaatcaagatttatttcccttttcaataagccttgtgcaaggcattctgccaggtgctaagaacacactaccactagtgtgcaattagggggagactgattctaccctcttccatacacaggcatgcacacacacacacacattgtcacagtaa

SEQ ID NO: 130585 - DNA, 655 bp, Homo sapiens
cacagtggctcacgcctataatcccagcactttggaaggctgaggtgggcggatcacaaggtaaggagtttgagaccagcctggctattatggtgaaaccctgtctctactaaaaatacaaaaattagctgggcatggtggctcatgcctgtaatcccagcattttgggaggccaaggctggtggatcacttgagttcaggagttcaagaccagcctgaccattatggtgaaacccctctactaaaaatacaaaaattagccgggcatggtggcgtgcacctgtagtcccagctacttgggaggctgaaacaggagaactgcttgaacccgggagatggaggttgcagtgagttgagatcgtgccactgtactccagcctgggcaacagagtgcaactctgaaaaaaagagaaagaaaaggaaagagagagagagagagagagagaagaaggaggaaggaaagaaagacaccgtgatttacagtcttgccaaaggactgaacctaagtcttctcaaattcaatgtgcctgaacctgcactgtgtgctaatatcgagaggacagggcaatgtgctgaaccgtgccatgagtgtgcaatcagcaaaatacaaagtatgggaaactctataggtcctaggatcaggttcttcaccagg

SEQ ID NO: 130586 - DNA, 518 bp, Homo sapiens
tactggtgaaactagaccagcctccagcctcattgtcagaagattttcttaaaacagaaacttgtacctgatcaaatcccctcccctccactttaaaaatccttcagtgacttctcattgtcttcaggatgaaatccaaaccccgaagcatgacatacaagactctccttgtgatctgatcccacctggccagcctcatctcctaagaccacagccatctcctaagaccgcagcactaacgagctgttgaaattctgcaggcgggctgtgcaccccctcaccttgcaatggtttcctctgagtatgcttgttctgcctttcctcgcctgggcaatgttagccacgggtccttcaagacacagctcagctgagctgagaagcctcaggaggcctttcttgagcctccacccatctgagtggggctccttgctctgtggccctcagcatccgttccatttgtggctcccatgtcaaactcacactgttggaacggatgctgtcgggctagtcgggggggt

SEQ ID NO: 130587 - DNA, 298 bp, Homo sapiens
ctctgtgtgttgctcagattggtcttgaacttttggcctcaagtgattctcctgtgttggcctcccaaagtgcgaggattacaggtgcgaaccattttacctggctcaaatggctcatttttatatattaagagtgcttcagaactcaagtaaaaaagtcacagaaaagagcaatgaggttaaataaaactttttttcagtttctttactaaaactgtaacttacttggaatccagttttgacatcagaaattcaaattcaggtgttttaaaaccatttctgcaagaaagaaatttaa

SEQ ID NO: 130588 - DNA, 544 bp, Homo sapiens
taatgtggccaattaccatgcacaacctctcccaaaagaaatatgccaggcctggctggtctctcaagtaaatccctttgaactcccccaaatgctggttaaagctaatttttcacctgcttcttgcctatataaatgcaggagaaaaacacaaccatgcatgagtagcatgcatgaagttgtatgaaaataaattattcagtttcccctagatgtcttctgaatggaaggcttcaagaaattggagctcatgatttgcaaatgaggggaagcataaaaattaaagaaaccaggcaaggcatggtggctcacaccagtaattccaacactttggggggtcgaggtgagcgaatcccttgagctcaggagttcgagatcagcctgggcaacatggtgaaaccacatctctaaaaaaaaaaaaaaaagatagaaataaaccgaaatacagctatcagaagctaccttcagcattcaggagagctgaggtcgtactgcaaatagagatttcaatttaggctcagtcaccttgctctgtagtctgtca

SEQ ID NO: 130589 - DNA, 190 bp, Homo sapiens
agctgtctacctctggacttcctgttatgtgagagaaaccaacctctgtttatgtaaaacagtataaattatggttttagttgtttgcaatgttttaacattattttagaaaggttaatctgcaatagcacaccagctgaaccggaaggtgatgagaattgaggtggtggttttagcaatatgggtctta

SEQ ID NO: 130590 - DNA, 350 bp, Homo sapiens
ctgcaacatccacttcctaggttcaagcgattctcttgcctcagccttccgagtagctggaactacaggcacacactaccacgcctggctaatttttgaatttttagtagagacggggttttaccatgttggccaggctggtcttgaactcttgacctcaagtgatctgcatgcctcacctcccaaagtgttgggaatacaggcatgagccaccacacccggcctgagtttgtatcttgactcacctgctttgaccttcaaataatctttcctgtgcctcagttacttcataggtttgttgtgaggattaactggtgctaatccatgtaaaacactgaaaaggtgcatag

SEQ ID NO: 130591 - DNA, 595 bp, Homo sapiens
cagtgcccgctgcgggtgctggggaatggcgccttacaggctgcccacctgcctcctcagggtggaaggcggggcttgggtgtgagcgtgctgaatcagaactttcctggaaagtcgccacttggtgtggtcagaggatcactgaagtcctgagtatgtgtctcctctcgccacttccactgcctctactcagttcagcacctcccgagggatgtctaactggcctccatgcttccgctctgcaccccacattccttatcagcacagcaacctgagtgagcctttcaatcaggagctggccgggcacggtggctcacgcctgtaattccaacactttgggaggccaaggcaggcggatcaccaggtcaggaggttgagaccagactgtccaacatggtgaaactccgtctctactaaaaatacaaaaattagctgggcgtggtggcgggtgcctgtaatcccagctacctgggaggctgaggcaggagaatcgcttgaacccgggaggcagaggttgcagtgagcagagatcgtgctactgcactccagcctggcaacagagtgagactccgtcacaaaaaaaaaaaaaaaaaaa

SEQ ID NO: 130592 - DNA, 254 bp, Homo sapiens
cagagatcgatctatattacttgtaatttattggaggaaaggccttcgtcctgaggtcctggactgggcttacccttccattctctcagatattttctttttcttaagtagttgataatttttcatcttcttctggtaccaatatgtggttctgtgttctctgattcatttggaagagatttaagtatatagcatggtgattaagttaacatttctttttctaaaagtatgtactgaaacataatagtgattct

SEQ ID NO: 130593 - DNA, 325 bp, Homo sapiens
taaatgccatattattgtcttcctgaataacagctacttgtaccataaacacatcaaggagattttaccatatgcattataataaagtacatttgaaaagtatagtcatgaaagtatatacttgacctatattttgaaaattcatggacaagtcctactttctagaaagaaaaagctcataaatgtagtactgtactaagccatagagtttactgggaaacctaggatgattacagaatcattctggcccttaacctggaagccacgcagagaaacttccagtaaaataccatgctgacactgcaggtgcctttaaagacacatt

SEQ ID NO: 130594 - DNA, 428 bp, Homo sapiens
gtagaatacggtgggtggccaagaaagacaattatgctgaaaagtacaaagtgactcaaatgcacgtcttgttccaagattctttgttatttagattcctgcattttcttcctgcatcttactcaacacccccatcactcctgcaaagtattacctgacttttagagtctatagtaagagccccacatgttttccatgaataaggctagttttatagtgagctctgatcatctgacaaaataatatttaattgtaagaaatgttttcaataatcatgaaaattcttgtaagtctaacatgggccaacttctattcgggaacgtaatcatgtgtgaagtccctgtggagtaaattggaataatgtgagtaactaggaaatgcaatcattctatccctagttaggagatggatgagacaggaaagctaag

SEQ ID NO: 130595 - DNA, 382 bp, Homo sapiens
cagacggataacttattctttccaaaagaagaacagactcactcagcagcagcttttctgctctctctggaaaggaggtattgagtcgtcttagattaactcatggtcttcctgacaggattgggtatggattttaacagattacagtcatcttggatgccttccagaaactgattctaaactgcttttatttttcataggaaacacccaacaacactgcatagaaattagatactcctaaagtggatttgaaccagtaaaattagctgtaaatatcgaagcataactaaggtttagtgtcttctctttgtaggtaatttgtgcagccctaacatttctcccctctggagcttagctgtacaattctaatcactactgtggt

SEQ ID NO: 130596 - DNA, 730 bp, Homo sapiens
tgacagagatagccaggagcccctgttgggtccccattgtgtcagtatccagaagccagaatgacacttctaaaatagttataatcatgagaatgttttaatcaagggcctttaaagccctcatgtaagccctttaatatcacattcaaaggtcttaacaagctggcctcacttccttttctacttcccataacacaccctacactccaactaccctgggtgatgttttccccaaaaaatgctgtgcactttaaccctctgtttaccatacgtttacctctgtatggaattctctctcccctttctcacattgagaaatgctactcattcttcaaagctcggaacaaaagttgtcttcaagaagttttctctagttcatgccattggtgtaaatcattccttcttcaatactccctggagcacttatctgtcagatttgccttatagtttgttgccagcagagcaaaaactgtgttttatccatatttctatctctagttcagtttttcacgcacagtagatgcccaataaatgtttattcatcaggttaaataatgaagaccacgatttgtaggaaagataagtttttagtaagaatgaagtaatccttttcttggctaatctcagttccagtaagattgagtgtgaatttccagaagtggtgttatcttcagcaattctcagcaccatgcaaataggaatgaaaacatatactgtaggccgggtgggg

SEQ ID NO: 130597 - DNA, 217 bp, Homo sapiens
gaccactacaggggaagagccagggtggaaaaaactacctatcacaggccggcacggtggttcacgcctgtaatcccagcaccaaaggaggccgaggtgggtggatcacctgaggtcaggagttcaagaccagcctgtggccaacatggtgaaaccgtctctactaataaaacaaaaattagccaggtgtggtggtgggcgcctgtaatcccagcta

SEQ ID NO: 130598 - DNA, 128 bp, Homo sapiens
tggtcgatctctagcaggatccccctggagatagtgaccagagacggatggagctggacacacagaagggaccacattgcacaggctgctgtaagattttggaggttctcttatccaggatgaggcat

SEQ ID NO: 130599 - DNA, 767 bp, Homo sapiens
atgtttttagagagtaatttcaaggtagttattgtaattgttgctaataaacacactacattgggcacaagctggactaggaaagagtgtcataaaaagaaatctgtaacgataagggattgtaaattgctaacgaatatcctaacaaaataaagcttttattaaaattaagaatctctttctcttatgaaagaactgggaaggattattttagctttacttggcataggctcttcatgataagaggagtgtatatatatgaattttgagggcagcatccagagcttggaaaaggtccagagaagagcaaatgcaattatcaataggttagaaaattggccctttaacaaaaggttaaaggagttggatgcatttagcctggagtagaagcaatttaataactgttaaagagctgttattaaggaggacactgaccaatgttctctctccccatcgaggacacaaataaaaggaattgtttaaactggaagagaagagagggatttagattaaatattaggaaacatttcttaggagtgagcatcattaaagaaaaaaatgccataagctataaccagttcctgaggaaggctaaggactctgtgtctcgggatattagtgtagtgggcacaacacaggctttgaactcagacagaactgcttttgaatctcagttcttgcctcggctaacataaataaaaggatcttaaaaattcctccactttgtagattttttggggaatgtggaacatagtatttggacacgc

SEQ ID NO: 130600 - DNA, 244 bp, Homo sapiens
ccacaatgcctggcacatagtaggcgctcactaaatattcgttgaattaatcacttacagttgaacattccccttccttaaggccaaagagactgtctctttccattgcccatgaccccctaaaactacaatgaaattttatgacttcttaaaacttttcttattgctgtttttatgtatttgtacaaaaccagacaaatacaaatatctagaggggctcatgtatttaactagatatgcaaat

SEQ ID NO: 130601 - DNA, 1004 bp, Homo sapiens
  misc_feature (685)..(685): n is a, c, g, or t
  misc_feature (715)..(715): n is a, c, g, or t
  misc_feature (912)..(912): n is a, c, g, or t
  misc_feature (987)..(987): n is a, c, g, or t
gagcgcctgggccaccacctgcagggtctccgggcggccttcctgggctgcctgacagacgtccgccaggcgctggcagcacctcgcgtggctgggaaggagggccctggcctggccgagttgctggccaatgtggccagctccatcctgagccacattaaggcctctctggcagcagtgcaccttttcaccgccaaagaggtgtccttctccaacaagccctacttccggggtgagttctgcagtcagggtgtccgtgagggcctcatcgtgggcttcgtccactctatgtgccagacggctcagagcttctgcgacagccctggggagaaggggggtgccacaccacctgccctgctcctgctgctctcccgcctctgcctggactacgagacggccaccatctcctacatcctcactctcactgatgaacagtttctggtgcaggatcagttcccagtgacgcccgtgagcacgctgtgtgcagaggccagggaaacggcgcggcggctgctgacccactacgtgaaggtgcagggcctggtcatatcacagatgctgcgcaagagcgtggagactcgcgactggctcagcactctggagccccggaatgtgcgggccgtcatgaagcgggtggtggaggataccaccgccatcgacgtgcaggtggggctcctgtacgaangagggtgttcgcaaggcccagagcagcgantccagcaagaggacttcctccgtgtacagcagctctcggcgagcagggccgtacgccccagttatacccccagtgccccgatggacaccaacctcttgagcaatatccagaagctattctctgaacgtattgatgtgttcagccctgtggagattcaacaaggtgtcggcgctgaccggcatcatcaagatcagccngaagacgctgccatgcaccggtctgtccctgcaccccatggcacccaggatctggtctcggtggtccttccccgnaggcagttgtcaggacc

SEQ ID NO: 130602 - DNA, 1139 bp, Homo sapiens
  misc_feature (683)..(683): n is a, c, g, or t
  misc_feature (723)..(724): n is a, c, g, or t
  misc_feature (750)..(750): n is a, c, g, or t
  misc_feature (758)..(758): n is a, c, g, or t
  misc_feature (909)..(909): n is a, c, g, or t
  misc_feature (938)..(938): n is a, c, g, or t
  misc_feature (950)..(950): n is a, c, g, or t
  misc_feature (956)..(956): n is a, c, g, or t
  misc_feature (1129)..(1129): n is a, c, g, or t
gagcgcctgggccaccacctgcagggtctccgggcggccttcctgggctgcctgacagacgtccgccaggcgctggcagcacctcgcgtggctgggaaggagggccctggcctggccgagttgctggccaatgtggccagctccatcctgagccacattaaggcctctctggcagcagtgcaccttttcaccgccaaagaggtgtccttctccaacaagccctacttccggggtgagttctgcagtcagggtgtccgtgagggcctcatcgtgggcttcgtccactctatgtgccagacggctcagagcttctgcgacagccctggggagaaggggggtgccacaccacctgccctgctcctgctgctctcccgcctctgcctggactacgagacggccaccatctcctacatcctcactctcactgatgaacagtttctggtgcaggatcagttcccagtgacgcccgtgagcacgctgtgtgcagaggccagggaaacggcgcggcggctgctgacccactacgtgaaggtgcagggcctggtcatatcacagatgctgcgcaagagcgtggagactcgcgactggctcagcactctggagccccggaatgtgcgggccgtcaaaaaacgaaagatgaaaataccacccccatccacctacaaataagcccctgcaccaanagggtgtccccaaagcccaaaacaacaaccccaacaagannacctcccccctgcacaacagcccccnccaccagncccctacccccccacccaaacccccagtgccccgatggacaccaacctcttgagcaatatccagaagctattctctgaacgtattgatgtgttcagccctgtggagattcaacaaggtgtcggcgctgaccggcatcatcaagatcagccngaagacccccctggagtgtgtgccccgcncacctttgggcncttcgngctgcagcaggtgcaagtggactgccactttctgcagctctacctgtggcgttttgtggccgacgaagaactcgtgcacttgctgctggacgaagaggtggcctctgctgccctgcgctccccaaaccctgtgcccatggagcccagtgtggttgaggtcatctgcgagcgcngccaggcgca

SEQ ID NO: 130603 - DNA, 835 bp, Homo sapiens
gtagcaaaagaacataggactggtgatagaaggctttttgtggaggtgttgtctagcgttgccaatggaatgggactggtgtcatcgtcccactgtttaataggatggtgcttttcctgatggtgcccacgtagcctttggtgccaaaatcctattgtaggctgacatgagcaagctccaactggctggacaaagtgtaatactaggtttttatcttcacagtagcactctgaggtctctggattattcatatatttattattcatatgcgatgatgatgggggaggagggcttaaagttgggtggtagagtaggggcctgaaccctggtctttatactttctttctactattatttgtaaacaaactatcacgcacttgagaggtagccaatcagttgcaaaatggggttgaagatgagaaagttcagtcttgccagattaacttgcttatttaaggatttatgctaatgaattttttctttgatgccagtataaatattgactcaagatgtcattaacagcaataataaagtactctttaatttgcaaagaactgtcaaacacagtacttcgttattttcttactttatttatttatttagagatgaggcctgggcgacagagtaagaccctgtctcaaaagagaaagaagaagggaaacagggaactcaaaagccatattggccaaaccaatttagtataaggccgcggaaacggcggcctaggggaataaggcaccttcggtacaagacgggaacccaggaagccagccgggatctagagcacgagaggccaacacaggtggcggaaaactgtgaaataagcccagaaagg

SEQ ID NO: 130604 - DNA, 313 bp, Homo sapiens
gtagctgggactacaggctcccgccaccatgcccagctaatttttttgtatttttagtagagatgggatttcaccgtgttagccaggatggtctcgctctcctgacctcgtgatctgcccgccttggcctcccaaaatgattttgttgctttttaaagttctgaagacacccaacacaattttgcaattatgtggtatatattcccaggaatacttacctctgttaaattttttatttcttcataagcacctgaaactagcattgatggaggtcttttcaggttaccttcttcaggaagaactttgttaaaat

SEQ ID NO: 130605 - DNA, 272 bp, Homo sapiens
ctgagagcaggcaaagagacaggtggggatgacagagaggggaaaaatttgaaagctatttggatgaagaatcgactaactggaaatgactgggaaagataaaaagggagggagcgggagtaggccaaaaagctttcagtccccagtgtagtctggaatctgtgaaagaagagagggaagggcgagttgtgtggaaagggcttcagacaacagtatagctctgagacagtttcagtcagcagtagggaacccccaagcaaagattgcctgtt

SEQ ID NO: 130606 - DNA, 211 bp, Homo sapiens
gctttctaaatgaggttatatgctgagggaaggacggggtgggggaagtgggggacaggacactaggtgaagttcaaggagaagtgaaaaggaagaaatgacttcagagagtggagaacatattaaaggaggcagtaacacttccgggtcgagtgtcatttgagatttgtggcaaattttaaagtaaccctggtcagaactgctggctttt

SEQ ID NO: 130607 - DNA, 229 bp, Homo sapiens
tgacatgcatcagctgggagtgaaacttgcagcagtggcctcagtgcttgaatacaagccccaggccagtcactggccacagcaggtcagctggggctggcaggaagggccagagtagatgggtgttattcttccctcagatcactaagggaccaacatatttttctatcttaatttggctttccaagtcagctttccacgcagcagcaaagatttttcactgcagact

SEQ ID NO: 130608 - DNA, 403 bp, Homo sapiens
tagcttatcagctatcattggtgttagtgtattttatgtgtggcccaagacaattcttcttccgatgtggcccagggaagcctaaaagttggacaccctgatgtagacacttaactagcaattaggttccacacaggtggtaccattagtgtgttaagagtttaaaaagggagtgtgggctaggcactgtggctcatgcctgcaatcccaactacttgggaggctgagctgggaggaccgtttgagtccagaagttcaagatcagcctaggcaacgtagtaagactccataactacaagaaacttaaaaattagccaaatctggacctgcggtgtggtgtgtgcctgtagtcccagctactcaggaggccaaagtgggaggattacttgagtccaggagttca

SEQ ID NO: 130609 - DNA, 226 bp, Homo sapiens
gcccatggctggggctgggccagagccaagcacctggggtccgggttcttccctggccccagtgctggccggaggggagatctggggagagggtgggggtttcttgcctcctgtgactttggaagactggccccactcttggtgcagagtgggaaggcccagggggagcctggggaggtcccgccacccctgtgggctgagctggcgatttcttcctcatcgctct

SEQ ID NO: 130610 - DNA, 615 bp, Homo sapiens
ctcccgagacctggggttggcggctgcgtgtgcgcctggcaggtggctacgcaggcttgcagcccagcaccacgctgttcgttcttggcctggatcccttttagttctccctctgccagggaagtggatctgaacctccccctcctcagaaatgctcaagttttaatgtcacaatttattctcagcatgtggaatgagatggttattagctggttgagtccggacaggtgtgggtggccccaggcaggtcccctaacctctctgagtgcatttatctcgagggtgtggccgtcccccgggcttgccgttggcttgaggcaggatacagtgaggagagcattttgaaagaacggaggctgctgtcgcccgaggtgtttggcaaggtcgtgctcccctgggagaggatgctggcaccagccctggagccacagcgcctgcctccatctgcgcacctggatctgctctgcttggcctcgtgcaaagaacgggcctggaatgagcagagccaaaggcgttcttggtgccggccgcgcccagctctggctctcgtgctgtccttcctggttttcatccttggttatttttctctgtttgcagccccgttgccgcctcaca

SEQ ID NO: 130611 - DNA, 428 bp, Homo sapiens
cttccctcccttactctttcccaaccaacagggctttatcaggcatcacctccatgccaaaatggtaatgttaattatggtggtctattcagagtaaagaagaatcagaagacaaaagtcctggtgctccaaggtctgggggagacaaaacacattgtactctgtccatgaaaacagtaaagaacaatatagaaaatctgttttcaagattgtattgacagagaatagtgctttaatcttaggaaaaaaaaaaacaacaaccaagttttctgtgggctagagtaggtggctctgagcctccctgtcagaactgttaacaaagttattagttccttgcagtaccttcttgtccttgctttttgttcagccagagagaccaggggaacaatgatatctgatcaaccatttatcttgtgtatagagggaaa

SEQ ID NO: 130612 - DNA, 366 bp, Homo sapiens
ggatatgctgtagtaaaaaagagcctcaacacctttgtagctacaacaaaggtttagttttttgctcattctacagtctattgaaggtcacctctgagctctgtccataagtcctgagtctaaggttcaggctgatgaaacaatatcatcatgagcactgcagattaccatggcagatgaaagagtgtgaaagcattttgcattaataatgaagtgttccaatacttatcacttctgttcacaactcattggtcagaaatgctcccatctaattacaagggggtctgggaaatggaatctcaccaggagcctggaagacagagagccagaactatttggtggtcaacagtaatgaataacacaatc

SEQ ID NO: 130613 - DNA, 627 bp, Homo sapiens
gtttaactttgtgtacatttttgttaaatggaaaaatttaatgttttattaaaatgggtttctagtgtaattatttttatgtcttggtgtcaaggttatatagaaaaaacattcactgggtgggcacggtggctcacgcctataatcccaaacttgctgggattacaagtgtgagccaccatgcccagcccaagggcttttttgagacaaggtctggctctattgcccactgcacttccagtctgggcgacacagtgagactctgtctcttaaataaataaataaataaataaacataagaatagtacatgaatataggtggaccaactcaagtggtgtggttagaaataatgtttctagctaaagtgaaaatgaaaacttaaaattacattttctaagctctaaaaagtaagacagtagtcttctaagcctttcctgacaaatttctgtagccagagtagaagctggaaaacaaaaaaaaaccaaaaaaaacccagttgtgacgggggagtctttatactaagggttcactcaccagttaatgtctccatgatatatggccgaattggatttttagcctctcaaatttcaaagcaacctatttaaggtttacccaaggtgaacaat

SEQ ID NO: 130614 - DNA, 475 bp, Homo sapiens
tcccagatcaagcgattctcctgcttcatactcccaagtagctgggactacaggtgcgtgctaccacacccagctaattcttttgtagagacagggtttttctgtgtagcccagggtaatctcaaacttctggcctcaagcaacctcccgcttcagcctttcaaagtgttgggattataggcgtgacccacagtgcccagcctaaataaacatttttaatgggtgcataatatcttattggatagatttatttaagtttacttaaccattgtcctattagtggacattttaataatctctgatttctcaatattctaaataacctaacaatgaatatctttgtggataaagaattttgtttctctttctctaggattttttccttaggatagattcctagaagattgattgttagatataaacatttaaaaaccatggaacactttgattctccttccaaaaggaaagaagtaat

SEQ ID NO: 130615 - DNA, 695 bp, Homo sapiens
cagcttactacaacctgcacctcccaggttcaagcgattctccttcctcaacctcctgagtagctgggattacaggtgcccaccaccacacctggctgattttcatacttttagtagagatggggttttgccatgttggccaggcaggctggtctcgaatccctgacctcaggtgatccacccgcctcagcctcccaaagtgctgggattactggcatgagccactgcacctggccacattcagcttttttacttagcagaatagcacattataaattccttagatacttgatttttaatggttgtgttcatagactggctgtaggataattccttttactactgtcatgcaattatttccaaagcgcggtccttagaccaccgctgggtctataccccaaagaaaggaaatcagtatatggaagcgatatctgcactcccttgtttgttgcgacactcttcaccatagccaaggtttggaagcagcctaagtgtccaccaacagatgaatggataaagaaaatgtggttcttatacacaatgaagtactattcagccataaaaggaatgagatcctgtcatttgcaacaacatggatggaactggaggtcattatgctaagtgaaatgtgccaggcatagaaagacaaacatcacatgttttcacatattgtgggacctgaaaatcaaaacagt

SEQ ID NO: 130616 - DNA, 372 bp, Homo sapiens
atgccatagctgactcctgagggtaaaactacgtcagggaaagacgaaattatgaaaaaggttgtttcaacactaagcagctttttaagaaattgtttaacaaacattgatgacatgtcttctgtgcactaggtactgcaataatcatcatgaccattctgaaagaagttgcttgactctggagccaaacagacctagctcaacatcttggtcttgttactcatttgtttagtgactttgaaagagaaacttactcactttgagtctgtttcttaatccaaagacagggagttagtaataccttctgaggttgttgaaagaattggtctgcattaaagtgcttgacacagtgcctggcacatgcaaggttct

SEQ ID NO: 130617 - DNA, 327 bp, Homo sapiens
agtttaaaaaaaatgattatataaacactaagcagctttttaagaaattgtttaacaaacattgatgacatgtcttctgtgcactaggtactgcaataatcatcatgaccattctgaaagaagttgcttgactctggagccaaacagacctagctcaacatcttggtcttgttactcatttgtttagtgactttgaaagagaaacttactcactttgagtctgtttcttaatccaaagacagggagttagtaataccttctgaggttgttgaaagaattggtctgcattaaagtgcttgacacagtgcctggcacatgcaaggttct

SEQ ID NO: 130618 - DNA, 543 bp, Homo sapiens
ctggctctgggaggctcatgcagcagagccggctgcactggatccagccctcccggttccggggccatctggactcagattcagttcctcctgcaagccctgaagttcccacaggccttgggaaggggagtggagatgaggtctggagaggccccagagggtagccccagtctgggggattctcaaatgctttgaggctccacctgggccttgaaggatggctaaggtcaagactagacagagaaaagggaaaaggcattatttctggtgagggccatgagcaagagcccagccaggctagggaaaagggccaggctgggagagggagtgacagctgggatgctgggctgtgagatgacagagacagcaccgcttggcctcaggcaggggctggctcagcaggaggggctgcacccaagcctcactgtcctctgctgtaaagcaggacatttggaccaggtgggagaaggggcaagatttgccatttactgagcacctagtatgtgccacacacagactaggtaggggctggcacatgcacgt

SEQ ID NO: 130619 - DNA, 790 bp, Homo sapiens
gtttttgttttggttttctattgtgaactggcttgcaagatagttccatttgttttctcatcactgtataggtcaatattgtgtcatcagtaacaatgtgaaaagacatgtataactgaaaggaagtagcagctttattctgctaccttttcacatttttaaataaagagttgatctttctttactaactaccaagtgcaccaggttccagtctttgtcagagattggcattctgactctaaacaaggcataaaatttggtggatgctgtttcctcatctgtgaaattgaacctagaggagggcattatggaattacagggcacattaaagtcatggtctctggagtaagactggtgtggatgggatcctcttgctactacttaccagctctgttcttttaagaaagttatttagcatcccctacattccctcatctgtaaaatggggacctgagacattgactctcacagttgtcttgaggattaaaataaattgtgcattaaagtgcttagacctagtaaaagcactggccctcctgctaataaaagatatacttaatgcatgcaatgtttttaatagactgcagtcaggcaaaccattgcctatgactttgtcctgtggctcttgttagccttaagcattgggtaaacttgctcactctgactttgctacttctttcattggcatttcaagacctctctctgttcctcccccttttaaaaaaattaataggactgacagcttcatggtaggtggacaaaaattcaagttgcataactcgtttctacc

SEQ ID NO: 130620 - DNA, 237 bp, Homo sapiens
ctagacatgagcaatttttaaaaagataatgtatataaaatgccaagcacataaacagttctcaacaactgttagttcacctcccctatcccagtctttggctagcaattttttaatgttaacaactgagcagacactcctctaaaggacaggttcaagtaactcttaaaacatcccttctaattaaaagtatgagagaatgcttaaagaattaaaaaccataagcccaaagactgg

SEQ ID NO: 130621 - DNA, 334 bp, Homo sapiens
  misc_feature (285)..(285): n is a, c, g, or t
gtcgctctagaggatctcgatcagagcatacccctccatccaaacccatcaacaacattccagaagaaaagaaaagcctgtcggacatacatgttcatttaactcccaagtccaactgcactaaggtgtttcatgccactccaaccttgggtcctctgtcacctgctgttgccattcagctgaggaacaggtggtagttctacatccacttctgccccatcccaggaggtctactttgacctagttcaatctggagttctatggggatattagaaatgtaatccntctgcaaggacagacacaaagcgatcctagggcgtatggctctgatcgc

SEQ ID NO: 130622 - DNA, 269 bp, Homo sapiens
gatgggattgaacaaacctggtgacatgaagactgactggtctctgggcccactcagaatttgtttcagagggagaatttctggcctctgcatgtgtggtatattcatgcatttgttaattcaataggccaggggcctgcaatatgcaagatacaagacactttgcatgaaaactcgtggtcttatgaagaaatgtacgtgtacatcagccgtagagacggacaaatgctacaccttataaacacagtacagtgcaaaccaaatgcttt

SEQ ID NO: 130623 - DNA, 353 bp, Homo sapiens
tgtagtgtcagaggctaagtcttacatcacagtccagttcccttgtttctcttgcaacactggcctttggagcctccaagcaagcaggctggttgccctgaagccagcatgctggacaaaagcccaaactagtccacttggaaaaaccacattaggagagaaagatgcccggccatcccccagctgcttcagtcccctgctgtttcacctccagtaacagtctaactacaactgcattagagacctagccagaactgcccagctgagcacttcccaaactcctgacccagagaaaccacgagcaataataaaaatgattgctgttgtgttaagccaccaagttttggggcaac

SEQ ID NO: 130624 - DNA, 735 bp, Homo sapiens
gaatgccttaaaccatgggtattactgaaccttatatacactgtacatttttttcctatacatacctatagtataatttaaaaagaaattaggcacagtaagagattaacataactaataaaaaacacagaacaattatgaaaatgtaccagcatcactgttcttgcacttattattaataattgctattattaagtaaagcaattgttacttgaacacaagcactgcaatactggatactgcaacagttgagatggctactaagtgactcacaggcaggtagtacatatggcatggacacactggataaagggatgagtcatgcccacaccagttggagtgagatggtgtgagatttcatcaggctattcaaaattgcatgcaatttaaaacttatgaattgtttatttctgaaattttctgtctaatattttcagactgcaattgaacactgttaactgaaattgtgaaaagtgaaaccactcataagaagaagaaactttgaaactttgaaagacaagtaacagattttctcttactgttgtcaacaccaggtctgtcattctgaaataaattaaaacatcaaaaacataaatccatgaaaggcatttgagataaagaaacaggatttttattctagggtgctattccaagtcaaagcatatctctgaaaattattgattgcaagcaaaagaatatcattttagaaatctttttggcattcttaatacaata

SEQ ID NO: 130625 - DNA, 631 bp, Homo sapiens
gaggcaaaagcagttctaaaagggaagattattgtaataaacacctacattaagcaaaaagaaagatctcaaataacaacctaactttaagaaaccagagaaagaagaacaaactaagcccaaagttagcagaaagaagaaaataacaaagattggagcagaaataaataaagactagaaaaacaatagaaaaggtcaagaaaactaacaattggtgttttgaaaaacagaattgacatgttttgaaaaacagaattgacaagccgttagctagactaagaaaaaaataagaaaagtctcaaatacataaagtaagaaaagaggagagattacaactgatatcacagaaatacaaaggataagagactactatgaacaactatatataagcaaattggataacctagaagaaatgaatgaattcctagatacatacatcctatcgagaatgaatcatgaagaaatagaaaatctgaaggtaccactaataaggaggttaaatcaccaatcaaaaatctctcaaaaaagaaaaagtgaggaccaggtggcttcactactgaattctttcaaacatttaaagaataagtaatagcaagtcttctcaaactcttcaaaaaaattgaggagaatg

SEQ ID NO: 130626 - DNA, 304 bp, Homo sapiens
ttgaatagactgtcaccaggttattggctgtttgaagattctcatttgtctgctaactatacctctattttttttctacgttcacctggaagacatgtcttcttcaagagcaccttgactctgtccagaaggagttcataattttcaacagagaaaaagtaaacagggactttaacaaaagacaaccaaatctagccttggaacaaaccaaagacccacaagtgacaaatggacaaatggacacaggactcagtgagacttttcagacctcgaaagtttcataaagtggtcagaatgccccagg

SEQ ID NO: 130627 - DNA, 795 bp, Homo sapiens
agtctggcatctgatgttgccatcagatgagaaaaccaagacataaagatattttaataatattgccacacagtcctagtagtagagctaggatttgttatattatttgtaccataccgcagtgcgttccatggaagatgtgaggatttaaatttagctctttaaaatccttgtcctatgtctgacttgtttgaatggatgaaccacttattctgtgcagagaattcctggcacaatgtaactaattcctgaacaaataatacttcatttgctgtcatatagaaaaaaattagaggtgatacttgtttaaagttaggactgcaagtcttaacctgtttttgttactagttcttgagaggttgggcaagtctgtacatcaggttctagctcactgtaatagtgattaggggatgatttgggagaatgacctaattgaattgaaaagcataataatagccaacatttcttaagtactttctatgtgctaggcactctgctaaatacattttattgtcttatttaatcttcacagtggaaactactattatcctgttttacagatgaagaaacttagggacagcgactaatttgccaaaagttatgcagattgaaaggagtggagccagaatgatatccccaataatttttatctcagagtttatactcttaatgatcatattggctccataaacagctttacacatgtataacctatgtggtgattagcacttgttctcaaatcaagtaatcagattgagatctttagtccctaacctgcatgccggcgaagaatgg

SEQ ID NO: 130628 - DNA, 934 bp, Homo sapiens
ctgtcccgggtcccccaaatctcatgtctttctcacattgcaaaatacaatgatgccttccctacagtcccccaaatcttaactcattacagcatttactcaaatatccaaagcccaaagtcttatctgagacaagtctacagtcccttctgccatgagtctgtgaattataaagcaacttaactacttccaagctacaatgattgtacaggcaatgggtaagcattctcaaccaatagaaaaaaaaattgctggaaagcagcacaaaacacagatgggattcataggatacataaatgtccaaaacccagcaggccagtcactcaatcctacagctccagaatcatcctttttgaatccctgtcccacatccatggcacaggtgtatgagggctggtcttcctaggccttgggcagatctgcacctgtggctttgcagtgttcagcccctgtagctgccgtcatggacagggctggtgttgagtgcctgtagcttttccatactgagggtgcaagctgtttgtgggtctatgaatctggggtttggagaatgatgcctccctgtatgggggcctgtgacagcaagggctgctgcagaggactgtgaaatgccttcgaggcctctttcccattgtcttggctatttgcactgggcttctttttatgcagatactctaagcctccttgaattttcccccggaaaatcatcttttctttttgaccacttggccaggctgcagattttccaaactttaggtctccacttctcatttcaatagaagttccaacttgaagtcatttcttaggtcacgcataagaacacaggctattcaatgcagacaggacacctcgctatgctgcctagatgttcattccaccagatacatcctaaatcatcacccccaaattcatagtttcatagatgtccagggca

SEQ ID NO: 130629 - DNA, 847 bp, Homo sapiens
gagcaaaccctcgaagaagttggggattatgttaaatgactaaacctaagaataatcagtgttcctgaggaagaagagaaatctaaaattttggaaaacatatttcagggaataatcaaggaaaacttccccggccttgctagagacgtagacatccaaatacaagaagcacaaagagcacctaggaaattcatctcaaaaagatcttcgcctaggcacattgtcatcaggttatccaaagttaagatgaaggaaagaatcttaagagctgtgagacagaagtaccaggtaacctataaaagaaaacctatcagattaacagcagatttctcagcaggaaccctacaagctagaagggattggggccctatcttcagcctcctcaaacaaaacagttatcagccaagaatttcgtatccagtgacacaaagcatcatatatgaaggaaagatacagtcgtttttagacaaacaatgctgagagaattcaccatcaccaagccaccactagaagaactgctgaaaggagctctaaatcttgtaacaaatcctggaaacacatcaaaacagaacctctttaaagcataaatcacacagggcctataaaacaaacatgcaagttaaaaagcaaaagccaaaaccaaaaaaaacctaagtacacaggcaacaaagagcatgatgaatgcaatggtacctcacacctcaatagttacgtggatgtaaatggcctaagtgctccacctaaaagatacagaaccacagaatggacaagaactcaccaaccgtctgcctgccttcaggagattcacctaatacgtaaggactcacatctcacataaacttacagg

SEQ ID NO: 130630 - DNA, 338 bp, Homo sapiens
ggcacaatgacggctcactgctacctccacctcctgggttcaagcgattctcctgcctcagccttccgagtagctgggattacaggcatgcgccaccagacccggctaattttgtatttttagtagagacaggggtttcaccatgttggtcaggctggtcttgaactcccaacctcagttgacctgcctgcctcagtctcccaaagtgctgggattacaggtgtgagagaccgtgcccagccaggagagtttttttgttgttgttattttaagaaaattgaaaaggaggtagaagaaaaccaagagaaaaaaaaaaaaaagacaaagcagcagcatga

SEQ ID NO: 130631 - DNA, 554 bp, Homo sapiens
attctggcccagcccacccattcccaacacacattaaagcaaagagaagccataagtaaatctgtccaggtacaactataaattaacaagattgccttcttgtatggtttaaagccactggtctcattaattcacagtcacagtgcagtttacggcttgaggaatcttcccaggaaaagcttaattcaattagggctctcggcagctccccaaggaagctctggtatcttacttttacttacacaaattgagggcagaccaaacagatccagatcttcccagagagaccccacccggcccagagaagatgcccttgcagaccctccattagagccaagccgagggaggtggccaaggcagcaccacttaaacactggctggcgcctaaggcatcattctgtgagtgtcgctcccagcgagctcagttaaactccttggcttggcagtctggtgccaaggagcctctgcaacctttgctctccctcctctctgagcagtcaaactggtttcttgtctgccccagggctttgcagggatcctatctttacactgaa

SEQ ID NO: 130632 - DNA, 261 bp, Homo sapiens
gggtaaccagtgctctacctctgaagacaaagataactcactatacgggaagaaaaaggatgccccacagaagaggaaaggaaagcttggaactatcaactacatttgacagttcccggtaatttaatcaaggacttcaagggaagcttgaaccaaaatctaaaataaagcacaataaacatgccaaatcccaaagtgaacccaaatttttaattattttttactgaacaaaatacaaactaatgaatccactaaactgag

SEQ ID NO: 130633 - DNA, 489 bp, Homo sapiens
cttagaatagtgcctcacacatagcagatgctcaataaagatttgttgactaaaatgaattgacagagggctcagggctttcttaaagcattaggtgtccctgccaactggaagtcaataaaaactgaagaccaatcagcccttaaagtataagtcaactgaaacatgtaattacatttatattttcaaataatatttcagccatctgtttattctacaaagtaaaatgtacccgtattttcagctttgattaaaaatataaactaccctctgtttgaccttttgattgagccacacttctgttcagcactaggtcaatgaagcatgactggaatattaaacggtgcttctattcttggttcagcctatgagtcagtttctttttcatttctccttcctttcagtggccaaatagatatatcgacaggcaatgaattattactatgacagatgttaagtttcatgaaaatgaaagggtaagtcaccatt

SEQ ID NO: 130634 - DNA, 379 bp, Homo sapiens
aatgattaaccgttcacacaggtttgaaggctattccaaagactgtctcaaaatcccttaagcagtgagaacattgaaataagcttaaaatttggctttaggctggaagcggtggctcacgcctatacccagcactttgggaggctgaggcagatggatcacgagctcaggagttcgagatcagcctggccaacatggtgaaaccccgtctctactaaaaatacaaaaattagctggacatggtggcatgcacctgtaatcccagctactcaggaggctgaggcaggagaattgcttgaacccgggaagcagaggttgcagtgagccgagattgcaccactgcactccagcctcagcgacagagcaagactctgtctcc

SEQ ID NO: 130635 - DNA, 513 bp, Homo sapiens
agtgtactaatcaactctaacagacattcaaagaaaaatatagtgggagaaagtaatgtatttcacagacaactgtttctccataaacttgattcacctgattcacattaaaatatgccctttatcaactgtttcattaaataagtagaaatacagataaccagaaaacttcctggcagttgtcctatcaattcctttatatcagattacccagttttaatactggctgtcatagccagactcagtggctcatgcctgtaatcccagctctttgggaggtcaaggcaggaggatcgcttgagaccaggagttcatgaccagcctgggtaatatggtaagaccctgcctctacaaaaataaatttaaaaaattagccaagagtggtgtcatgcacttatagtcctggctactttggcggctaaggcggaaggatcactggagttcaggaggtcaaggttgcagtgagctatgatcacaccaccgcactccagcctgggcaacagggtgagatcc

SEQ ID NO: 130636 - DNA, 1931 bp, Homo sapiens
ctcccttccccagtctgggcccccgcggcacagggggccgagcagaagcccccagcgtccagggccgggggagggtccgcctgcgcccccaggcccgcgtggtcgggccctgcagggcgggaggcgcggcgcggggcggggccggtgacgggacgcggagaccccgcgggcggcgggaggggcacgaggcgcgcgtttgcacccgagcccggcccgcgccccgatgcggagcgatgccgctcggcctggccgccccccgcgagcaccgcgctgcagacgaagcccgcgcgtgatcccgctccgggtgacctcaaagcagaagctctgaattcacctctcatctgacgactgacagctgctgccaccgccagcctctgtcccttgcccaggcctgtcacacggctgcctctcagcaggggcagtagaatgaaagagggcatgtctaataacagcaccactagcatctcccaagccaggaaagctgtggagcagctaaagatggaagcctgtatggacagggtcaaggtctcccaggcagccgcggacctcctggcctactgtgaagctcacgtgcgggaagatcctctcatcattccagtgcctgcatcagaaaacccctttcgcgagaagaagttcttttgtaccattctctaactccgtgtgtgatgaaaacgcctccttttctgaccttcaaagtcccctgtagagaccatgcatgctctaagccttagggagtgagaccaacacccatccctgcccagccaacagtggccggggcttgtcttatgtttccatctgttttcttcgtggcattcaatttcatttttttccttttcattttcatgttattttcattattggcaaagaaaatcaaaatgtttatagccaaataacaaatgtgccatgtaaaagtaagtctggacttaagagtttaaaatttttaaacatcagtttccaagtttatatcatattaatacatttcagtggataatttatttaaaaaaaaaaactatgcctaaatatcccttatttgcaatattcagtatcaaattagagcattttgaccaactgaaacatataacgttttcatctcctttcctggagaaagcagctgcagaggttctgtatttcctgcatttccatcatcctagtaaaaagacaacaacccacaggattggaatggttttcttttgttttttttttgttgttgttgttgttttgagatggagtctcgctctgtcacccaggctggagtgcaatggcgtgacctcagctcactgcgacctccacctcctgggttcaagcgattctcctgcctcagcctcctgagtagctgggatcataggcacgcgccaccacacccagctaattttttgtatttttagtaaagacggggtttcaccatgttggtcaggctggtctcaaactcctgacctcgtgatccacccgcctcggcctcccaaagcgctgggattacaggcgtgagccaccacacccggccgtggaatggttttcttagcatatcctcctggggccgtggcgccccggctgtgggccgtggtggatgtcccttgtttcagtggtcctacaaaggtagatggtgggcggacaccgaagtcaacttgactgtaaaagtaccccataccgttgacgcgctgtggcagacctgtgggtgcggtctcccctctccaaatgccacctcttcctgctccctcctcttttggctcctactcagtagttccattgtgggctgcagtaatataaggacctgttctggacacagcactgggcccgctggggttttagtagggcagccccttccctgcaggagtgaggcatggtgacagcagtcccctatgtgcccccaagtcatctgagcattggtgtgcattaaggtactcaatcttccaacaataaataccataagtgca

SEQ ID NO: 130637 - DNA, 1838 bp, Homo sapiens
agcggcggtgccacagggacgaggcctggagagcagtcgctcctagaaccggggcgcgaagggcacccccgcctccagcacgcgccctccgccctcccggcctcgctccccccggagtgggggcctcgccggcccctggtccccgtcactcagcaacgtcgggtcagccttcgccgggttagtggcgacgcggccgcgcgaattcgcacaggtgacctcaaagcagaagctctgaattcacctctcatctgacgactgacagctgctgccaccgccagcctctgtcccttgcccaggcctgtcacacggctgcctctcagcaggggcagtagaatgaaagagggcatgtctaataacagcaccactagcatctcccaagccaggaaagctgtggagcagctaaagatggaagcctgtatggacagggtcaaggtctcccaggcagccgcggacctcctggcctactgtgaagctcacgtgcgggaagatcctctcatcattccagtgcctgcatcagaaaacccctttcgcgagaagaagttcttttgtaccattctctaactccgtgtgtgatgaaaacgcctccttttctgaccttcaaagtcccctgtagagaccatgcatgctctaagccttagggagtgagaccaacacccatccctgcccagccaacagtggccggggcttgtcttatgtttccatctgttttcttcgtggcattcaatttcatttttttccttttcattttcatgttattttcattattggcaaagaaaatcaaaatgtttatagccaaataacaaatgtgccatgtaaaagtaagtctggacttaagagtttaaaatttttaaacatcagtttccaagtttatatcatattaatacatttcagtggataatttatttaaaaaaaaaaactatgcctaaatatcccttatttgcaatattcagtatcaaattagagcattttgaccaactgaaacatataacgttttcatctcctttcctggagaaagcagctgcagaggttctgtatttcctgcatttccatcatcctagtaaaaagacaacaacccacaggattggaatggttttcttttgttttttttttgttgttgttgttgttttgagatggagtctcgctctgtcacccaggctggagtgcaatggcgtgacctcagctcactgcgacctccacctcctgggttcaagcgattctcctgcctcagcctcctgagtagctgggatcataggcacgcgccaccacacccagctaattttttgtatttttagtaaagacggggtttcaccatgttggtcaggctggtctcaaactcctgacctcgtgatccacccgcctcggcctcccaaagcgctgggattacaggcgtgagccaccacacccggccgtggaatggttttcttagcatatcctcctggggccgtggcgccccggctgtgggccgtggtggatgtcccttgtttcagtggtcctacaaaggtagatggtgggcggacaccgaagtcaacttgactgtaaaagtaccccataccgttgacgcgctgtggcagacctgtgggtgcggtctcccctctccaaatgccacctcttcctgctccctcctcttttggctcctactcagtagttccattgtgggctgcagtaatataaggacctgttctggacacagcactgggcccgctggggttttagtagggcagccccttccctgcaggagtgaggcatggtgacagcagtcccctatgtgcccccaagtcatctgagcattggtgtgcattaaggtactcaatcttccaacaataaataccataagtgca

SEQ ID NO: 130638 - DNA, 2246 bp, Homo sapiens
ctcccttccccagtctgggcccccgcggcacagggggccgagcagaagcccccagcgtccagggccgggggagggtccgcctgcgcccccaggcccgcgtggtcgggccctgcagggcgggaggcgcggcgcggggcggggccggtgacgggacgcggagaccccgcgggcggcgggaggggcacgaggcgcgcgtttgcacccgagcccggcccgcgccccgatgcggagcgatgccgctcggcctggccgccccccgcgagcaccgcgctgcagacgaagcccgcgcgtgatcccgctccgggtgacctcaaagcagaagctctgaattcacctctcatctgacgactgacagctgctgccaccgccagcctctgtcccttgcccaggcctgtcacacggctgcctctcagcaggggcagtagaatgaaagagggcatgtctaataacagcaccactagcatctcccaagccaggaaagctgtggagcagctaaagatggaagcctgtatggacagggtcaaggtctcccaggcagccgcggacctcctggcctactgtgaagctcacgtgcgggaagatcctctcatcattccagtgcctgcatcagaaaacccctttcgcgagaagaagttcttttgtaccattctctaactccgtgtgtgatgaaaacgcctccttttctgaccttcaaagtcccctgtagagaccatgcatgctctaagccttagggagtgagaccaacacccatccctgcccagccaacagtggccggggcttgtcttatgtttccatctgttttcttcgtggcattcaatttcatttttttccttttcattttcatgttattttcattattggcaaagaaaatcaaaatgtttatagccaaataacaaatgtgccatgtaaaagtaagtctggacttaagagtttaaaatttttaaacatcagtttccaagtttatatcatattaatacatttcagtggataatttatttaaaaaaaaaaactatgcctaaatatcccttatttgcaatattcagtatcaaattagagcattttgaccaactgaaacatataacgttttcatctcctttcctggagaaagcagctgcagaggttctgtatttcctgcatttccatcatcctagtaaaaagacaacaacccacaggattggaatggttttcttttgttttttttttgttgttgttgttgttttgagatggagtctcgctctgtcacccaggctggagtgcaatggcgtgacctcagctcactgcgacctccacctcctgggttcaagcgattctcctgcctcagcctcctgagtagctgggatcataggcacgcgccaccacacccagctaattttttgtatttttagtaaagacggggtttcaccatgttggtcaggctggtctcaaactcctgacctcgtgatccacccgcctcggcctcccaaagcgctgggattacaggcgtgagccaccacacccggccgtggaatggttttcttagcatatcctcctggggccgtggcgccccggctgtgggccgtggtggatgtcccttgtttcagtggtcctacaaaggtagatggtgggcggacaccgaagtcaacttgactgtaaaagtaccccataccgttgacgcgctgtggcagacctgtgggtgcggtctcccctctccaaatgccacctcttcctgctccctcctcttttggctcctactcagtagttccattgtgggctgcagtaatataaggacctgttctggacacagcactgggcccgctggggttttagtagggcagccccttccctgcaggagtgaggcatggtgacagcagtcccctatgtgcccccaagtcatctgagcattggtgtgcattaaggtactcaatcttccaacaataaataccataagtgcaaaaaaaaaaaccaccgacatcaaacagcaaccacacacccgcggccctaacatgtcgggggcgccgaacacagacgcgttacagcaccgtgcgcccctgtgcacaccagccgtgcgtccgggcgcccgcactcctgtctccagggggcaactctggcgcggccccaatgcggcgggacgtaccaatccaccacccaggtgtcccttcttaagccacgcgcaaccgcgtaccgccgcccttgccccgcgcgagcacgcgggcacggcaccagctcacacccgagccacccacgaccgcgcaccacacctgccaaaa

SEQ ID NO: 130639 - DNA, 1726 bp, Homo sapiens
agcggcggtgccacagggacgaggcctggagagcagtcgctcctagaaccggggcgcgaagggcacccccgcctccagcacgcgccctccgccctcccggcctcgctccccccggagtgggggcctcgccggcccctggtccccgtcactcagcaacgtcgggtcagccttcgccgggttagtggcgacgcggccgcgcgaattcgcacaggggcagtagaatgaaagagggcatgtctaataacagcaccactagcatctcccaagccaggaaagctgtggagcagctaaagatggaagcctgtatggacagggtcaaggtctcccaggcagccgcggacctcctggcctactgtgaagctcacgtgcgggaagatcctctcatcattccagtgcctgcatcagaaaacccctttcgcgagaagaagttcttttgtaccattctctaactccgtgtgtgatgaaaacgcctccttttctgaccttcaaagtcccctgtagagaccatgcatgctctaagccttagggagtgagaccaacacccatccctgcccagccaacagtggccggggcttgtcttatgtttccatctgttttcttcgtggcattcaatttcatttttttccttttcattttcatgttattttcattattggcaaagaaaatcaaaatgtttatagccaaataacaaatgtgccatgtaaaagtaagtctggacttaagagtttaaaatttttaaacatcagtttccaagtttatatcatattaatacatttcagtggataatttatttaaaaaaaaaaactatgcctaaatatcccttatttgcaatattcagtatcaaattagagcattttgaccaactgaaacatataacgttttcatctcctttcctggagaaagcagctgcagaggttctgtatttcctgcatttccatcatcctagtaaaaagacaacaacccacaggattggaatggttttcttttgttttttttttgttgttgttgttgttttgagatggagtctcgctctgtcacccaggctggagtgcaatggcgtgacctcagctcactgcgacctccacctcctgggttcaagcgattctcctgcctcagcctcctgagtagctgggatcataggcacgcgccaccacacccagctaattttttgtatttttagtaaagacggggtttcaccatgttggtcaggctggtctcaaactcctgacctcgtgatccacccgcctcggcctcccaaagcgctgggattacaggcgtgagccaccacacccggccgtggaatggttttcttagcatatcctcctggggccgtggcgccccggctgtgggccgtggtggatgtcccttgtttcagtggtcctacaaaggtagatggtgggcggacaccgaagtcaacttgactgtaaaagtaccccataccgttgacgcgctgtggcagacctgtgggtgcggtctcccctctccaaatgccacctcttcctgctccctcctcttttggctcctactcagtagttccattgtgggctgcagtaatataaggacctgttctggacacagcactgggcccgctggggttttagtagggcagccccttccctgcaggagtgaggcatggtgacagcagtcccctatgtgcccccaagtcatctgagcattggtgtgcattaaggtactcaatcttccaacaataaataccataagtgca

SEQ ID NO: 130640 - DNA, 1588 bp, Homo sapiens
gcaagtcgggagcagctgtgggtggtgtcctacaggctctgctgccgaggaagagctgctgccctgagtggaggggcagtagaatgaaagagggcatgtctaataacagcaccactagcatctcccaagccaggaaagctgtggagcagctaaagatggaagcctgtatggacagggtcaaggtctcccaggcagccgcggacctcctggcctactgtgaagctcacgtgcgggaagatcctctcatcattccagtgcctgcatcagaaaacccctttcgcgagaagaagttcttttgtaccattctctaactccgtgtgtgatgaaaacgcctccttttctgaccttcaaagtcccctgtagagaccatgcatgctctaagccttagggagtgagaccaacacccatccctgcccagccaacagtggccggggcttgtcttatgtttccatctgttttcttcgtggcattcaatttcatttttttccttttcattttcatgttattttcattattggcaaagaaaatcaaaatgtttatagccaaataacaaatgtgccatgtaaaagtaagtctggacttaagagtttaaaatttttaaacatcagtttccaagtttatatcatattaatacatttcagtggataatttatttaaaaaaaaaaactatgcctaaatatcccttatttgcaatattcagtatcaaattagagcattttgaccaactgaaacatataacgttttcatctcctttcctggagaaagcagctgcagaggttctgtatttcctgcatttccatcatcctagtaaaaagacaacaacccacaggattggaatggttttcttttgttttttttttgttgttgttgttgttttgagatggagtctcgctctgtcacccaggctggagtgcaatggcgtgacctcagctcactgcgacctccacctcctgggttcaagcgattctcctgcctcagcctcctgagtagctgggatcataggcacgcgccaccacacccagctaattttttgtatttttagtaaagacggggtttcaccatgttggtcaggctggtctcaaactcctgacctcgtgatccacccgcctcggcctcccaaagcgctgggattacaggcgtgagccaccacacccggccgtggaatggttttcttagcatatcctcctggggccgtggcgccccggctgtgggccgtggtggatgtcccttgtttcagtggtcctacaaaggtagatggtgggcggacaccgaagtcaacttgactgtaaaagtaccccataccgttgacgcgctgtggcagacctgtgggtgcggtctcccctctccaaatgccacctcttcctgctccctcctcttttggctcctactcagtagttccattgtgggctgcagtaatataaggacctgttctggacacagcactgggcccgctggggttttagtagggcagccccttccctgcaggagtgaggcatggtgacagcagtcccctatgtgcccccaagtcatctgagcattggtgtgcattaaggtactcaatcttccaacaataaataccataagtgca

SEQ ID NO: 130641 - DNA, 366 bp, Homo sapiens
aacaacaggcaaaacactagcagcagagagttaagtaagaacttcatttaagtaaggagttcagcggtagtggagatttagtcgccaaggaagtcttgcttacggctttggttcccctaatctggcgtgtaagctttgagtcagggtctttgggtgggacagtctgagctacggctttcctggcaaatttgacatgacttaaaaaacttcagtgttgaccagtgattagtcctgggccacccaggatttagacaccacctgtttacttgtaaacatgcagttattgctgagctaaaaaaacttgcatttgtattcacatttgggttctccaaagaggtgaaactgacccgatgaaacacagtaaaa

SEQ ID NO: 130642 - DNA, 182 bp, Homo sapiens
gcagaaaaggttaaaagacaggtttctctgcagcacgtttatatagataggtacatacatagcagagaagtcaaggctggggaatctggcggtgggtagcgacagtgctgtggcagaggaacactggaatgtgcttatgtaacttttcaccagagacagattttaaagcagcagttgtcact

SEQ ID NO: 130643 - DNA, 379 bp, Homo sapiens
aaaaggtcccccactgggcgggaacagtaggaccatggtaattcttgtataagtctgttaaacgtctttcctttcctgtatgcaaaacctcaggagtttactttaacctcttagaaccagtatcatgtaggttatgtagataccaaaagttagatacataacaaaggaatttgaacaagtaaggttacagaagtggagtttaaacctggactgagacttcaaaatctgacaaataccaattccaaattttttcaattcctagatatttcattcttggggataaagtagtcctaataattattatattgtcagggcttactataatggtgaaagactgtaggtccaagtttacctatacagagtgggaacaaaatcatct

SEQ ID NO: 130644 - DNA, 153 bp, Homo sapiens
tatttttcagttgaagactctgaaaatcagcaagattggctcaatgttaggatgagacaagtatggggcaggattgggccttatgaggaagaactatagtctctctcttcttcttctttttttttttttttttgagacggagtctcaccctgt

SEQ ID NO: 130645 - DNA, 682 bp, Homo sapiens
taaagtgagttaccacagcccagtagaaacccagatctggttgtgtgaccttaatagaggtatctgaaattataaattgattttcttccaatagcccgcatctgaaataactggattgaggttcatgtcagtaaattcttcaatttctatgtagggaaaaatgaggacctttttgtttgtaattattctatttattgaacagttattagttgtacttctaatctgtactagaagactatattacaaagtgtttattttccctaaacaatggcttctcttgattcgtgttcattattgccctaaataaattgaaatttagaaaaagaaaaacccagttttcttagtatcatacatgcaagcttaagttttcttatttgtttgtttttatttgacatacatgaaggttatttccaaagatacaaatggaggccaaaacagtttgacataaagcagaccaaaacagattgaattatactgtacctctacactgactagcattttgatgtctagatggataagtaagcatagtgctaatttacaagcgcaaactcaactagtaagattaactaatttctaggctgtaatgaatttatataaatattcttgttattcagatgggaaacctcataactgtgctgtagattagacttgcattgcctaaaactggagaatgtaacttttt

SEQ ID NO: 130646 - DNA, 444 bp, Homo sapiens
tgttaaccaataattataaccaattaattattattgggtgcctggcagacacccaaacgggtgaacccctgagggtcccaggacaacagggaatggtggggactgtggcaaaggggacccacccaacgaagcagccaaactccatgccagcagagcccacctgctaagaggagctggaagttctaactttcaggtgaaatcttcagatttttaagtgttgtcctaagttcgtaacacgctgtgttggtccaaaggacatcagcggtgtcagggtcctagaggtggatgcagaagcctcactgggtgtggagtggggaggagagggactcagccaggggactgtgttttacaagccctaaccaggcttccttccagggatccttcctcacccttcgagcagctgcgattgacaatttcccccaacagcattggtccccacccctc

SEQ ID NO: 130647 - DNA, 343 bp, Homo sapiens
aaaaaaaaaatgcagtcttacatcacagaacaccttttcctgtagctaggaaatgaggcatgagaatagccttgtctcccacttagagggcatgaaaactgagaagttaatgtttctgagatccttgagtgaaaggcacagacttatctgcttcctgccatagaatgtcctgccttgagatgttgtttatcaaaccattaatcctaatgtgtcttcaccagccagcacttgataggataaaagcattgtcctcttggagtggcagctggcagactctattctaacacgtaggggcctccttagcaataatgtagtgtttctcactggaagcctcacatacctc

SEQ ID NO: 130648 - DNA, 407 bp, Homo sapiens
  misc_feature (407)..(407): n is a, c, g, or t
aaaaggagagaagagagagaaagaggaaggggcagcgggttggggcaggaaaacttagtgcagtgatgtaactatacaccaggtacagtgaggtcacagagaagagtatggccagttctgcctggggtattgggggaagaggaaagggtctaaggaaaaaaaatatgagaaactttgcagacactaccctttcatccttatatccttgtgacagcaaagctaccgagtctctatttcttttagaagcacgcatgcagcagcagcagaaagtatgatgggtcatgctcgcagtgatacagaaatcatggcaggaaattcgtggcccggcaataaatacgttcaaatgagagaagcaagcctcagacctcttattgaacaagaaggagcagaaggagaaacagcttaan

SEQ ID NO: 130649 - DNA, 378 bp, Homo sapiens
aaaggggaagaaagaacttgacaaaattcacagaaattaaaacacacttaaaacacacatacatacagggcttcacatactcaagagagaactgtgtctgacaaggtctaagttaatcttttactgggggctgagactacccaaccccacattaaggttgtccacgtaactctactgtgcttcacctcaaaactttttcacattgctagaccgtggggaatcactgtatatcccagacgagactgtggcattcccgaggaggccagctctggtccctgctgaccctgccagctgctttctaagccatccagtcccatctcagccttactctgtggccgtgagccttttgtttcactgaactttattttacttctagaa

SEQ ID NO: 130650 - DNA, 286 bp, Homo sapiens
actggaaatttgaagctgtagagctcttaaactgtgtttcttgataatcaacatcctttataaatcaaagtaaagatatgattttgaaagaaggcttaaattccaaactcttggctgtgattcgtggggttgaaggatataacttctatccttttgggacagatatctcaacaatatgtataagattacacagtctttccccaacaggaaatttcttgtttatttaaaactgggatttactaaattggtttgaatttaatgctgttcagtagtcaactcagttgag

SEQ ID NO: 130651 - DNA, 361 bp, Homo sapiens
tagagatggggtttcaccatattagccaggatggtctcgatctcctgatctcgtgatccacccgcgtcggcctcccagtgtgctgggattacaggcgtgagccaccgtgcccggtctaatcaattaattttccacaagataattcaatggggaaagaatcatcttttcaacaactagttatccacgtgtaaaataatgaagttattccctatttcacaccacacagaaaatttaactcgaaatggatgaaagatctaaatgtaaaaattaaaactataaaacttttagaaaaaaaaaatatcggattgattcttcttgactttggatcaggcagttgttagatgtgacaccaaaagaaaaa

SEQ ID NO: 130652 - DNA, 444 bp, Homo sapiens
gaaagaaaaacataatgttaaaaaaactccacatttctgagaagataaattgatcttagagataattgaacataagacaccaagccttaaaagtacttatttcaacaaagatatacaatgccataccaaaaatattgctttttcaaaagacttttatttattatttatttgcatttttccatttgtatagttattttaaagaaaggctttttgtgaatgtttgagattgcttaattacagcagctttttggtttcctttatttatatttatctatctacctctcagatgaggtttaaattagagtttttaaggttataggggtttaaaattttatgtacatgtacaaaatctgtactagaggaagaaatactagtgcataatttcaagggatagcgtgaggctggctgaggtcagacccatgatggaatgcagaaattatgaga

SEQ ID NO: 130653 - DNA, 221 bp, Homo sapiens
tataggaatagtgacttaatagaccacatgcagtggctcattcctgtggtcccagctactcaggaggctgaggtgggagcatcgcctgagcccaggagttggaggctacagtgagccatgatcgcctactgcagcccggggcaatagagtgagacccccatctctaaaaaaagaacaagcacacgcctgtgggtggtcccagctactcaggaggttgaggt

SEQ ID NO: 130654 - DNA, 873 bp, Homo sapiens
gaataagtcatcaaaaaccaacaaagaaaatctcagaactagatggcttcaatggtaaatttcataaattatctcaaaagaaactaccattaattattcttaaaccactataaaagcttgaagtggagagaacacttccaaatttattttatgaagacagcattactctgataccaatcaaagacagacaatgacactagaaggaaagcaaactacaggctaatatccctgatgaacacagatgtaaaaatcttcaatgaaatatgagaaaaccaattcaacaacacattaaaagcaccattcaccatgatcaagtgggatttatccctgggatacaatgatgattcaatatataaaaaacaaaaattatttgtgttctgtatcctaataataaagtatttaaaaacaaagttaagaaaatgcatatttacaacagcatcaaaaagaatcaaatacatagaaataaatttaaggtgaaacacataaaccttgaaacataaaatattaaagaaattaaagaagatacaaataaaaacacatcctatgttcataaatttgaagtcttaacattgtttaaatgtctataactacctaaagtgacctaaagattcagcaaaatccctaacaaaattccactgtcattttttacaaatataaaataaacaaaggaccctgaattcaaaagaattttttattttgagaaaaaagaacaaagctgaaggcatcccaccttctgatttcaaaatatattacaaagctacagtaaataaaacagcatagtaccagcatgaagacggacatatagaccaatagaacagagactccagaaataaacccacacatttttgatcaattgatcttcagcaatattgc

SEQ ID NO: 130655 - DNA, 351 bp, Homo sapiens
  misc_feature (8)..(8): n is a, c, g, or t
agagggcnactctagagatccctgatatagctgtctcaacattaatgcgctgttttttttgtgtatttttttttaagagatagggtcacattctgtcacccaggctggagtgcagtcacgcaatcatagttcacagtaaacctcaaactctatttggtgaagatatttctagataaaatgccatgtgataaatatggttaatgaaacaggaggagaaatagtacttgagcaatgcatacactcttcagattttgtgccatcttcctacaagactcaaagcaggtcagcaggtttgttttttaagcaagttagagtgacccaaatcagagaaatacttgtatacagagaccc

SEQ ID NO: 130656 - DNA, 117 bp, Homo sapiens
tgctgggattacaggcaccgcgcccagccaagaaaacttttaatgtaagtgggaataggttaaaaatgcagtcagacttcatgatcacttgaagagagctgcctttttgtctccttt

SEQ ID NO: 130657 - DNA, 148 bp, Homo sapiens
gtatgggagaggacaggtgtccagagaggctgatattctgggcaatcatcaagaatgaggtgaaccagctgagcctcaaagctcaaaatggaatggtggcaaggatctctcacttcctaatgaggtcttgaaagcactttgttttctt

SEQ ID NO: 130658 - DNA, 186 bp, Homo sapiens
ggtggggtcaggagtgcttaaagaaaatgtaacatctgagctggattttgaaggagtttgacaggctgaaaaggacattccaagcagaggagataagagcatgcacaaaggcacagaaaagtcaactcagagagaacaacagtgagacatcagtatcactaatggaaacattagaaaggggtaagg

SEQ ID NO: 130659 - DNA, 397 bp, Homo sapiens
tagaaaggttaaacatgggaaaagacagcgggagctctatagtaaccttgagtgacttctataacagtaggcacatgcatttacgcatttccagagagagatatcaaacatcctccttttggtcctctgactgaagacaaaagatttcttcatgcacatcttctaagggaagggaagaagtcctacctattttactaaaatagttcttattaaaaggccactgtgaaaagaaagaactgaggagtttgtaatggggacccaattctcatcaaagccctgctatagcacaaagtttagccttggactttcacaaaggtaagctggatatttacatggtgcccaacatcggccatgccttagagacttagatggcagtcatccttggaggatgatcttc

SEQ ID NO: 130660 - DNA, 426 bp, Homo sapiens
cctggcgagatctctgcatcatttcttctccccagcttctctctccacccatgccgccatgggagagtttaggctgtctcgtccctgactggcctgaggtagggctgtgactgtctccttttccctctctcctgtcttcctcacctatgcccacataatcagtccaccttccttactgctggatgcaaacctgctgagtctctatggctttcaggatggagttcaaagacatcacctcagcgtgaaaggccctttcaggtctggcccggcacaaccctgacacccgcatgttcctgggtgcaacaacatggggccccagggcagcttcccatgatgcatcagcctctgctggctcctgatgtggcctctgttcctgtcttaggcccctattcctctcggcaggctccacacttgccttactctatc

SEQ ID NO: 130661 - DNA, 323 bp, Homo sapiens
aaaaaaatgtacacttgttagtaggaaagaaacaacattggtttgacagaactttctttaaaactcttacctcaactaatagtacttaaagggtatttgcttgcattaaagtcaggttgcagggttagggaagtcaaacttttattctaggtttgaaattaacctataacttcagctggattaaaagtctacagttttagattgggtcctgtaattttggaaagtttagtcaaaatcccattttagccttggtttttactaagatgcaaagggtattagtatgtctcaatatgaaaataccttagagtaactttctcaacctg

SEQ ID NO: 130662 - DNA, 302 bp, Homo sapiens
ccccttatcagatatacaatttgcaaaaatcttctcccattctgtgtgttgtctccttactttcttgatagtgtcctttcaagtacagaagttttacattttgatgtggtccaatttatgtattttttcttgtgtttcttgtcctctttgcgtcatatctaaaaaaccattgcgtaatctaaggtcacaaagatttacacctacgttttcttctaagagtgttatagctttaactctcgcatttaaatcttgatccattttgagttaacttttttatcggataagtagagggtccactttcc

SEQ ID NO: 130663 - DNA, 387 bp, Homo sapiens
tgttcagggagtgaatggggtcataaaagtcaatgcagttgcctatttagagaatcctaccttgcagaatgggacctttggtgtcagggtgtgaacaataactttatttcaacataaatacatagtaagcattactaaaatttaaaaaatccaaaccctatcactaccggaacttaaaatatattagaagtggatataagcagaaattctatctagatacataacactatcatagtataacatttgaattagaatttaaaattttgcttctctttcttattggtgttcagtttagctcttaataatttagtgtttgcctagtgctctagttaatcttcagaaataaacatgcactgtaggggctcactctttctggtatgctgaggt

SEQ ID NO: 130664 - DNA, 195 bp, Homo sapiens
cagaggaaaaaaaactgccttagtctagtgaaaaaggtatccaatataatgaaaataacagtcgtggcatgcatctaaagcagtatttgtagaaaaatttatatgctacaaatcccagtggatacagttaaacaaaaaggaaaaaaaattacaaagctaaaaattcattagaaacaaagaaaagtcttaaatcta

SEQ ID NO: 130665 - DNA, 299 bp, Homo sapiens
aaggctccccttgtgtcagattagtacatagcggtacaaggaggaggcagaaggagaccctatcttttttaaaaaaaaattgtaaaaatcagccaagtgtggtggcacacacctgctacttggaagtcccagctactagggaggctgaggtgagaggatcacttaagcctaggagtttgaggctgcagtgagctactatcataccactgtactgcactcctgtctggatgacagagcaagactctgtctctaaaaatacacagatacaaataaatactggcttattctccagttcttaa

SEQ ID NO: 130666 - DNA, 378 bp, Homo sapiens
tacacttctacttgtatctgtctctcaaatagtgtgaaacaagctctgtggctctactgtgatctgcacggtggacagccatgtgtcccattcaggaaaaacactgtcaggaggcgaggttcagggctcaggccccagggcagctgacagtgctgccctccctgcttgcttctttgtgcgtgggtaccatgctcactgcagtttatatgcgaatgtgtaatggacatgcaggttgtattatctagttgtaatcaacaaaccctcagaaaatgacaagtggttttatgagatttctaaaaaacccagattgaggctacagttgccctttgaacaacattggtttgaaatgcatggattatcttccgcctctgctgcccc

SEQ ID NO: 130667 - DNA, 335 bp, Homo sapiens
ccctttagtatccagttgaaacatcacctcatttgtgaaagcttcctgtcatcaaacccaaggcagaattaattactctcctctctgaccttacattttcctactagatagaataattacctgtttatgccatacttttttaaatacgaatttcagtcttcaaggacctgaatgtgcagcagttttaggtaatctcttcatatcacttccctgcttatgacctttcaataggtccctcttgtctactaaacaaagttcagattcctcagcaggaagtccaatccaagtctaccttcaggccccttaatgcctctttaacctctctcactactccc

SEQ ID NO: 130668 - DNA, 652 bp, Homo sapiens
gtgaaaaacccacagctgacactatagtttgtagtaggagactgaatgttttctccttaaaatcaggaataagacaaggatatctgttcttgcaacttgtattaaacattttactggaggctatcactagggcaattaggcaagaaaataaaaggcattcagattgggaaggaagtaaaactgtctctatttgcaaatgacacgctcttgtatataaaaactcttaaagagaggagactattaggattaataaattcatcaaggttgcagtatacaagacaaatatacaaaaatcaattgtatttctaaatactgggactgaacaatctgtaaataaaatcaagaaaataatttcatttatgacaatatcaaaagaaaaaatacacttagaaatatacttagaaaaaaattaacaaaataagtgcaagacattctctgaaaactacaacaaaatgttaagataattcaaagacctaaataaatggaaaggcatgccatggtcatggattggaaaatttaatattgttaaggtgacaatactcccccattgatctatagattcaacataatccttatcaaagtcatagctggcttctttccagatattaatgaaatcctaaaattcagatgggaattcaagggacctagaata

SEQ ID NO: 130669 - DNA, 236 bp, Homo sapiens
caggatccccggccgaccagtttcctgagcacctgttacagtgtcagtactgggacctccggtctttccttactttctttctttctataatattttcacctatcctatttcattcacagtggaggttttaatttacttcaagcagtattgccatctggatgtcaaaagacattgaattgacttcttatctgtagatcccaataaaggtctcacctgcctagaaacaaaagatttag

SEQ ID NO: 130670 - DNA, 412 bp, Homo sapiens
agaaagaatttgtagtaaaggtcaagaatccaatagcatttatctctgaaattctgggagaaatgataggcctcactcttaccacttacacactatatcctaggtgtataacctaaatacaaatggagttttgagatgtttttagaaggaaactgtgctaaggaggctcttaaagatgcttgaatctcattgtattggtcagagttcttagttgcaaaccagagaatccacttaaactactttagatagaaaggagtttgtcaaaagacgttagtggcttatggaccctctggtgtagcctaagagtcagatttggccatttcacagcaggaaaaatgctcagctacaccatggaactattctagtgaaatatactgcagcttacttgctcttgagggggaccaaaaaaaaa

SEQ ID NO: 130671 - DNA, 496 bp, Homo sapiens
ttagggacatgtagcccagggtatggtagggtatgagcaaattcctatcagacagcaattccagaatactagtttcaagtgtgtaagtttttggaggtggtctaaatttcaattttgattgtgactgtatgctcttgaatgaggccacttgtttatgactccatctgcctcacttgtaagaggagacagtatcagttgcaatcaatgaacctagccaaaaaggctaactataaatatttgctgaatgcttcaacattcttaggggaaatagataaagttttaatgatgtactttcccactgtacttgcagccaagttgaattttgtcatattcttcctagtgttaacatttaaaagatgtaaacattttcatcatagtatctaaatatagaactcattttgtttcccacaattaaatataatcatcagaaaggaaaatagatgattaacagaaatgtaaatggtaagttatttagtcccctctcaccaaaaccaat

SEQ ID NO: 130672 - DNA, 376 bp, Homo sapiens
ttatgtttctcatcttattgatgatcacttgttctttgcagaaatttcaattaaccttaacttgtcttttcttccttattcccataagtagtctttcactaaatagccttttaattgaaccttaattcagaccccaggtatctctttctaggattattgtaacacccttcaaaactgttcttgttctctgccagtcattctatacctccatatattttcccacatgatatttatacttatctttctaaaacacaaatcttatcatgtatggcatgacctctgatgctctaactcatcctacacttcgtttactgtctctcacatggctaatcttgcctttacatacctctgtgttttttctctcaactgttctctc

SEQ ID NO: 130673 - DNA, 173 bp, Homo sapiens
ccacatgtaactgcaaacaaagcacataaaatctgaaatgttatacctaataactcactatcaaatgtaagaaataatcttttaagaaaaatgcttagagccaagcacaatggctcacacctataaatcccaacaccactctgggaggccaaggtgagaggatcgcttgaggc

SEQ ID NO: 130674 - DNA, 680 bp, Homo sapiens
ggctgaggcacaataatcgcttgaaccccggaggcagaggttgcagtgagccaagatcatgccactacactccagcctgggcgacagagtgagaatctttctccaaaaaaaagccatccgtgtgggtggggtatgtaggaaaagcatgagactctacctgtcttctttgaagttctcatccacacatggttccaagtaaaaagcttttcttgtgtatttttaatgtacccccaaacctctcctcctttattttggtttcctaatagaggagctaagttacagatgagagcctgagtcttagaatataaacttcaagcatctggtaaactttactattttctctctgcttcattaaaactggaggaaagatgtcaactagaacttggtttattcctgttttggtggtaggataaaacaacaaagatcttaatattgttcatctcctattagaatattagctagtaaggcaagaaattagatgggtagctgtatgttgcacttttctttgatcgtgagatctcaaggtaacaggcaatgggcatagcatagggcaacgaatcccacagagctgtcctaataatgtatatccttcatgtcttcaaagtgatgcaatgtcagcagtttccatttgaaggctaaccctttgtagtgcccttccctatgtaagtattcagtcttga

SEQ ID NO: 130675 - DNA, 734 bp, Homo sapiens
attcatagctttaagtgttccttgcaaattctcatgaggtgcagtttatggtaacaaaaaagctcatacacacacatgatgtggtcagtagttttgggtgtttttttatttatttttttgagatgagtctagctctgtcacccaggctagagtgcagtggcacgatcttggctcactgcagcctccacctcctgggttcaagctattctcctacctcagcctttcaagtaactgggattacaggagcgtgccaccatgcctggctatttttctatatttttagtagagacagggtttcaccatgttggccaggctggttttaaactcctgacctcaagtgatccacccacctctgcttcccaaagtgttgagattatagacgtgagccaccactcctggccagtttgtttttttgttgttttttgtttgatttgagacagggtctcactccatcatccaggtggctggagtgcagtggcgcaatcatagctcactgtagcctccaaatcctgggtttaagcaatcctcccgcttcagcctcggcctccaaagtagctgagactacaggcatgtgccaccatgcccagctagttttgtttgttttttagtggagatgaggttgtgccattttgcccaggctaatctcagactcccagcctcaagcgatctgcctcagcctttcaaaatgctgtgattacaggtgtggacactatagcctctggtccattttaaga

SEQ ID NO: 130676 - DNA, 210 bp, Homo sapiens
ctccagcacagctcttcatcctctcctcccctgcggcctttcctatccctcaccctgacccccctgccctcggcccccacctcacccccacctcccaacacccaggccacctctccctgtccctccagcaccgcctctcttttgagcacagctccacttggcctctgcacccttaccctccctgcactggggtctcctcgccatcttttg

SEQ ID NO: 130677 - DNA, 450 bp, Homo sapiens
ctgaaagggatgatataattccagctcagtcacactgtgtcagagtgatacaatgcaaagatcaggagacccgagttccggtcctgtatttgctgccaactagcagcatgagctgaggcacatcatttaatctttttggaattcatttttctcatgcctagaagaacagaagtggattgtattccttcttgccttcttttcctttcttctttccctccttctttccttttctcttgctcaaacatgtattcactaccactcaaaaaccatttgttgaacaaagcaaacaaatgaatctcccaagccttgggcttcatcctgtgatttcctcaattcccacctgccttaaattactcagtgaagccctgtccttggagaaaattcagtgggtggttaacccagagaagctggagatcaaaaagaagatggccaatgaaagaacaaaggcca

SEQ ID NO: 130678 - DNA, 526 bp, Homo sapiens
aatcttatgaacttttgttctctcatgctttccttatgtatctttcttcagtttttaaatgctcatttattttaatggcaatccatcctcttttatgctatttggtttatacagttattgttttgtctgtcttatgcattatatctttcaaaatcatctcacttttaaatttatgtttaatgtattaaatcaggaaaatagatgcaacaaaaggggccagctctgattaatgatgggtgctatgaacaaaaagatgagaaatgtggcacacatgcccagaattcttattgacttagtttatgataaacaacaataaaaatgtgcaccactaacaaccaaattgagagtttggtcctctgaaatataatcctggttttacttctatccagggactctgcagtaacttgagtagggcagaagttctgcacagcttttgaagtccaagaaatggaaaccagttgttttcaaaagtgtaataattctactgcttactttattcttacatcacagtggttgtccctgataa

SEQ ID NO: 130679 - DNA, 328 bp, Homo sapiens
gccggggcttggggaggggaaggggagtgacagctggtggggaccagcttccttgctcccttttggggcgatgagacagctctggaaccagagagtggtgatggttgcacaaccctgtgaaggcaccaaatgccactgaatttcacggtgtggggatcacagcggtgtgggaatcacagctcaatgttttaaagggggagaaatctacaagagctgtgttttgtgtcgctggacagggagttacggtcttcctgaaagctcctgcgggatggtaatgagttttccgcccccatctcaggacacaatggacagcccagaactttgaggt

SEQ ID NO: 130680 - DNA, 306 bp, Homo sapiens
gcatgttaatgagatctctaggtgtattatgttgcacatcaaagtgtgagtagcgctggtttaggtgacacctggtaagaagcaaaggtttgctttgaagcatattccttagatattgctgaacactatatttccctttatgctttcacagatctactatcagttgtgcctcagttatattaactataattcccagttatgaaaaacagagacatgagaagaatttaacttgcccataacaactggcaaaattaaaacggaaggaagagaatgcagaatgcagactcctctgcttccctttccttt

SEQ ID NO: 130681 - DNA, 617 bp, Homo sapiens
tctcccaggctggagtgcagtggcgcgatcttggctcactgcaacctccacctcctgggttcaagcaatcaattctcctgcctcagtctcccgagtagctgggattacaggcgcacaccgccacacccagctaattttttgtatttttagtagggatggggtttcaccatgttggccaggctggtctcaaaatcctgaactcaagtgatccacccgcctcagcctccgaaagtgctgggattacaggcctgagccaccgtgcctggccgtctcctctgacttttaacagcgacacccatccttccaccttctgtgctggggctagcattgcccttgatgacactttgtcaagttcatttcctggcatgacaatgtatttggcttcagcaaaaaggtggtggtccacactgtctccaaggagtaagaccctcagaccaggagccccagtgacagtatgagaggaagagagaggccctcagctgcttgggagtccctgctgcactcagccccccaccacactgaaaatctccccatacacagtttccatgccagaccccctgaagaacagggcctatcaataaagcagtaaggtcctctgtacttagaccaaaaacaaa

SEQ ID NO: 130682 - DNA, 582 bp, Homo sapiens
ttatgccttttcatcgccactgcactttcctaattatcctacctctgatggagcctcttctgattcctcttcttcctgacatttcttaattgtgagtttcccaagcctcaatttctggtcttccattttttcctctccatactcttaccttttggttaattgttcttacctcaaatcttcaactagttccagccagcctagccatagtcccagatggcatttctagaaacatttgcactaatcagtggcaaaggtatttgtttttcacaactaatctttacttctaaaagtagtatttttgcaagcggttataagaaatgagtgtagggggccgggtgcagtgggtcacgcctgtaatcccagcacttggcgaggctgaggcaggcagatgaccctgaggtcaggagttcacaaccggcctgaccaacatggagaaaccccgtctctactaaaaatacaaaattagctgggcgtggtggcgcatgcccgttatcccagctactcgggaagctgaggcaggagaatcacttgaacccgggaggcagaggttgcggtgagccaagatggtgccactgcactcca

SEQ ID NO: 130683 - DNA, 402 bp, Homo sapiens
agtaacatttaaacaggatacgcacaataatagagaaagtcagctggtcatgttttacaggaaatatacaaaacaaaacaaatgaaaacatttaaacattaaatgtaactaaacccactgattggttagttgattaattactacttattgagcacttttaatggaccaggcactgttctatgctttgggattagtttcactgttttatagagaagctctcattaaaggatgaagtcatggttttcttttaaacatttccagtcacgctctatttcggcatctggagaaatcctgtcatggagcagcactccccaggtcaaggcacagcggccttcatgaacatccagggtcacctgtattaagacggtcctccccactaatctcaggctgtggacagtgaaa

SEQ ID NO: 130684 - DNA, 472 bp, Homo sapiens
ggcgagactccgtatcaaaatcaaacaaacaaacaaaaactttcttaatttaaataccaatacactttagatttttgcaagatatttttatatttttagatcatatttttttgagtgcttgttgtttcaggctggtggtcttatccgtttagacatttagccaagtcatgcttcccatttttctgctttgatgtgtggatgctccattctctcggcatttgtatccctcctctagcaatgtcacctcttccccacttttctcacaatgtccccctgaggtttgagggttcctactgacagttaacaccatgaattaaaagtcataaagttttcattttaggcatgttcttctcactattgtacagcatttttattgatttgctaactgcattggattaatctgctaactgcattacactcttattaaattacattgctattccagagaagggacagctaaagctgaaatcct

SEQ ID NO: 130685 - DNA, 529 bp, Homo sapiens
gatgaatttttcccctaagcattctgtagagtgaggtgatctttccaaaaggcctcagctgtcagccttttttaaaactttaaggtaaattgaactttgatttagagtaaaaagtgaagaaccaaattaaataaactgatgttccttttcttctaaaatgttggttcttttgaaaacatagcaaacatagtaaaatagaatatcagcaacccttgcaatgtcagagctagacatccagcttttcctttcctttttgaatagtgggggagaggggagtggacaggagtgggagaagcatagagaatgaatcacaaccataagtaatatcatgctggcttgctttacatttttacctgagaatctcttgatcattaagtatcatgccattttcacgtctacattcttttttatggtgggtgggtgggtgtggaactagaaatttttattactgtatttaaggatttcatgttgatcataaaaggaaacggaagaccatagaccatgttaatacccaaactataattctttt

SEQ ID NO: 130686 - DNA, 263 bp, Homo sapiens
aggatttttttatccttgaaagtcttccaagctatctcaagtgttctcgtgggcagtagcagcagcagcagcaacagcagcagaaggaaatgaaggagtacatggagagaccaaagcttagagtgtcagtggggtttgaaaggatgcccctgaataaaatagaaaggttttaattcataaatgccagcataaataccccctgataattatgacagagtggaaagaaaattaaatatgttgaatttttgtcagataattttgaa

SEQ ID NO: 130687 - DNA, 375 bp, Homo sapiens
aggctgaggtgggcagatcagttgaggtcaggagtttgataccagcctggccaacatggcgaaactctgtctctattgaaaatacaaaaattagctgggcgtgatgttgcatacctgtaatcccagctacttgggaggctgaggtgcgagaattgcttgaatctgggaggtggaggttgcagtgagctgagattgtgccactgcactctagcctgggcaacagaatgagactctgtctcaaaaaaaaaaaaaaaaatctatagcaaatatcatgcttaatggagaaagaagatgccagctatcaactttactaactagaaatgtaaagtgaaaaggtgagagggtgtagtgaaagaggggtcctgcacccaaaat

SEQ ID NO: 130688 - DNA, 640 bp, Homo sapiens
actggtttccgtctgtcctgggcggccccgcgcgggccccacactggttgtgcgtttctcaggccaccagcagcgtccaagagctctggccgatctgcctccctccctgcgtctcggcatctttgtctggcactgctgatggttttgcctaaacggctctttgctgtggggcatcctgtgcaccgtgggacgtcttgtgcactgtggggtgttgagccgcatccgtggtctccacccacagatgacaacgacacccccagctatgaaaccagaaatgactccacacattgccaaatgtcccccagggcaaagtcacccacttgggcgttatgttacccactgatgatctgaatttttgtccatttcacctgtctgagtttgtgtgtctctgagcactggtgggactgagcgtgtccgtggcttgtggccactcctgcttcctgtttgtgaattttatgttcataacgtctgcccctttctttgggtttttcactttattcttattattttgtaaattccttaagtattctggatacttaccttttgttattctattctagtagtcactgtccccaaaacaatgttcataaatttgttcttataaagatgagaaataaaaaacattgaattttaaactgca

SEQ ID NO: 130689 - DNA, 710 bp, Homo sapiens
gaatttgattgcttcacatccctatagcaactctcctggttcaagcccatcatcatctggatttttgggaagtggtcttaactggtgtgctgcccttcccctctgctctcaaccctattttcaacatagcagtcagaataatctaaaatataaaccagatcatatcactcctctgctcaacaccccctcccaataccttcatgtcatcctcagagttattgtccaagcctctaactgtggtctacaagtctttacatgatctgtcctgttacattttccactctcgctccagacctgacctaagaggcttttctctgaacttgctaaacatgctcttacctgagggtccattcccactgcctctgcctggaatgctcttccccagacatgcatctgcgtggatcatttccatgcctcctcaggtctttgccctcatgaagccttccctgacaaccctatttaagattgtaatcccctcccacagtggcccctatctgctagagactgaatgtttttgtccccccaaaattcctatgttgaagccttaatctcaacataggaggtttggcctttgtgagttagttttagatgaggtcatgtgggtaatagaattagtgcatttataagggcgtgaagagccctcactgtgaggaaaccagaatgtaagccttcaccagaacttcttcatgctggcaccctggtcttagact

SEQ ID NO: 130690 - DNA, 182 bp, Homo sapiens
agacttttattacctgtgcacaacgcaaaattatactgttggtttaatcttgatttaattgatgtttacagtgtcttcaaaaagatgctataaaaggtactgagacaaaagtattatttatgcaggcaagcattgagaatatgccaaagtcatttgtatgtaaaaatctgtaagtttaagaa

SEQ ID NO: 130691 - DNA, 402 bp, Homo sapiens
ccatttggcaatatctggggacattactggtttgtcataatgcaagttcatttttatgtcatatttttactgtgtactttttgcattttcaaatgactttgactattgccagagtcattatagacctgcctatgatgtaggagtttattgtatctagtggaaaacatacctgtttgtggggcagaagcttctgttccattcatcctgattttagacacagcatttaacttttcaggttcagttccatatgtataaagtagggataatagtgacatcctagtgtattaagaattaaggtgttattatttctgtcactgttacttcaccctaattttgtttccacactcatctctgagcttttttacttcttatgttgttcagtgttttctaaattaaaaaaaa

SEQ ID NO: 130692 - DNA, 105 bp, Homo sapiens
aaaaagattttagagctgaaagatatccaaatattgtaacatggggagaccgaaagtttctactcctactcttagcaactagctttaaagatttcttctggaatt

SEQ ID NO: 130693 - DNA, 248 bp, Homo sapiens
tgcagataaccacagcctgcctctgcaccgggtcctggctgtcccttccagacggacctgtctcttccactctgagcctctctgagcagaggtcccacagggtgttagtgaccagagatgctgccggttgaggtaccactccccccaaagaccccaaggtggaccccaagttcaaggttccgccttacctgagccccttatttctgcacacattcctgccctctacattctggccctgctgcctcccc

SEQ ID NO: 130694 - DNA, 466 bp, Homo sapiens
cataattgtaaccatattttcaaagtctctttcaccacataatgtaacatattgggggttttaggaaataggacatggacatctttagggggctattattcttcagaaatgatgtaatttcataaatgtttgttgttttaaactttcactttgtcacacgataatatacattcgaagaggaaaagtgtcctgaagttattaaccaggatacagttatatataaggtgttcagtatatcacatatttacatacaaacacacatacttgacaaggtattatattagaggctataggcattatagcatttttcatacagtatctcataatactctgtcaataaccatatattatctataagatgaaactccaggtcattggtagtttagattaaatcccagttatttcaaattcaagctatattatgacatctgtttctctttttcttttaaaatctaaagttccaggt

SEQ ID NO: 130695 - DNA, 395 bp, Homo sapiens
ggaaggggaccccggccagcctgaagtctctcattttacacagcaggtggtagagccctaccaccttttagctgtgtgcttttagcaatgaactcctctgtttgtgtcttggtttccccatacgtaagtaggggtaatcataaaatgacctgtgagtaagaaacaacacatgtgcacgtgtgggactctcccatctcctcacagtactcagtaaacattggctagtattttcagagagaagactgcagacattttttgaagcatacagagctttgtttaacaaatactaagaatttttcctgcttaaatttttatcacagacaaagagtcacatggtagtcaacgacctcaaggtatttttatagcacatgtggagattagttttgtatagttat

SEQ ID NO: 130696 - DNA, 389 bp, Homo sapiens
taagttcatctatctatcgaacatttctatgttctagttattctttgaacaactgccttcttatagataagaaaattttcggtttgctgattggtaaattggtagttactcctccatttttggttcttgttagttttctaacactaggttcaaactcttgaagaaaatattttgttctgcatgcacctttgcagaattcttcgaaaatttgctggcagaatagttgtagaaaaccccaattacagataataattttgccattttcctgatgacccctagagaggaataaatttgcaaaattagtttaattttgttttactcctgtgtcttgtgctttctcatttcctttcctcaagttatagaaaatacataagcccaggtcgacgcgg

SEQ ID NO: 130697 - DNA, 460 bp, Homo sapiens
caaagcctgccagcaagggatgtttcatcttagcttatctgtatactcaaaggatttattgcatcatttacttccattatgggaggaaaaataaaagcagacactcttgggtatgtatgtatatgtgtttgccttttttaaaacaatgaagttgatttattaccttctgggtttaaaatcttatctgagccttttctgcccctaagattctgtgattctataatcagaaatagcttggggaatggataattattttgtaaaggaatctagaaaacttgtctttgaatatgataacagtgaaggtaatattttcattcccagataccccagttttattatctttttttgctagttttattttgttttcttataaactattatcaattttggtaacctggaaaattttattggattctccaaataactggattataaagtatttatggaattatcagagttg

SEQ ID NO: 130698 - DNA, 269 bp, Homo sapiens
aaaaaaaaaggacctcgagaaagggtctgagatgagatctgagggccactcacatgaaagggatgggcaagaggagctcagaggaaggctctggaagagaggcaggaagagagaccgtcatgggcaggggctttgacgcaagaggttccacagtggcttggcccacatgtcagggaggaggagcgaccattcagtgacaagagttgctgcagcccctgtctgtccatccatctggggaggactggggacaaaagccaggctggagagag

SEQ ID NO: 130699 - DNA, 728 bp, Homo sapiens
cctctttctcagggcagcagagcgggtgcagattgcaaatccaccaatggtgcacaagaaaccagaagggtgacagaagatggcatctccacgatgatcaacaagaacaacaattcatgtgtgaatcacttctttggcttttggctgagatcaagtgcaatgcacgtgtgacctctcgtcctctggtgtctctgatgattagatgaagacagttgttaaaacaaagtcttgtttcagcaccaagctgcaacagacatgaactttcaaatggaggtgccaaatgtccacgtgcagatattcatcaggaatttctgagaaacttgctctgaaacactgagactctctcaactacttgaagaatagaaacccaatctctactaaaaatacaaaaattagccaggcatgagccaccgtgcctggcccaaatgtcactcttcttataaggacaccagttgtattagattaagggcccaccctactccggtatgaccacatcttaactaattattgcatctgcaacaacctcatttccaaataaggtcacttttttgaggtgctgggggttaagacttcaacatatgcttttttggggaacacaattcaactcatagcatagggagagaaagtaaaggggtggggggtaacgaaaaggtgagaagtccatcttctgaggtccatcttcccaaaacccctgtttctattctactcagttggtctgtatccttact

SEQ ID NO: 130700 - DNA, 275 bp, Homo sapiens
caaatactgcgtgttgtcacttatgaatgggaacgaaatgatgagaacacgtggacacagagagggaccagcagacactggggtctgcttgagggtggggggtggaggagggagaggaacagaaaaaataactgttgggtactgggcttaacacctgggtgatgaaatagtctgttcaacaaaccctgatgacacaagtttacctacgtaacaaacctgcaacccgaacctaaaacaaagttaaaaaaaacgttgggtttctgcggagagaccac

SEQ ID NO: 130701 - DNA, 447 bp, Homo sapiens
cactgatctcatcagaaaaatctgttaagtattgggcacctttcaagttcatggtgtcaggttcaagttttctaaaattttaatttttctatcaaagctcaaattttatcactggcaattaacattatcagtcttccttgaagtgacatgcttggtttttcaagaaaatgcttgttaaatataaaaaatctggataactttgcatgagtccatcacactttcaaacagatgttttatgaaaaaagcagctagctcagctcacaactcaaaccacttgtccattttctcaaattaaccatcttactgcactaaggagagaagaaatgctttatatgaactcatttcatcacagaatataaaaagacatgaatacaagatctgtgaaattggtttttttagttttgggttttttcttttatttatttatttatttgagacagcctatca

SEQ ID NO: 130702 - DNA, 356 bp, Homo sapiens
aatgtctgggaaaggcattcgtcatctctgttactgtgttttttatttctagcctttgcatttgactcttgcttttttttatctcactgctgaaatttcctgtctcttcatgcatattgttcagcttttccactacagcctttgacatactaatcatatttatgaatcatattaatcttagttattttaaattccttacctgttaactgcaataatactgtggctctaatttcatttcctatttttttctcttgattatgggtcatatggacatgactctttcacatccctggtgactttggattgaatgaatgttggacattgtatattaaaaacaggagatgtattcatctgtt

SEQ ID NO: 130703 - DNA, 426 bp, Homo sapiens
tttggctaattacttattttttgagacttggtttccttacctactaaatgggaatactgacagtaccaacctcagaaagttattgtgaggattaaagcccttgcatagggcatggtacagaatgaatgcccaaagtatgcaattagtgttttagctttaccatgcatttcatgtcaagttgcctgcacataccaagctacttaatgcctacgtccttttacataggtttctgacttaggatgctctccccagaatctaccacaaagttccccaccccacttacttgggtctgacaaatgcttactcataatggaagatccacctccaggatcaaatccctcacatggaattatacttctcaacctattttataataactccttaaccaggccttgagatcactaaaggaacaacccatgactcatt

SEQ ID NO: 130704 - DNA, 672 bp, Homo sapiens
gacttcttaaaatcaacacagggtcatcccttcaacgattccaatgaacgctctatatcctcaccaccgcccaattagactcactgttgttgggaaccacaattactgataagagtgttatatccttcaggttatcgtcagatagaaaaaaggaggagaacccttcttgtagaattcagaacagatagtggtccatcagggaacagaccgcctcccacccactccagtggctgcttcatgtcacatgctgtcctctgcagcgagaaagccagctccctctaggagtagcactagttttaatcatgtgctgaacttaggcagagataataggctagtcatggggtgctcctatgaccctgggcttgctaagctttaattacatcagatatcgttcctgccttaacggatccataaccttggagaccaggtgccttttgatacttttcctccataagacttcctcaagagtcactgttttgatgacatttgagtcctgaactaagaagctaaaaacctgaattcctaggtggtctttgacagattctggagtgcctgcatgaagtgtgggagggccagaagtgctgggagcatttccgaaggggaattcacagctccatttacccagaggcatcctgattctccccagtgcagagctagcctagggaccaaacc

SEQ ID NO: 130705 - DNA, 547 bp, Homo sapiens
attttaaatgaagactttgtaatttccagtcttctaatttcagaaaacagagttttacagtagaagaacatggacttatggatgagaatggaatctgaattagtcattgcttcttagaatcaggcaagatatttactctttcgttattttaggtaaaaaggtactgtgaaaattgaattaaattggaattaatgaactagagttatatttccagcaaaggtaaaattcaaaaacgtaagggttagaaaagcaagttgtagaatgactagtacatgacaccatttattgaatgttaaacaatagtataaattgcttatgaatcacacatatggtagaagtatgaaatgtgctttagagtgacacactcgtatttcaggatagtagtcatctctctaaatgacagcagagtggaatggaataactgtatctgtagctttcttttttaaattattattcaaaagcccgaaggaaatgtagcaaagtgtcaagatttgctaaaggtggctgatggataaatgagtactcgtggtattaattctgttgtgtg

SEQ ID NO: 130706 - DNA, 574 bp, Homo sapiens
gatattcacagggacctgtgggggtaaggggctggggtgtggactaggtttgcatctcagagaacatttggaagctggaattagggagctctggtctggttctcttgtccccatctcttgctggtgatccagcagagagaagaaaatccctgttacactcctctgtttgctctcatcagaaaactaaacagtggacaggcttaaagattatcccacatccaggactgggaaggctgagctgggacggccaagacaggcctgaaagccagcaggaaagcactgcgtgtctaggggagattgtaagattcaaagggcaagggccacacctatcttattcactgtatccgaggccctggcaatttcttagggctcggtcaataatgagccctatgattaggagtatcctctccatcatgtaccccatgaagtatggggactaacatatgcatagacaatcaactgtttggaattatccacagaggattttgaggtttggtttggttttagcaacaaatgcacttttttatccttgactagcccatggataaaagcccataatacctttagtacttca

SEQ ID NO: 130707 - DNA, 463 bp, Homo sapiens
ggagtcaaatgaagaaaacagaagtaaatctcttatactacaggtgccaacttcagtaacctgtggtttaagttaagacaggctactggggaggattattactactactcagtaagagaactctgtctcaaaatctcccccactcaccccagctgccttcccctggctgagtctcaaagaagagcattctttgagacctatctggatatacgtgaggaaacagtttggtagctgctgctttcaggagcagcaatgatttcaggctttgccagcaggtggcattataacttactttatttccacagcaacgttttggtctagggacccttttacactcttaaaaaaatcattgaggactccaaagaacttttgcttatgtaggctgtatttatcaatatttactgtatttgaaattaaaactaatagatttcttaaatgtaataaacccgctacatgttaacat

SEQ ID NO: 130708 - DNA, 623 bp, Homo sapiens
ggttcatattcttttcttccttggaagtttcccaccccaccccgaattaggaagttcctcagggacagaatccatgtcaactactttatcttctgtctctccatgcctagcaaatgctaggtgtttggtcactgagtagatgaatgaatgtacatccctgaccttcacccttgttccttgagtggagaaaaaagaccccaggctgtgtgtactcttcatttctggaatgagggttcttgtacatcccatcatcagctctcctgggcttttattctgaaggctagtggaggcacaactgcaaaagactttgcagatacgacgtgtgaaatgccaagaggaagaaaaattgaaagcaggagttgcatcttgccatgtgatgtgaatacctttctggcactatgacagtctcctcatggtgggcagtgggataccatgtgagaccaagcaagggcccaagtcacctgcagctctgagatgcctgcagaattctgtggaaaacttcccaaatgcacttagaccccagggttttgatgatgttgatggttctctgttcagttttttagtttctgtcaaaatgtattatctaaactctttactcagtcctacctacaaaatacactttc

SEQ ID NO: 130709 - DNA, 169 bp, Homo sapiens
gatactccaattagcatatatgagatgggaaaaaataaagagggtattttctaattaattgaaaatcatgcttagatttagaatggtgtttcccaaactatcaggtctgtaagttcacaagaaagaatcaccaccatttttaagtaacaaaaataaaataatattttga

SEQ ID NO: 130710 - DNA, 586 bp, Homo sapiens
tagggaatgggtgctgggagaagctattggtcgctggatgccggtgattgctgcacaccgcaggagctaggcaatggagaagctacgcgtactgcaggagctagacatggagaggccatgcacgctgcaggaggctagtgccagagacgccacccgtgctgcctgcctactgaacacaccagaaccagggtgaaaaaagcctttccttctgcagtgtctctccagcatcttctactaaccactgttaacatcatgttagctggcaagggaaacacgtttaagggcccagaaccatttttgcatagcaggcagtgaaggtgggtttggggctgagaggcaataaattaataactgactgtctcagtgagtttgggctgctgcaacagaatactatggactgtgtgtcttaaacaagaaacatttattgctcacagttctggaggctggaaatcgaagatcagggtgccaccatggtcaggttcttgcggagggctctcttcctggtttatagacagtgactttcctgctgtgtcctcatgtggcagagagcagaaagagagcaagcactcatgtctctatttacaag

SEQ ID NO: 130711 - DNA, 248 bp, Homo sapiens
gaggacgtggaggagaggggctccaccgccagggaagagaagcccagaaggaaggccgcagcactggcaaagacagaggtgaggctacagcgagtgctaaccagactcagagatcatggagcaaagcagagaggagcagctgctcatcctaagttattgaattgattggtccctgctcccctctttggttcaaggggcgctgaggaaggggcctggacacaaagacctctgtgccccgaagagcttgg

SEQ ID NO: 130712 - DNA, 429 bp, Homo sapiens
caggctgtcagcccagagggcgataacatgagaattcctgttgtgaggtcattgtcatgacctcatagccaggctgttcaaaatgtttgcccagcttctgggaggaatctggagctgatgactcaagaaatgtccttcctcctaagaaattatcctcccatctgagattagcagcatctaatctcagttttctccactgctgaccagcatcagcaacacaggtaagcagagacaagcaagtccacctaaatagctgaacaccagtcatgtacgcatatctgtattacctgcaaacttctggtacgcaagtttttattttggttcggttccaaacactttttcttagtattctttactggaggattgggctacatttaagcatccccgccaggcgtggtggctcacgcctgtaatcgcagtactttggga

SEQ ID NO: 130713 - DNA, 234 bp, Homo sapiens
tggcccggggattagtccctttgatcaatccgttccgggatcccggataacccccaaaagggagagcggcgtggcagggagggaaagaagtccggatgggccctctcagaacacaatgtccaatagctgagcggcccagggaccgccagaaacaccaagcgcgggttggagtctgaacccgaggcgcctgcgtccctcccgcagggacccccacgctccaccgggtggggccca

SEQ ID NO: 130714 - DNA, 754 bp, Homo sapiens
ttggggcaaatttttcaaatacaaacatcagtgaatataggcaaggccttttcttttttattattctattttaagttctagggtacatgtgcacaacgtgcaggtttgttacataggtcgacatgtgccggcaacgccttttcaataatgtcttacaaggagaaacgtggctcctctaggtgagcagccctcagtgcgcatctccctgaagtccacattgatccggcagagctgtggggttcacatctcacactgaggcatttagggcctaaaccccactttactcttttgtacaatgaatgggaaatcagtgatctaaatgagtttaaatcttattagggattcagactgcccttcagactctgtctctattcctcccagagctgggttcaacatgaattcaaatagaaatatgagacaatgaattatggtagtgacaaagaccttccttcgaattccggatttttctagcagcccctttctttctgcttcccacctgccttcaactctttctcctaaaaaagttcagttggggtgaagtttggtgacttagaacatcattattttaacgtgatcccaaagcagttttcattatatgcaaagctgcatatttattcacattttaaaaaatgttctaaattggtttcttatgtccaaaagaaggggagctagttataagaaaagagaactgagtaacataagaaagtgctaatcatttcaaattaaagcgggaaacatgcaaagcagaaagaat

SEQ ID NO: 130715 - DNA, 256 bp, Homo sapiens
ggtgagacagagatgaagagacagacagacatattggagagaaacagagacagagaggaagggggcagagagacagagacagagaaacagacagagacacatcggacagacacacaaagaaggcaaagggagggagagacagagagacagagacacatcaaagagacatgcagagacaaagaggagaaagggatggtgagatagacatgaagagacagagacagtgggagagactgagacatcagagagacagagg

SEQ ID NO: 130716 - DNA, 642 bp, Homo sapiens
caactgaaagttgttttctgaagtaaattatctaagaaaagggaggtcagagccctggagtcagaaagaaacctatgtaaaacttagttaagctgaaagaaacgttaagaccttttgggtcatatgttcttttcttttcttttcttttcctcttttcttttcctttctttcccttcccctcccctcccctcccctctcctcttctcttctttgcttttctttttctttctattatagaggcgagcgtcttgctatattccccaggctgtcccgggttcaagcaatcctcccaccttagcctcccagtgtgctggaattacaggtgtgagccaccacacccagccacattctcttgatgataacttatcactgtagcttccaactgctgctcctgaacttccccagttgttttactttccctgcaggctgttgttgctcattttggttttcttctctcagaacaggaaggaagcctcctgtttactgttctccagagcagcaatcacacacaatgctgggctatgtaagcctcatgggagacttgcagataaaggcagggaattacagcatacagtagacagtaacttacatttgtaagttggaagtctgtgcttttgaagttacacactcatgtcacactaa

SEQ ID NO: 130717 - DNA, 350 bp, Homo sapiens
ttatttctctccctgaaacccacctttttgtaaattttttacctttcaagttttactaataaaatgcaacttacaataaaaaactgaagtcaaaaaaagtgaagaaatcttttcaagatgataaacccccagagagtggcagtgctgattagaaaactgatgtgtttgactcgtgtcaagtcaggccacgatcccttgattctcccaccccatcctgctcacttaagtgctcaacgaccaccctcttcggagacactatacctcagttactgctccagatgcattttagtttgcaagttcttgcaccatctcactggagtaagttttttttagtttttttggtacactat

SEQ ID NO: 130718 - DNA, 386 bp, Homo sapiens
tcagaggaaggagggtgccatagaggctgaggcccccctcaaagatctgagagagcagactaggctcctcagctcacttcaagctgccagtcaaggccctctagagagtaaccagaatccacctccctatccttacctgcaacagggcctgtcccttcaacttaaccttccctcaagctgcagaggccacagggccacgacattccacccacattgttactgctgaaaaaagccctcacttccttcacaaaagtgctgtcctccaactaaacagcaacccctgtctccacccacaaggctgaggacatgatgtcacctcaacccaatcacaaaatcatgttcctatgactcctagaggaagaaggtagtgaaaagattaaggtgga

SEQ ID NO: 130719 - DNA, 155 bp, Homo sapiens
ccaaataagtacctatcagttccagtactaagtagtttagtctaaatagcttagtaagtatttatatccaaacaacttagtaaccacttgaaaaaaaaatacacataaatcgaaagtagtgctggctgccgtggctcacgcctataatcctagca

SEQ ID NO: 130720 - DNA, 115 bp, Homo sapiens
tgtgataccaacaggcatcattcggtttcctctcaagagaataaaaaggactgggcaacaggaaaaactcaactacaggaaatcacagaagaaatgaaacatgccccccgagtgg

SEQ ID NO: 130721 - DNA, 454 bp, Homo sapiens
ttattttaagaatttcatcaattttctgctttcatagaaaactgaatggaacagtagaaaagccctattatattcattttcataattattaaacaattaagagaagtcattggtattttcttttacagttgaggaaaccatggttcagacaggtaaaatctcacaaaatcacatagcttgaacttactgaattttgtatttcaaagactaccagttacctctcgctttaatgaaaacaatgatgagatgacatgaaagtccagggactttcactgtatcagtaagatgtcatgcttccatattgatttcctgtgtaaaatatgcaatttcaaaaggctttcaattcttattagtggaaactcctctttaaaaatcctactaattagtcataaattctctgtctaggtcaatatccagtaacaaacttgcacatgtaccccctgaatttataagt

SEQ ID NO: 130722 - DNA, 434 bp, Homo sapiens
catgcacttgtagccctagctactcaggagggtgaggagggaggattgcttgatcccaggaattctgagctgtagtgagctatgccgattggattcctgcactaaatttggcatcaatatggtgacctcccgggcacgggggatcaccaggttgcctgaggaggggtgaaccagcccaggtcgggaatggagcgggtcaaaactcccatgatgatcagtagtgagatcatgcctgtgaatagccattacacttcagcctgggcaacatagcaagaatcaatctcgctctctctctttttttttttttttaaagagccaaccttaggaagaaatgcctttttttttttctttttaaaggacatttcttctaaggttggcttgttttagggatagccaaacctacaggttgttctaattgatatactcatctcacc

SEQ ID NO: 130723 - DNA, 755 bp, Homo sapiens
ggcacacgcctgtaatcccagctactcgggagacagaggcaaagttatcacttgaatttgagaggcggaggttgcaatgagctgagatcaagccactgctctccagcctgggtgacagagagagactctgtcttgaaataaattaattaattaattaaaacaaaagagataaataaatacagacatacataaaatgaatttgcactcctaccagaaatatatgagtgcctttctcccttcatccatgccagtattatagttgggcattgtgcctattcaaatgatatgattatttatctagaaacctccaaagaatctatcttttaaaaattatgtaagtcagtttcctttaatctggtaataaccagttagaaatataatgaaaggggaaatatccccttcccaatagccacagaaaacatcagtttcttggaaataatctgaacctgcaatatgtgagaattacatgaagaaaccaaattttactgagagaaagaaaatttgaataaataggcagtctgtgttccttaaagggaaggcttaatattgtgagaacattttaagcatattaattccatctaatttaatttataatttaaaacaactcttttcagaatcacaatgtgatttttttgaaaattggaaaatgtattctgaatattctgaatattacctggaaggataaacaagtgaggctagctaactttgtaaatggaaaagtaaagaaaaaattatcggcattagggttaataaaa

SEQ ID NO: 130724 - DNA, 224 bp, Homo sapiens
ggggtgatctcaagcttctatcctatacctgccccatgagaatattacaggtggggaaactgaggcacagaaggctttggtgacgtgctcaaagttagcagcaagtgcacgtctggggaagcctgtgcctgtcaccaccatcctaaggtagacacaaccttagcaaaccaaagacaggggccctgtccttccctgccctccttggtgcagctccggtaccgaga

SEQ ID NO: 130725 - DNA, 444 bp, Homo sapiens
attgaaatccctgtaatctctatgtgtcaaagatgggagcaggtggaggtaagtggatcatgggggcagtttcccctatgctgttctcaccataaggagtgagttctcacaaaatctgatggttttataagtatctgtcatttcccctgcttgcactctctccgtcttgccaccatgtgaaggaagtgcctgcttctcctttgccttccaccatgatgttaagtttcctgaagcctccccaccaaagcagaactgtgagtacacttcttttctttattaattaccccatctcaggcactcagatatttcctcatagcagggtgagaatggactcatacatacatacatacatatgtatatgtatatgtatatacacacacgtggagacagagggaattcaagtttatactctaacaagtgtgtatgtgtgtattcagtgaggta

SEQ ID NO: 130726 - DNA, 751 bp, Homo sapiens
  misc_feature (631)..(631): n is a, c, g, or t
tacagaggttaagtattttcgggttaggcttgctcaacaggtaagtgtaatgcaaatattccaaaatcggaaacttctggtcccatgcatttcagataatagatagtcagtctgaattaaactaacttcttggttgggaatttgcctggtcagataatgtgaattctagagtccaaacctaggggaagactgtcttgtgcctaagaactgtcaggaaagtattttctcttctttacccacacctggctaatttttgtattttttagtggagacagggtttcaccatgtcttgtgcctaagaactgtcaggaaagtcttttctcttctttacccagagcaagactgatataggaaaaagtttccttacagttctcccttaaaagatggaagaagaggccagacgcagtggctcaagcctgtaatcccagcgctttgggaggccaagccgggcagatcacttttttatctataaattgaagataatattttctttgcctcataggaaaactgcacatgtaagagaaaatgaaatgtcataaaccgagtgtacctgtgtaactggcacttaaattaaaacaaaaacagaacattatcagtatcccaggaggtttttacattctccatgtgtgtntcgaggattcactatattgtaggtggactggcaggaatcacactgtacctagcacttgtaggctagcggaggatttatccaggttgaaatagcgtgaccgaagggatcgttttatcaggg

SEQ ID NO: 130727 - DNA, 444 bp, Homo sapiens
ttccatcagcacccctctgccttcctgccttccaggctccgcaccctgatgtcgcttctcctcctccctctgcagccagtgccaccgctgctctctcacagcttgctttccttgcactctcatgccacccgccgactgtgcaccaccacccatgcccgggctcctgctgcagcctcttctgtctgttctctgcaccttggacctcccttctggcctccactctactcactgctatccaagtcactgtccttaaaaccaagcccaccgaaatcctcctaagcccgaagcttcccaaggttcccatttctacaggatagagcttgggattcaagatgctctgaacctccccctcttcccttcattgttgaccattcatgcctccagcctgaaggtgctaagcagtggcccaatgccaggagctgagccaagctgagctccagcaca

SEQ ID NO: 130728 - DNA, 312 bp, Homo sapiens
taaccttgcctactgcagttttcatcatttcatttcacggcaacttcaactttccaattgttcagtcccaaaatttcagagtgatccttgactactctctctcacttcatctttaatacacacccagaatctagccatgtcctaccacctctactgctactatcctggtccaaaccaccaaaccactatcctggtccaaaccatgcctgaatgccctcctaaatagccttcttgcttctggccaaagtctattatcaagaatacagagagaccattcaaaatgtaaataagattatgccatgcttctgctca

SEQ ID NO: 130729 - DNA, 618 bp, Homo sapiens
cttcctgatgaggtgtcttacattcttgaaaccaggaggaggtagttaggtggtggagggtattctggtggagagaattgcatgtacaaatatctgaagcaagagagtgatgtgtgctctggatatggttcaggatagcgggaagccgtgtgtgtgtgcacatgtgcatgtgcatatgtgtgtgtatctttgaatatacatttactgagaccctcccctgcaccaaacaccattgagaaagatgatatttttgctgctgtgaacaagacagtctgctaggagccccctttgtgaacaatgatgtgggctctcatgcagctgtgctgaaccagctgtgttggggcctggggaccaggagggccagacagatcgtattctttggagccatatttatttgggttccagtgtgtgacctagagacagatgttgaactcttctgagactcctctgtaaaagcagaatgtctttcttacacagcacttcagtgcagtgcttggaacatggaaggtgctcagtatgtcctggttgctggacccattcatagcattatcaatgccatcgatcactttggcattgtgtttttctaggaaaatgtgttgtgaattccagccttgcacc

SEQ ID NO: 130730 - DNA, 563 bp, Homo sapiens
aagagtccaaacagtgcccagagtccaaacagtgcccagagtccaaacagtgcccagagtccaaacagtgccccagaaatcatgtttctaactagtatgctacactgcctgtcatgtatgttaatacatgtaatactttatgaatcatttaaggtgacttttagtcatccacacagaaatgtcacatgtagaattaggtgtaagtaatgaggttgctggagttgtatgggttggaggtaaatttgggagtcataagcatgtggatggcactataaggtatgaatatcgaagtggatgagatcactcaggaagagtgtaactagagaagtccaaggactgaatgctggcatgctctaacgttttagaggcccacgaggtgagaatgtagcatgaaatctaaaaaggaatgggctcagaggtaggaggaaaatcaggatagtgtggtttctaggaagccaagagaaagttgcaagaatgactgttgaatgctgctcagaggtgaagaaaaaggagtgagcattcgacacaacatgctacatgcgttgggcatactaacacacagt

SEQ ID NO: 130731 - DNA, 474 bp, Homo sapiens
gcctaggtgcccaaatactggtatttcaacaggacggcttttatttttaataaaataatttttatagagatggggtctcactgtgttgtccgggttgttctcaaactcccgggctccaacaatcctcccacctcagtctcccaaagtgctgggattacaggtgtaacagctttttataggagttctgcctcctacagcttcatactggaaaatacgagcaaaaaatgttgagcacatctatgatgagtaagggagatgagttgcactgtatggagaacctgatcccaggcctggccccacctttttttaactgtgaggcctgaggactatcccaggccatccaggcctctggtgtcacgtctagatagtgaggaagaacccccttccatggtctctaaggtggttcctagatctattattccaagcactagctctcctatgagctgtactgttgaggggcagaggggtcaaaag

SEQ ID NO: 130732 - DNA, 332 bp, Homo sapiens
tacagtacattattaagtcatttaatcctcacaagtattgccaccatttggtagacaaggcacctgaggctaagagataatttgtccaagatgtcacagcaaaaatgtagcagagttcagaacttaaaccaatgtgctataatgggtatattttattttcagaaaatacaaaactagatttccttaaaatgtagtctgagctataacagattctattttatgttacacgtgtgtagaagagcatttatagaggccacattactaaaatggggaacttcatagcattctgttttgtaaccagcatcatacttaatcttctgagttgaaagaat

SEQ ID NO: 130733 - DNA, 1026 bp, Homo sapiens
  misc_feature (1004)..(1004): n is a, c, g, or t
ggccccgccgccagcgcttccatccccgccccggcgggtccaagccggtgccgggcgcccaggggttgccgcgctgggcgggagggcagcgcctgagagggcggtggaggtggcggggttcctgcgcgcggcccgccatggaggtggaggaggcgttccaggcggtgggggagatgggcatctaccagatgtacttgtgcttcctgctggccgtgctgctgcagctctacgtggccacggaggccatcctcattgcactggttggggccacgccatcctaccactgggacctggcagagctcctgccaaatcagagccacggtaaccagtcagctggtgaagaccaggcctttggggactggctcctgacagccaacggcagtgagatccataagcacgtgcatttcagcagcagcttcacctccatcgcctcggagtggtttttaattgccaacagatcctacaaagtcagtgcagcaagctcttttttcttcagtggtgtatttgttggagttatctcttttggtcagctttcagatcgcttcggaaggaaacaaagtctatctcacaggttttgctcttgacatcttatttgcaattgcaaatggattttccccctcatatgagttctttgcagtaactcgcttcctggtgggcatgatgaatggagggatgtcgctggtggcctttgtcttgcttaatgaatgtgtgggcaccgcctactgggcacttgcaggatcgattggcggcctcttctttgcagttggcattgcccaatatgccctgttaggatacttcatccgctcctggaggaccctagccattctggttaacctgcagggaacggtggtctttctcttatctttattcattcctgaatcacctcgttggttatactcccagggtcgactgagtgaggctgaagaggcgctgtacctcattgccaagaggaaccgcaaactcaagtgcacgttctcactaacacacccagccaacaggagctncagggagactggaagtttcctg

SEQ ID NO: 130734 - DNA, 417 bp, Homo sapiens
agtttgtattttttgtctatcttccctttatttccactaattttctggcctctatgatactttcattctctgatgttcaacttagtgtagatttttttttcttttctggtgtgcctcttatagttgccagcatagggctgacatctcaccaggaagaaattggctctgtaacttggggttggaaatggtgctgcagatggtgctttctccagtgacagttctcttttccctgaattaggatcgattggcggcctcttctttgcagttggcattgcccaatatgccctgttaggatacttcatccgctcctggaggaccctagccattctggttaacctgcagggaacggtggtctttctcttatctttgtaagtagtttttcctcttagagttttaatttaaaaagccaaagcaatg

SEQ ID NO: 130735 - DNA, 493 bp, Homo sapiens
aaaaaatgtgtattctatttggacattacagtggattgacagcatagaaattatttattaaacccatcctactggacctgaaggtgaaccccatcgtaacagggtgcctggtagagtcattcttaactagccatcgatttgtaaaaaattgcaaaagtgggtttttttttttttttttttttgaaatggagccctgctttgtcgccagactggagtgcagtggcatgatctcggctcactacaacctccgcctcccaggttcaagcaattctcctgcctcagtctcccgggtagctgggactacaggcgcccaccaccacgcccggctaatttttgtactattagtagagacagggtttcaccatgttggccagaatggtcttgatctcttgacctcgggatctgcccgccttggcctcccaaagtgctgggattacagtaaaaatttcttatatcaaatgaccgttcttgaattgttaccttggattaacag

SEQ ID NO: 130736 - DNA, 102 bp, Homo sapiens
ctatgtgttccattgtggcaattgtgattcacaagggcatagctgagccaccacagctttcagctgtaatcctcctggcatctatccctgctgttagaggga

SEQ ID NO: 130737 - DNA, 451 bp, Homo sapiens
gtagccagccctttctgggcagaagtatctttttaaacatttcctcaggggattctgatgtgaagccagggctgggaatcactaagttaagccaagagtcggagggaacattcgatgagatggctgagatgcaaaggtagagagtttgcgatcatggagcaagaatttggagagcagcatcggaggcaggagggagagggggatggcagattgagtcaggaggaagatgggagagggtatgatgggagaggatggatgggtatggaattcccactctaggtttccacttggttccttggagaaggataagtgctttggcataagagaagtctgcttcagcctgaaaggaagacccagtggtgggtggggtgtggagctggagatcctttgccttgaggtcttctggggagtgcatgtgtacaaaggtgggctggggcgacggataggagag

SEQ ID NO: 130738 - DNA, 303 bp, Homo sapiens
gatactcgcttccaaaacaaataaggccacgtggagctgtgcactggaatgggattctggatgcaattttatttgattgggtacaagaaccaatccagttaaaggggtcatgaaccaactccaggcaccaggctcctactcagaggctgcctcagacccccttctggcccaggcaccaacccctcacccacccaactccatctcccgacattcttcaaccacattcccatctcgctccacaatattctccctccaggtccccctgactctatttctcctctattcccaaccctgacctctcta

SEQ ID NO: 130739 - DNA, 442 bp, Homo sapiens
catcatgggaaaaccctgcccacatgattcagtttacctcccaccaggtccctcccatgacatgttgggattatgggagccacaattcaagatgagatttgggtggggacacagccaaaccatatcagtctgtaataaataactcaaatttctttaatcctatattttccaaactttcttagtcaccaaatgtctcttttcacatacatcttttaacatcttgcagggcacactgggaactgctaaggtcagagaggagtgttcttgagcagaggaatgacattatgaaagcagtgttttagtcaaagtaatgtatataggatgattggagacagaagagattggaaacgtaagatcctgtttggaagctattggaatattttgggataaagaagatgtcacagatggataataatagcaaatattcattcgtcaattcagc

SEQ ID NO: 130740 - DNA, 289 bp, Homo sapiens
tgccgggattacaggcatgagccaccatgtccagcctctgtgtattgaatttcttaggatattttcactcatgtgacagttttcttctcctcctgtcccaaaccagttgcctgaaggatgcagtttccttcattagaccccaggggattccgcctcactgtttcttcccaaaagtctccagtgcagcgtccctggacttcctatgtgcaccactgcttggcagttcactgtattggagttaactgaactgacagttcagtgtgccatgccttaagcccctggtgacctc

SEQ ID NO: 130741 - DNA, 234 bp, Homo sapiens
gctgcctgatagtatgataaggtcaacagaagaaaaagaatagtggaagctgagacctgggattctacttctggctctatgtctaacttactgtgcaactctgggtcaatcagtttacctctgtagggcttgagtgtcccttaatatatacctgtaagtgttagaggaactgagaagttccatttcagaaaaactcccttggatttaacaatatgatggagaaaatagtatgaa

SEQ ID NO: 130742 - DNA, 554 bp, Homo sapiens
gggttgggggcccctaccctagtccacatttaatgtaatcatttaaacttttgacattcagattagggaaaaaataaatcttactttaattgaacagtttttctcatgctcattgattgtcatacttctgaattgcctattcatctccttagcctatttttctaaaggattccttatattcttaacgagttacagaagccctctattatccagttcatcctttgtaatatatgttacaagtacttttatttggttacttgtctttttgctctgttatgaaagttttaattgatactatttgaaatctgtccactttttctttgaggtttctgagttttgtgtaggaagactttatggatggtgtgagataggaataaaaacattttttcctcaataacgagttgtgcctgtctcatttattttccctattataaacttaaagatgttagtgtttcttttactgtggtttgctttcaaggcgtctcaaatattttgatatagaatactggatttttgaactaaacctccctgcgccattttctttttatcttccc

SEQ ID NO: 130743 - DNA, 238 bp, Homo sapiens
tcatgattcaagctaccacagattctgcatgaattagagaagggtcactttagcccgagggtgctgttcatgagccaaaaagctctcacagaagccagaagctgtctctgaaaatcttgtccagagctttccttactataatagccatttttgaaaggtctgtgtcctaaaggggttgcatcactcttattgagtgactcttttagtttttcacaaaaactattgcttttggagtatt

SEQ ID NO: 130744 - DNA, 774 bp, Homo sapiens
ggttgaatctgcagatgcaaaaccagtggatacggaggcctggctgtatggtattacacaggaagagtttactgagtgagaaatgaggtcaaggatattctaggtggtcttagaaaagcagtcagcaaagggttttgagaaaagaagaaaatgtttcttgagaagattaagagtaacatattaaacgctgcagtgtatttaaggctttggcattctttccaactcatagattgtcctcagcagtagataagattacttaccttaacctatatcatttctattcaagtctgtagaacttttttcatcttcttttcttctttttttttgcatgagtatcaattaaggaaaaacaacaacaaccatgtttacaatttattaggttccctgcagatatacgtggtatctgatcagaatagggaatacttttaaagcaagaagctaacaattttttttcacacctgcaatccttgatacatagaaggaaatctgattgcgaagacctctgttcatacagaataaccttaaagatataggctagtcttatttcatacctaagtgatatacaagtgtgtcaataatcattgatagtgaaattttccatcaacacagggtgcctatgagaataagatgatacaattccagagtattttgacagtagaaacttgtatgttaaaaatgaggagctatgtgataggtctaattatatctaaggcaacaaacagtccttttggcaattccttgaatttaggaatgaaaatactggttacgtatctt

SEQ ID NO: 130745 - DNA, 428 bp, Homo sapiens
ggggtcttttcccaatttttatctcctttgttgttcttgatccccttttcctcttcttttctgtctttcctttacatattcaccttttaactcatgtttccctttttcatttcttctttatcttcctttcccttatgttctctgtctaccttttccctgttaaatgccagaatagaagattgggttttccagttgcatactcagcaaatgagcagaaacagcacacatgtccccgtttaatttgtaaaggaacttaagtctttctgaagactatcaattaatgtgtctgtagccataaacatacctatgaaccatgttttacatttatgtaacactgctcaagaagtttatgcacttattagtctttgcatagcttcaaggagcagataatattgagtattagaaataaattttatttctgctgaaat

SEQ ID NO: 130746 - DNA, 216 bp, Homo sapiens
tacggctcactccacgaatctcaggggcaggagaccaaagataaagatgaaagagccctattaaaccactgcaggccaggcacagatggtgcccaccatgcaatcccagcactttggaaggccgaggcaggagtacgagacatgttgttgtaactggaaggtgctagtcggatgtcgtgggtgggggccagggatgctcctaaacaccttaaaatg

SEQ ID NO: 130747 - DNA, 117 bp, Homo sapiens
ttatgatatgacacaggaaacatcacaaactattgaaaaaagtgaatattattacataaaatatgttggattaattggccatctatatacaaatctagatgtctatctcataccata

SEQ ID NO: 130748 - DNA, 372 bp, Homo sapiens
agtatttggaggtggggcctaatgggaggtatttaggtcataagggttccactctcagaatggatcaatgacaaaataaaaagagctcgacctctcaggctcaaacagtcctcttgcctcagcctcctgagtagctgggaccacaggcacacaccacaacacccagctaatattttaaatgttttgtagagacgaggtctcactatgtttcccaggctggtctcgaactcctgagctcaagtaatcttcccgcctcggcctcccaaaggctgggattacaggtgtgaaccattgcacctgtcctgggtttagtttttttttttctagatttttcagtgagagatactttcttcctgggttacatattacggg

SEQ ID NO: 130749 - DNA, 610 bp, Homo sapiens
agaatacctaactatgcaacactttgattactttcagctgacctcttttgtttacaccagttttatgggcccctgagtgtggtgttagtggtggttacaatattgacctgctagctacatgaagctgctcaacagctacccagtcttcatgtccttttgtgaactatttctagaaagaaatggattcccagctctcagttgtaatctaactgcagagtaatgttggataatacatcagcctcaagaaattttccagattaaattgtctgagtgagaagtataaaagtgtatctactggaaatgcaagctaattatgtcacattcttggcttttcagttttaagttacatgttaaatgtgtatttgaagaaagagcttctagttaaagactgtgaaaaaaaagacattttgtctccatttcattcactcagaaattgttaaagaaataaattcagtcaaaagctgtgtctatgtgggagggggtaaaaaagtggggaagagatgaagttcctcttcactttcaatgaaagaggaaatggctgtgttcccatatcctgaatttgtcataaacctgccaaatatatggaatgtggcctggaatgagagagacc

SEQ ID NO: 130750 - DNA, 402 bp, Homo sapiens
acttcagtttactgaaatgaaaagagaaaatactggtacttgttttatgttacattacataaaatggtatggataaaacaccaaccttagggccttgcatgtaaagtaagcacttagtaactaatccttccctctccctagcctctttgagttaaaaatccaaggttctattctcaactttgctagaatcttaatattttcatctgctaaatggaggcaacagggtcggtctgctttataaaaagctgttgtgaatttggagtaagaaacatacatagcctatgttagagctagatgtatgctgcttgttggctgggaggtctctttcaatctaatttcaagttctaaaatctttacaatcgcttctctgctgttccatggtcaatgacagtctttgggtat

SEQ ID NO: 130751 - DNA, 148 bp, Homo sapiens
ggtgttgtgagattgttttaggtagtagcttttctagtcaggccaggtctaggaggagtaggggtaggttttggcttgtaagaaggcctagataagggactgtgcggtgtatgatactagggtaaaatccgagtatattagagaagta

SEQ ID NO: 130752 - DNA, 151 bp, Homo sapiens
tacagggtaatatagttttcaaagttatatgtgctatttttttaaacacacaatgatgctgtaactatgcaatagtagaaattttatattaaaggttgtggaatcccagcactttgggaggccaaggtgggaggattacttaagttcagga

SEQ ID NO: 130753 - DNA, 690 bp, Homo sapiens
cgttcacctctgagaggcagtgcagcactctttctttgatccccaggagcactctggcatattggggaagcccacaggtgctggcggaaggtggcctgcactccagtgtctgtcatttactggccaaaacccctgagcacttttctttaacatctgtgatcatgtttcctcatctgtaaagtaggggcaattgctgtgaggattaaatgagctgatacaaagcacttcatatggtacctggcaatagtgaatgttggcccatgattcccccaaattagcatgcttagctttgcttagtaagtgtatttataaatgatttgtagaaatattttaaaggaatcttattctagcttatatccatgtaaaatgtaatttaagaaagaaatgaaattcaaagaatcatttttgtaatgtaggatttcaaaaaataaaaacaaaaaaggacccttccttcacccgtcacttaattttgatgcacagttgaacttcagtcagctctgatccagttacccatatgggaatatttaggattgtctagtcacgcctgggtaatagaatgtcaagccctgattttacaagctaatatgtcaaattcattttttcctgtttacatgtagctgtctgattcatttgtccccgaggcacgtgatacttggctccactccaattttagaccctaacaaaaattaa

SEQ ID NO: 130754 - DNA, 572 bp, Homo sapiens
atagaatgtttgtaactcagatccttatgaggatcataaattaatatcaaacaaaatttttatcctaaatatttttaaactaagttgatattaagacatcagcttaaatctctgttccaaaaccatctatattgttttaaatatgctatctgtaaaggatatcgtttgctcattgttataggaggaagtggagtagatgacttctcagatctcttagatttaatctactatgagtttgagtctcaaaccttttgtgtgacagtaaaaatgttttcattctgctctctccatatatccatgagctgaatcgcatgcttggaatccaacacagtgcctgagtcttagcaagtactcaataaatgttaattgagttaaattgatttgttcaatgcaacaaaaatgtatgtagcgctgtctgcattaatatttctctagcctccaacatgcatctgcccaaatactcaaaggatctaagttcaaacagagatcccagtatatccagcaccactaacagatggagcctccgtaattaccatgtccacctgtctgcagtgggctgttctgggaaggaa

SEQ ID NO: 130755 - DNA, 488 bp, Homo sapiens
acacacaagccagtggcaaacctctgcccaagtattaaaggataaactgggcaatcagatttgaatctcaaaactctggactaggaaatcagaagaatgaactactgtaagtcaatgatatgaacgagtccaagagacaaagtagagggggaaagctaatcagtagaaaacaggcagatgaagatgcctggagagaagcagagctgccaacggagaacagacgcgagagctgtccgaggtcctgataccctgaggttctgattccagtcaacctgcagactcacatctatcctgaaatgcaacccaactccaattccacagagtcacaatgtacctaaattatttggacagacacagaagtcataataatataatttaacctactgataggccctgtgacaaaaaggcctaggcaaatggtaatttttaaaagcccagtctgcctgagactgaagcccagctctgtcatttattacctctgtggccct

SEQ ID NO: 130756 - DNA, 771 bp, Homo sapiens
tgtcacctgtttgtctctgtaaaaaatggaatccctccttcattattatctttgcctttattctgctttttttttcccctagtgcttatcactctctgaaactatgttatttgtttgcttatttctttgctgtagcccacaccagatcaggaactcctcaaaagcaagaccttaaaactatcttatttggctaccatatccataacttataaaacagtactcagcatacaatagacaccaggtaaatagttgttggatctgttgaattatcaccatgaaagctaaaatcctctaggataatggtgggagtcagggtgagagtgaggtgtcaatgtcacctgatgagttgaagaaaagataattttactatttgagagaaaggactgaaatatgatatgctaaggagttgttgctgaatttaaatttttttagggaatctatattaaaatatgctgtatatttgatattagacctagaggtcagtgtaacccattcacagggtttgcaagtatcatttgtgtcatcctcagttttgcaaataaaatgttgcacttttaaaagataaatgtaagtagcttaagcagaagtagttaggtatattttttcactttttctttttggtccagatctggcatggttcctagacatgtgaaattagtgatgtggaaaaatgtaaatatatagctaatgcaataagcttcacaaaaatattttgttctatacagtgttcagcattttaaccagctccatggatttcagtaggaagtctca

SEQ ID NO: 130757 - DNA, 198 bp, Homo sapiens
gacactggcccccagcctcctcctatgtcttcctaggcacctctgcctccactgagccctgactctgggggaggcaggcaggcccaggagagtatatatgtcagttagggtttgtcgtttacacgtggagatcattaacgagacttatttttaaattgtaattgcaaaatgtaaatgctccccaaaccgatgtgtaat

SEQ ID NO: 130758 - DNA, 421 bp, Homo sapiens
aatgttttgttcccaccacaatcactgagtctcagaactggaaggaattatctaattttctacccaatttcctacgcatgaaaggaatgctggggaggattctgagaaaagtgtggcttcttaataaaaagaggtgcagagaagagatacctcctcttctctgtacatacctcattgtgcctgtataaaatgcctaggacctggacagtcatcctgggaccttcccatatccagtatccatttctgaaagagctctccagttccatgagcttcagaccccataaaactcaggtcggcctcctactcatctccctgatctaagtcacaagtctatgaactcaacatcttgagtatctctcaagcctgcccacttactcttctccagtgctaccatcctggtccacactgccatcttctttca

SEQ ID NO: 130759 - DNA, 392 bp, Homo sapiens
tgataataaccctttttgaaaactatgtggccttcctaaagctaatgcaagaccaccaggttagaaggatgagaggagcctgaagtcgttaacttccccagttactcctggagataacatcactattgtagaatctaagtaagattggcctttagagatgtcttttaaagtttttgcatttctgatgacccacgactccacgtgaacccaccaactagtcccatggccgcccccagaagaggactactttccatactcccattcaattgcccaccaaactatccttgaaaaagcctagcctccgaaatttgggggagattgatttgagtaatgactccatttcccatgtggcgtggccaggcttgtgtttattcaactctttttttattgca

SEQ ID NO: 130760 - DNA, 401 bp, Homo sapiens
aggaaacacaggtggccccctttctgcaggactcggagctgggcggaggtgagcctggagcctccacaggcagccaggagggagagcctgcttggcagcaaagccagtccagcagaaaactgagctgggacttggcagaggcagcttccagacaacatctaagttctggatttgtgcctaatgcagagatctgccctggaatttttcattacgcaaaccaagaagtgcccttttggcctaaatcaggtggagtccagcatctgccacttgcgacagttgctgtagcacacctattgggtgtgtaacatcctcaaccttaggagcagaaatccccgccgataccagcaaagaatgaagcaagcagaggccaatgcccagacgggccagacaggaccaggaga

SEQ ID NO: 130761 - DNA, 824 bp, Homo sapiens
aatcgagctcggaccaggacagtcttacaggacagtacccgtctgcagcctggggactggggaccctgctttagatgatgtactctggctttgcattctggcattagctaagcaccctcttaaaggaaattgggtctatactctcagtccgtgttctccctaacacctggaaacattgaataccttcaatgctgggaagttaactcccaccacaactagaacagctatgggaaagacaacagttgattttgaagagtgtcaccaatttgcacatgattccatccttaaccattcttatcctatcagctctgccaaacatggagaatagttggctgcaggacagctatttttcctacttgtagatgcaactatttctcacccaccaggatgtaaaaggtccctgtaccctaagattggtcctacatacacacccaatgggaaaatgagatgaaaaatttaaagcagtaaatatttgaggaagtagatagagtaatttagaaaaagaaaatacacagggccaagcacagtggctcacatctgtaatcccagcactttgagaggccaaggtgagaggattgcttgagctcaggagtttgaggccagcctaggcaatgtagtgagaccccacctctacaaaaaattaaaaacttagttgggcttggtagtatgtacctgtagtttaagaaacttgggaggctgagctgaggcaggaggattgtttgagcccgggtggtcaaggctgcagtgggccatgattgtgccagagtactccagcctgggtgatagagtgagactctgtctcaaacaaaaaaaaaaacagagac

SEQ ID NO: 130762 - DNA, 341 bp, Homo sapiens
aaatggactaagacagatttggtccctctcttacagcaccattaatatttctatttttaagatagggaaactgaagttcagaaatgatagatgatttgctcaaggtctctcaacaaaatacttattaaatgcctgttgctgccaatcacgatgctgaatgctgtggatggagtttagatctagcgggataagcagacactcaaataattacacaggcacatgtataattatgaacaagaataactgccaggaagaaagaggttggggagtggcaagagtgtacatcagctcatcagtgccagccatgtgtcctgaccccaaagccatttgattgctaaacc

SEQ ID NO: 130763 - DNA, 272 bp, Homo sapiens
cacctaggctaaataaagtgcagtgcacaatcattagctcactgcagccttgaaatcctgggctcaagtgatcctctcacctcagcctcccaagtagctagcctcaagtgatcctcctgcctcagcctctcaaagtgctgggattacagatgtgagccaccgtgactgacctattatctgattttagccaacaatgttgtttttcttaatattctttcactgttaattaaatgtgatttaagtaatatcttttaactctcagttgttataga

SEQ ID NO: 130764 - DNA, 406 bp, Homo sapiens
cagatagggctggcacagcaaagcagagactcggccgtatcctgaaaatccacagaaatggcaaactacttctacgacaggtcatcgttcaagcagaatgcagacaggccattcacgagcccaagttgaagagaagagacgcccatccgtgaaggagcagaccatccatccgatcctccccttcccctgtccttccttcgtggattgtctccattgtccagacagtgcccccatctcccacctagatgtctttgtaacctgagctggtaagaaagggaggagggacagaaagaggggaaatatgcccttgacatatgatgtatcttctttcttttcttcttctctttgattacacgaaataaaatggtttaggctgagggtaaagaagtaataccatttctagttg

SEQ ID NO: 130765 - DNA, 332 bp, Homo sapiens
actctaattagaaaagtctaaaaccacccaaaaatgtttttagagacagcttcagaaagtctactgccaatttagtttgagtcactatgagcaaagacaccagggcaaaagaggggtgacgatgatggaaagaggaatggctggctgaagcccaatgccagggctggatagctcctaggggaagtcaggacaatctgaggagggtgtgtgagggtgtgtgtgtgtgcgtgtgtgtgtgtacatatgcacttcaattttcacaagttgtgcttgatggattgagaaagggcagaggcgtctgggcacggcggctcacgcctgtaatcccagca

SEQ ID NO: 130766 - DNA, 379 bp, Homo sapiens
cttcactgccatttaaggtaactttctgcttgtttaagaatattccagctgtgtttatggtgttccaacattcccctgccaaaacccttgacaaatgaatggcaatattttcagggatgttggcaagtacagactggatttagctattaaatcctcattggtttttgtcatatctgatcagaatacaggaatgggcttttgactattaaaacatgtacacagtgcttgggaggctgatgcaggaggaccacttgagcctgggagttcaagaccagcctgggcaaacacagcgagatgctgtctcaaaacaacaacaacaagcatgtacacagaaatgaatcagttttcacacatttcagctctgcccacacagtaccta

SEQ ID NO: 130767 - DNA, 752 bp, Homo sapiens
tatttggtatcacaatgcatactttctcagtagagacgctatttattatcattttaggcagaaaggtaattccttgtgtgggatttttctgagcattgcattagcttattatcccagtcccaacacattgaatgcctatataaccccacaatcattgtggcaaacaataatgcctacacacatttacgaataccctttggggatatggtatagtcaccaattgagggagattcactggtacagtgcatatttgagaaatccaaaattctctacttctcctctctaaacttcccccaacaaattatgggagtctgtatggggcatcttactcatgctcatgaaataatcctctcaactgccacaaggcagccactaatttccttctatccagctgattattactggtgctttttcctgctacatttctttccagatgcagactggtgcaacttacttcacagaacttacctattcccttcacattcctacagttctagtattaactgagatgagtggtatgccaaggttagtcttggggtgaggaggatggagggtagaggagggtggaaagtagaggaggaatgaagctgagagcttgcttctttcagcccagaaccggtgttcaacattcttctcccttagaatagttatttcccaagagtatctcagtacctaccagattctgaattctaggagagcatggacttctcaagaatgatacctggcttattactggtacttaaattcataca

SEQ ID NO: 130768 - DNA, 932 bp, Homo sapiens
gtagttgcttctttctcctgggaccgtgctttttgacagtttacccaccaggaggctgaaacttttgcaaaccagaacctaggtcttcaatttcagttttgatgctctgatttgttccccgaggacagctgataacctggctgctcttcctccttccaaattagcttcccaataagtgagaattcagtggcctcttgaattcagcagtctgtgtttccccagtaatggttcccaatattgctcctgcagcaatttgctataactgggtctaattctccaaattgcgaccacagccttgtgccaatataatagactttccttctcttttccattggtatgatcagaaggttaacatgtaagtcccaacacctctcacattatagaaagctgagttcacacagcaagtcttcagccctagtaacaggtacattggtggttgtgatcatttcttaattcctaccctgttgttttttttcccccaactttttgttaatctgcatgactactccactgtcaaggtttgtcacatgtaacctttccttccttttcaggagagtgctgtagagggtgcagtttgaataagttcagggttccacttgggcaagtatcagcatctgggatgtgggagctctcattatgcctcctttgtatttcaaactctggctagcgagaaacaatagcaccttgccctaaggtgtgaaattaaattcaagtaaatccatagcagtaggaaacacgcttactatttgtaatcagcaggcaccgttcgagaaaaggcaatatcaaggggagatggaggcttatgtgcactcccagtgtgctatacatctcaaaagagggctgcccaatgaatgtacaaaccttagatattgaccaggattaggaaaccatgattcttgctcacaaagcactgtgcaagtgtccccctttcc

SEQ ID NO: 130769 - DNA, 605 bp, Homo sapiens
ctgtctcacatggtaatcttatttgcctctgatgactggagcagatgaagtaatcgcttcgcagcatctgataaatacattacattaactgtgagaagcaacaagagactcaaaagccttgttcccaagtgaaattaaaatcaggttattgtcctcataaggcatttctcttccttaggcttctgagcaggagtcattggtgctgcactaagcatttctgctctctctagaactaatgaaactcttggcaatttagaataaaggtcattatttttgacaaaatggaagatgggatttggtattcaaatgatttaggtatttttatgctaaaaatattgatggtatgtggaaataaaaccacaccttttctcctttgatgggagcagtgtgtacctttatattccgttatttcagagcatgctgtgaaatttcaactttttcactccctgtgttcttccatgactaacccagttttcaggtcaggatgaggggttgccgccggcccggctgtagctgctttagggggagtattctgcatgctctgggcgcccagaacattttgttaaatgatttaaacatgagacagctgaaaccacttgacttgg

SEQ ID NO: 130770 - DNA, 238 bp, Homo sapiens
cgcctcccgacagcattaccgtgtgagctccgcccccgttagagcattactgtgtgagctccaccccctgccagagcattactgggtgagctccaccccctgccagagcattaccgtgagctccgccccctgtcagagcattactgtgagctccgccccatgttagagcattactatgtgagctccgccccctgccagagcattactgtgagctccgcccccctgtcagagcattagt

SEQ ID NO: 130771 - DNA, 215 bp, Homo sapiens
aggaaagctacatggcaaagggtaggagccactgtatacagtgggcaggcctggcaggggcaggggggtgacacagcgctgtctcagagggaatctgttcctagtccattaggccaagcagggccccagggaagagcctgtttcctgggaggaaaggcattaaccccgggtgctgttagcagcagggcagaatgtttacacctggggctccgaag

SEQ ID NO: 130772 - DNA, 438 bp, Homo sapiens
ttagaaatggctccttcctcacccacaccttcgggttcaggccaccctcgccaattgggacacaccctgtcctcaaggctgcacatcgtcctggcacctgctcccaggacccgctgccctcctgatcccacagggcagcgcttcaagggcagatcggacgtctcttcaatctgtgcctcgtccgtgaacaaggacgtggagccaggggcacaagtcaaagggttactccaggcaaagctgctgcatgaggaacggaacatcataaatgcagccccagtcacagttactgatagcaaggcttacgatcaaaatgaatttcttacatgagcagcaggtgaagagatgataggtctttcgcagaagcctcatgctggaaacagcccaaatgtccgtccacggcagaatggaaaaagtcgactaaagtccagccatacagtg

SEQ ID NO: 130773 - DNA, 234 bp, Homo sapiens
ggctcaggggttaaagggaagatgactggtcactggtggggctgaggtttgaatctggcttgctggctccccgaataagaggattctttccactcctccaagctccccgacaagggactcacctttcccaaggtctaaggatgtcctaaggggctcacaggtcccactggtctccttggaggctggaccttgagtcaccccggattgagcctcatatccctcagtattttgcca

SEQ ID NO: 130774 - DNA, 362 bp, Homo sapiens
gcctcccaagtagctgggattacaggcacatgccaccatgcccaactaattttttttgtatttttagtagagatggggtttgaccatgttggccaggatggtctagatcttttgaccttgtgatccaaccaccttggcctcccaaagtgctgagattacaggcgtgagccactgcgcctggccggctcctccttcttattccttctgtctttttttctcctactggagcacctcaattgactgatcttcatgtttgctgactccttcttctcctagtcaggtctgctcttaagcccctctggttaattttttttttttttttttttttttgggaaacggcatatgggggacccggagtcgag

SEQ ID NO: 130775 - DNA, 216 bp, Homo sapiens
gtgatccacccgccttggcctcccaaagtgctgagattacaggcgtgagccaccgtgcccggccataacatatgctctgtgaccttgctactcaaatatggcccagggaccagtatcatcagcattatctcctaggagcttattagtgcagaatctgaggccccactttagacctgatgagtcaggacagcagcaccgcagggtcaccggagctcg

SEQ ID NO: 130776 - DNA, 1080 bp, Homo sapiens
  misc_feature (230)..(230): n is a, c, g, or t
  misc_feature (273)..(273): n is a, c, g, or t
  misc_feature (283)..(283): n is a, c, g, or t
  misc_feature (305)..(305): n is a, c, g, or t
  misc_feature (314)..(314): n is a, c, g, or t
  misc_feature (318)..(318): n is a, c, g, or t
  misc_feature (321)..(321): n is a, c, g, or t
  misc_feature (325)..(325): n is a, c, g, or t
  misc_feature (328)..(329): n is a, c, g, or t
  misc_feature (352)..(352): n is a, c, g, or t
  misc_feature (377)..(377): n is a, c, g, or t
  misc_feature (381)..(381): n is a, c, g, or t
  misc_feature (388)..(388): n is a, c, g, or t
  misc_feature (395)..(395): n is a, c, g, or t
  misc_feature (407)..(407): n is a, c, g, or t
  misc_feature (424)..(424): n is a, c, g, or t
  misc_feature (450)..(450): n is a, c, g, or t
  misc_feature (453)..(453): n is a, c, g, or t
  misc_feature (477)..(478): n is a, c, g, or t
ggtggcaagctcttcgtacaggacgaaaaaggagcattcaactttgaccaggaaacagtgatcaacccagagacgggcgagcagattcagagctggtatcggagcggggagacctgggatagcaagttcagcaccatcgcctccagctacgaagagtgccgggctgagagcgtgggtctctacctctgtctccacccgcaagtgctggagatctttggctttgagggggntgatgcggaggacgtgatctacgtgaactggctcaacatggtncgggccgggntgctcgctctggagttctacanacctgaggncttnaangggngannaggcccatatgcaggcccggttngtgatcctgagagtctgctggaggntggngagggantcgttancatcactcccancacaggctccgatgggngcccagatgcccgggtccgcctcgancgnagcaagatccggtctgtgggcaanncctgctctagagcgcttcctgcggagacttcaggtgctgaagtccacaggggatgtggccggagggcgggccctgtacgaggggtatgcaacggtcactgatgcgccccccgagtgcttcctcaccctcagggacacggtgctgctgcgtaaggaatctcggaagctcattgttcagcccaacactcgccttgaaggctcagacgtgcagcttctggaatacgaggcgtcagctgctggcctcatccgatccttctctgagcgtttcccagaggatggacccgagttggaggagatcctcacacagctggccacagccgatgcccgattctggaaggccccagtgaggccccatctggccaagcttgaggaagatgtgtggccttgcccccaattccatcagaccaaggctgcaagtggccctccattcgtgtgtgtatttaggggctggggagggggaggggcaggagcttggaccttggtactacctcagctgagggtggtgacacaaccccttccatttgtcagcactttccagcctgccaattgcttcccctctgtgatctcatttcatctgcactgccgtacgtggagtgagcaaga

SEQ ID NO: 130777 - DNA, 797 bp, Homo sapiens
agcagtggctctgtaatcccagcactttgggaggccgaggtgggcgtatcacctgaggttgggagttcaagaccagcctgatcaacatggagaaaccccatctccactaaaaatacaaaaaaaattagctgggcgtggtggcgcatccctgtaatcccagctactcaggaggctgaggcagaagaattgcttgaaatcaggaggcggaggctgcagtgaaccgagatcatgccattgcactccagcctgggcaacaagagggaaactctgtctccaaaaatatatatatatacactaataaacagagatccagaatgtaagactgggactgaaatgaatgcatcagcatgacaggcaagttcagactaacccaggagctaataaactaaatggcaggtgcaatatgttctctaatgtgacagtgttttgtaatgacaccaaactaaaaattatatctaatttcaaaataactaaagtagtatgaagtattacaagtagcagatgaaaaaaaatcagtatgatacaaggagcttcaaaagtactagttaagtactacctcatttcttaagctggaagaaaataccaagtggtttttattacttcattttatatgttatataaatgctcgcattatttcacaattttacaaaatttagcccatattgaacaagataaattacagtgcacactggggatctaaaacagataactcagaaagatgcccattaaaaataagcaacaacagaaaagctacaaaacagaaatcaagaaaaactagatctaaaattagattacat

SEQ ID NO: 130778 - DNA, 665 bp, Homo sapiens
cttcaaaaatgctgggattacaggtagaaggcactacacctgccccatcctcttattttcaatctatttgtgtttttgaatctaacatgcttctcctgtaaatgacatacagttagatcatgttttttaatctagtctgacaatttctgccttttaactgggttagttcccatttaatttgattcttgatattgccagatttatgtctgtcattttgtttttccttttctataggcctcatgtctttttgtttcactttagcttcattaatgattttctcactttttgagctactcatttttagtggtttctccaatgtttatcatatacattttaatttatccgaatcagcttcggattatgctagcttaatatccataatacatagaaatgttacttctatataactctattcccatttctccttttttggtactattattgtgcatgttatgtcttttaatgttacatgccaacaatatattatattaattattactttaccacctatcattatttcttatcccattatagctttactgtgaccaacttcttctgtactgctattgacaaatatattactcacatattacatttccatgtgctataagcacaacaatacattttatattattatgcaattgtgttttaaaaatcttttaact

SEQ ID NO: 130779 - DNA, 878 bp, Homo sapiens
tgcttttggacaggttgtgcaaggacggctctgacagccgtgtcaaaactatgaaggcggcatggcccacctgctgaagatgtcacagtggaaaggtgaagtctcagggctcagacaagattgtgaactggcgaattaacacaggagccttctttccccaagttccttgtcctatgaggttataccactgattgtttatgccatttttagttgaaggttcttttgcttgcagccccaagcattctcactgacatgaaaggtctgcaagagtcatgagcagactgtggcagtatattttgatagtctatgtggagaaaccttagtgcatgggtgtcgtcatagcggttctgcctctctaaggatattcccctttacttctgagtttacagctgtgatcaggatagtgagttcgccctcatcccagtggcattgtactatcttaacaggctgcatggagagtaatggagaaagacaccattgtccaagctgactttgaccccctggagctctcacagtatttcgagatggtttgccctgtgaagggcagacctacctgtgtttccatcaggccccaatttcctcattactttgctcagcttccaagatgagatcattattaattaatacacttatagttattaacatatggtgacattaattaactacagtctactaaatgccccctgtgtgtctggtctgatgctacatgttgtgctgcattttctcattgatcctcccaacaacccaagaagatgagttttgctatgcatattttacaagaaagaacccaaggttcagatcattaatgcgcccaaaggcccacattctgattggaaatcagcagaggtaggatatcacctctgcaattctccctggtt

SEQ ID NO: 130780 - DNA, 448 bp, Homo sapiens
cccggtgcttactgtctaagacattttgggaaaatccctagagcctggatcttcaatcctggtaagccagagagcctggagacacacccaaattatgtccctcttagttcagggaacatgtccattttcgtcagcattaaaattttggcaccaaatgtgctaactgcaattccaccatacaatgcataactggaaatagaggcaacatctcatatcctgaacaattcatgtgagaatctaggagacacaccgcttatttttgccttttcccactgaaacaatggctagtattaacaatgttatgctatccttggtttcactccccacttttaaatctctcggatgtttacttcttgagacagggcgtcactgccgtcacccacgcttttctacggtgtaatttttgttgttcgcttttgtcaaatttagaaattttcatttcatctct

SEQ ID NO: 130781 - DNA, 291 bp, Homo sapiens
gtgctggacgggctcggggaacagatggaatgcatgtaggtgggaaagctattatttaaacagaggagggctactgtgtgttggaagggggtggatttttgagggtagctgggtacttaacattttggggctagactaatatatttactagtggacacaggaagaagcagacgccaaggcatatggtcaggaagggagttaacaggccaccaacaaagaggaagaatgcggcagctgaaatcaactgagggtagatgaaaagaggataaaatggcaccgacagatccaaag

SEQ ID NO: 130782 - DNA, 223 bp, Homo sapiens
caaccctgtgtggagcttggccattaggatagtgcagtgtagacaaagctgcatttttctcaagagctagattcatactcatttcagcacttgagaatatgtgcatttgatgttccataattcctaccttccacagtgtaagagacaggggaaaccaaagtgttttcctattcacacagcacttaccactcagctcagcgcttctgacaccagatgctggggg

SEQ ID NO: 130783 - DNA, 178 bp, Homo sapiens
tttgaggcaatccaataagcaaagagcagtcggactaactgtccttgtaccagctgactgtctccctgccccgatcaagctctagggaccagacactgtgttaggcactgggcatgaagatcgtaacacaaaatcgactccttccaagagctcaggcttgagcagaacacacatctcc

SEQ ID NO: 130784 - DNA, 772 bp, Homo sapiens
tgattccccctctcatatcttctaccctccaggccaatctatatgtgtcctctgcagaatggaaagatttaaaaacagctactccatcttgctgtacaaccttagccaaggcatgtaacctctgtctctgttcccttgcccatgtgaaattgttgtaaggataatgataaagaagaggaagtcaacagtggctaacatttatcccttgctcacaatgaaccagacaccaagctatgtgactttacctgaatggtctcaatcagtcttcacacaagcctgcaagatgtgacttgctccttcttgccttccgccatgattgtgaggcctccccagccatgtggaactgtcagtcaattaaacctctttcctttataatcacccagtctcaggcatcttaataacctctaagttgcacccaggagagttggtgcagaaaaggaattctggccaacctaatttgtatttgaaaataccccataggccaacggaacaagattcagatgaatttcacaggcagctgagggctacacaaggaaaataatgatgtgaactcatacttatcagctatctgataccctgagccagaccccggtgtattcctcacaacaccccaaaagttctggagatgagaagtccaaaatgagtcttaagaggataaaatcaaagtattgacagggctagttccttctgaaggttccatggcagaatccattccttgcctcttccagattctagaagctgcaggcatttctgagcttggactgcatcattc

SEQ ID NO: 130785 - DNA, 383 bp, Homo sapiens
gactcagcagggaggtcaaagaaggcttcagaccaaggtttaagataaagagacccagagcacccctgggacccctcccctattcttccatgatggtcgcctgattagaaactctagactctgggtggccgggtgcggtggctcacgcctgtaatcccagcactttgggaggccgagacgggtggatcagctgaagttgggagttcgagaccagcctgaccaacacggagaaaccctgtctctactaaaaatacaaaaactagcatggtggtgcatgcctgtaatcccagctactcaggagactgaggcaagagaattgcttgaacctgggaggcggaggttgtggtgagccgagattgtgccattgcactccagcctgggca

SEQ ID NO: 130786 - DNA, 173 bp, Homo sapiens
tattaaaaaaaaaaaaaagaatgattcagtgtagttgtagtgctagatatattatatggaattatcagcagtttaccagttggttctttattagtactcctgatgtcttaaacaaaaatgaataattgtttatcttttctcaaagtgtctcatctgttcagtaacaatcacag

SEQ ID NO: 130787 - DNA, 226 bp, Homo sapiens
tacgttcatgcctccgaatacataacatccaaatccagcaggaagaacaggctacctgatatataaaacaatactcataaagttactatagtacatataaaaatagcaaaatatttcccatgaagttatcataatgataaaaatggcaacagcatgcactatgtgcaaagcaatgtcgtaacaatttacatgtattaacccacttaatcctcaaaactaccctgtg

SEQ ID NO: 130788 - DNA, 710 bp, Homo sapiens
tatctatgttgtataattagtaattgggaagcagatgtttgtctttcttccactccgtattgccgtaaggccatattctattgagacacttctgccttgctgaagcccagaacagcagagttaatcagcttcttcaggaaagagaaggaagtaattcctctggctagaaattccacgtgtacaacactgaatatttaccaaatgacataattcccctctaaaaaaacaaaaacaaacgagaaagatctcaaacaaaaaatgctagctaatagttttcattaaattaaactgttttctctatcagcaatttaaaaaaatactgaggccttttagatgtaaccttcttttttaaggccctggagatatgaagatgagtaagacactcttcctatcttcaagtaagtcacagtccattgaaaaaaacaaatgtgtatatagctataatattaattaacgtaataaacagaggcactcctatgtgattatgtagtgtcaattcagagatgttttgtatcaaaaaagtgaaattaaatatgggaaagaaaaagtaaagatttacaggctgggcatagattggccacacctggcccagtcatcttaaatatggctaaatgtttaaatcagtgtttttctatctggggtgattttgacctccaagtgacattttgcaatatatggagacattttttgttatcactgcttggagggga

SEQ ID NO: 130789 - DNA, 256 bp, Homo sapiens
tgaatcttaacattttatcaaatgaaagaaaccagacataaaagagtacatattgtatgatttaacttacatgaattaaagaacagactaatttcatccatggtgagagaagtcaagatagtagttacctctggggaagggctggcatgaaatggaaaggggcccaggaaaactttctgagggggatggacgtattttctgtcttgaactggttgatgattccccaagtaaaattcattcagctagacatctaggg

SEQ ID NO: 130790 - DNA, 212 bp, Homo sapiens
ctcaccagaatccagagacaagtaaattagtacctgatctttaggtgtcagcctcctggaacatagaacagggtagaaataggtagcgttgtgtatctgccaggaccactggaaataccagtacacctacgatatcatcaaatgttttaaataatgacaatgaacttgttcatttatgtagttggtaaaaattctggcaaaatgtctcaata

SEQ ID NO: 130791 - DNA, 693 bp, Homo sapiens
cactaaaagttggcttaagaaatatgcaattatatgtcatgtaaatgattatagaattagatatcataggtataaatcagtaattttaatatttcagaaaaatagagcattccatttacctaaataatataaaagagtaaaacttaaatatgattttgtatttcagcttaatgattctacattctgggaaaaagacttaactccaaaaaatgagatagtggggcatttaatattcctcataaatcttaaattgttttgcctaatttttttttaaaatagttactagtatatgtatttttatttttttaaaaggaggatatctggtgttagcactattgtcttccaaaatcagtgtcttagatgattctttcattcatctatccatctatccatccatgaaacatttattcattaccttctggttactagagtctgggaatacaaagatgaataggatccagaaaaacgtttttgtgggggaatccaatgtgtaaatataattgcatcatcatttgatgtttcactgtagcatagttctgaggttaggtgtataatcttaaacttcagttttctcatctgcataatggtcataataagaatacctttcataggactgttgagagggtaaatgagtttttgcatgtgtttcacttatatatagaatgttgtgattattccataaatgttatgatg

SEQ ID NO: 130792 - DNA, 801 bp, Homo sapiens
gaaaaaggatttttaaacaacaaagtttgctgaggccaactttgtgtatggttctacactgggctggaaagatgacatggaagctgtgcttgtaccgcatcctgggctgtcattctctctgagctggtgcaagttggacatcagagaacataaacagatatcactcatctagcactcaggacaggccttttggctccacctttgtggtggatgctggaaggcagtggggaaaggacattaaggtgagttttccctgattccaagccctgggcccacttcattgactggcatgagaaatgcacgctacttcctttgtgcttagcttcctcttccttcaggtttgctctagaaatggcagcaggaattcagaaggcctgctttctaatctccagcatgccggtagcttgctttgtaactctgggcacacggctctgtgcctcatttctcatttttcttactataaatgagatgggttggcttagatagaggaatttttaaaaggaacttctgacacctgttaggactttcagctatcatcttctgactgtgaaagattaaggtatgcatgagggggtgttacctaggctggcataggctctctgagtcaccatatggtgccacctccctcacagagtccttgttttcatcagtgttcagctttcaaaaatggctaaatcatttttaactgttccttaaagatactgggctgggggtatagggtgaaggttctgtaagacttgcatttggctgggcacggtggctcacgcctgtaatcccagcactttgggaggccaagaaggg

SEQ ID NO: 130793 - DNA, 219 bp, Homo sapiens
gaaaatattttggcatttctcatagtatgatgttgaacccacagttggaacaaataaatacatgtgaactgatacttattctactcataggatgagaaataactctaagaaggtaagtcacagcaaatttttgtggaacatggctaaggtgttcatatgtttgatttagactgagcatttcttcaacaaacgcagcttttttttttttttttttttttt

SEQ ID NO: 130794 - DNA, 686 bp, Homo sapiens
gtagatttctaggttgagggtcattgtatagaacataggcctctattctttaaaactgttcagacatgaaagacagggaaaaacatagaaatgttccaggctaaaggagactgaagagattggatagctaaatgcatcatatgttcctgaattaaatcctggaccattagaagcaagtgacaatattggcactgttggtaaaacttgagtagggtctgtggattggataatagtgttatattaagtggatttcctcatttggaggcttatgtggtgattatactggccacagttcttgttttcaggaaataccaactggagtgtttaggggtataggggcatcatatctgcagcttactctcaaattgttcagataaagataactgataaaataggcagggggagtaggagggagggggaaatgtgctaaaaaaatgttaaccattgaggaaactgggtgaaggttattaacttgaaaagcaagtattttatataaaactatggaaattgctatagagctttcatttaaactaatgaaggtctcattttttgtcataagtggtttataatacgtggggcatggttttcttttaaaatatgtgtggcataatttcctcattgtatagttaacagtggtgttttccaaaaggccagtcacactctaaaatgtcttataactatatgtt

SEQ ID NO: 130795 - DNA, 587 bp, Homo sapiens
catggtggtgcctgcctgtagtcccagctactggggaggctgaggcaggagaatcgcttgaacccaggaggtggaggttgcattgagccgagattatgccactgcactctagcttgggcaacagagtgacaagttgttctcaaaaataaataaataaataaataaaatatttatcataccactgcccccacaccaactcccttctcccaaaaccccaaagcctgcacgattcttgatacccagggcaacagccatgtaaaataagaagttcactcatatttactcttcatttgtgagtcctattacttaaagagccgtgtaatctgagcactaaaaaggtattttacctactagaatacatacaatatagtctggttcttattatcttatttttttgtttttcttttgttattctgaggcagggtctcactcatgtcaccccagctgcggtggtgcgatgatggccacaacacctgggcctattctcttattaacagaaaaaaacagtataaaacgttgtatggctgagtagaaactgtgagtaaagagtcaagtctgagaatctgctagtcaagacatacgttatt

SEQ ID NO: 130796 - DNA, 684 bp, Homo sapiens
attttgggaggccgaggcgggcggatcatctgaggtcaggagtttgagaccagcctggccaacgtggtgaaatcccgtctctactaaaaaatacaaaaattagctggacttggtggcaggcgccttaattccagctacttggaaggcagaaaaaaaaatactacaaagtctgctttccatagccctaggctgttcactctattcatgaatgaccttgcgtggcatgtgacgttctgttcctctggactgtaagtatttgtgactaataaatgattgtcaatatcgtaagtccagtttcagttattgtatgtctggtcatcccattaccctaaagtgggaatcgctccctcatcagtgggtgaataggaggtgattaaaacagaccctcccctgccactcccacccaccatgtgcttggccctacaccagtatattgctactcaatgtcttcggacattctgatatgtcactgctgaccttgtgcttagaaatatgtcttcttgtatctgtgctctgagggtaagacatggcattcagaaaatagcataaatcatctggttccatatgctcaaatatattttaactgtgacaatctatttgactatctatagaaaagataactaccttagttctaagacaatagtaggttaaaattttaagatttaaaaaattttcgtggtgaga

SEQ ID NO: 130797 - DNA, 508 bp, Homo sapiens
gcctagctttttatattgcctgtgcacacacagttcccccttggattcaaagtgctctgtgtatgaaaaaggaagaacggtatgcacttgaaatattatcttattaaattgttttagttcttaactctcatacccatggggttgataggaaggaagcagcgttattcaattataaagttactctcttcttaaacaaatgctttaaattataccaaggcaattttttcattggtggcatttaagtggaagttatatacagccgtctcctggggcattatactcttgtcttctacccttaatttgacctgaagaaatttcccacagccgagttagctagcaggtgaaggaagcagaaacatgccaatgtgcccattaatcagaactctagacttagagaacacatatatcaatgttttctaaaagctcttcctaatagggcctggaaaaaggcagaagcattttttcctctacctaagaattatcttccttaaatatgcttattttggaa

SEQ ID NO: 130798 - DNA, 212 bp, Homo sapiens
cttagacgtaattatttaggttataatttatctatttaaatcactcttagatgatgcagctatatcattttcctgataatgatgtcttcgccattccaacagagaaaatgtttgaatccagctcatttaaaaatagtatgaggctggacgtgttggctcacgtctgtaatcccagcactttgggaggccgaggagggcagatcacgaggtca

SEQ ID NO: 130799 - DNA, 733 bp, Homo sapiens
taccaatccttctcagattctttcaaaaaggtaaatgaggagggaatacttccaaactcttttttgcaaggccagcatcatcctcatatcaaaggcaggcaaggccattacaaataataataataataaattacaggccaatatcctttatgaacatagatgtaaaaatccccagtataatgctagcaaacccaattcaacaacacattaaaggatcatccaccatgatcaagtaggatttatccctgggacgcaaggatgattcagcatacccaaatcgacaaatgtgatacatcattaacagaatgaaggccaaaaaccatataattatctcattagatgcaaagaaagtgtttgacaaaattgacaagtttattgctgggttatttttcagttctaaatagcaataataataatagctaactcctactgtgcactaacttcatgccaggtgtgttttaagcacttcacaggtattaactcagtactactcagatagagttccgttaattttattttcttttttaattatcagccaaatcgcttattgatttggtttcatttctgctatttttttctttgtctgtccattgactctaagccataaatttttatgcaattttaatctgattatcatttcctcttaagttttttgaggattggtttcattttgctagaagaaccttgtgagaccttcttcctccattccccttcaaagactcttgttagtttc

SEQ ID NO: 130800 - DNA, 377 bp, Homo sapiens
tccttccatctatacaattattttggatagttacatgtgacgatgacagaagaaaatgacactgcataataagacaaagagtaaaaataagtagcttaagcgttggaaactgtgaaaggcacataaggaatatttctctgtggggatgacttgaaaatgatgaatcgactgcagtgaggcaaaatggaatgaggaaaccagccagaagatgtgctgtctttcgtcctgtgtgcacctttctccactgcacgtgtgctttggaatactgactggcaaagactgtatgaatcaggaggcccccttgccctgtgacttcctgttgagtctagccaatgaggatactgataggaaatcagagtgaagcagcagagtgaggt

SEQ ID NO: 130801 - DNA, 354 bp, Homo sapiens
tggaaaggcctcagcacaacgaacagaaaatggagtgaacgcccgtgactgccctgcgcaatcctgcggagtcattgcttcatggccagagcttatttaccgccctcgggttagcccggtttggtcagacgatcagtcaggcaacctgtattgacagtggcctctgctgctacgatgacagctgtgcgcgagcgcccccagattatctgtgtgtagggcggaacagggtgcccgaggagtgtccacccaaatgggacaatttaatatagttgaggtgttcgccttatattctatcaaattaagttactggtcaatttcaggctttaagtggcattaaggatagttccaaaatta

SEQ ID NO: 130802 - DNA, 357 bp, Homo sapiens
cccatatcaggactgaggctggaagtcatcctctgtcagttcccaccctgcatcttggcacttttcctcctcaatctctcatcacttctgtcctttccatgctctaccacgcccttggctgggtccccctttggccattccacctccactccctactatcagggccatctttctcaaatgcagacctgaccaggtcactctcttgcttcaaatcccttagagatggctgccagccgagaggcagaagagagcatgggcttgggaggtggccctgtctcccaatggtcagctaccacttactggcagtgtcatcgggggcaatgctgggatcatgatgtgctttgcagggtagctggc

SEQ ID NO: 130803 - DNA, 246 bp, Homo sapiens
tgtcggaaagaccacagctcacccactgatctctgcaactgcagaaaagatctcacggctgcaaggattgcacaagaggaaaataagtaggaaggaaggagtgggaggaaatagtgaagggagtagaaggaaggataaagcagtgtatttcaaccctgtgcatcacaacacacagaggacaatgtaatattgtctaggacatttgagtcagtggacaaggctctgtgtctgctccaaatgctgaat

SEQ ID NO: 130804 - DNA, 183 bp, Homo sapiens
gtagtcttatctgggaagctactgaaaaatgacagtattagaatcagaaaggcaaatcaagacagactgtaggagactcagtcgattaatagttcattgtgttttacatatcatgtaatgtattggtagcattataaataataatggtcctgatcatgattagaataacagtattgggataag

SEQ ID NO: 130805 - DNA, 413 bp, Homo sapiens
gaataaatgctggttccaacatctccttcaagcttcataaatgaggcaaccttacactctcaaagaacaaagaaaaagcaatctgacagcttttgaaggccaaaaaacccttcaggcaacgttattaaattgacccacagcactgaagttttaaagccaagaaatgacttaggttttagaaattaacacttgtataaaaccttcagaataccatggggaaaataatcctttatttcagaaataaactttgaagtttgaaaacaaagcagaaaacctgtttctgaaaacagaaaggactatttgaaacactgagcacagttcttccacagctctttgaaactcttcaatagttccactctgacttctggagatggccaagtaagatataccccagaatgccagcaaaagaaaaa

SEQ ID NO: 130806 - DNA, 654 bp, Homo sapiens
ggaatagttcttttctatgtggttatactacatactcagtacacaagttcatatgtttcattttgcttttaatttttaggaatttttcttaataattatataaaacaatccaaaaagtcaaatctattaatagtattaaggcttgttcagaaaagtctatattctattcctgaatcctctaccttatttccttctccttagaggctaaccatttttgttttggttcaatttggggtttggtttatcctatttttaaaaacagtgttgtatatgaatatttttaattgaggcataatttatataattgtaaataaatatagtaatattacttgaaactttccatggtgatagaaatcagaaagtagttgcctaagtttgactagaaagaggctaagagattttagccctaagactaaaggctaaggggtaatagaaattcttacccctaacctcctgtcaccttctagcatattgtgcttaaagaaatttgtggtacagtaagggttctgttttaggaaaaagaaaaaacagcactgggatcacaaggaaatagataatttttggagaggagtaagtggggatggagcataaaattttaaagcacaatatttttagactacaaatttgaaaataattttatgttttaagatatag

SEQ ID NO: 130807 - DNA, 369 bp, Homo sapiens
caggtccctcccgtgcaggcagacctctctggagaaaatccttgaaacgtcactaagaatacacacaaagatgcattctgcaagaagctttacagtagggtccctcagggagggtgctgttgcaggcaaacttgattccagattcaccctgctctttttgatttgtgttttcttcccttcttaaaaaagttataggttgggcgcagtggcccacgcctgtaaccccagcactttgggaggccaaggcaggaggatcatttgagcccaggagtttgagaccagcctggccaatatggtgaaactccgtctctactgaaaatacaaaattagccgggtagggtggacaatatagcgagaccctctctctat

SEQ ID NO: 130808 - DNA, 763 bp, Homo sapiens
caaggatggggagaagtcgtttcctaaatgttatgcttgtgggacctgttttcaaatatatgttactgaccaaattatttttaactactcctcaccatttttatcactaccagcttctagcttatgctaacactacagtttcagtctctccgtcggcattttttttttacccttgaaatacctccatcagttaggcagtcttaccctctttcacatggtaccaatttttaatcatgctcctgaaacagatttttttctgtgacacttttattgtattttacagtaacatatatatgcaaaggtttaaaaagttcaacaacaaactggtttttatgaacagatggttttgggggtgcttgtttcatttcttttgtgtttaaaattttttaaattaacaaataattgtacgtattcatagggtgcacagtgatgttttaatatgtataatgtatagtgatcaaatcagggtagttagcatatccatcatctcaaacatttatcatttctttgtcttggaaacctccaatatcctccttctagctatttcaaactgtaagatatattaactgtagtcatcctttggtgggatagaacacttgaatgcatttgtcttatttagctgtaattttgggtcctttaacagtttttaaatgaatattgtccttatatgactctttctacaaacaatatatttagaaatctgttatattaggaagaaagatatataaaaattaggcatgcttagcctaaacctatttacttg

SEQ ID NO: 130809 - DNA, 264 bp, Homo sapiens
ctcattttaaaaactttttgtataaacagtcttgctgttgcccgggctggtcttgaattcctggccttgagttatccttccacctcggcctcccaaagtgctgggattacaggtgtgagccactgcgcccggcctaacccagtaacttttatctgaaatgcaaggttccccctctcccagcagtggagctcacgggtcctttgcatgaaaggcgtctcagtgcgttggtcgggtgcccgtggtctggcttcctgtctggcaccc

SEQ ID NO: 130810 - DNA, 358 bp, Homo sapiens
aagtatataatttatctcttttcacgtggctctttgccagagctaccactgttataattttcttaggtatacttctagagctattctataaaaatacaaggacatatgtgcatacttatatgtacattttaaatataaattgtagcatattattatagtgtatgttgtcctgcaactttttttcacttaaaaattgatcctgggggccaggtgtggtggcacatgcctgtaatgccaatacttagggaagccgaggcaggtggatcacttgagctcaggagttcaataccagcctgggcaacatgatgaaaacccaaaccccaaaatcccatctctacaaaaaaatacaaaaactagc

SEQ ID NO: 130811 - DNA, 965 bp, Homo sapiens
cttgcatcctaagctgcagccatgatgaaacatttctggccacagcaggcttttgcacatgctgtttctaatgcctcaaacaaatcctcccacccacccggctcctcttaaaacctaattcatccacttctcaccacatggtctcatagtttcccttcactatccttttattgcttttatgtttcattttgtgactctctgattaaagttactttcacctgttagactgtaagttccataagtgcaaggactatttttgttttattgaccattataccatccagactgtcttctactacagtgcacagaaaaccagcaggcactcaaagtatgtgttaaatgaataaataaaaatgccaatgctggtaggtgagtggggatggggatcactgattgaataaggaccagaagaatgtgagaaaggaaaatgaccaaaagcacaactggagaggtctgccatagaaaggaaaagcagttccttctctgatacctgaaaacagctgcaggagggtaaaattacagaaatatagagaaagtagggatgaaaatgtgaggggattcatattatatggcctctcttcaagaaagcagaagaccaagtcaacttggagtaagaaatcagcagcttgagtgagaaacgtggacattcttttctgacctgctgctgtagagaatggggtagagtcagtagggaaaaacaaaaaagatgaccaagaccacgggcctcgctgaggaaagtaatcacaaatctcatgaagagacagtgtcaatacaatactataatttttacaaaagctatggttaaataccagagtagaagtgagaaaaatgggcaacttgttgtgcccccaccaatcctgggcactagtgaaagaaatggacaactaaatgtccccccaccaggcctggggattggtgagacaagtgaaacactccaagtgctaatgatgcatctggcatcatat

SEQ ID NO: 130812 - DNA, 475 bp, Homo sapiens
tctcaaactcctggactcaagtgatctgcccaccttggcatcccaaagcgctgggattacaggtgtgagccagcgtgcctggcccccttcttcaataccattggaaagacatctgcttgagctttcagagctgtccatcccagagcttgggtccaaattaattacatcacattgaaataaaaaacttcctggaggctgggtgcagtcgtcacgcctgtaatcccagcactttgggaggccgaggcgggtggatcacgaggtcaggagatcaagaccatcctggctaacacggtgaaaccccgtctctagtaaaaatacaaaaaattagccgggcatggtggcgggtgcctgtggtcccagctattcgggaggctgaggcaggagaatgccgtgaacccgggaggcagaacttgcagtgagcagagattcgtgccactgcactccggcctgggggacaaagcgagactccgtctca

SEQ ID NO: 130813 - DNA, 666 bp, Homo sapiens
cacagaggctcacgcctgtaatcccagcactttaggaggctgagacaggaggattatttgaggtcaggagttcaagaccagcctgggcaacacagtgaaaacccatctctactaaaatcacaaaaatcagccggacgtggtggcgcacacctgtaatcctggctactcagtaggctgaggcaggagaaccagctgaacccaggaggtagaggttgcagtgagctgagattgtgccactgcactccagcctggggaacagagcgagattctgtctcaaaaataaaaataaaaataaatttaaaaaagagtgaggaatgagctagaagagacatcatggcaggaagatgggggacagattccttcggtcctaagggactagggtgctgggttgaatgaacatttttccagaggttctacagtaaatataaagaaattagagctatacccaaataaatatattatttgccaaggatatacttcttgacttttccaaaagttgccaagaataatccattagaaaatcagtaattttatgacctttatgtctgaactcttcttttctgaaagctggcataacacagaagagaaacaggaaggggcccacagcccagtccagccattccttgtctttgaatagaaaaaccaagctaatgcacaaagagtctc

SEQ ID NO: 130814 - DNA, 812 bp, Homo sapiens
tgataaaagaattttatagttttagctcttatagttagcagttctattttgagttaattttagatgtggcgtatgttaggagtccatctttattcttttgcatgtggatatccagttgccccattaccatttgttgaaaaggctattctttttaacaaattaatagtctcagttgttgtttttttacccttgttgaaaatcaattgaccataaatatgtgggtttattttgggattctcaattctaatatgttgatctatgtctatcatcatgccagtaccgaatctaattttaggatacttatttttcagtcatgttgcttattattcccaattgtcctaagtaagaatagaaattcaggtagtaggatgcctttaatttcactgtttgcttcctgaaggaacatgtggccagcttatattaatatcttgctgactcctgtgacacaatgggaagtcaggcttacaaagacagagcgtattcatttctttttctccgttcaaaccatttttctctcactcagtccctacctcttcactccgattttcatcaaatcttggttagaggatctgctgactcagtctactatttactgcattatatttactaactcataataagtcatagaattgtgtagatttttgccatgtaggaaggagaagattaagtctgggctgttgctttcctctttggaaattgagctaattcatcatcttacagctcacaaatagatcctctgttgacctggtacctggttctttgtataacactggagctgatccttttcttggcacagatcctacattctcaga

SEQ ID NO: 130815 - DNA, 293 bp, Homo sapiens
aggcctgctactacctggagtggctgttaggtcctaatacctcttgggaggcagggtgggtgaagtaggactgtctttgatttgccttgggggtctcgctctgtggagacccaggcccatccttctgtcctcctgaatttgtggcctgggctctgccctcctcggtctgagttccccttaccaaggtggcttctctgtccactagcccctctgcgcctcttcaggtggatgttaagtccagttggtgagaggtttcccaagatgtggcatgcagaagctcacagagtggcccc

SEQ ID NO: 130816 - DNA, 451 bp, Homo sapiens
gcattttccacaagtgatgagacaatctccacagcataggtagattcctccgacttcatctcagccttggatgttgtcatttgagctctttcttggaaaacaaccatcagagaagcctgtggctgtgatacacccctttactatctccctattaattccctgattggtaattgtaaaaacccattaatcttactgtgccacttcctgcctggcttctcacagcatggtgctgaggaatggagattctagaaggtgttaggccatgaggtgtaaaatgagaagaacccatacaaagaacgtttctccaagaaagcttcaattcaacctccatgttaccaaattatcatttgtattttccaaccagagttccaggtcccagtagcatctgccctgaggagctcaggaaaccccttcaacagtgctgcccctctttaccgcttctttacatctc

SEQ ID NO: 130817 - DNA, 743 bp, Homo sapiens
cataatattaagacaatcttgttttgtaaaaaatcagtcaagaactttggaaaatatggcaaatgatcttaggccctgctggctgtagaataaacttccaacatgtctttcacatattttaccaatatctctcaataaaatgttctgctctttcacctgccaatttcacttgagatgtttgtcttaaggaaatctctctgtgtggatcacataccttatagagagaagaggcttactggggcattctttgtaacagtaagatgtttgaaacgatgccagcgtcccacagtaggggtgcggctgtgtagacgaggggattgcagttctgtagataattatgcagcatcctgagggatggcttcaaagagcatgttataaaatgggagatccctgttacaaacgtcagattctacagggcagaaatgcaactgtagtcatgtaacagctgaacaaaacctatgtagaaacaaattgggataaaattagaccaagagatatcctggctgtgttttacataacgtatctgtggctaatttccctctttatttagtattgtgagttcctaaaattttttttgtgacgatgactttaaaagaatcagtgcctgggccgggtgcagtggctcatgcctgtaatcccagcactttgggaggctgaggttggtggatcacaaggtcaggagatcgagaccattcctggctaacatggtgtaaccccgtctctactaaaaatacaaaaaaaaa

SEQ ID NO: 130818 - DNA, 328 bp, Homo sapiens
ggttaattggtcctttccatgaagtcatcgttgggaagcactcttcctttcaaggcagtgagcagcaccgttctgtttctatagtttcccctgtagctagctggcttggaattgagagcaacagtcctctgaaccctgtctcatgctgagctgtttggtacctcactttgagaattctcagcccaagggtgttttcttccttagagaccaaattctccacttattcattcaagaaatatttatggagtacctactatatgctaggtcccaaacatgaaatgcctcttgtttgtttttttgttttgttttgttttgttttgtttttttc

SEQ ID NO: 130819 - DNA, 344 bp, Homo sapiens
tagttaccactgtcatttcttcagctatggatatgtggctgatgttggagagacggacctcagtgtgttttatattgtctggtgttaagatgataaattactttgtgattacaagcaaattttctatttgacaaagcccttggtggagtccaaatgatttttctgtaccatattgttctcttacacatacgtatgttaggaaaataggcacactttcaaagagaatgttctcttacacatacgtatgttaggaaaatagacacattttcaaagagaatgttctcttacatatgttaggaaaataggcacactttcaaagagaggtataggggctttttactgcc

SEQ ID NO: 130820 - DNA, 320 bp, Homo sapiens
agctgggggggggctaattttttttgtatttttaagagacggggttttgccatgttggcgaggctggcctcgaactcctgacctcaagtgatctgcccacctcagcctccccaagtgctgggattacaggtgtgagccaccatgcccagcctataattgtttctatcttatgtctctttatgcggtattgtggatgacttccttatatccatcttataataaattaggcctttttattgaggattatagaaacttatctataataaattttgaatgttttactccagaaactattttttaattttcattttttgacttgg

SEQ ID NO: 130821 - DNA, 444 bp, Homo sapiens
catgtatgtgtgtctgtgtgcatgtgtgtggtgtgtgtgttctgcctgtgcatggtttgtggatgtgtgtacatgttgagacgtgtgtgcacatgaatgtatgtgtgttggtgcatccgtgtgcatttgtgtgcatgtgcacatgtaggtgcctgtgttacatacatgtgcaaatgccctctgcccacggcagtctggggttttcctacctcctttcctaactgctctgtctcagtcacctgcccccctcactcactctcccatggcaagcttccccagccccctgcagcttgagtgattgtttcaaggctaacaatgcctggatccctctctccagaccagacctcactcctgagccccgacccacatgtccagtgccccccggtcactcccgtgacagcaccctcatgctgggtgagaatcttctggaaggtgtgggcctcc

SEQ ID NO: 130822 - DNA, 498 bp, Homo sapiens
cttgtagcccctctttagaaaatagcatggatgctttctgatcacaagcttcctgctcaattgagttctccacaggaaggaaatattggagccactgaagcagtcgatagctcaagatggagagagagactggcaggaagcaacaagaaagaaaatgcgttggaaactgagaatggtgagcccaggagacaaaagaagagggcagtgcaagaaaaggagatgaaaggggccttagccaccaaattcagttctggtcctacattttaagggcatctatattctaggcactgtgctgggttctggacatataaaaataatatgggctgggcgcggtggctcacacctgtaatcccagcactttggaaggccgaagtggaaggattgcttgagcccaggagtttgagaccagcctgggcaacatagtaggactccatttctacagaaaaattaaagaaaattagcccggcatggtggcacgtgtctgtagtcctagctact

SEQ ID NO: 130823 - DNA, 463 bp, Homo sapiens
gcagcacctgcttgtgtttgggtcgaggagactttagttggcaggccacatcaagaggctggaatgtcaacttgcactgggccagtgggtcatcaccttgcctgcctgttgggacccccggcatcaccactgcagctttcatggatgcccaactctcgcctcatgattctgattcagggcgtgtgggctggagacgaggtttctataaccctcaggtgactgacgcccagccaggtttcactgagtgagacctacagtgagccctgcatgacatccaagtggcgtccccacctccacatctccttacacacttgatgcactaccgtcatccaggaaccacccacatcctccttagcacatgtcgtgaacttcagaagcaacctgtgatctctccagccccatgttgtgggagtgaaggggcctaataagggccatctcaaagagacagcagacaaagtcttcg

SEQ ID NO: 130824 - DNA, 420 bp, Homo sapiens
tatgttaaagaaactaagtcattagtcttgtagtgactctaaagaaactaagtctaagtcttgtagagttcccctcagtctgaatactggtgactgtatcccagtgttattggatacactggtggaagaaatacttaataagtgtgtatatttccatcaggagatacctaatatctggatgtctctcctttttctttttgttgagtagccattgatggtcattgcctaggtctgctaattcatgacagtcttcggtaaatgggactattagctagtggctcttgccaatatattaagtattctaggatatacaacatttagacacaggttacacactttctttttatattgtctgcaactatttccattggtattctagtttattttactgcaactgccttttaatgggtcttcctgcac

SEQ ID NO: 130825 - DNA, 815 bp, Homo sapiens
aaacagctgtgggccagaggaatggaggggctgtgggtgaacacgaggacagccgagattcgactctgcccacagaccagcaaagccaaggacagagaggtcttcagggaatacatggctatggtggtttgaagactcccattagagagtggatattaattgccctccttttgaatatggtctggacttagtgatttgattgtaacaaatagaatacagcagatgtgatgctatgtgacttccaaacctaggtcataaaaggagatgaagttttcacctggctctcccttgggacactcacccttggaacccagctgccatattgtgaggaagctcaagccacagggaaggccatgtgtaggtgtttgggctgatggtgccagctgaggacctggtctactgccagtacaacttatatcaagcatgtgagttggcgagcttttgaaagaactccagccacagtcactgaccacgctgcctgagagacctagagagaaaacctagctgagccaaatcaggccccggaaccaatgtacagcatgaaagaaatgctccagtttatataacttatattttggatgcaacaatcaagtattcaacctcaaggaatgggaagatgggatacagaaattggtaggtggagaaattttatttgtggtcaatgaaaagacactttttgagtgattgaatctgaatttctcaagttgtaaacagatggaatatgtggatctattagttacagtgtacggtatattaaaggtgggataacttggggaaaagcatgtttaaaaaagaaaatggggggcaaattaagg

SEQ ID NO: 130826 - DNA, 429 bp, Homo sapiens
gatcctcaactggcagcctgcaaggaaatggggatctcaattctacaactgcaaggaactgaattctgccaacaatccacatgagcaaggaaacatatcttatcctggagcctccagaaaggaatgtaaccttgccaacaccttaattttagttcagtaacatccgtattatacttctaacctgcagaactatgaggtaataaaattctcttgcttaagccactaactttgtagtactattatggaagcaatagaacattaatacaacatatattccctctcttcttgtcaatgtcagtttatattattctatacaatagcagaatgcagtatagaagagaggaaaagagtgtggtctgtgcatttagacagagctgagtttgaatcttgcttctgttatatcttagctgaatgactttgagaaaatac

SEQ ID NO: 130827 - DNA, 613 bp, Homo sapiens
agttttcatccctcattacctctgtcctaggcaattgggatagcctcctaactagtcactgcctacctatactctctccctgctccaaagcatcttaaacactgatgtttgattataactcataacttccccccaccccgccttttttttcttttttaaaaaaattatactttaagttctgggatacatgtgtagaatgtacaggtttgttacataggtatacatgtgccatggtggtttgctacacccgtcaactagtcacctacataaggtatttgtcctaatgctctccctctcctagccccccattccctgacaggacccggtgtgtgatgttcccctccctgtgtccatgtgttctcattgttcaactcccacttatgagtgagaacatgtggggtttggttttccgttcccatgttagtttgctgagagtgatggtttccagcttcatccatgtccctgcaaaggacatgaactcatccttttttatggctgtgtagtattccataatgtgtatgtgccacattttctttatccagtctgtcattgatgggcatttgggttggttccaagtctttgctattgtgaatggtgctgcaataaacatatg

SEQ ID NO: 130828 - DNA, 180 bp, Homo sapiens
agattgagcagaagccaacagtcatgtggtacacagatcttcagggctttccacttctctccgcgagtcctaataacctaatctggaaaatacttccaaaggtactgcacaccccatttcccctcagtaaaccacagcccaagggtaaacgtggctcaggcaagggcatgcgtggtggag

SEQ ID NO: 130829 - DNA, 206 bp, Homo sapiens
gtaagagcctttattgtggtttctgtaggaagaaataggacagacaggagaagcaggcttgggattgactagcagaataatttcagtgggcttgtagagagtggagagactgttccaagttgtcggatactttgtcctgaggggattgggggaggaagcagcggcttgatgtgagtcagttcagttcaataaaggaggtagttggg

SEQ ID NO: 130830 - DNA, 408 bp, Homo sapiens
tgatcgcccaaatccatatataattacaaatgtgttgaaaacagtgataagaaagtaatgtctgtaatgaggggtatgacttagtctgcagcattctggaaggatccccgaggaaacagcatttcctctgagctctggaaagtggagtaggtataaatcaggcaccaggggagaggaagagctttcctagcagcatgtgcaaaggctccatggcaggaaggagcctggaaaatgtgagtaactaaaaggaataagatgcaactaaacagaggaagtgagaggtggtgttttagaaatggtctcagggaggtgggcaggaagtggaccatgaagaggctagaggccatggcagggagctggctctgtatacttaaaaaaacatgggtccaggcatggtggctcacacct

SEQ ID NO: 130831 - DNA, 467 bp, Homo sapiens
aagttacagaagacaagtttattttatcttgtatttaatatgataattgcaactaagcatttgaaacaacgggcagcaaaaggcccagtggcacacagggcagcacatccagtgcaggctctttaataaccagcttacatgccactctgctcacactggggcaatccggcttcctgagagccttccactacttttggccgggtatggtggctcacgcctgtaatctgagcactttgggaggccaaggcggataaatcacctgaggtcaggagtttgagaccagcctgaccaacatggtaaatccccaactttactaaaaatacaaaaaaaaattagcctggtatgatggcgtgcgcctctggtcccagctactcaggaggctgaggtaggagaatcgcttgaaccagggaggcagagattgtagcgagcagagactgggccactccacttcagcctgggtgacagag

SEQ ID NO: 130832 - DNA, 288 bp, Homo sapiens
acgttgtgcacatgcaccctaaaacttaaagcatgataaaaaataaaaaataaaataaaaacattggctgttgactccaaatatcctgcttcatcatctctccactccagaaacttttcacatgcttacaaagggtgttcatttctcctctaagtatttgcactccagccccacctgcaagaaggtggaagtagggcctctgcctgggatggtaactctcaaatacaaggcaagacctttctctcctccaatatccccaggactgaaggactgtgcaagtctgcatat

SEQ ID NO: 130833 - DNA, 326 bp, Homo sapiens
tcaggcatgatcagggttcactgctgtctcagcctcctgggctcaagcctctcgaatagctgggactacaggcacaagccacgatgcctagctgattctttaatttttatgtttttgtagagatgggcctcattatgttgccctgggttgtcttgagctcctggacttaagcgatcctcccaccttggtctcccaaagtgttgggattacaggtgtgaaccactgcacctggctgagatccttttaattatctacatatgccaggcattgtgctactaactgaacatgtctaaggagaactggatttgtttgtaatactttttttt

SEQ ID NO: 130834 - DNA, 655 bp, Homo sapiens
gtagaactgaaagaacttaagactacagttaattctaagcctttttgaagattatatagtcttctagtagaagtctgtgcatcagaatgttttaagaaagggttttaagaatgtataaaaaccaaaataattgattttcatacttctatattgttttttatcagtgactcttttttctttcaaatgaaatcttatatgaaattttcatatataatatagaaaaaagtggatctagtctgtcaaagagaatagtgaagctcagagatgtgccagcctggcctttttctcagctcaagtggcagaatacagtttgtaaacaattgcactagctcttaaattcgaagaggcagtcaaactaataaataaattggagagttatttctttggtagaggattaagggaaataaccacagacagaagaagcaaatatgagaatctatgtgaaatggatgatattctagaaaaaaaattatcaaaactgacccctaaagagagaatatctaaacagagtaaagaagaggtacagaaagttactgaagaagtttccaccccacctgcacaaataacaatagtaccaggccccagtggattaatggggaaattctgttaaacctttaaggaatggtaactctaatactaagtgttccgaacatat

SEQ ID NO: 130835 - DNA, 113 bp, Homo sapiens
ggcacagcctgagtgttagcattgcagatggatactgacttgcccaaagtcacatagtgagtcagtgcttggggcagggcaggaagtaggtctcctaactcctagcccaggac

SEQ ID NO: 130836 - DNA, 407 bp, Homo sapiens
cttggggaattgccacactttcttccacaatggttgaactaatttacactcccacctgcagtgtaaaagcgttcctatttctccacatccttgccaacatctgttgtttcctgatgctatattttcattgaaaatacttttcagttcaaaatattttctcatttctttgtgaatttgtagatacataatattgagttctaacttcatcccactgtcttcagaggacatattttcaatgatttcaagctctttaaatgtattaaaactgtcttatggtccagcatatagtgtatcttgaacatcctcagtatgctcagaaagaatgtgtgtattctacagttgctaggtgcagtgatctacaaacatcaattaggtcaaagtggttgataatggtattgttcatatca

SEQ ID NO: 130837 - DNA, 225 bp, Homo sapiens
aaaaaacaattttattggttttttttcagactgtattatatagctcttcagctttattacaatcatgcaaaagccaaaggttaatatttgaaaatattctccaagcaaggatttagtaaatactttgactgtatttctgctttttgctagaaagtctatttcattgctaaaatgcatctattatatcaaataaatgcatacagctatctcctatgtagatacatc

SEQ ID NO: 130838 - DNA, 351 bp, Homo sapiens
ctgagcccagatagtgccactgtactccagcctgggcaacagagtgagtgagactccgtctcaaaaaaaaaaaaaaaaaaaaaaaagacaaaaaacaaaccagtatttacccatataaacactagaagtaaattgcatgacttttaagctaggcaccatatcttcgtttgagttatttggtttctttgtggatgtgtgggcacctatgcgcgtgtgcatctgtgtgagtcattagggtaaatgctagttatgtaaagaatgtatggagtctttagaattcaaatagaattggttccattcaaagtaattgatttctagtagttgaaaattagtgctggttgactcttgtta

SEQ ID NO: 130839 - DNA, 196 bp, Homo sapiens
aggagagagaaaaaaatcaccaaaggtatattttcttagtagaaccaagtatccagcacaaagaaccaagacccccatcaaggccaagcacatggaacccctaacacagtgaacaaagagagcttgaaaagctgccaacgagaaaaagcagatcgtgcacacaaggtcacagtggctcacgcctgtaatcgcagca

SEQ ID NO: 130840 - DNA, 167 bp, Homo sapiens
agctcattatctgtctgtacctccaccaccccaccccaaataacttatccttttctcagtaaaagaataagttactttcctcagcagagataaacatatgctgaattttccagggcaatccttatcgtgtataatttcattctttcctaaaaaggtagttttgctgg

SEQ ID NO: 130841 - DNA, 2292 bp, Homo sapiens
taaatcagctcggtaccggcatgtgctgtaggccagcggaggcccatcgctgtcttctgtgctgaacgagctgcccagtgctgccacccttcggtaccgagaccctggggtgctgccttggggggcgctggaggaggaggaggaggatggaggaaggagcagaaaggccttcacagaagtcacccagacagagctgcaggaccctcacccttcccgggaactgccctggcccatgcaggccagacgggcacacaggcaaagaaatgccagcagggaccaggtggtctatggctctggaactaagacggaccgatgggcgcggctacttcggaggtccaaggagaaaacaaaggaaggcttgcgaagcctgcagccctgggcgtggacactgaagaggatcgggggccagtttggcgccggcacggagtcctacttctccctgctgcgcttcctgctccttcttaacgcgctggcctacagcacatggcctgcgtgacgctgctgcccacctggttgggaggcgctcccccaggccctcccggccccgacatctcctcgccctgcggctcctataacccccactcccagggcctggtcacctttgccacccagctcttcaacttgctctcgggtgagggttacctggaatggtcccctctcttctatggcttctacccgccccgcccacgcctggcggtcacctacctgtgctgggcctttgccgttggcctcatctgcctcctgctcatcctgcatcgctcggtgtctgggctgaagcagacactgctggcggagtccgaggctctgaccagctacagccaccgggtgttctcggcctgggacttcggtctctgcggggacgtccacgtgcggctgcgccagcgcatcatcttgtacgaattaaaggtggagctggaggagacagtggtgcggcgccaggctgcggtgcggacgctgggccagcaagccagggtttggttggtgcgggtgctgctcaacctgctggtggtcgcgctcctgggggcagccttctatggcgtctactgggctacggggtgcaccgtggagctgcaggagatgccccttgtccaggagttgccactgctgaagcttggggtgaattaccttccgtccatcttcatcgctggggtcaattttgtgctgccgcccgtgttcaagctcattgctccactggagggctacactcggagtcgccagatcgtttttatcctgctcaggaccgtgtttcttcgcctcgcctccctggtggtcctgctcttctctctctggaatcagatcacttgtgggggcgactccgaggctgaggactgcaaaacctgtggctacaattacaaacaacttccgtgctgggagactgtcctgggccaggaaatgtacaaacttctgctctttgatctgctgactgtcttggcagtcgcgctgctcatccagtttcctagaaagctcctctgtggcctctgtcctggggcgctgggtcgtctggcggggacccaggagttccaggtgcccgacgaggtgctggggctcatctacgcgcagacggtggtctgggtggggagttttttctgccctttactgcccctgcttaacacggtcaagttcctgctgcttttctacctgaagaagcttaccctcttctccacctgctccccggctgcccgcaccttccgggcctccgcggcgaatttctttttccccttggtccttctcctgggtctggccatctccagcgttcccctgctttacagcatcttcctgatcccgccttctaagctttgtggtccattccgggggcagtcgtccatctgggcccagatccctgagtctatttccagcctccctgagaccacccagaatttcctcttcttcctggggacccaggcttttgctgtgccccttctgctgatctccagcatcctgatggcgtacactgtggctctggctaactcctacggacgcctcatctctgagctcaaacgtcagagacagacggaggcgcagaataaagtcttcctggcacggcgcgctgtggcgctgacctccaccaaaccggctctttgacccccgcagcccacgtcccgctttcagaccccaggcccattgtaagcctaggtcacaacatctgtaaactaggagaactggagaagactccacgcccttccagctttggtatctggagatttccagggcccctcgccgccacgtccctgactctcgggtgatcttccttgtatcaataaatacagccgaggttgctgagcgcgctttgaa

SEQ ID NO: 130842 - DNA, 2357 bp, Homo sapiens
taaatcagctcggtaccggcatgtgctgtaggccagcggaggcccatcgctgtcttctgtgctgaacgagctgcccagtgctgccacccttcggtaccgagaccctggggtgctgccttggggggcgctggaggaggaggaggaggatggaggaaggagcagaaaggccttcacagaagtcacccagacagagctgcaggaccctcacccttcccgggaactgccctggcccatgcaggccagacgggcacacaggcaaagaaatgccagcagggaccaggtggtctatggctctggaactaagacggaccgatgggcgcggctacttcggaggtccaaggagaaaacaaaggaaggcttgcgaagcctgcagccctgggcgtggacactgaagaggatcgggggccagtttggcgccggcacggagtcctacttctccctgctgcgcttcctgctccttcttaacgcgctggcctacagcacatggcctgcgtgacgctgctgcccacctggttgggaggcgctcccccaggccctcccggccccgacatctcctcgccctgcggctcctataacccccactcccagggcctggtcacctttgccacccagctcttcaacttgctctcgggtgagggttacctggaatggtcccctctcttctatggcttctacccgccccgcccacgcctggcggtcacctacctgtgctgggcctttgccgttggcctcatctgcctcctgctcatcctgcatcgctcggtgtctgggctgaagcagacactgctggcggagtccgaggctctgaccagctacagccaccgggtgttctcggcctgggacttcggtctctgcggggacgtccacgtgcggctgcgccagcgcatcatcttgtacgaattaaaggtggagctggaggagacagtggtgcggcgccaggctgcggtgcggacgctgggccagcaagccagggtttggttggtgcgggtgctgctcaacctgctggtggtcgcgctcctgggggcagccttctatggcgtctactgggctacggggtgcaccgtggagctgcaggagatgccccttgtccaggagttgccactgctgaagcttggggtgaattaccttccgtccatcttcatcgctggggtcaattttgtgctgccgcccgtgttcaagctcattgctccactggagggctacactcggagtcgccagatcgtttttatcctgctcaggaccgtgtttcttcgcctcgcctccctggtggtcctgctcttctctctctggaatcagatcacttgtgggggcgactccgaggctgaggactgcaaaacctgtggctacaattacaaacaacttccgtgctgggagactgtcctgggccaggaaatgtacaaacttctgctctttgatctgctgactgtcttggcagtcgcgctgctcatccagtttcctagaaagctcctctgtggcctctgtcctggggcgctgggtcgtctggcggggacccaggagttccaggtgcccgacgaggtgctggggctcatctacgcgcagacggtggtctgggtggggagttttttctgccctttactgcccctgcttaacacggtcaagttcctgctgcttttctacctgaagaagcttaccctcttctccacctgctccccggctgcccgcaccttccgggcctccgcggcgaatttctttttccccttggtccttctcctgggtctggccatctccagcgttcccctgctttacagcatcttcctgatcccgccttctaagctttgtggtccattccgggggcagtcgtccatctgggcccagatccctgagtctatttccagcctccctgagaccacccagaatttcctcttcttcctggggacccaggcttttgctgtgccccttctgctgatctccaggagccagacgtttggatataatggaagagcgtgtcaggagtggcttccgttcctgtctccttcagcatcctgatggcgtacactgtggctctggctaactcctacggacgcctcatctctgagctcaaacgtcagagacagacggaggcgcagaataaagtcttcctggcacggcgcgctgtggcgctgacctccaccaaaccggctctttgacccccgcagcccacgtcccgctttcagaccccaggcccattgtaagcctaggtcacaacatctgtaaactaggagaactggagaagactccacgcccttccagctttggtatctggagatttccagggcccctcgccgccacgtccctgactctcgggtgatcttccttgtatcaataaatacagccgaggttgctgagcgcgctttgaa

SEQ ID NO: 130843 - DNA, 2351 bp, Homo sapiens
agagacagcccagcctgggccatggaagaaaacccgaccttggaatcagaagcctggggctcctctagggggtggctggccccccgggaggccagaggaggcccatcgctgtcttctgtgctgaacgagctgcccagtgctgccacccttcggtaccgagaccctggggtgctgccttggggggcgctggaggaggaggaggaggatggaggaaggagcagaaaggccttcacagaagtcacccagacagagctgcaggaccctcacccttcccgggaactgccctggcccatgcaggccagacgggcacacaggcaaagaaatgccagcagggaccaggtggtctatggctctggaactaagacggaccgatgggcgcggctacttcggaggtccaaggagaaaacaaaggaaggcttgcgaagcctgcagccctgggcgtggacactgaagaggatcgggggccagtttggcgccggcacggagtcctacttctccctgctgcgcttcctgctccttcttaacgcgctggcctacagcacatggcctgcgtgacgctgctgcccacctggttgggaggcgctcccccaggccctcccggccccgacatctcctcgccctgcggctcctataacccccactcccagggcctggtcacctttgccacccagctcttcaacttgctctcgggtgagggttacctggaatggtcccctctcttctatggcttctacccgccccgcccacgcctggcggtcacctacctgtgctgggcctttgccgttggcctcatctgcctcctgctcatcctgcatcgctcggtgtctgggctgaagcagacactgctggcggagtccgaggctctgaccagctacagccaccgggtgttctcggcctgggacttcggtctctgcggggacgtccacgtgcggctgcgccagcgcatcatcttgtacgaattaaaggtggagctggaggagacagtggtgcggcgccaggctgcggtgcggacgctgggccagcaagccagggtttggttggtgcgggtgctgctcaacctgctggtggtcgcgctcctgggggcagccttctatggcgtctactgggctacggggtgcaccgtggagctgcaggagatgccccttgtccaggagttgccactgctgaagcttggggtgaattaccttccgtccatcttcatcgctggggtcaattttgtgctgccgcccgtgttcaagctcattgctccactggagggctacactcggagtcgccagatcgtttttatcctgctcaggaccgtgtttcttcgcctcgcctccctggtggtcctgctcttctctctctggaatcagatcacttgtgggggcgactccgaggctgaggactgcaaaacctgtggctacaattacaaacaacttccgtgctgggagactgtcctgggccaggaaatgtacaaacttctgctctttgatctgctgactgtcttggcagtcgcgctgctcatccagtttcctagaaagctcctctgtggcctctgtcctggggcgctgggtcgtctggcggggacccaggagttccaggtgcccgacgaggtgctggggctcatctacgcgcagacggtggtctgggtggggagttttttctgccctttactgcccctgcttaacacggtcaagttcctgctgcttttctacctgaagaagcttaccctcttctccacctgctccccggctgcccgcaccttccgggcctccgcggcgaatttctttttccccttggtccttctcctgggtctggccatctccagcgttcccctgctttacagcatcttcctgatcccgccttctaagctttgtggtccattccgggggcagtcgtccatctgggcccagatccctgagtctatttccagcctccctgagaccacccagaatttcctcttcttcctggggacccaggcttttgctgtgccccttctgctgatctccagcatcctgatggcgtacactgtggctctggctaactcctacggacgcctcatctctgagctcaaacgtcagagacagacggaggcgcagaataaagtcttcctggcacggcgcgctgtggcgctgacctccaccaaaccggctctttgacccccgcagcccacgtcccgctttcagaccccaggcccattgtaagcctaggtcacaacatctgtaaactaggagaactggagaagactccacgcccttccagctttggtatctggagatttccagggcccctcgccgccacgtccctgactctcgggtgatcttccttgtatcaataaatacagccgaggttgctgagcgcgctttgaa

SEQ ID NO: 130844 - DNA, 1572 bp, Homo sapiens
ggagacggctgcatcagttcacgttaaggaggatctctggagagccagacctggggaaccgggaggcccgcgccttgggaaatggagtccaagcgggcatctctcctgccttcaggtggagctggaggagacagtggtgcggcgccaggctgcggtgcggacgctgggccagcaagccagggtttggttggtgcgggtgctgctcaacctgctggtggtcgcgctcctgggggcagccttctatggcgtctactgggctacggggtgcaccgtggagctgcaggagatgccccttgtccaggagttgccactgctgaagcttggggtgaattaccttccgtccatcttcatcgctggggtcaattttgtgctgccgcccgtgttcaagctcattgctccactggagggctacactcggagtcgccagatcgtttttatcctgctcaggttccagcctcacggggatggctgggaatgatgaagggtgggggcggtcagagggatgttggcgctgacaggaccgtgtttcttcgcctcgcctccctggtggtcctgctcttctctctctggaatcagatcacttgtgggggcgactccgaggctgaggactgcaaaacctgtggctacaattacaaacaacttccgtgctgggagactgtcctgggccaggaaatgtacaaacttctgctctttgatctgctgactgtcttggcagtcgcgctgctcatccagtttcctagaaagctcctctgtggcctctgtcctggggcgctgggtcgtctggcggggacccaggagttccaggtgcccgacgaggtgctggggctcatctacgcgcagacggtggtctgggtggggagttttttctgccctttactgcccctgcttaacacggtcaagttcctgctgcttttctacctgaagaagcttaccctcttctccacctgctccccggctgcccgcaccttccgggcctccgcggcgaatttctttttccccttggtccttctcctgggtctggccatctccagcgttcccctgctttacagcatcttcctgatcccgccttctaagctttgtggtccattccgggggcagtcgtccatctgggcccagatccctgagtctatttccagcctccctgagaccacccagaatttcctcttcttcctggggacccaggcttttgctgtgccccttctgctgatctccagcatcctgatggcgtacactgtggctctggctaactcctacggacgcctcatctctgagctcaaacgtcagagacagacggaggcgcagaataaagtcttcctggcacggcgcgctgtggcgctgacctccaccaaaccggctctttgacccccgcagcccacgtcccgctttcagaccccaggcccattgtaagcctaggtcacaacatctgtaaactaggagaactggagaagactccacgcccttccagctttggtatctggagatttccagggcccctcgccgccacgtccctgactctcgggtgatcttccttgtatcaataaatacagccgaggttgctgagcgcgctttgaa

SEQ ID NO: 130845 - DNA, 360 bp, Homo sapiens
atgtcactaaatagacagagtgtggatggatcatgttgaacctgtaggaagccaggcagatccaactgctaggagaaatcctcaaaagaatataataaaaagttttaaattggtaaagtgaattagtagagcttaagagggaaagagaaatggggtgtgggggagtagacagaaaaagaaaaggaaaaagagacattcagatgtctgtttactacacttggatataggacttaaggacagtatctcgggttttaatgctcatgaagggacaggcggtaaagtgtagctcagagtgttaagctggaactaaaactgatgcaaagtatcaattcgtttgaagagacacagtattactaggtg

SEQ ID NO: 130846 - DNA, 575 bp, Homo sapiens
tactaagtatttaaaaagaagtactcagttgttaatcaaaataatatgatttggaaaaatgtaaattaaacctcagagtcctagagtcaaactggttttgaatttcctgttctttactagacatgtgatcttaggtgagttagttcaccactttgtgctttagtttccttatcaagtaaagttgtgataataatattccatatatgatagggttatgctaaagattgaatgaggcaatatatataaaatgcataatacagtgcataataataatgcacacagtggcaagttcctgtagttccagctacttgggtggctgagacaggaggattgcttgagcccgggagttcgaggctgtagtgtgccgtgattgtacccgtaactagccactgcattccagcctgggcatcataggaagaccttgtttctctttttttaaaagcataatacattacctaccatatactaagctctcagtaagttaaaaattaaaacaaaaagttatgaatatttacctgtaaccaactttgtaagtgaaggtattaatacattggagtttatctcttgaattttaa

SEQ ID NO: 130847 - DNA, 549 bp, Homo sapiens
ctgtccagaagtgtcacttactgtgtgctcagtcctgtcttaaggagaatcagggatactgaaaggtgtaagggcagttccttccctcggaatcgacagactggtggggaagacagataaactgctgtaaggtgatgccacaatccagcatcaactcttggtcagaacaaagtgaggagcccagagtaggtgctcaataagccaccaagtgggtctgtaaatcatcctgggctccagatctcagttacttgcttccgaggacccttcagggtctgaccccaaagacgagagatggctcattaaaaccagaggtgctctgctgagaaagtgcatgcccgtcctggggagcataacaagattctttaatgctaaaaatagccccggtaaacaggctttgatgactccccacagccaggatatgcgcgggctgaggttttggagcactttttccggagcaacgctcatttccttcaggcagcaccgcccatgtggggtgggacttcctgggcagcaggggctgtgcattgggagagagcaggcagagtggca

SEQ ID NO: 130848 - DNA, 270 bp, Homo sapiens
gagtgactgaatgcttttttccctgtttgatatttccttttttaaatgtataaatttgaaatttgatgaaagctgcatcaggacccactgtcagatcttaggataaagctaatgtgtcacaaaagcttttacttccacataagcatgtttcaggaggacccatggtgaacctaaatcagtataaaaaggaagccatgttattttgggggtgctgttgtctcattacgagagacagtgatacgaactgttacaccaaacaaataacaatta

SEQ ID NO: 130849 - DNA, 341 bp, Homo sapiens
ccaaatctgatttcttaattggtatactgtactgtgtatgtgacaaaagtcatatattcaatgattattgcatagtcaaaacaagtagcaggtttgccatcatgaaacgctgtaaagcaattctttctcctgggagaggtggacatgatttttataccattttacagataaggaagctgagttttgataggcttagggaatatggacaatgtcagcaggccagcagagagccgagaacttcagatctaaatctcctactatgtccaccatgcagagctggatgttaatgaagggcagaagttttctaaatccaaatccactcctaatacccgacacttaag

SEQ ID NO: 130850 - DNA, 377 bp, Homo sapiens
tcacgcagggttttcagagaggggcaggatggccctgtgtggtgtgtggacgccccacattgcactgtgaaagcacagatggaaagggtggtttctgctgtcttcaccttcctttgtgtgctccccttttcctgactatcacaaaggactgatctcaagtggttcccaagaccatggagcaggacattctcttcctaggaagtgggaattatttacctaaatccacatgtagggaacacagttgctaaggactggggctggataacagacagacttggatttgaatcccagctccacctcttattggctgtgtaacctcagattacagacttaaccaccccatgctctacttcctcattataaaatagacaaaaggg

SEQ ID NO: 130851 - DNA, 163 bp, Homo sapiens
tgctgggattacagacatgagccactgtgcccagccttatatacagctattattattaatgtatactgtgtattcatttcaattcttaatctctccacttggatgttgatgaaatacatacctcacattcaacatttctttctttttttttttctttttgaga

SEQ ID NO: 130852 - DNA, 557 bp, Homo sapiens
atgcttttggaaagctaattttatacacttgaattaagtcacagctgacagactgtttttgatttgacttgagcatttagcatatattatctattagatttcaattgtttatgtagctgtagttcataatctatttattaaacaaaaatctgcggcacacactgtgtaccactcttatggctctttgaacctagttttcattttgctttttccatatagcctagaagttttgttgtgattgtttatctaatgctgtgacattaataatgttattattataaataaataatgtcagtaatgtatgaggccttttgtaagttgtttaaagtgttactttgtattattttgagattttataaaggattatattttaggtaaaagtccgaaagcagctattaaaaagaatataaatgggtgtggtggctcctgcctgtaatcccagtacattgttgagaggcggaggtgttcagataacttgaggccaggagtttgtgaccagcctacccaacatggtgaaatgccgtcactaataaaaatgcaaaaattagccaggcatg

SEQ ID NO: 130853 - DNA, 216 bp, Homo sapiens
tccctggctaccatactcctcatctgctgacgtcaccactgagatcagggagctggtcacaagaccataaaaggccgcttctggaatgtgaagagaggaaaggagaggcaggacagggtgctgcttggactactggcaattctgagacaccgttggcaggtgtaccagctcccgcagctctgacagccctgtgggctgggcactgtgttaccatga

SEQ ID NO: 130854 - DNA, 525 bp, Homo sapiens
ggagagaggcctgcccatctctcatgcaggccactggaaatcaactctgggtcaaaaccgacaagatttttatcttttaatgcttattgtaagaggccgggatgtttgaaagagggcagcgtcttaagttgcagactattcaccaaagtccttttctattcaggaatgactaatgactttctttgttccccttttccaaaccaaacagcagcagtattaccttgactccaaagtacagtgattgcaatggacagtcttgagattaagggtctttttagtgctttgctcggaatctggagcaaggaaatgtctagggatgtttgttgaatgaacccacctgccagcagtccagagagctgtcccaaaggcccctgagatgtctattgtctgctttggtagggagccaacctgctagaagactcaagggcatttgccttagagagaaaaaaaaatggcacatttagttccgggcttgggtgctgaagtcactgtgtttttggctcctgaagctccactttctttttt

SEQ ID NO: 130855 - DNA, 178 bp, Homo sapiens
ctgagctacttgtttagttttgggcatgtgatcttcttctgctgtatattttggaaaacctcatgggagtttctggcagagatgttcctctctgcctgaagccacagctccttgcatttcagcttttgaatgcaatagttaagtcctaatgcctgaagctcttgcggacggactgtag

SEQ ID NO: 130856 - DNA, 564 bp, Homo sapiens
gattttttttaagttagttgattatttacttaatttcttaagaaaaaaaatgactgccaatctttttgtgccattatggtttgatacaggcaatggtgtcaatcaggattaatggcattcttggtctagttctgttttatcatcataaattttgaactaagttttttcagttgagaaagtcacataaacataatttgaaattatatacattataaagtagacctctttcccagcccttcttcccagagatactgttaccagttttttggtgttattccagaaatacagtgtccgtataaaatcatttatatataaatgattatatatattttatacacatatgtattacacatacattcctcctctgttttcaggatattctgagtggaattatgttgttactttgtttatagtagatttatttactactaattttaattcctttaaattctttatgctactggagttttttgtccttcttagataaattatttacataattattatcatttttttttactttcttctttctttcttttttttttttctttttgagacagggtc

SEQ ID NO: 130857 - DNA, 706 bp, Homo sapiens
tgtgcagtttctgtttcgtcagaactaaacaagtgttcaaagcaactctgaggttcctccctttcagaaggaaacatttttttaagggaatttaagaggtgaaaaagtatctatataaaactcagcagtaagccagtaatactttaatatacaaatttatctcacgaattcttataaaaaattcatagaaaattataaaatcataaatgtaggaactgctagttaatgctcactgaaagaacgttttggcatttattcctactggaatatatgatctccagtaggattcttcacaaacagagaattaagactacattatgaatatttagtggttttgaaagttaaacagctggcaagctttggggagcattaggaataatatacattacaggatgggagggaggaacataccaactcaatactcaagggaagagaactgtgaaagaatggaatgggtaggttgaacaatttcagacttttagatgtatattacacatgtaagctccatgaggccaactgtttttattttgttagccattgtatcaccttacagccattagtcctataataatttaatttgggtttgttggtatagaaactgtatttgcacaataatgataaagccactcaggctcatctagtcatttcctggatttatgtgtgtaggagtacataaaaataagggcactgattcgttttgtacttg

SEQ ID NO: 130858 - DNA, 256 bp, Homo sapiens
gactgtgtctcaaacaaacaaacaaataaaccaaagaaatagctgttcaagagctgagaccttttaacttttgctccagtatcaagcaagacatacaggtctaactcacttttccccacataaaatattctaatcatctctagaaaaattctctttcaaaatgagctaccaaataataatacagtaaaaaagacagggcttggctaggcccggtggctcatgcctgtaatcccagcactttgggaggccaaggcag

SEQ ID NO: 130859 - DNA, 276 bp, Homo sapiens
ctcagcccacctcctgtaggggagcacgggtcccgtctttcttgtccaatttctcagccggggcactgagacgtctttgttccctcaccctaagcctggtctgaagtctgcctcctgcaatgcaagctctgttttgccttcttagccttcttcctgagatgctccttccattcaatttccatttgcccaaagctgactccacactttcattcccagaggcctcatttctcctgtactgccactgcgaagatcggacttaacaaagggggtcccggg

SEQ ID NO: 130860 - DNA, 297 bp, Homo sapiens
aactgggattacaggcatgagccaccgtgcctggccctggtctccattctttatctttccctatatttaggccctttcaccatgtaacactggtctgacctgccctgtgactatggcctcagccttgtgatttgctgcagccaattgaatataagcaaacatgacacacggaaaacttgaacagtgtttacttgaataggctggcttgctctttcccgtctgcagtcaccgcaagaataggctgggctgggctgctgaagaaggagacacatggaatagaatggagttgcccagtca

SEQ ID NO: 130861 - DNA, 404 bp, Homo sapiens
ctattaagcttgagagatccagtgaaatccaaataagagaaactgtgtcctacacagttttctgttaaccattttcttggtatttaaattatttatcaaattttaacttcaataaaaaattattctggagaacacatacctctagagtaagtaaagtatacactttcaatttttagacatgaggttttgaggtgtttgactgtatctaatttcctaaaggctctattttttaacctacaaaaattataaaaagatatataaaagatatgaaatgtaaaaataaggaagatatgaagattaaaataacctataatcccaccactcagaggtaactgttatacaatttttgatgtattattctatgcagatataaattttaataaaatttgaattatatacagttt

SEQ ID NO: 130862 - DNA, 2712 bp, Homo sapiens
acggaaatgaaaggagcacttccgggttcggcaataacctggagccggcggcgtaggttggctctttagggcttcaccccgaagctccaccttcgctcccgtctttctggaaacaccgctttgatctcggcggtgcgggacaggtacctcccggctgctgcgggtgccctggatccagtcggctgcaccaggcgagcgagacccttccctggtggaggctcagagttccggcagggtgcatccggcctgtgtgtggcgcgaggcagggaagccggtacccgggtcctggccccagcgctgacgttttctctcccctttcttctctcttcgcggttgcggcgtcgcagacgctagtgtgagcccccatggcagatacgaccccgaacggcccccaaggggcgggcgctgtgcaattcatgatgaccaataaactggacacggcaatgtggctttctcgcttgttcacagtttactgctctgctctgtttgttctgcctcttcttgggttgcatgaagcagcaagcttttaccaacgtgctttgctggcaaatgctcttaccagtgctctgaggctgcatcaaagattaccacacttccagttaagcagagcattcctggcccaggctttgttagaggacagctgccactacctgttgtattcactcatctttgtaaattcctatccagttacaatgagtatcttcccagtcttgttattctctttgcttcatgctgccacatatacgaaaaaggtccttgacgcaaggggctcaaatagtttacctctgctgagatctgtcttggacaaattaagtgctaatcaacaaaatattctgaaattcattgcttgcaatgaaatattcctgatgcctgcgacagtttttatgctttttagtggtcaaggaagtttgctccaaccttttatatactatagatttcttacccttcgatattcgtctcgaagaaacccatattgtcggaccttatttaatgaactgaggattgttgttgaacacataataatgaaacctgcttgcccactgtttgtgagaagactttgtctccagagcattgcctttataagcagattggcaccaacagttccatagtttaacatctagttaagctacaaatatagtataagcattattagcagctggtacttctgctaggggttgtaaattccaggtgttacactgacctcaatccaatttacataatttacataaatgcatctcggtggaaaaataatcattttcttggcatgttaaatcaagcttaaaaagttttgagaaaattttactgtgctgtgttgctaatggttaaagaagtctgtatctagtgataaatataccagtttttttaaaaagatgctgttgtgcctatatcatgaagtacattaatttctcatgtaaaaaaaatagctctaaaatttgtttcaacctaattggtaacctgagtttatatctggcatgaattcattatggtgatacacatatgtgaattcagtacattttgagacagtattctaccattcagtaattttggttaatgattttaacacttctcagtgtatttaatttcaaattgtttttttaattggttttatgctgctttgttaggacagatgtgttttgaatgtaccattataagaagaattctatgtatcttaaactatgatcttctaaaattttatttccgtaagtacttctgtggccttgagtattttttaaaaggctcaactgtaagcctcttagccagttggataaatatttggggtcacctagccattgaaagcagaaagcagtagtgacacagctttcccttcaaagagccattgagaaacatttctcaaacaggaaatccttcttttactaatgtggacatatagattattcgtattatagtttgtagaactacctagttcagaatcttgactgccagttttcttggtttcttaggcttgaattttcatagacaattgcaacagtttagatgccttttgaaaggaatgtaatgaagattcagcatctgactatatgtgtgtctatcctgaaataataatggagagtatactgtagattacatgtttacccatcaaatctgacttaaaaggttaaatggaaggttttataggtaaggtaattgattgggaatggggtagggggaggagttgtgggggaataatgtgcatttcagtctcaacgcatagataaatttaggggaattggatgtattattcaactttgatttgggttgtaaaatgtgttaaatcctgttcattgaactcccatcaactcttataaaattcatgctgatcttcattaccgttgcatgattggaaatgtttaaaacattgtacagttttagtatagagaaatgtaatggtttttgtgaccagtttctgtctgcatgtaatttggatttctcaaatacattcattagtaatttatcagtaacattagttttatttttgttcatctccttatctataaaaaggggatattcttaggataaatacatgaaaaattatacttgatagcttaactataatcagctatttttgtatttttgtaatatttgtccactaagctggagaagcagcctcatacagttgattttgtgtatgtggctagtcttattgtcactatgtaagtaatccaatggttttagaaactaaactttctagagcaataaaatgactataatgtt

SEQ ID NO: 130863 - DNA, 2508 bp, Homo sapiens
acggaaatgaaaggagcacttccgggttcggcaataacctggagccggcggcgtaggttggctctttagggcttcaccccgaagctccaccttcgctcccgtctttctggaaacaccgctttgatctcggcggtgcgggacagacgctagtgtgagcccccatggcagatacgaccccgaacggcccccaaggggcgggcgctgtgcaattcatgatgaccaataaactggacacggcaatgtggctttctcgcttgttcacagtttactgctctgctctgtttgttctgcctcttcttgggttgcatgaagcagcaagcttttaccaacgtgctttgctggcaaatgctcttaccagtgctctgaggctgcatcaaagattaccacacttccagttaagcagagcattcctggcccaggctttgttagaggacagctgccactacctgttgtattcactcatctttgtaaattcctatccagttacaatgagtatcttcccagtcttgttattctctttgcttcatgctgccacatatacgaaaaaggtccttgacgcaaggggctcaaatagtttacctctgctgagatctgtcttggacaaattaagtgctaatcaacaaaatattctgaaattcattgcttgcaatgaaatattcctgatgcctgcgacagtttttatgctttttagtggtcaaggaagtttgctccaaccttttatatactatagatttcttacccttcgatattcgtctcgaagaaacccatattgtcggaccttatttaatgaactgaggattgttgttgaacacataataatgaaacctgcttgcccactgtttgtgagaagactttgtctccagagcattgcctttataagcagattggcaccaacagttccatagtttaacatctagttaagctacaaatatagtataagcattattagcagctggtacttctgctaggggttgtaaattccaggtgttacactgacctcaatccaatttacataatttacataaatgcatctcggtggaaaaataatcattttcttggcatgttaaatcaagcttaaaaagttttgagaaaattttactgtgctgtgttgctaatggttaaagaagtctgtatctagtgataaatataccagtttttttaaaaagatgctgttgtgcctatatcatgaagtacattaatttctcatgtaaaaaaaatagctctaaaatttgtttcaacctaattggtaacctgagtttatatctggcatgaattcattatggtgatacacatatgtgaattcagtacattttgagacagtattctaccattcagtaattttggttaatgattttaacacttctcagtgtatttaatttcaaattgtttttttaattggttttatgctgctttgttaggacagatgtgttttgaatgtaccattataagaagaattctatgtatcttaaactatgatcttctaaaattttatttccgtaagtacttctgtggccttgagtattttttaaaaggctcaactgtaagcctcttagccagttggataaatatttggggtcacctagccattgaaagcagaaagcagtagtgacacagctttcccttcaaagagccattgagaaacatttctcaaacaggaaatccttcttttactaatgtggacatatagattattcgtattatagtttgtagaactacctagttcagaatcttgactgccagttttcttggtttcttaggcttgaattttcatagacaattgcaacagtttagatgccttttgaaaggaatgtaatgaagattcagcatctgactatatgtgtgtctatcctgaaataataatggagagtatactgtagattacatgtttacccatcaaatctgacttaaaaggttaaatggaaggttttataggtaaggtaattgattgggaatggggtagggggaggagttgtgggggaataatgtgcatttcagtctcaacgcatagataaatttaggggaattggatgtattattcaactttgatttgggttgtaaaatgtgttaaatcctgttcattgaactcccatcaactcttataaaattcatgctgatcttcattaccgttgcatgattggaaatgtttaaaacattgtacagttttagtatagagaaatgtaatggtttttgtgaccagtttctgtctgcatgtaatttggatttctcaaatacattcattagtaatttatcagtaacattagttttatttttgttcatctccttatctataaaaaggggatattcttaggataaatacatgaaaaattatacttgatagcttaactataatcagctatttttgtatttttgtaatatttgtccactaagctggagaagcagcctcatacagttgattttgtgtatgtggctagtcttattgtcactatgtaagtaatccaatggttttagaaactaaactttctagagcaataaaatgactataatgtt

SEQ ID NO: 130864 - DNA, 2632 bp, Homo sapiens
acggaaatgaaaggagcacttccgggttcggcaataacctggagccggcggcgtaggttggctctttagggcttcaccccgaagctccaccttcgctcccgtctttctggaaacaccgctttgatctcggcggtgcgggacaggtacctcccggctgctgcgggtgccctggatccagtcggctgcaccaggcgagcgagacccttccctggtggaggctcagagttccggcagggtgcatccggcctgtgtgtggcgcgaggcagggaagccggtacccgggtcctggccccagcgctgacgttttctctcccctttcttctctcttcgcggttgcggcgtcgcagacgctagtgtgagcccccatggcagatacgaccccgaacggcccccaaggggcgggcgctgtgcaattcatgatgaccaataaactggacacggcaatgtggctttctcgcttgttcacagtttactgctctgctctgtttgttctgcctcttcttggtgtccagatgtcttgctttaaaaaagagaggtcctcagctctttccatcttaaccccagtgaactagatacaaatggaatttaaccaagaaacaacttatttaagcagtgagtatcttcccagtcttgttattctctttgcttcatgctgccacatatacgaaaaaggtccttgacgcaaggggctcaaatagtttacctctgctgagatctgtcttggacaaattaagtgctaatcaacaaaatattctgaaattcattgcttgcaatgaaatattcctgatgcctgcgacagtttttatgctttttagtggtcaaggaagtttgctccaaccttttatatactatagatttcttacccttcgatattcgtctcgaagaaacccatattgtcggaccttatttaatgaactgaggattgttgttgaacacataataatgaaacctgcttgcccactgtttgtgagaagactttgtctccagagcattgcctttataagcagattggcaccaacagttccatagtttaacatctagttaagctacaaatatagtataagcattattagcagctggtacttctgctaggggttgtaaattccaggtgttacactgacctcaatccaatttacataatttacataaatgcatctcggtggaaaaataatcattttcttggcatgttaaatcaagcttaaaaagttttgagaaaattttactgtgctgtgttgctaatggttaaagaagtctgtatctagtgataaatataccagtttttttaaaaagatgctgttgtgcctatatcatgaagtacattaatttctcatgtaaaaaaaatagctctaaaatttgtttcaacctaattggtaacctgagtttatatctggcatgaattcattatggtgatacacatatgtgaattcagtacattttgagacagtattctaccattcagtaattttggttaatgattttaacacttctcagtgtatttaatttcaaattgtttttttaattggttttatgctgctttgttaggacagatgtgttttgaatgtaccattataagaagaattctatgtatcttaaactatgatcttctaaaattttatttccgtaagtacttctgtggccttgagtattttttaaaaggctcaactgtaagcctcttagccagttggataaatatttggggtcacctagccattgaaagcagaaagcagtagtgacacagctttcccttcaaagagccattgagaaacatttctcaaacaggaaatccttcttttactaatgtggacatatagattattcgtattatagtttgtagaactacctagttcagaatcttgactgccagttttcttggtttcttaggcttgaattttcatagacaattgcaacagtttagatgccttttgaaaggaatgtaatgaagattcagcatctgactatatgtgtgtctatcctgaaataataatggagagtatactgtagattacatgtttacccatcaaatctgacttaaaaggttaaatggaaggttttataggtaaggtaattgattgggaatggggtagggggaggagttgtgggggaataatgtgcatttcagtctcaacgcatagataaatttaggggaattggatgtattattcaactttgatttgggttgtaaaatgtgttaaatcctgttcattgaactcccatcaactcttataaaattcatgctgatcttcattaccgttgcatgattggaaatgtttaaaacattgtacagttttagtatagagaaatgtaatggtttttgtgaccagtttctgtctgcatgtaatttggatttctcaaatacattcattagtaatttatcagtaacattagttttatttttgttcatctccttatctataaaaaggggatattcttaggataaatacatgaaaaattatacttgatagcttaactataatcagctatttttgtatttttgtaatatttgtccactaagctggagaagcagcctcatacagttgattttgtgtatgtggctagtcttattgtcactatgtaagtaatccaatggttttagaaactaaactttctagagcaataaaatgactataatgtt

SEQ ID NO: 130865 - DNA, 1370 bp, Homo sapiens
acggaaatgaaaggagcacttccgggttcggcaataacctggagccggcggcgtaggttggctctttagggcttcaccccgaagctccaccttcgctcccgtctttctggaaacaccgctttgatctcggcggtgcgggacaggtacctcccggctgctgcgggtgccctggatccagtcggctgcaccaggcgagcgagacccttccctggtggaggctcagagttccggcagggtgcatccggcctgtgtgtggcgcgaggcagggaagccggtacccgggtcctggccccagcgctgacgttttctctcccctttcttctctcttcgcggttgcggcgtcgcagacgctagtgtgagcccccatggcagatacgaccccgaacggcccccaaggggcgggcgctgtgcaattcatgatgaccaataaactggacacggcaatgtggctttctcgcttgttcacagtttactgctctgctctgtttgttctgcctcttcttgggttgcatgaagcagcaagcttttaccaacgtgctttgctggcaaatgctcttaccagtgctctgaggctgcatcaaagattaccacacttccagttaagcagagcattcctggcccaggctttgttagaggacagctgccactacctgttgtattcactcatctttgtaaattcctatccagttacaatgagtatcttcccagtcttgttattctctttgcttcatgctgccacatatacgaaaaaggtccttgacgcaaggggctcaaatagtttacctctgctgagatctgtcttggacaaattaagtgctaatcaacaaaatattctgaaattcattgcttgcaatgaaatattcctgatgcctgcgacagtttttatgctttttagtggtcaaggaagtttgctccaaccttttatatactatagatttcttacccttcgatattcgtctcgaagaaacccatattgtcggaccttatttaatgaactgaggattgttgttgaacacataataatgaaacctgcttgcccactgtttgtgagaagactttgtctccagagcattgcctttataagcagattggcaccaacagttccatagtttaacatctagttaagctacaaatatagtataagcattattagcagctggtacttctgctaggggttgtaaattccaggtgttacactgacctcaatccaatttacataatttacataaatgcatctcggtggaaaaataatcattttcttggcatgttaaatcaagcttaaaaagttttgagaaaattttactgtgctgtgttgctaatggttaaagaagtctgtatctagtgataaatataccagtttttttaaaaag

SEQ ID NO: 130866 - DNA, 1111 bp, Homo sapiens
acggaaatgaaaggagcacttccgggttcggcaataacctggagccggcggcgtaggttggctctttagggcttcaccccgaagctccaccttcgctcccgtctttctggaaacaccgctttgatctcggcggtgcgggacaggtacctcccggctgctgcgggtgccctggatccagtcggctgcaccaggcgagcgagacccttccctggtggaggctcagagttccggcagggtgcatccggcctgtgtgtggcgcgaggcagggaagccggtacccgggtcctggccccagcgctgacgttttctctcccctttcttctctcttcgcggttgcggcgtcgcagacgctagtgtgagcccccatggcagatacgaccccgaacggcccccaaggggcgggcgctgtgcaattcatgatgaccaataaactggacacggcaatgtggctttctcgcttgttcacagtttactgctctgctctgtttgttctgcctcttcttgggttgcatgaagcagcaagcttttaccaacgtgctttgctggcaaatgctcttaccagtgctctgaggctgcatcaaagattaccacacttccagttaagcagagcattcctggcccaggctttgttagaggacagctgccactacctgttgtattcactcatctttgtaaattcctatccagttacaatgagtatcttcccagtcttgttattctctttgcttcatgctgccacatatacgaaaaaggtccttgacgcaaggggctcaaatagtttacctctgctgagatctgtcttggacaaattaagtgctaatcaacaaaatattctgaaattcattgcttgcaatgaaatattcctgatgcctgcgacagtttttatgctttttagtggtcaaggaagtttgctccaaccttttatatactatagatttcttacccttcgatattcgtctcgaagaaacccatattgtcgtttgtggtgccccaaaacagttacaatagtaacaccaaagagatcaccgtaacagaacagatcacagatcaccataatagattaataatgtgagcacatgctgttggaaagtggcactgatagtcttgctgt

SEQ ID NO: 130867 - DNA, 907 bp, Homo sapiens
attacattcctttcaaaaggcatctaaactgcttgaattttcatagacaattgcaacagtttagatgccttttgaaaggaatgtaatgaagattcagcatctgactatatgtgtgtctatcctgaaataataatggagagtatactgtagattacatgtttacccatcaaatctgacttaaaaggttaaatggaaggttttataggtaaggtaattgattgggaatggggtagggggaggagttgtgggggaataatgtgcatttcagtctcaacgcatagataaatttaggggaattggatgtattattcaactttgatttgggttgtaaaatgtgttaaatcctgttcattgaactcccatcaactcttataaaattcatgctgatcttcattaccgttgcatgattggaaatgtttaaaacattgtacagttttagtatagagaaatgtaatggtttttgtgaccagtttctgtctgcatgtaatttggatttctcaaatacattcattagtaatttatcagtaacattagttttatttttgttcatctccttatctataaaaaggggatattcttaggataaatacatgaaaaattatacttgatagcttaactataatcagctatttttgtatttttgtaatatttgtccactaagctggagaagcagcctcatacagttgattttgtgtatgtggctagtcttattgtcactatgtaagtaatccaatggttttagaaactaaactttctagagcaataaaatgactataatgttaagtaaacataatgttgatttctaattatgttttaaaaaatgaagtcttgaattatatcaagaaattttggcagctgaagtcatgtttattttgaagctgttagttttttcctataatttaaaaag

SEQ ID NO: 130868 - DNA, 961 bp, Homo sapiens
acggaaatgaaaggagcacttccgggttcggcaataacctggagccggcggcgtaggttggctctttagggcttcaccccgaagctccaccttcgctcccgtctttctggaaacaccgctttgatctcggcggtgcgggacaggtacctcccggctgctgcgggtgccctggatccagtcggctgcaccaggcgagcgagacccttccctggtggaggctcagagttccggcagggtgcatccggcctgtgtgtggcgcgaggcagggaagccggtacccgggtcctggccccagcgctgacgttttctctcccctttcttctctcttcgcggttgcggcgtcgcagacgctagtgtgagcccccatggcagatacgaccccgaacggcccccaaggggcgggcgctgtgcaattcatgatgaccaataaactggacacggcaatgtggctttctcgcttgttcacagtttactgctctgctctgtttgttctgcctcttcttggtgagtatcttcccagtcttgttattctctttgcttcatgctgccacatatacgaaaaaggtccttgacgtaagtaaaactgctctttgtctgacttctgaattacagatcattgacatgaatttgagttctaagacattttggtatttgtcacaaaaagtccctctataccttacaaacttgttatgaattatttagtgatttgaaagttttaagtttaaaagtgtttattgttgaagtttcacaaactagaacattttatagataaaggattgcacttaaaatcaccccccagtctccaggggaatttttcaagtttgaaatagatcagtttttttgaaacctgtgtctctaaagtttgttgagttgtcagatctcttgttctgtcagtgtttaattctggcatacctgataagttgagtgtactgaatgaatctcttgtacactaattttcaga

SEQ ID NO: 130869 - DNA, 439 bp, Homo sapiens
cggctaggtaagcgaggctgggtggcccgaagctccaccttcgctcccgtctttctggaaacaccgctttgatctcggcggtgcgggacaggtacctcccggctgctgcgggtgccctggatccagtcggctgcaccaggcgagcgagacccttccctggtggaggctcagagttccggcagggtgcatccggcctgtgtgtggcgcgaggcagggaagccggtacccgggtcctggccccagcgctgacgttttctctcccctttcttctctcttcgcggttgcggcgtcgcagacgctagtgtgagccccctgaccccttctttcaaacagaaaaaaaaaaaaaaaaaaaaaaaaaaaaaaaaaaaaaaaaaaaaaaaaaaaaaaaaaaaaaaaaaaaaaaaaaaaaaaaaaaaaaaaaaaaaaaaaaaaaaaaaac

SEQ ID NO: 130870 - DNA, 750 bp, Homo sapiens
atgatacaatttagaagaaaaggctaaaaaacctaataaaacacatttggcatcttaatatatttcttccaatttaaaaaaatacaattgtaataatatgtgtagttttatattctgcttttttcagagttgctatgtaattttcataaccaagattctaggtagttgcatattaaatccattaaataaccataatataagttgttcaattctacttccttacagttcacattaggttgttgccacattttgtttgtagttatttcagtgaatgtcttaattcagatagtttttcttagggaagaattccagacctggtatttcataaacatatatataattcttgggatattgtaattgtgttttttaaccaagaacaataattagtataggctgtttagatttactgatgagccagtgtaatttttttggtggaggggagtgtttgtttctttttatatatataaaataagtcacttttcatttgcatattttatgaagctttacaacttgatttcatcaattagtaattacggaattatttaacattttctgatttatttagtattttaaaaaatttcaaaagtaatacagataagaatacatttataaaaaaattaaacaacattttactctttaccaatcatgtacattcttttatatccttttttaaggataacttggatttagacatgatagatttcactatgaccatttgatgaatgaagatacacatattctccagttgaa

SEQ ID NO: 130871 - DNA, 2838 bp, Homo sapiens
acggaaatgaaaggagcacttccgggttcggcaataacctggagccggcggcgtaggttggctctttagggcttcaccccgaagctccaccttcgctcccgtctttctggaaacaccgctttgatctcggcggtgcgggacaggtacctcccggctgctgcgggtgccctggatccagtcggctgcaccaggcgagcgagacccttccctggtggaggctcagagttccggcagggtgcatccggcctgtgtgtggcgcgaggcagggaagccggtacccgggtcctggccccagcgctgacgttttctctcccctttcttctctcttcgcggttgcggcgtcgcagacgctagtgtgagcccccatggcagatacgaccccgaacggcccccaaggggcgggcgctgtgcaattcatgatgaccaataaactggacacggcaatgtggctttctcgcttgttcacagtttactgctctgctctgtttgttctgcctcttcttgggttgcatgaagcagcaagcttttaccaacgtgctttgctggcaaatgctcttaccagtgctctgaggctgcatcaaagattaccacacttccagttaagcagagcattcctggcccaggctttgttagaggacagctgccactacctgttgtattcactcatctttgtaaattcctatccagttacaatgagtatcttcccagtcttgttattctctttgcttcatgctgccacatatacgaaaaaggtccttgacgcaaggggctcaaatagtttacctctgctgagatctgtcttggacaaattaagtgctaatcaacaaaatattctgaaattcattgcttgcaatgaaatattcctgatgcctgcgacagtttttatgctttttagtggtcaaggaagtttgctccaaccttttatatactatagatttcttacccttcgatattcgtctcgaagaaacccatattgtcggaccttatttaatgaactgaggattgttgttgaacacataataatgaaacctgcttgcccactgtttgtgagaagactttgtctccagagcattgcctttataagcagattggcaccaacagttccatagtttaacatctagttaagctacaaatatagtataagcattattagcagctggtacttctgctaggggttgtaaattccaggtgttacactgacctcaatccaatttacataatttacataaatgcatctcggtggaaaaataatcattttcttggcatgttaaatcaagcttaaaaagttttgagaaaattttactgtgctgtgttgctaatggttaaagaagtctgtatctagtgataaatataccagtttttttaaaaagatgctgttgtgcctatatcatgaagtacattaatttctcatgtaaaaaaaatagctctaaaatttgtttcaacctaattggtaacctgagtttatatctggcatgaattcattatggtgatacacatatgtgaattcagtacattttgagacagtattctaccattcagtaattttggttaatgattttaacacttctcagtgtatttaatttcaaattgtttttttaattggttttatgctgctttgttaggacagatgtgttttgaatgtaccattataagaagaattctatgtatcttaaactatgatcttctaaaattttatttccgtaagtacttctgtggccttgagtattttttaaaaggctcaactgtaagcctcttagccagttggataaatatttggggtcacctagccattgaaagcagaaagcagtagtgacacagctttcccttcaaagagccattgagaaacatttctcaaacaggaaatccttcttttactaatgtggacatatagattattcgtattatagtttgtagaactacctagttcagaatcttgactgccagttttcttggtttcttaggcttgaattttcatagacaattgcaacagtttagatgccttttgaaaggaatgtaatgaagattcagcatctgactatatgtgtgtctatcctgaaataataatggagagtatactgtagattacatgtttacccatcaaatctgacttaaaaggttaaatggaaggttttataggtaaggtaattgattgggaatggggtagggggaggagttgtgggggaataatgtgcatttcagtctcaacgcatagataaatttaggggaattggatgtattattcaactttgatttgggttgtaaaatgtgttaaatcctgttcattgaactcccatcaactcttataaaattcatgctgatcttcattaccgttgcatgattggaaatgtttaaaacattgtacagttttagtatagagaaatgtaatggtttttgtgaccagtttctgtctgcatgtaatttggatttctcaaatacattcattagtaatttatcagtaacattagttttatttttgttcatctccttatctataaaaaggggatattcttaggataaatacatgaaaaattatacttgatagcttaactataatcagctatttttgtatttttgtaatatttgtccactaagctggagaagcagcctcatacagttgattttgtgtatgtggctagtcttattgtcactatgtaagtaatccaatggttttagaaactaaactttctagagcaataaaatgactataatgttaagtaaacataatgttgatttctaattatgttttaaaaaatgaagtcttgaattatatcaagaaattttggcagctgaagtcatgtttattttgaagctgttagttttttcctataatttaaaaag

SEQ ID NO: 130872 - DNA, 2660 bp, Homo sapiens
cggctaggtaagcgaggctgggtggcccgaagctccaccttcgctcccgtctttctggaaacaccgctttgatctcggcggtgcgggacaggtacctcccggctgctgcgggtgccctggatccagtcggctgcaccaggcgagcgagacccttccctggtggaggctcagagttccggcagggtgcatccggcctgtgtgtggcgcgaggcagggaagccggtacccgggtcctggccccagcgctgacgttttctctcccctttcttctctcttcgcggttgcggcgtcgcagacgctagtgtgagcccccatggcagatacgaccccgaacggcccccaaggggcgggcgctgtgcaattcatgatgaccaataaactggacacggcaatgtggctttctcgcttgttcacagtttactgctctgctctgtttgttctgcctcttcttgggttgcatgaagcagcaagcttttaccaacgtgctttgctggcaaatgctcttaccagtgctctgaggctgcatcaaagattaccacacttccagttaagcagagcattcctggcccaggctttgttagaggacagctgccactacctgttgtattcactcatctttgtaaattcctatccagttacaatgagtatcttcccagtcttgttattctctttgcttcatgctgccacatatacgaaaaaggtccttgacgcaaggggctcaaatagtttacctctgctgagatctgtcttggacaaattaagtgctaatcaacaaaatattctgaaattcattgcttgcaatgaaatattcctgatgcctgcgacagtttttatgctttttagtggtcaaggaagtttgctccaaccttttatatactatagatttcttacccttcgatattcgtctcgaagaaacccatattgtcggaccttatttaatgaactgaggattgttgttgaacacataataatgaaacctgcttgcccactgtttgtgagaagactttgtctccagagcattgcctttataagcagattggcaccaacagttccatagtttaacatctagttaagctacaaatatagtataagcattattagcagctggtacttctgctaggggttgtaaattccaggtgttacactgacctcaatccaatttacataatttacataaatgcatctcggtggaaaaataatcattttcttggcatgttaaatcaagcttaaaaagttttgagaaaattttactgtgctgtgttgctaatggttaaagaagtctgtatctagtgataaatataccagtttttttaaaaagatgctgttgtgcctatatcatgaagtacattaatttctcatgtaaaaaaaatagctctaaaatttgtttcaacctaattggtaacctgagtttatatctggcatgaattcattatggtgatacacatatgtgaattcagtacattttgagacagtattctaccattcagtaattttggttaatgattttaacacttctcagtgtatttaatttcaaattgtttttttaattggttttatgctgctttgttaggacagatgtgttttgaatgtaccattataagaagaattctatgtatcttaaactatgatcttctaaaattttatttccgtaagtacttctgtggccttgagtattttttaaaaggctcaactgtaagcctcttagccagttggataaatatttggggtcacctagccattgaaagcagaaagcagtagtgacacagctttcccttcaaagagccattgagaaacatttctcaaacaggaaatccttcttttactaatgtggacatatagattattcgtattatagtttgtagaactacctagttcagaatcttgactgccagttttcttggtttcttaggcttgaattttcatagacaattgcaacagtttagatgccttttgaaaggaatgtaatgaagattcagcatctgactatatgtgtgtctatcctgaaataataatggagagtatactgtagattacatgtttacccatcaaatctgacttaaaaggttaaatggaaggttttataggtaaggtaattgattgggaatggggtagggggaggagttgtgggggaataatgtgcatttcagtctcaacgcatagataaatttaggggaattggatgtattattcaactttgatttgggttgtaaaatgtgttaaatcctgttcattgaactcccatcaactcttataaaattcatgctgatcttcattaccgttgcatgattggaaatgtttaaaacattgtacagttttagtatagagaaatgtaatggtttttgtgaccagtttctgtctgcatgtaatttggatttctcaaatacattcattagtaatttatcagtaacattagttttatttttgttcatctccttatctataaaaaggggatattcttaggataaatacatgaaaaattatacttgatagcttaactataatcagctatttttgtatttttgtaatatttgtccactaagctggagaagcagcctcatacagttgattttgtgtatgtggctagtcttattgtcactatgtaagtaatccaatggttttagaaactaaactttctagagcaataaaatgactataatgtt

SEQ ID NO: 130873 - DNA, 1924 bp, Homo sapiens
aagagtggtatcaacgcagagggcccattacggccggaaaatattctgaaattcattgcttgcaatgaaatattcctgatgcctgcgacagtttttatgctttttagtggtcaaggaagtttgctccaaccttttatatactatagatttcttacccttcgatattcgtctcgaagaaacccatattgtcggaccttatttaatgaactgaggattgttgttgaacacataataatgaaacctgcttgcccactgtttgtgagaagactttgtctccagagcattgcctttataagcagattggcaccaacagttccatagtttaacatctagttaagctacaaatatagtataagcattattagcagctggtacttctgctaggggttgtaaattccaggtgttacactgacctcaatccaatttacataatttacataaatgcatctcggtggaaaaataatcattttcttggcatgttaaatcaagcttaaaaagttttgagaaaattttactgtgctgtgttgctaatggttaaagaagtctgtatctagtgataaatataccagtttttttaaaaagatgctgttgtgcctatatcatgaagtacattaatttctcatgtaaaaaaaatagctctaaaatttgtttcaacctaattggtaacctgagtttatatctggcatgaattcattatggtgatacacatatgtgaattcagtacattttgagacagtattctaccattcagtaattttggttaatgattttaacacttctcagtgtatttaatttcaaattgtttttttaattggttttatgctgctttgttaggacagatgtgttttgaatgtaccattataagaagaattctatgtatcttaaactatgatcttctaaaattttatttccgtaagtacttctgtggccttgagtattttttaaaaggctcaactgtaagcctcttagccagttggataaatatttggggtcacctagccattgaaagcagaaagcagtagtgacacagctttcccttcaaagagccattgagaaacatttctcaaacaggaaatccttcttttactaatgtggacatatagattattcgtattatagtttgtagaactacctagttcagaatcttgactgccagttttcttggtttcttaggcttgaattttcatagacaattgcaacagtttagatgccttttgaaaggaatgtaatgaagattcagcatctgactatatgtgtgtctatcctgaaataataatggagagtatactgtagattacatgtttacccatcaaatctgacttaaaaggttaaatggaaggttttataggtaaggtaattgattgggaatggggtagggggaggagttgtgggggaataatgtgcatttcagtctcaacgcatagataaatttaggggaattggatgtattattcaactttgatttgggttgtaaaatgtgttaaatcctgttcattgaactcccatcaactcttataaaattcatgctgatcttcattaccgttgcatgattggaaatgtttaaaacattgtacagttttagtatagagaaatgtaatggtttttgtgaccagtttctgtctgcatgtaatttggatttctcaaatacattcattagtaatttatcagtaacattagttttatttttgttcatctccttatctataaaaaggggatattcttaggataaatacatgaaaaattatacttgatagcttaactataatcagctatttttgtatttttgtaatatttgtccactaagctggagaagcagcctcatacagttgattttgtgtatgtggctagtcttattgtcactatgtaagtaatccaatggttttagaaactaaactttctagagcaataaaatgactataatgtt

SEQ ID NO: 130874 - DNA, 1414 bp, Homo sapiens
acggaaatgaaaggagcacttccgggttcggcaataacctggagccggcggcgtaggttggctctttagggcttcaccccgaagctccaccttcgctcccgtctttctggaaacaccgctttgatctcggcggtgcgggacaggtacctcccggctgctgcgggtgccctggatccagtcggctgcaccaggcgagcgagacccttccctggtggaggctcagagttccggcagggtgcatccggcctgtgtgtggcgcgaggcagggaagccggtacccgggtcctggccccagcgctgacgttttctctcccctttcttctctcttcgcggttgcggcgtcgcagacgctagtgtgagcccccatggcagatacgaccccgaacggcccccaaggggcgggcgctgtgcaattcatgatgaccaataaactggacacggcaatgtggctttctcgcttgttcacagtttactgctctgctctgtttgttctgcctcttcttgggttgcatgaagcagcaagcttttaccaacgtgctttgctggcaaatgctcttaccagtgctctgaggctgcatcaaagattaccacacttccagttaagcagagcattcctggcccaggctttgttagaggacagctgccactacctgttgtattcactcatctttgtaaattcctatccagttacaatgagtatcttcccagtcttgttattctctttgcttcatgctgccacatatacgaaaaaggtccttgacgcaaggggctcaaatagtttacctctgctgagatctgtcttggacaaattaagtgctaatcaacaaaatattctgaaattcattgcttgcaatgaaatattcctgatgcctgcgacagtttttatgctttttagtggtcaaggaagtttgctccaaccttttatatactatagatttcttacccttcgatattcgtctcgaagaaacccatattgtcggaccttatttaatgaactgaggattgttgttgaacacataataatgaaacctgcttgcccactgtttgtgagaagactttgtctccagagcattgcctttataagcagattggcaccaacagttccatagtttaacatctagttaagctacaaatatagtataagcattattagcagctggtacttctgctaggggttgtaaattccaggtgttacactgacctcaatccaatttacataatttacataaatgcatctcggtggaaaaataatcattttcttggcatgttaaatcaagcttaaaaagttttgagaaaattttactgtgctgtgttgctaatggttaaagaagtctgtatctagtgataaatataccagtttttttaaaaagaaaaaaaaaaaaaaaaaaaaaaaaaaaaaaaaaaaaaaaaaaac

SEQ ID NO: 130875 - DNA, 455 bp, Homo sapiens
ttatgcccttttctccctgggttatttatgctttgatttcactcctactgaatcagtaatcgccacttcatcttaacttcggcctgaattgtccaggggagcatgcctagcccccagcccaggtttccgtgatttgcaaataagcgtggcctccatgaccacttcctagctgagatcacaccagtgcagtgaggtggctcacagctgtgattaggaatccttttttgcaaaatgtgaaccatcactcctcatgtgttggtttccacaaatcacatattgttaaagtgggaaggagcgggtgagaggggatagaacccattcagaaaatgtttacaccaacccaagacttttcaacaggtagcttagcctggaacattgagtccaaatttgtagaaattaaaaaccatgggaatgggggaaagaggcgagagaaggcatccaaaatggtaatgtac

SEQ ID NO: 130876 - DNA, 460 bp, Homo sapiens
agtagcaccagagtagcttagtagtggtctaaatgcccagtagtccatagtagagctgtgaaggcaataccatcaagtggccagttgctgcttggccagtgaaagagaaaataggcttcaattttagaataagagaggtggacagaaagattttttgggatcagaattttattcacaggttgactacatcccagaaatctggaaacctataggcttgccatagccaattgcagggaagtgagatatatgcaggctatataacttctagaaattgaaggcaggaaaagtgaaagtgagaggtggtaatatgaagcaaggttggccaccagccactcttaagacagagaaagagtgtaggaacctacttattggacacacaattccatgtgagataagaactcagtagtttaggaattgaaataatgcaaaatcccagtcaatagaaactggagtaacaaag

SEQ ID NO: 130877 - DNA, 291 bp, Homo sapiens
ttctcattcgcttgattccgttctctctctccacacacacgcgctctcattcgcttgattccgttctctctctccacacacactcgtgttctcattcgcctgattccgttctctctccacacacactcgtgttctcattcgcttgattccgttctctctctccacacacatgcgctctcatttgcttgattccgttctctctccacacacactcacgcgctctcattcgcttgactctgttctctctctccacacacactcacgctctcattcgcttgattccgttctctc

SEQ ID NO: 130878 - DNA, 281 bp, Homo sapiens
gtttggtgtttaggagggctgagggtctgtatacctacccactgacataaaggctgagaggaaaaaaaaaaagaaattaaaagcagttttacaaggcactcactcaacagcacaggggcctggtgtggatgggatgtgggactaggaaacacttcacagggtgcagacaggatgattaactcacttcctgtgacaaccataaaaggaggaacgtttgctccaaaatatattaactattaaatgctatctggggaaatgtctagacataaagcaccatattt

SEQ ID NO: 130879 - DNA, 292 bp, Homo sapiens
gtggagggaagggcttgggacctgtgtcaggagagctgggtccatctccctctctgtctcaaactatgcttatgatctttagcagtgaaaataatctctctaaggtggggacaggaccccagtccctgctgtgcttaataaattatgaggatcaaaataaattatcagtgaatgtgtatgggaagactaagaaattgttaaagttctcgaatacattacattttcatccacagaaaagtgtaggctagggatgataggggaatagttagtaatgacagggatagttgaactt

SEQ ID NO: 130880 - DNA, 133 bp, Homo sapiens
tttaagcgatccaactgccttgacctcccaaagtactgggattacatgcatcagccaccatgcccggcttaaattcttccatgacttttcccctccaggctttagtgtctcttgtaatctgctggaaatctac

SEQ ID NO: 130881 - DNA, 155 bp, Homo sapiens
ctagtgcctgctatgtgctaaagtctcatggtatgtgttttacatactttatcttatttacttcatacaacaatttgtaaatattattcatcccattttataaaagaggaaactaagattcagagagtttaggtaattttcccaagtcacagagt

SEQ ID NO: 130882 - DNA, 574 bp, Homo sapiens
acagagggctaaattactaacatagacccttatatatacatacatacatataaaaattgagaagaaaaagttccatgttccaacggaaaaatgggaaaaggctattaacagtttagaggaaagagaaatttactgctctgaacatatggaaagatgttaacctcactcacagtaagagaaatgcatttttaaactgcaccaagataccatgccccatgtacagaatggcagaaatgcaaaagttaaacagcatagctattctgatggtgcagtgagcaaaaccagccctcttcaaccctagtggttagaatgcagcatggtactaccccagtggggatggcgtttgtcaggatctagcaaaaccgcctctgcattttctttcttcaactaagcacctcatatatatgaatctatcccaaagataatgagcaaaatcaagatgtggcatgtgctcaagggcatttagtgcagcactagttgtaataggaagcaacaagaaacaacccaagtaatcatcataggggactgagtgaataatatggtccattaatagagtgaagtactacatagctat

SEQ ID NO: 130883 - DNA, 504 bp, Homo sapiens
agagaattcctgaaccaggtaaaatttccaagtttagggcacacggttatgtgcctgtagtcccagctgcttgggaggccagaagattgcttgagcccaggaggctgaggccagcttgggcaagaagcaagagaccctatctcaaaaaacattccctgtttgcctagggtcagtgtccaagccaagttgctacagggtgaagcccttatagtggatctgaatggcaagctgaagacagatgtcctgtgggtgttcttcactggcagggtgtaggagtggtgaggactgaggagtctgggaagaaagatcccattgtaaggacttgcagcccatagatattcgcctcccctgccacccactttttctgctctagcctcttgggctagcagagtatgacactaaccatgaggattgagcttcatacttatccaacaagtacagatgctcctcaacttaccatggtgctacatctctatatgcccattgtacgctggaaatattgaa

SEQ ID NO: 130884 - DNA, 879 bp, Homo sapiens
ggtcgaggcaggaggatcacttgaggcccaggagtttgagactagcttgggcaacatagcaagaccccatctgtaagaaaaagaggaaaagaaaaaaattaactggatgtggtggtacatgcctatagtctcagctactgtggaagttgaggcaagaggatcacttgagctcaggagttcaaggtgcatagtgaactgtgatcacaccactgcactccagcctgggcagcagagtgagaccctgtctccaaaaataaataagtaaataaaataataaatgaaataaaaaattagaaattaaaagttctggaagctcaaaagtctgaaattaatttcactaggctcagatcaaggtatcttgccagggctgtgttccctctggaggctctaggagagaatgtgtttccttgccttttccattatatagagctgtatttcttgcctgcctttattcatattctctttcttcatcttcaaagcagtatggcattttgttttagttatcacattgccttcttcttctgtagtaaaatctccctctgcctccctcttataaggtcacttaagattatatttagggcttagctggctaatccataatattctccccatttttttatttttttgatccttaatttgatcacatgtgcaaagtacctcttgccatataaactagcattacagattccagagattaggacttggatatcttcgggggctgttatttagtttaccatagtctcttactgctacttttctttctgcagttcttcgtggttctccctttttctgaagactagctttctctgctttggcatacaggtgccaagcatatattaccaacaatgatggccttgggtcctgggttcacaagagaat

SEQ ID NO: 130885 - DNA, 365 bp, Homo sapiens
cgcctgtaatcccagctactcaggaggctgaggcaggagaattgcttgaatctgggaggcggaggtagcagtgaggctagatggcaccacttcactccagcctgggcaacagagcgagattccatctccaaaaaagaaagcatcaaggaataaccaaatgaagcaaaattttatttttctttggaaaacatttgaggtgattggccagttgtaaaattgagtgtatatcaagatcagtttaattcatctgaattttgcttaaggtgatttcattttttgctgtctaatagctttattcaagtagaattacacgccataaaatttactcattttatttttttatttttattaagttaggttgtgtt

SEQ ID NO: 130886 - DNA, 827 bp, Homo sapiens
cattgaaagagaatgtacatctatgttatatttgaagctacatagaaataaactttttacattttcagaatattttcatagttgtattccgaaagtcatacatttaggcaggctaaagtttacaaattaagttgaaccttttccgcatctagacttaattttgtgatattacaagtgaatgagcacatgaagttctaacagatttttgcatctgaactataattaataagatttaactgattatacactaaaacttgacaaagtagtttttcttttattttccattttttaatatgttccgcctcagggttatatatttactactcctgtgcttttacaaaagcaacttcaaattcttaggcacaggattctgaaaattagatgaactaaccaggtacagttactttaattttcagattttagggatattagagtgcatttatttgtatttctatttgtaatatttaaaatggaccaatttgtgtgtgcattagtttccaatggggctgtaacatattaccacaagtttagtggcttaaaatcacacaagtttattattctaaagttatggaggtcgctgggtgcagtggctcacacctgtgatcccagcaccttgggaggccaaggcgggcagatcacgaggtcaggagatcaagaccatcttggccaacatggtgaaaccctgtctctactaaaaatacaaaaaattagccgggcatggtggcacgcgcctgtagtcccagctacttgggaggctgaggcaggagaattgcttgaaccttggaggcggaggttgcaatgagccgagatcgcgccactgcactcca

SEQ ID NO: 130887 - DNA, 126 bp, Homo sapiens
agtaaatcattttaataggttaaatttgattatgagaagtgacccttttcaaatgtcacttactaaagaagttttctttcactttccctcccttcttttcttgccatagtagaataaactcacagt

SEQ ID NO: 130888 - DNA, 122 bp, Homo sapiens
tttgtttggttccaagagcatgagaaaaactttaagaagtacagacgcttccacacaaaacaaaccaagatggacccagaattgccactgccctgcctgtacaacatgagcaccacccactg

SEQ ID NO: 130889 - DNA, 504 bp, Homo sapiens
atcttttaaaaatagagactagggttttgctgcgttgcccaggctggtcttgaacacctgaactcaagtgatcagcctgcctcagcctcacaaagtgttgggattacaggcatgagccacgatgcctggccttagtcatcctttaaatctcagcaaagcatcacttccctcaggaagccttacctgacttttctgatcagatttgattctgctgttagaagctggtgatagcatggtgcaccttcccttggtatcacttactgtagttgcagttgtacctttatctgtgtgattattttgttagaaatgcttgttccccagtgccacagagaaatagcactcaaatataaatttatttcagcaaggcaatttttaccttctgcagaaagggtgctccttgcagatggaacaatggcgagcgcacactgaacaaagggggtaaaaatatttatatcctacacatctggaccctactgctgtgtcctgattccattggctggaact

SEQ ID NO: 130890 - DNA, 660 bp, Homo sapiens
ctcagttatttcctcatctgttgacttatatgttttggtagacaatcccatgtacagctctttcatttttgatatttcttttgcatataagttgtacatattcattggagacaaattagaaataggtattagcaatgtaacatatgaaatacagagaagaacccaccatctaaatataattactgttgatattttgaatgttttgctttaagtctttttactgtaatatatgcctatgtattttttcttaactaatattcacaccttgttttataacctgattttttttcagtgttagattgtttaggcttgcaggaggtggggagtgtgactttttgtctactttattcattccatttttaaaagaacatagaataatatttggcatggactttggacttatttatctagaaatctcaaatataataagcatgtgtattttagtacaaattcatacttaaagcatagttgaatagcagttttagatttcagcaggccttgagaggtgattttttaaaaattctaaaaagttcacatctgcttcacattcattgtttaaaatgaaaacagagaagctcacacatgcttgataaagctgtagaatacgtaatgattaagtttttatgtgcttttagatgatagctaagtcctgtaaggcta

SEQ ID NO: 130891 - DNA, 151 bp, Homo sapiens
aattcatctcctctgagcacaaaccacctcacccttgcatctaattctgtgaactacaaattcctggctccagccttgcctggcttcacaggctgcatgcccccaacttcagtctccctggcaacgtcaccaaccactcccagcccagcct

SEQ ID NO: 130892 - DNA, 135 bp, Homo sapiens
agccataaatgtatatcatagatattgtgacactgctttttatcagtttggttcatattgtgctattatatatgccctaatgctcatgtttattttagaaactgtgacccaatgtcctttgttcctcttctaatt

SEQ ID NO: 130893 - DNA, 326 bp, Homo sapiens
attttaagccagggatcataaaacccacctttcaggatgactgtgaacagaaccagattcagctggtatgctggtatgcctggcacgacacggcatggcaggcagcattcactctgatcggttggtgcctgcgctgagtatgtagaatttcacccctggttgtgaggctttaaatgagtaaatgcttataaagcattcagcgcattttctgcctcgtaataagaaggtcacaaatgatagctgcttctgctaccactattaatgctatcattattcttattatctggaggcagattgtggaggacttttggaggccaaacagagac

SEQ ID NO: 130894 - DNA, 362 bp, Homo sapiens
cctttagccaagaaggggctagaaattgctctaaggaggacattctgggagagctacagcctccatgagtaaattagactgagaggtggcaatgtttgcatgttcatttcccagatgtgagatgaataatttaacctgaaaggtgaaatgctcaggaaaagcaataatttaacctgaaaggtgaaatgctcaggaaaagcagatggtccagagatgccatacttctcatgcaacattgcttccattgcttgaaattggtgtctgattttttcatagaaaaaatgttatgaatattactttggaaaattgtagtgaagtcatggtcacacttgtgtgtgtggtccagttctttggggttctct

SEQ ID NO: 130895 - DNA, 442 bp, Homo sapiens
gctgtgtgctcccaagtgtacatacatgatgcacatgctaataaacttctgtttgtttttctcctgttaatctgtctttggaaagattaagctggaaaacctgaaatgagtagagaaaaagactttttgcctttcctatagggaaattataaaatatcttgagacataagaaaacaaaaatacaacatgccaaaacttacgagatgcagcaaaagcagtgctatgaggaaaatttatagctataaatgcctacattaaaaagaaagaaaaaggccaggcatggttgcttatgtctgtaatcccagcactttagaaggccaaggtgggagaattgcttgaggccagtagttcaagaccagcctgggaaacatagggagaccctgtctctacaaataataacaaaattaggtaggtgtggtggcatgcacctgtggtcccagct

SEQ ID NO: 130896 - DNA, 648 bp, Homo sapiens
gggactctttatttccctcttaccttcccacttacgccatttgtctggctgacctattcagctactctggcatgggaggagttttcaccccactcctgaggttgaagaataagaggcctggcggtgctttcctaagagggctttgctgccttcctcctccaccccaatgaagaagggctgtcaggccagtatctcctgggtacaagtcctgtatccccagcagactttccttggctagaatgatatttgggcatctgggtctcttggtttcagacaagagaccagaggaaggggctggatttgagttactgagttcactacctgctggggcaggagttctctcctttccatcctgtgaggcttttccctggaccttttttcttgtgaattcagtgggcaggtagtatcctcctgctggcctggggaatttgaggttggtggggacagagactcaggagccctgcctctatgttctaagggcagcaaggcccaggaaagttgactatgtctttcaaaccatctcacatatagaggctgaggctgggtgggcctttgctgaaagagtcctccatggccaatttatgagtcaggcatggcgggagtgagctggagagggtcccaaactagggaagagacagggttctctgt

SEQ ID NO: 130897 - DNA, 623 bp, Homo sapiens
cctttcaagatagtaatgtatttcttttaacccatccaacaattaccgaattcccattttacagatgagtacgacttacataagttaagattggacaattagtgcactatcaaacacatagttactggtagagctagaatttgaattcctgtttttaaaaattatgtatggttccttttgcacgatgacactgttttggacagtatagaatactgcagtctcattgagaaatacagcagtatctagaaatatactagggatatgtgaattggctcagcttgcatttttattgtaggaggcaattgtttgtggataagtttgatacctttgaagcttctttttaagcttgctggggcaagtctagaaagtcttcactctaaggtggatattttcaaactttatggttttagaaccttaacactctttaaaattactggggactccatagtttttgtttatgaggattttaactatggactgttcagcattttagaaattaaaactaggaacattttataacacaagactacagaagcacaacctgtacaatatcaatgtaatattatgatacaacatgtagcctctataaacaccactgtataattgtgaatgaattaaagtga

SEQ ID NO: 130898 - DNA, 440 bp, Homo sapiens
aagtttctttttctctggggtgactgtgtacatttcagggagatttctatgttacacagcctagtttttctccacaatgatggaaaactaagaaatatatcactaattcttagactacacaattaacaactcttgttgcttaattgagagacatggacaccgagattcctgatccagccccagctgcagcctctttcatttgtggctgtcaattacaggactaccaagaataatccaccaatctcctggcataccaggaaaattcctggtctagattcagacaagtggtttatagttccagctctactttgagttaatcctgtttaaatttcagttctcatattctatgattcatttgtggaacatatactgagtcattttgaaaagttttaggccaaggctaactttcttacatgcaacaaaaagttgctggaaaaata

SEQ ID NO: 130899 - DNA, 794 bp, Homo sapiens
gagatacttcctggacaactgctataaaaacaacaacaaatacttttattaattcggggagcctggtcaccaactggatgctcagaggggagatggaaccctgagcagcccatgtacatggaagatctttattgcagagatcttcaaaccagctagtgtgcatttactcctgcctctccatgcctgaaggaaggaatgaagaggtctctgctgtccatctgagccagtgactgggtgaatatgcctgcccaattctagcatgcagtattaggaagcccactgttgctgtgcacctaagcccaggttttccagtatcagctcttttagtaataaagttggcattgtagtttctagctaaaaaaaaaaaaaaaaaaaaaaaaaaaacaaaaaaaaaaaaacaaaaacaaaaaaaaaaaaaaaaaaaaaaaaaagaagaccacagagcagcgagacagagagacaagaggagaaggagcaaggaagagacggacgcaagagagagagagaaggagacacacacgcgcgggaggagcaatgcacggggcgagacggggcccacgccagggagacagaggagaacacagacacgcacggggggagtgggggagagggaacgcggggggggggggacggggagagaggcggagaggagggggcggggggagagaggggaggaggagggaggggggcggagaggagcgaagagaggaagaggagaggggaggggggcgagagagggcgggaggaggcgggggagggcggggaggggaaccggaggcgggcgagaggggagg

SEQ ID NO: 130900 - DNA, 1030 bp, Homo sapiens
tgatctagaggatcccgtatatgctgtctcaaaattgtataagtttaagaacctcacaatcaaaattcactcttcttgaatggaggaaaataatatagtggagaccagggaagttgggtatttcagatgagttttgaggcagttaataacatctagaagagtttaattgatttctcctttgaaagggaaaatggtggaataggaggttgctgacatatattttttgaataataaaccttgtattactagttaacttttgtatgcataaatttgacaaaacttaaaactatgtatttatttatttattcatttatttatttgaggggagatggaaccctgagcagcccatgtacatggaagatctttattgcagagatcttcaaaccagctagtgtgcatttactcctgcctctccatgcctgaaggaaggaatgaagaggtctctgctgtccatctgagccagtgactgggtgaatatgcctgcccaattctagcatgcagtattaggaagcccactgttgctgtgcacctaagcccaggttttccagtatcagctcttttagtaataaagttggcattgtagtttctagctaaaaaaaaaaaaaaaaaaaaaaaaaaaacaaaaaaaaaaaaacaaaaacaaaaaaaaaaaaaaaaaaaaaaaaaagaagaccacagagcagcgagacagagagacaagaggagaaggagcaaggaagagacggacgcaagagagagagagaaggagacacacacgcgcgggaggagcaatgcacggggcgagacggggcccacgccagggagacagaggagaacacagacacgcacggggggagtgggggagagggaacgcggggggggggggacggggagagaggcggagaggagggggcggggggagagaggggaggaggagggaggggggcggagaggagcgaagagaggaagaggagaggggaggggggcgagagagggcgggaggaggcgggggagggcggggaggggaaccggaggcgggcgagaggggagg

SEQ ID NO: 130901 - DNA, 219 bp, Homo sapiens
ctttatgtggtctctggagttttgaacataaagggaggtttgggagcacaaagaagagtctgaactgtttgctcatggtatagaccatttgctgaggacaacgcagaacattcagcggaagcctacgacaccactttgaccagctgtgccaaatactggggggtgaagagcaagtgtcatttttcttttttttttttttttgagacggagtctcgctct

SEQ ID NO: 130902 - DNA, 237 bp, Homo sapiens
agaaaactggctcacagtgaccactaactccacatggagtaaaacaaactagaaggctttactggagtcagttttcatcccaggtcaatttatattccatcaaaccacataaaaattgccagatcaatctgaccacagccaggaggagatgttcctgcttggagacaggcacatgtgctacttgtactcgctgctgtgctggaggcacaaatatggtcaaatatgtttgaatagtgg

SEQ ID NO: 130903 - DNA, 138 bp, Homo sapiens
tgcagggatgacaggtgtgagccaccgcggctggcccacggtcaaatcttaaagcatggtttcccagccacagcaccgtggccatttgagctggaccagtttctggagcagggccgtcctgggcactgcagggtgctg

SEQ ID NO: 130904 - DNA, 844 bp, Homo sapiens
aaagggttgaatgttctcctgactctgggtgatgtgactataaacttctttggctcttagcctcatgatgatgctgtccactctgcttttttaatctgtcatgacctctcaggcttagtgccagataatccacaaatccagccatgttttcatcttttccatagcttcgtcatgcacagcggatgttactttagcacttacttgagtgaactcatgttcagattggcaaatttcctcttcctttttctgcatgtgtcgttttgttgactcattaacactgaactcacagccaacagtggtataacttctgcctgaacgaagctcatctaacgcaagcattttctccataaggcgcatcacagccttcttgtacttaggagcactagaaagcacttaattgctatacttggaggccaatttatagagaaaaatcatcaacaaaaagcacaaaaatgtcaaaaacacagcactaaaaggaccgaggaaaggacacttgtgtacagtatgagagccaaaacaagaaggcagggtggcttcttgttggacatcagctagaaacgtatgtatcaggtagctcattttttcaccactctgtgcatgtcgatggatggccccaagaacactgcaagtgttgattttggggttacaaataaagcttagtaagtaggcaaattcacaaatacggaagctgtgaataatgaggactgactgtatttgccaagagccacatggagaggcttatttgttagtgcgctgaaccatgtggctctgatgtagatggcaaagggaagaagctagggagtgtgtcactgtgtgtgtgtgtgttggcgggagatgctgccca

SEQ ID NO: 130905 - DNA, 178 bp, Homo sapiens
tttgaacataacaatccaattccttcaacaaccatcatagaaaaatcagttaaaagcaatatgtctaattaaaataatgattttatttaatttggtcaataacaaaatgtcactctttataaatgcaatttgttctgacaaacgtcagagatagtctttgagtagtttcctacagatg

SEQ ID NO: 130906 - DNA, 470 bp, Homo sapiens
agatggagaaagtccatctcgtactaaaaacacaaaatgagcggggttgtggtggctcatgtctgtaatcccagcactttgggaggctaaggcgggcagatcacaaggtcaggagatcaagaccatcctggctgacacggtgaaaccccctctctactaaaaatacaaaaaattagccaggcgtggtggcacgtgtctgtagtcccagctacttgggaggctgaggcaggagaatcgcttgaacccgggaggcagaggttgcagtgagacaagatcatgccactgcactccagcctgggcgacagagcaagactctgtctcacttcttccaagtgagcacacaatcatttctacctacaaatgttataactaaaaattaattatcaggaactccttctcaatataacgatttaaacaaatgtaaggtgtactaatttatttgcttaacattgtttattaaatacctgtac

SEQ ID NO: 130907 - DNA, 333 bp, Homo sapiens
ggagaagaccaagcatggcacctgggaaaattctctctagaaaatggtggaagaagatccagcaaaccagaggggaagagtgctcagagtggcaggagaaccaaggcagagcagtgtcccagaggtcaccggtgtgatgctgcagagacatcaaggaagacactgtcaggaagcatggaggggacttgccctcaattccattcctccatttcccacttcccgctatcctcgttttgtagttctctcgagtgtctttggctgtcatggtaactaccagtaccacacccctctatgaaggccacactgattcattctttattgactcaggtgtgg

SEQ ID NO: 130908 - DNA, 579 bp, Homo sapiens
gtggttcagttagcttccctgttcactgactctggctagacattttgcaagtgcatgtcaagtgtgaccccaggatagcaagagggagatgggctaggggtatctctcatatatgtatatttatttatttagagacagggtctccctctgttgcccaggctgccaggctggagtgcagtggcgtgattcatgctcactgcaacctccacctcccaggctcttgaccctcgtgcctcaacctcccgagtagtcaggattacaagtgcatgccaccatgcctggctaattttgggtttgttttttttggtagagacagggtttcaccatattgcccaggctggtttcgaaatcctgggctaaagcaatctcccctcccaaagtgctgagattacaggtgtgagccactgcatccagccactgtatcttatatatttctttttttttttcctacgaggaaacaccaattttaatttaaagaaaaaaaaaaatcagaaattgtctgtaaggataacagagcaaaacaagtcctgaaaaagagctctgcatcttggtggtcatatttattgaagagctttagaa

SEQ ID NO: 130909 - DNA, 232 bp, Homo sapiens
ccatgagccacagagggcaggggcagagggacaggcagaggtgtccacactatgctctcctttgaaagtggcagtttgtgtgttttatgataaaagattctgtgtaaggtttgacttggaacactagagtatgaaagccacagcattagccagatccagaggaaaggacaggatgtcccttttccaccacctcactctgctggtgagctgctgtcttcttcagaggacacca

SEQ ID NO: 130910 - DNA, 437 bp, Homo sapiens
tctcctgcctcagcctcctgagtagctgggactataggcgtacgccaccacacccagctaatttttgtattttcagtagagacagggtttccccatgttgaccaggctggttttgaactcctgacctcaggtgatccacctgccttggcctcccaaattgctaggattacaggcatgagccaccatgcctggcctaaagaaaattttttaaaaacaagtagttttaatatagcttttcacatgaatgatgtttgaggtcttggctagggaccctagatagtggaccctgacatgaaggcaatccatttaaaagtaagaatttggcaagaataaaaaattacttgctaaggaataaaggaggcaaaattttatgtaaattcttaaacgatgtagaatcttaaactatgtagaatcacagaattttaaattatttctag

SEQ ID NO: 130911 - DNA, 500 bp, Homo sapiens
gttggctgcctctagaggatccactctccctactgtatcctatgtttgttgagaaacttatttaacttctctggccctccgtttccttcactgagcagtggagtgattgataacctccacctgtggttgctgaaggtcttgcacaagatgatatagttaaagtagctagcagtgcccacgtacggcggatgcctcacaacggtttgcagccatctctctatctgtgtctttgtctctctctcacactggttttggcttactgttagcagctagccgagataagtgtgtttatggtctttgcatgtattgtttctgtagcatactggaggattacaagaggttggggagtgagggggcggtgaggagtagacaaaggcagccaactcttccaagtttagcttagaaggaaggagcggtaaaccctagttgaatgttggactgaagcaggtttgtttttgttttgtttaaaggatagggaagatctgtgcgtgtttccagga

SEQ ID NO: 130912 - DNA, 582 bp, Homo sapiens
gttcaattctaactctgcaactagtaagcactgtgaccttgctataccctccatatagccatatttttacaagatttgggggtgtcaggaattaaatatggctatatgttttatatacctatatatttctctctccagtatatagaataagacataatgccacttaaaagattgagaaacttaaatgtttatctgaggtgaaactgctaaggataggagctacctttactaaacaagtcttcttacttctaccccagtgctttttccattattagtcttatggctttcagcagaatcaccttgggttcttgttaaaaatgtagattcaggccgggtgcagtggctcacgcctgtaatcccagcagcctgtaatcccagctactcgggaggctgaggcaggagaattgcttgaacctgggaggcggaggttgcggtgagccaagatcacgccattgcactccagcctgggcaacaagagtgaaactctgtctcaggaaaaaaaaaaaaaaaaagtagattctgaggctgagtgcaggggctcacgcctgtaaccccagcactttgggaggctgaggtgggagg

SEQ ID NO: 130913 - DNA, 310 bp, Homo sapiens
aagctaaagaaaaagcaaagaaaattcaccccgccacacagagaaatgtgtatatttaattattcccaatgtgtttttgctctgcttctctttgtgttatgagaaacaggaagaattttgtctaggtaggaattaagtcagtttcatttcctgactgcaaatgatgtccgagagatttggcagaaacacagtccaggaatttttgtctcccgttgtctttcaacttagataacatagccctggttagaaggggaggtgtgggaagcaggaaggcaggtcacatatcaatgttgcggacctactttgctgg

SEQ ID NO: 130914 - DNA, 945 bp, Homo sapiens
ggaaaataaaactgcaggctgaagacttaagtcttagtaactaataatactcatcgtaaggagataggagaaattgaactattaaaggaaacaaggaacagctggaaatcaaagaagataatctgtgaactgaaaataactttccagagatgtttttcatttttctaaaaattgactggatgacgaagctttttaaaatacgttaaatttggtcatgtctgtaatactcttttttagaactggtggaaaaatataactaacatttaaatatttccttgctatttgctgtacaaagcaagaaaatcatctcaaaatttttatcaagaaggaagtctttgttgttactctgtatgctacgttaaacagctctggatctgacacgtcaatttatatatcaaaaatatcttctatttgcttctttttaatatactcccagatttgtcagagatcacagaagcacatttcctctaattcagctctaggagcaatgagtgtagtacgggtgacagcaggtcattcgtttcaggagaggattcgaaagagaggaaaaatctcctggaatttcaaagaaatttcttttgtataatagcttctgtaaaaagatcttctctgtcatctagcacagtgtctacagatttggggccaatggtgtttgtattagtgttttcttcaggaagactacctggttttggagaaactaacttgctagtgattaggtcttttctgttttctagctccccaaagtcagtgaggaggctctctccctgctgctgtgatcactgggccatgcatgcttagtcttgtgaacttgtcatgtgagaacacatgccatgtcccttccccactggtttatgcccctgtggccctgaagtcttctttaaaaagagaaacagcctgacagtccagtagaaaaaggagcaaagcagatttcaagagaagaaattg

SEQ ID NO: 130915 - DNA, 687 bp, Homo sapiens
gacttacactgcctggcatatctagacactgtagatattagcatagggattaacagtgtaggctttggagtcaagttacttggtttgaatcgtggctccgttgcacactggctttgtgatcacaggcaagttattcaacctctctgtgccttactttcctcatgtttaaagtagtcataatcatacttgcatcatggtgttattcagaagatcaactgagagatgtatgtaaagtatttagcataggacttagaacctagttaatgctcaattaatatgttatttttggccaggtgtggtggcttacgcctataatcccagcactttgggagactgaggtgggcggatcccttgaggctaggagttggagaccagcctggccaacatgacgaaaccccgcctctaccaaaaatacaaaaattagccagccatggtggtgcacacttgtagtcccagctactcgggaggctgaggcaggagaatcgcttgaactcgggaggcagaggttgcagtgagccgagattgtgccactgtactccagcctgggcaacagagtgagactctgtttaaaaaaaaaaaaagatatatatatatattaacatgcttcttattgaggtataatttacatactgttatggactgaattgtgttccctccaaaatacatatgttgaagtcctaaacccca

SEQ ID NO: 130916 - DNA, 433 bp, Homo sapiens
ttcacaagcatctcaaaacaaaaactgacctcggcatctcctcctgttcaccttgtggctacttccttaccccttcctcagggaatgacacctttgctatcagctacccaagtcagaaaccagagtcaacctaaaatccctccattgccaaccactgcagccacattgcaagtccttgggatcagataataacacaatctagaatccaccttctctcccctctactgcctcccctctactccacctcctcctgcctctactggggctccagtactaacatctttcaacccagacctctacaactgcctccaaattcatctctctgcctctagcatcctgtggcataaagccaacgtttctcaaattagagtccaagatatgtttctttaaattttgaactttaattttaatgatgttttaaaatatattttac

SEQ ID NO: 130917 - DNA, 513 bp, Homo sapiens
caattctgatggccaacaatttcaagacatcacttagaagaataatgtagagatggccagagtcccagagttggccaaagactggacaagtggctaacatccttttctacctatctgcctgtctcatcagggctctcattccagacaacctccaaggggctgctgaatgtaaatttctaaagcacagctctgaaatgttggattaaagatgtttctcagtgacccccaaaacatgagtttcacagcatgtaacccttcatagtctggccaaaggcaccttttgagcctcctatgcgggattctccttctgtgccacttgttgagcctaaacaccattttttcacttcactgtacactgtacatatactggttcctcttactgagatggcttttccctcatgtacctgataggtgcttagttttcctctgagatcccctcaagtgtcaccttctcttgacaccttcctgcagtgcttgtgcaggatgcagcaaatagagtataaggatgtgggc

SEQ ID NO: 130918 - DNA, 274 bp, Homo sapiens
attatccatcacatactatatttctagatgatgccatgctttctgtctctccttccagctttcatatctgctgccccatgtgccaaaaactcactcacactccctccttctcttggcccagcaaactcttactcttcaagtttaaaaacacttcctcggctgggcgcggtggctcctgcctgtaatcccagcactctgggaggctgaggcgggcggatcacgaggtcaggagtttgagaccagcctgaccaacatggtgaaaccctgtctctac

SEQ ID NO: 130919 - DNA, 397 bp, Homo sapiens
catcggaccttccagattcccaaaaaattaagtttaatacggacaggtattggttgtaacatgaaaacattttaagagtataaacagaggatgtgatacctttctggtcttgaagaaattactgaaaacgagctcattcaatacttagttgattaccaaactcttatctccatctcagtataaaaactataaattcaggccgggcacggtggctcacgcctgtaatctcagcactttgcggggacgaggcgggcggatcacgaggccaggagatcaagactatcctggctaacaccgtgaaaccccgtctctactaaaaatacaaaaaattagccgggcgtggtggcgggcgcctgtagtcccagctgttcgggaggctgaagcaggagaatggtgt

SEQ ID NO: 130920 - DNA, 210 bp, Homo sapiens
agataaattccacagggcttctgtggtgtctctggaaaattgaggcattttaaggcaaacaagggccccccacctgcctctccagcctccgcaaatgatattgcaattcatatattctgtgttcttgccctattgagcaatgccctgcaccatttaacatgccataatttctttgattatccttatattctatttcctttccctggaatg

SEQ ID NO: 130921 - DNA, 785 bp, Homo sapiens
gcctgttgcaagaaaatctctattaatacctgtaaattggatggggaaatagtcaagcaagttctttaccttcatcaagaaaagctagtttctggtgacctttctttatgaggttttaatcaccccagagttttatccctctcagagtcagtggtcggctcttgtatcccatgagtaaatgcaaatgtttcctccatttgaaagcaaaaccagtaagaccccttacttataaagtgagttaaaacaaaaagaaagaatataaaaactaaaggaaggtagtaagtaaagcatttagctttctgaaacaattcaaatggggataggaagttggttttaaatggcttaaaggggattagggttttaaagttggataaagagtttggtgcttaggtttaggcatggcattgcttttaaaagattacttccatatttgacaatgattctaactggagattataaagtaaatagtcaattttaagacaccacgggaaacaagagggtttcttttttgttgttgtttgtttatacaaaatggtagcctagagttaacaggctgaatcctgaagccctcatttcataatactacagaggatctatcaccagagagaatctagcagaggttgtttaatgcacttaattgagattatctgagcttttggtttaaattactttggaaaaagtcttaggtgcaaacagcgtccttgaaaggtaaacatacttacctctaagaaaaaaaggttcaatttaagttctttaaaattcttcatacaggttagtagcaccaa

SEQ ID NO: 130922 - DNA, 418 bp, Homo sapiens
tcagcaccctcagccatcaactccagagaagtccatgaaggtcccaaatctagaaccaatgaagaaacattaaggcacaagatctgattcataacaccatacagagctaaaagcatgggagaaaacagctgccatgagcacaaggagcagaggaaggttcatgggacacaaggaggcacagaatagaggcccttgaggggagagagttccctccactgagggaagggaagccagtgaggacagcagacatgccggggcctcagcctgggctccacacaccatctcagagcccagggcatccctgtccttcattaacagcaaaccatggtaagaacagagttttccagaactctgttccagtactgggtgctgatatgaggggctctgtctgacagatgtacgttcaaacaccaacact

SEQ ID NO: 130923 - DNA, 206 bp, Homo sapiens
ttacttatacttgatgtggctgactaaaattatgatataccagataaaccagattctgaatcccagtccaaccacttctaactatatgacattagacaagtaactcaacctagctgaggcttgatgacctaatttgtaaagtgggaaaaacaatcaaaacctatatctgatggctattagaatgtttaaatgagataatatataat

SEQ ID NO: 130924 - DNA, 226 bp, Homo sapiens
gcgttttgaagattgaaggtggcaagctgtgtgctcccagggtgagttcccagggagagcaggggcccttgctatgggtcagggtgtcggatggcatcctggagatgcgggtggaggtaacatatgtgtcctagaaacaggaaaccctgacagctgcagcccctagactgagcccagcctaaaggagaagactgtcctccctggaagagcccatgctgtccaggcc

SEQ ID NO: 130925 - DNA, 445 bp, Homo sapiens
ttgctttttttttctcaggcacatcaaaggagtccgctttttcctccttcattgtgaatggcagcaaaagaagaggaaatctggaaatataataatttggtttgcctgaacactgaaatggaacttgagaattccttgggctgtcagataatttttgttaaagattttttttaaaaggagtagttaatcttctaataaatgcactaatcatcagagaaaacaaggctcaagataaaaatatttgcccttgatgagttccctccattagaatttataacacagttgaagaggcttacatgtgttattttgattttaatagaaagtctaattccaaacataatttcaatcagcatatgtgaatgtctcttcctatctttatctataaaaatgattagaatatacagcaacacatagaacattccacacccatgttcagctctgtttt

SEQ ID NO: 130926 - DNA, 305 bp, Homo sapiens
gggaatatccccagaagactggcctagggattaactgtcatggtcaatagaaagcacacatcttagaaggatcctcactcagcacatgttgagtgtttaatgaaggttgcgcgttgtcactgttatttaagtattctagaatgaccatgagggagaggaagcttgtgggacagaggctgaaaggaggggttggggagaaggctgaggatggagtaagacagtattagttcctttcttcctcctctctgtgtccttgagaactgaatgccatggtggtgtccagaggccaggacaggagacagggg

SEQ ID NO: 130927 - DNA, 422 bp, Homo sapiens
gaaaagagggaggtggactgaagggaagaaatatggaagggggaaactacagattcagggacttagtttattacaatggacctttttgggatcttataaagcatatatatttatcaggtaattatagaaatttgaacactgatgaacatctgattagttattgttggtttttaaatatatgatattgtattatggttacatttaaaagagtccttatttatcatttgtttgtttgtttgttgagacatagtcttgcactgttgcccaggctagagtgcagtggcacaatctcggctcactgcaacctccgccctccaggttcaagcaattctcatgtctcagcctcctgagtagctgggactgtgggggtgcgccaacatgcctggctaatttttgtatttttaggagagtcgaggtttcac

SEQ ID NO: 130928 - DNA, 777 bp, Homo sapiens
gggctcggtggctgacgtctgtgatcccaccattttaggaggccgagatgggagtgtacctgggcgtcaggagtttgagatctgcgtgagcaaaatagcgagaccccatctctaccaagacaacaattaaattaaattaaaacattagtccagcatgatagcgcttacactttaggagacactcttttttttaaatatattaaaaaaaaaaaccagtacagtaacaacagcctgttatcccatcttcccatcacacaaagagctctactgctagctaataagataatttggtgagcagataaatgcacattttttcccacaaaatgtatgcagtatatggcattttacaacttcgcgttgttttaatcaatttcccttatttaaaaagtttacaaaagtgattttaatgtctttattatttcttctcctgaattctgcctgctacagtgttaaccaattccctaggaatttattaatcaaccagattttttaaataattcatcttttccctgcggattaagtaccacctttaacattatacatactcggaactattaccaaaattctattctgtctataatttaatcaaggtggtttgccaaagggaatctatgttcacggttaaaagcttagaaaattcacattaggaaaaattttaaaagcagtaatttatatctgcttaatattccatcataagaattttctaggtccactttcacagtatttctagtacttagcaataatgtgctaattttcttttcctaatttaaaggagaa

SEQ ID NO: 130929 - DNA, 707 bp, Homo sapiens
agccgcctcagcctcccaaagtgctaggattacaggcatgagccactgcgcccagccagtccacacaactttttaaaaaaatttcctgacagcagtaacttcatggtccatacagcttaagaagtgtttatgctttaacaactttgtagctgtttgaaaaaataatacacaaacattgaaagagagcatgtctttatttcattctaactatacttactaatggaatatgtgcctgttggaattgcacaacttctcaaaatttggtatcagaatggacacctacacactcatttcctgttacgtattggttttcttatggtatttgcttttgtcatagcaactatttaaacccagctttgtgaaaatatgatgttatctatcaaaaggattgtagggggaactaatgttgaagcagtgtacaattttgagttagtagtgcacacattctccaacagatattgctgtttttcttcaaagagttaaaataaccctcgttgtgaccctctgagttcaccacagccacccacagtgcctgagagcacagtttaggaactgtggctttagagacttttgaaaaactatgaaatctcttatatgtttctatgttaatgtctacaagttttcttcatatattcagattcatgcaaagtatgatttccagcaaattataaatattggcatttaaaataaaactgttacttcgttta

SEQ ID NO: 130930 - DNA, 315 bp, Homo sapiens
caagaccgtgcctcaaaaaataaaaataataaaataaaaccaaggaggtatgaagaggtagggagacgtgactgttaaccaatattgcaggaaagggttaacattcaaacagtctagaaaatcactttggttcaagttttatctttgacagttctgcttaacgtagcaatattgtggctggaaagatttggagttagaaaaccttgtacgcttttttcaaacaaaggtgacctattcataaataggagcattaacagctgacaacgttgcacataaaagattcctggccggcacggtagctcatgcctgtgagca

SEQ ID NO: 130931 - DNA, 3543 bp, Homo sapiens
  misc_feature (1596)..(1596): n is a, c, g, or t
  misc_feature (1830)..(1830): n is a, c, g, or t
acgcgggagattcgattggaaggctgccggcgtgctactgagttcggccggtccgagtcactgtgcgtcgcctgggcgcgttcctggtcttctcccccaggtcttgctctgtcacccaggctggagtgccatggcatcatcatagctcactatggccttgatcctcctgccttagcctcccaagcagctggtattacagaccacggtgtgaacacatgaacagaagacgaaaatttcttctagcctcagtacttgctctccagaattcaagttttatatatccatcatgtcagaagtgcttctctaggataatcctggtctccaaaaggtctaattgtccaaaatgtggctctactggtgaatctggaaatgccaattacagatacaaactttccttaaaagttgcagaatcaaacaaattgtttgttattactgtatttggaagttgcttagatacattttttggtcttactgccactggtttgcacaggtacattcaggatcctaataaaattccagaaacactggacaatgatacaactcagaatctattaactaaagcagttgaaacttgctttgttggacaaagctttatttttggagtgacgaattttgaaaaccaacctggacaaggttcagatgccagtaacttcttacagcaatgctctgaccacaaaagaaaagccgaaagcactagtggcttgccagattgttctaccagacccaggtattgcaggctttactgtcattgactacttccatcaacttttgcagacttttaatttcaggaaacttcagtgtgactctcaggcacctaacaatcacttacttgctttagatcactcaaatagtgatctcagcagcatatatacttctgacagcacttctgattttttcaagtcctgcagcaaggatactttttcaaaattctggcagccatcacttgaattcacttgcattgtttcacaactaacagataatgatgatttttcagcttcagaacaaagtaaggcctttggtactcttcagcagaacagaaagtccatctccattgcagaggccactggttccagtagctgccatgatcccattcaggattcatggagccttgtttcatatatggataaaaagagtacagcagaaaagttgggtaaagaacttggcttacaagctaaggagctgagtgcagttcacagcagtcatcatgaaattggagttaatgactctaatttattctctttggaaatgcgagagccccttgagtcaagtaatacaaaatccttccacagtgcagtggaaattaaaaataggtcccagcatgagctaccatgttttcagcatcatggtatagataccccaactagccttcagaagagatctgcatgttgtccaccttcgttactcagacttgaagagacagccagcagttcccaggatggtgaccctcaaatttgggatgatctgccattctctgaaagcctgaacaagtttctggcagttcttgaaagtgagattgctgtaacccaggcagatgtcagtagtaggaaacatcatgtagataatgacattgataaatttcatgcagaccacagcagnttatctgtgactccccagagaactactggagccctgcatacaccacctatagctttaagatcatcacaagtaatagtcaaagcaaactgtagcaaagatgacttccttttcaactgtaaaggaaatctaagtcctagtgttgaaaaggagtcacaaccagataacaaagtagaggctgtctctgtaaatcataatggaagagatatgtcagaatattttttaccgaatccttanctgtcagctctgtcttcatcttcaaaagatttagaaacaatagttactcttaagaagactatcagaatctcaccacacagggagagtgaccattctagtctaaataacaaatatttgaatggatgtggagaaatatcagtttcagaaatgaatgaaaagttgacaactctgtgttataggaagtataatgatgtctctgatctttgcaaattagaaaataaacaatattgtaggtggtccaagaaccaagatgacagttttacaatttgcaggaaacttacatatcctttagaaactctttgcaatagtccaaatagaagtacaaatacattgaaagaaatgccttggggacatatcaataacaacgtaacacagagctattctattggttatgaaggtagctatgatgcctctgctgatctctttgatgatattgctaaagaaatggacattgcaactgagattaccaaaaaatcacaggatattttgttaaaatggggaacatctttggcagaaagtcacccttcagagtctgatttttcactgagatcactttctgaagacttcatccagccttcacaaaaattatccttgcaaagcctatctgactctaggcattcaagaacatgctctccaacacctcattttcaatcagattcagaatataattttgaaaatagtcaagactttgttccatgttcacagtcaactccaatttcagggttccaccaaacaagaattcatgggataaacagagctttcaaaaaacctgtattttattcagatcttgatggtaactatgaaaaaataaggattttccctgaaaatgacaaacagcaagccagcccaagctgtccaaaaaatataaaaacacctagccagaaaatcagaagccctattgtatctggtgtttcacaaccagacgttttcaatcactacccttttgctgagtgccatgaaactgatagtgatgaatgggtccctcctaccacacaaaaaatatttccttcagatatgcttggattccaaggcataggtctagggaaatgccttgctgcctatcatttccctgatcaacaagagttaccaagaaagaaactgaaacatattagacaaggaaccaataaaggtttaattaagaagaaattaaagaatatgcttgcagcagttgttacgaaaaagaaaactcataaatataactgtaaaagttcaggctggatttccaaatgtccagacattcaagtcttagcagcacctcagctgcaccctattcttggacctgattcttgttcagaagtcaaatgttgccttccattttcagaaaaaggcccaccttcagtgtgtgaaactcgaagtgcttggtcacctgaattgttttcataaaaagtcacctgaacccaattcctgaacttttaaatctgtttggaaatgtttgccttcaggggtacggaaagcattctttacattttgaacacttggagagaagcaaattgaaaacaggactctgctgggagctactgtgccttttaaaatataaagccattgttttccccagggttttatctagaatactatgattaggtagttgagcactttatcttatactgtttattgtactttaataatattgttaagattgtttttgaaagtattaatgtttgttaaaatcacatatacatccagaaataaagactttgcaaaccaaaaaaaaat

SEQ ID NO: 130932 - DNA, 3022 bp, Homo sapiens
  misc_feature (1596)..(1596): n is a, c, g, or t
  misc_feature (1830)..(1830): n is a, c, g, or t
acgcgggagattcgattggaaggctgccggcgtgctactgagttcggccggtccgagtcactgtgcgtcgcctgggcgcgttcctggtcttctcccccaggtcttgctctgtcacccaggctggagtgccatggcatcatcatagctcactatggccttgatcctcctgccttagcctcccaagcagctggtattacagaccacggtgtgaacacatgaacagaagacgaaaatttcttctagcctcagtacttgctctccagaattcaagttttatatatccatcatgtcagaagtgcttctctaggataatcctggtctccaaaaggtctaattgtccaaaatgtggctctactggtgaatctggaaatgccaattacagatacaaactttccttaaaagttgcagaatcaaacaaattgtttgttattactgtatttggaagttgcttagatacattttttggtcttactgccactggtttgcacaggtacattcaggatcctaataaaattccagaaacactggacaatgatacaactcagaatctattaactaaagcagttgaaacttgctttgttggacaaagctttatttttggagtgacgaattttgaaaaccaacctggacaaggttcagatgccagtaacttcttacagcaatgctctgaccacaaaagaaaagccgaaagcactagtggcttgccagattgttctaccagacccaggtattgcaggctttactgtcattgactacttccatcaacttttgcagacttttaatttcaggaaacttcagtgtgactctcaggcacctaacaatcacttacttgctttagatcactcaaatagtgatctcagcagcatatatacttctgacagcacttctgattttttcaagtcctgcagcaaggatactttttcaaaattctggcagccatcacttgaattcacttgcattgtttcacaactaacagataatgatgatttttcagcttcagaacaaagtaaggcctttggtactcttcagcagaacagaaagtccatctccattgcagaggccactggttccagtagctgccatgatcccattcaggattcatggagccttgtttcatatatggataaaaagagtacagcagaaaagttgggtaaagaacttggcttacaagctaaggagctgagtgcagttcacagcagtcatcatgaaattggagttaatgactctaatttattctctttggaaatgcgagagccccttgagtcaagtaatacaaaatccttccacagtgcagtggaaattaaaaataggtcccagcatgagctaccatgttttcagcatcatggtatagataccccaactagccttcagaagagatctgcatgttgtccaccttcgttactcagacttgaagagacagccagcagttcccaggatggtgaccctcaaatttgggatgatctgccattctctgaaagcctgaacaagtttctggcagttcttgaaagtgagattgctgtaacccaggcagatgtcagtagtaggaaacatcatgtagataatgacattgataaatttcatgcagaccacagcagnttatctgtgactccccagagaactactggagccctgcatacaccacctatagctttaagatcatcacaagtaatagtcaaagcaaactgtagcaaagatgacttccttttcaactgtaaaggaaatctaagtcctagtgttgaaaaggagtcacaaccagataacaaagtagaggctgtctctgtaaatcataatggaagagatatgtcagaatattttttaccgaatccttanctgtcagctctgtcttcatcttcaaaagatttagaaacaatagttactcttaagaagactatcagaatctcaccacacagggagagtgaccattctagtctaaataacaaatatttgaatggatgtggagaaatatcagtttcagaaatgaatgaaaagttgacaactctgtgttataggaagtataatgatgtctctgatctttgcaaattagaaaataaacaatattgtaggtggtccaagaaccaagatgacagttttacaatttgcaggaaacttacatatcctttagaaactctttgcaatagtccaaatagaagtacaaatacattgaaagaaatgccttggggacatatcaataacaacgtaacacagagctattctattggttatgaaggtagctatgatgcctctgctgatctctttgatgatattgctaaagaaatggacattgcaactgagattaccaaaaaatcacaggatattttgttaaaatggggaacatctttggcagaaagtcacccttcagagtctgatttttcactgagatcactttctgaagacttcatccagccttcacaaaaattatccttgcaaagcctatctgactctaggcattcaagaacatgctctccaacacctcattttcaatccgaaaaagaaaactcataaatataactgtaaaagttcaggctggatttccaaatgtccagacattcaagtcttagcagcacctcagctgcaccctattcttggacctgattcttgttcagaagtcaaatgttgccttccattttcagaaaaaggcccaccttcagtgtgtgaaactcgaagtgcttggtcacctgaattgttttcataaaaagtcacctgaacccaattcctgaacttttaaatctgtttggaaatgtttgccttcaggggtacggaaagcattctttacattttgaacacttggagagaagcaaattgaaaacaggactctgctgggagctactgtgccttttaaaatataaagccattgttttccccagggttttatctagaatactatgattaggtagttgagcactttatcttatactgtttattgtactttaataatattgttaagattgtttttgaaagtattaatgtttgttaaaatcacatatacatccagaaataaagactttgcaaaccaaaaaaaaat

SEQ ID NO: 130933 - DNA, 780 bp, Homo sapiens
  misc_feature (672)..(672): n is a, c, g, or t
  misc_feature (688)..(688): n is a, c, g, or t
  misc_feature (697)..(697): n is a, c, g, or t
  misc_feature (719)..(719): n is a, c, g, or t
  misc_feature (758)..(758): n is a, c, g, or t
acgcgggagattcgattggaaggctgccggcgtgctactgagttcggccggtccgagtcactgtgcgtcgcctgggcgcgttcctggtcttctcccccaggtcttgctctgtcacccaggctggagtgccatggcatcatcatagctcactatggccttgatcctcctgccttagcctcccaagcagctggtattacagaccacggtgtgaacacatgaacagaagacgaaaatttcttctagcctcagtacttgctctccagaattcaagttttatatatccatcatgtcagaagtgcttctctaggataatcctggtctccaaaagttgctctttatttgcttctgaatcttgctgaggatactcgtaccgaactgaaaatgaggaacaagaacatagttcacatgttggtgaaagcccttgatcgggacaattttgagctgctaattttagttgtgtcattcttgaagaaactcagcatttttatggagaataaaaatgatatggtggaaatggatattgttgaaaaactggtgagaatgataccttgttgagcatgaagacctgctgaatatcaccctccgacttttactaaacctatcctttgacacaggactgaaggaataagatggtacaagttggactgcttcccaagctcactgcactcctanggcaatgacaactacnaacaaatancaatgtgtgttcttttaccacntaagcatgggatgaacgctttaaatcaatgtttggcatncactgactgtttaccccagtta

SEQ ID NO: 130934 - DNA, 396 bp, Homo sapiens
cctgagccagacacctcagtaggtgccagcagccctccatggatgaggagggagctgttgcaccttgatatgtatttttgtcatctggatctgggctctacagtatggtggccactggctacatgtggctgttaagcacttgaaatggaactagtccaaactgcgatgggttgtaaatatgcagtgcacactgaatttcaaagacttggtatgataaaaagattgtaaaatctcaatatttttaaattggttatatgatgaaatattttggatataccaagttaaatagaagaaattatttcattaatttctcttgtttctctacttattttaaagtgactgccagaaaacttaaaattgggtatgtgtagaccttggtctagatgctataccctg

SEQ ID NO: 130935 - DNA, 831 bp, Homo sapiens
ctattattttgtctgctggcttttctcatttctatagaagcagcttgtgcaatgtaaattctctagcattaaatacttttacaatcaaagtcttagtgcaacagaaattcctttggcatcaacctatgtctacttatttccagcacaacttgatagtacatcagaatgtgaactgaatattggaatgatatttgatatgtgtatcacgccttcattaatttattgctttacatatttcatgagaacctatgtgtccagcacagtggcattgtaggcactggacatacacagttctagatggagtttctgccttgggaggtgatatgaggaaaatagtcattgagactaaaaatatttactgagattcatacttgtcatgcattgagctaggttcagagaatacagtggtgaacagacaggttccctatcttgatgatgcttgcagacattgttcattcaagctgctataacaaaataccataaactgggtagcttgtaaacaaaaaacatttatttcttatagttctggaagccgttaagtccaagatcagggtgctggcagatttagtgtctggagaaggcttgctttctaatagatgacaacttctttgtcctcccctggtgcaaggggccaaccagctctctgatgcctctttgataagggaattaatctcttataaggctcttccttcatgacctaatcacctcctaaccccacctcttaacactattgcattgaggactaggtacaacatgtttgggggaaacacaaacattcagaccatagcagatatgtagactaatactatttcagcatattgcaactattag

SEQ ID NO: 130936 - DNA, 447 bp, Homo sapiens
gccagtgattaaaactacagtgatcataaaaatgcagggatgtaagccacagggaatgttgaaagcagtgattcctcagcctcaactagatgctcacgaactttacgttcacatgtgaaacagacgcatcaagatgaagaccacgtggaacactgaaaatatatcccagaagactgtgtctaaaaaatgaagggtaattatcaatgtcatcattagctcactgggggtaaggtccccctgtaatatgtccgtctgtcgttcaacttttgcacattcatttaacaatgcccagcaaacactgagggctgtttcaggtaaacacagctgataaactgctcctgccctcaagcggccagcattctttagaaggcattttcagggattattattataatcaacgaaagaggctacaaatattgacaatggtccataatttagaattagatt

SEQ ID NO: 130937 - DNA, 669 bp, Homo sapiens
gtccataattcatccctaccaagtcctatccaattcatggtgctcatgggttcccactcctgagtgccacaaaagactaccctcttggggctcaatgaaggcttgaaaataacactgctccaagagtatctgcctttctgaatctcagccccagcttgagatgagcattgggcagttccaagttactgccctgaggactctaacctggggaaagtccatgttagccaggccctcaaggttctgggccagccatttaccccaaatcctgacaccttctgagactggagaagtctggctgatggtctgcagcctgtctgcattgaccctactagtccagaagtgatatcgggccatacacataggactcctcatcaaagtgggatttgggattggaacagagctctgggcttttagtctgccttggctctgaatcacttgaacttaaactgatcattctttccctttactccttcagaggttttctaagagttctgagagggaaagtaaaatgctcttcactttaaattgtaaaatcatgcacttaggaaggccgaggtgggaggatcacttgaactcaggatttcgagaccagcctgggcaacatggcgaaaccccatctctacaaaaaatagcccagtgtggtggcacacgcctgtagtcccagctact

SEQ ID NO: 130938 - DNA, 697 bp, Homo sapiens
tagctgagactacaggggcatgccaccacgcccagctaatttttgtatttttagtagagatggggtttcaccatgttggccaggatggtctcgatctcttgacctcgtgatctgcccacttcagccacccaaagtgctgggattacaggcgtgagccaccgcacccagtttaaaattcatttttctatatacacagaaaaccaaggatcatcagccatggcattaatcagaagcttggaaagaaaaggctaagatggaaagaataactgtcacagggagaatctagggaatagagaagcatctaattattttttttaaaatgtattctcagaatttgaaaaatattgcatccataaagtaagaacaggaaactataataaaggaacatcagaaaacaagttaggctcttagaaactaaaaatattactgcaggaaattttaaaaattcaatataagcattggaagtagaagtccaggtagtctgtcccaggacatagaccaggaagataaaaagagaatatagggaaggagaagataagatataggggactaggtcaagatgtgactagtggaagttctaaaaagaagggagtctttggattgaaggggctcactaagtgccaggaaagttgaatagagaaaaaaattcaaacaccacacatagcacatcatggaaaaatttcagaacaccagagat

SEQ ID NO: 130939 - DNA, 510 bp, Homo sapiens
caagctctgcctcccaggttcacgccattctcctgcctcagcctcttgagtagctgggaccacaggtgcccgccaccacaccctgctaattttttgtatttttagtagagacagggtttcagcgtgttagccatgatggtctcaatctcctgacctcgtgatccgcccgcctcggcctcccaaagtgctgggattacaggcgtgagcgaccgtgcccggcctcttttgaagtattttcagaagatgatctcgagtggtccattctcctttgcttcacttctcttgtgaaattctgctcccccctgcacacaggaaattgttactgctgccccgcccgcagcacagaggtggtactgagcggtcacactttgcactggaatgtcagacttctcagtcaaggggctgggaggcaggcagcggaaggtcctgctgatgagtagcaccctacagtgctctttctttctatgcaattcctgtctgatcaagggtccttcagacaaaggattccat

SEQ ID NO: 130940 - DNA, 282 bp, Homo sapiens
atccacctgcctcggcctcccaaagtgctgggattacaggcgtgagccaccgagcccagcctatttttaaattttaatccatttatttatttatttattgaccaggttatgagtctgtataactttttgtatttttgatagagacggggttttgccaggttgccaaggctggtctcaaactcctgggctcaagcaatctacctgccttggcctcgcaaagagttggagtaacaggcatgagccactgcacctggccaagcagtatctttctaactgatagcc

SEQ ID NO: 130941 - DNA, 234 bp, Homo sapiens
gaagtcttccctgaccattccctgatcccacaacagccaatccagtgggctcaatgaatgcttgttaaatgaatgctgtggaaacaccaggatgagcatagattccctgtaatccagactgaacctatatttcagtcttttctcccaataaagacttagatacttgtgggccgtggccacattgactgaaataccacgaacccctgggttcctcacctaggatgcgggagtcaa

SEQ ID NO: 130942 - DNA, 315 bp, Homo sapiens
tatattggctgatagatacttaatacttaaactaagtattcacatggatatattttagcacccgtctaaattgtaaacaacatgaaggaaataactgtatttttataaatctttgaaccttttcaccatctaacacgctgccttgtagaaagcagaaatatgtattgattggttgattcataaaaggattacattatatgaaaacagagtaggcaaacttttgaggctgaatttgatatccacatccgagaaaatgccaaatataaataactcgtaaaatcatgtatttgggatagttcctaatttcaaagagtt

SEQ ID NO: 130943 - DNA, 165 bp, Homo sapiens
aatccattatatatggaatatcttggcctggggatagtgaatgaatattaggccggaggtcagccggctggcaagacagtgcaggtttgtgaaatatttgttagggccagtggcagcactcgcttgtgccgggatttaaaaggtaaacaaagcagctgaggaaaa

SEQ ID NO: 130944 - DNA, 349 bp, Homo sapiens
aagtaacagggattacaggtgcatgctaccacatctggctgatttttgtatttttagtagagatggggtttcaccatgttagctaggctagtcttgaactcctgacctcaagcgatctgcccacctcggcctcccaaagtgctgggattacaggtgtgagccaccgtgcctggccctttttgctgttcttaaacacaccaggatgctcccaccatggggcctttgccctggttgtttccttgggctggaatattcttctccagaagtcagcatggctcactgtcttcccaggtcacctctcagtggggccttcttgccaccttgtttaaaactgcacccaccatcccac

SEQ ID NO: 130945 - DNA, 178 bp, Homo sapiens
gttcaactcacctggcagccactcccagagcccctggaactctggcccaaggctctctgactccttcccagatcttctcggcttagcagctgaagactgacactgcccgatggcctcagaagccccctagaccatcacggatgccgagcttcgggtaactctcacagtggaaggtaag

SEQ ID NO: 130946 - DNA, 358 bp, Homo sapiens
  misc_feature (23)..(23): n is a, c, g, or t
tctacaggatctagtgacttctntctctggtaccttattgaacccctgacgtggtgatgacgacttttattttctgccaccttcaccgggcatccttttcatgcaaactgttgtgtgctggagcagctgtgctcatgtcttcccaatgccgtgtgcggtgacacaagctgtggtgagggtattcaggccacagaaacctgcaaatgctgaaaatcagaaattcaggctgttgagccattcacctgcacaccactgagtgcagagcagcccacctggcccagggctggcgtcccagaggaggagtggaggagggtccgtggcacccgtcagtggcacctatcccagaggaggagtgaag

SEQ ID NO: 130947 - DNA, 1698 bp, Homo sapiens
agacccccaaaagaggctgcagattcttagtggacagctctcatatcccctccagggaaaatgatgaaaaatgtcttcagaaaaatagctttatgaaggcaagaggactttttgcacctgcaagacatgtctgaaagctcctcaggtcaaaacacaagtagtcaagagatttgtccatctaattcatcatactactctgatccaagtgagacccacactgggtcagctccatcaaggagaagaacattccacccacgtttggattctggaatatcatccttgcttccatcagattcttgtaagtacctcacttggcacaaggtagacatgacgttcaaggaagtcaactgcgttgcccaagagtaagagaaggaatctctgaagaagagcaacttttcagacaggtagagtgtgccttgctcccaaggaaaagagttcttgaaaaaaacaaatgggaaacatggctacaagaaaactgggaagactgcaagaatttgaacatttcatttcagggtttgggggatccttaccaagttgaaaattttaacagaattcttagaagactaattcgagttgaaaccctctggttagtggataattcactggtggacttaagtgccataagattgccaaggcaaaaacatgctaactgacaagaaaatcatgggttttatacaaggataacaagtgctgggttgcttagctatgaggaaggctaggctcactgcataccagaagatgtacagcgttggagaattcagggatttttatcaacaatcaaactatatttgtggaaattttgtgcataagtgccaaagatggctgacatcggaccacattctatttaactcaactgaatgacaccaagctctcatcctaaaacttatagttacatccacccttctgaaatatttaattattctccaatacactggaggtaataggtataaaaagaatgagcatgtgcaacttagtatctcatatctaattttgtgtcccaagttcattcttcccctgaatgtcccatgtctaccaggtgcaggattatctggatgggtcagttcaaaacaatttcagggaataaattgtgtaggggactcaattttctgagacagaaacataatgtgaataactcctttgttagaaaataatttcagtgacagaaagcctttcagttcataaagaaaacttacatatcaacaagcctagctcctcactagtcccagtgaatgcttacatcaatcagctctacaatatccagtaaaggactttccaattcgcctttgaataaactgaggtattggaaacatctaaaaaatggtttttaattcttcctaatcttcagggagttcttccttatattgagctgatatctgccctctgtaactttcaactaattattcaaatctctcaagtgattataattaattccatcttataaggaatttttctcagcttccagcctcttgaaaatactctgatattttctctaatattcaagtggaaatgtaaatgggtaacgtaagagtctgtggggttaggagggtggaggaaaggtaagggaaagctaatgagaaataaccaaagcaagaaaaagaattttattttcttcaagttctttgtacatccaaagtggaagattcctaaaataaattccccataccacattttaaaaattaggttagcaagcttactttt

SEQ ID NO: 130948 - DNA, 1852 bp, Homo sapiens
agacccccaaaagaggctgcagattcttagtggacagctctcatatcccctccagggaaaatgatgaaaaatgtcttcagaaaaatagctttatgaaggcaagaggactttttgcacctgcaagacatgtctgaaagctcctcaggtcaaaacacaagtagtcaagagatttgtccatctaattcatcatactactctgatccaagtgagacccacactgggtcagctccatcaaggagaagaacattccacccacgtttggattctggaatatcatccttgcttccatcagattcttgtaagtacctcacttggcacaaggtagacatgacgttcaaggaagtcaactgcgttgcccaagagtaagagaaggaatctctgaagaagagcaacttttcagacaggtagagtgtgccttgctcccaaggaaaagagttcttgaaaaaaacaaatgggaaacatggctacaagaaaactgggaagactgcaagaatttgaacatttcatttcagggtttgggggatccttaccaagttgaaaattttaacagaattcttagaagactaattcgagttgaaaccctctggttagtggataattcactggtggacttaagtgccataagattgccaagggattgctagagaaccccttttacagggagctgctatttgcttcagcaggcagaatgcgtaggtggagtgagctttggtggcaatgagaggggccaacagaggtcctcaggagtgaattagatgaaggaaattgagcatccacaaaaaggaaaggcaaaaacatgctaactgacaagaaaatcatgggttttatacaaggataacaagtgctgggttgcttagctatgaggaaggctaggctcactgcataccagaagatgtacagcgttggagaattcagggatttttatcaacaatcaaactatatttgtggaaattttgtgcataagtgccaaagatggctgacatcggaccacattctatttaactcaactgaatgacaccaagctctcatcctaaaacttatagttacatccacccttctgaaatatttaattattctccaatacactggaggtaataggtataaaaagaatgagcatgtgcaacttagtatctcatatctaattttgtgtcccaagttcattcttcccctgaatgtcccatgtctaccaggtgcaggattatctggatgggtcagttcaaaacaatttcagggaataaattgtgtaggggactcaattttctgagacagaaacataatgtgaataactcctttgttagaaaataatttcagtgacagaaagcctttcagttcataaagaaaacttacatatcaacaagcctagctcctcactagtcccagtgaatgcttacatcaatcagctctacaatatccagtaaaggactttccaattcgcctttgaataaactgaggtattggaaacatctaaaaaatggtttttaattcttcctaatcttcagggagttcttccttatattgagctgatatctgccctctgtaactttcaactaattattcaaatctctcaagtgattataattaattccatcttataaggaatttttctcagcttccagcctcttgaaaatactctgatattttctctaatattcaagtggaaatgtaaatgggtaacgtaagagtctgtggggttaggagggtggaggaaaggtaagggaaagctaatgagaaataaccaaagcaagaaaaagaattttattttcttcaagttctttgtacatccaaagtggaagattcctaaaataaattccccataccacattttaaaaattaggttagcaagcttactttt

SEQ ID NO: 130949 - DNA, 1436 bp, Homo sapiens
agacccccaaaagaggctgcagattcttagtggacagctctcatatcccctccagggaaaatgatgaaaaatgtcttcagaaaaatagctttatgaaggcaagaggactttttgcacctgcaagacatgtctgaaagctcctcaggtcaaaacacaagtagtcaagagatttgtccatctaattcatcatactactctgatccaagtgagacccacactgggtcagctccatcaaggagaagaacattccacccacgtttggattctggaatatcatccttgcttccatcagattcttgtaagtacctcacttggcacaaggtagacatgacgttcaaggaagtcaactgcgttgcccaagagtaagagaaggcaaaaacatgctaactgacaagaaaatcatgggttttatacaaggataacaagtgctgggttgcttagctatgaggaaggctaggctcactgcataccagaagatgtacagcgttggagaattcagggatttttatcaacaatcaaactatatttgtggaaattttgtgcataagtgccaaagatggctgacatcggaccacattctatttaactcaactgaatgacaccaagctctcatcctaaaacttatagttacatccacccttctgaaatatttaattattctccaatacactggaggtaataggtataaaaagaatgagcatgtgcaacttagtatctcatatctaattttgtgtcccaagttcattcttcccctgaatgtcccatgtctaccaggtgcaggattatctggatgggtcagttcaaaacaatttcagggaataaattgtgtaggggactcaattttctgagacagaaacataatgtgaataactcctttgttagaaaataatttcagtgacagaaagcctttcagttcataaagaaaacttacatatcaacaagcctagctcctcactagtcccagtgaatgcttacatcaatcagctctacaatatccagtaaaggactttccaattcgcctttgaataaactgaggtattggaaacatctaaaaaatggtttttaattcttcctaatcttcagggagttcttccttatattgagctgatatctgccctctgtaactttcaactaattattcaaatctctcaagtgattataattaattccatcttataaggaatttttctcagcttccagcctcttgaaaatactctgatattttctctaatattcaagtggaaatgtaaatgggtaacgtaagagtctgtggggttaggagggtggaggaaaggtaagggaaagctaatgagaaataaccaaagcaagaaaaagaattttattttcttcaagttctttgtacatccaaagtggaagattcctaaaataaattccccataccacattttaaaaattaggttagcaagcttactttt

SEQ ID NO: 130950 - DNA, 928 bp, Homo sapiens
agacccccaaaagaggctgcagattcttagtggacagctctcatatcccctccagggaaaatgatgaaaaatgtcttcagaaaaatagctttatgaaggcaagaggactttttgcacctgcaagacatgtctgaaagctcctcaggtcaaaacacaagtagtcaagagatttgtccatctaattcatcatactactctgatccaagtgagacccacactgggtcagctccatcaaggagaagaacattccacccacgtttggattctggaatatcatccttgcttccatcagattcttgtaagtacctcacttggcacaaggtagacatgacgttcaaggaagtcaactgcgttgcccaagagtaagagaaggaatctctgaagaagagcaacttttcagacaggtagagtgtgccttgctcccaaggaaaagagttcttgaaaaaaacaaatgggaaacatggctacaagaaaactgggaagactgcaagaatttgaacatttcatttcagggtttgggggatccttaccaagttgaaaattttaacagaattcttagaagactaattcgagttgaaaccctctgggattgctagagaaccccttttacagggagctgctatttgcttcagcaggcagaatgcgtaggtggagtgagctttggtggcaatgagaggggccaacagaggtcctcaggagtgaattagatgaaggaaattgagcatccacaaaaaggaaagagtattctcctgtttgccaaacttaaaaatgctggatggaatcttgaagctaccagaagattgcttatcaccagaaaccaatattttttcaaaaatatgccttgtatcctaatgcagtctgtatagaaagaaagcaatcatcattgttgctaaaagctaataaacacaggacatgcatgattaaatat

SEQ ID NO: 130951 - DNA, 655 bp, Homo sapiens
agacccccaaaagaggctgcagattcttagtggacagctctcatatcccctccagggaaaatgatgaaaaatgtcttcagaaaaatagctttatgaaggcaagaggactttttgcacctgcaagacatgtctgaaagctcctcaggtcaaaacacaagtagtcaagagatttgtccatctaattcatcatactactctgatccaagtgagacccacactgggtcagctccatcaaggagaagaacattccacccacgtttggattctggaatatcatccttgcttccatcagattcttgtaagtacctcacttggcacaaggtagacatgacgttcaaggaagtcaactgcgttgcccaagagtaagagaaggaatctctgaagaagagcaacttttcagacaggtagagtgtgccttgctcccaaggaaaagagttcttgaaaaaaacaaatgggaaacatggctacaagaaaactgggaagactgcaagaaattgatggcaaaatatggaaataaaaaaattaagttgacttttaggaatgcagtttacaagagcaatgcgaccactgagagtggtagcaatgtattttacaccaaagttgcctgatattaaaagtgaaaataaaatattcagtatctttgaagcacaccaaa

SEQ ID NO: 130952 - DNA, 378 bp, Homo sapiens
tgattttcaactattagaaaatgaaaaatgtggtgaagtcctggatcttttcctgtcttcaacctttcccccaaccaggttaggaagacaggagtgggttaaatcattttattactgctcatactatgtgggtcaaatcatgcttccccaagttgtgatatctagtgggagtttcaaacaactggccaatagcaagtgaagataccagtcctgccccctaaacatacttccaaaatctcaacttgtggttcttatctaggaatctctgaagaagagcaacttttcagacaggtagagtgtgccttgctcccaaggaaaagagttcttgaaaaaaacaaatgggaaacatggctacaagaaaactgggaagactgcaag

SEQ ID NO: 130953 - DNA, 217 bp, Homo sapiens
ttggccaatgtatcctaggttaggatactgctggtattttgtttccaagatgcatgctactgatttttttcccataagaatttttagcatgaaatttatttcagtgcattacagttttattttcaaaggaaacttaacctagaaatcaaggcaaatcccaaaagttattaactaatcttttcagttctaatatcatttataggaaaacaggaaaaga

SEQ ID NO: 130954 - DNA, 531 bp, Homo sapiens
ttccacgagccattgcatttttcctaaatggggcaaacaagaatttcaccttcccacgaaatgatttgtaccttttttcagcactcttgtttttcatccttcctttaccttctattgctctttattttaccaagctaggaaaaggagacagctaaacatattttagcggcctctgaaacattataggtaaaataaataagctgcacatgggaatcagagacaagggaagatgatgaggtatttacttagtggtatagactttaatatacaccaaggaacaggaagtttggagtgggggtggtggggatgagtgagacgttgaaaagaagagagaaaggaattgaatggagtctactgaatttaccgcaggcactgagataatctgcaaggtaaaagtgttgtttttaatgcagtagaattttttctggtctactgtcaccatatttgtcttgttgctaagcttggccatacacaggctaggccttcctgctcacttgccctcaccccctgtggaagttctcaataggttgc

SEQ ID NO: 130955 - DNA, 940 bp, Homo sapiens
agaggaatgttgatgcaaggttgaatattgattcaggaaggttgatatttgtattacgctgaacattttatcaccatttctcaagtaaatttcccaaaggtgaaagtgtctttttcacgtagataaaatcctattgcatgattatagtaataaagcaggcatccttcctaggaaccagtttccacatggtaaaagtgctgtgttacctgttttactgtaaattttctgtgggagaaattctctctccctggcctatttagttgtgactttctctaacaaccgtatcagattgtgtgctgcttttactaatacctctctttctggacttctaacaccccagccttgcctcagatctaaattctctccctactaggaggaataaaatgtaccaagtgtataaaaatagctgcaaatactcatggagcattgtgcgccagatgtggtgtcagctctgtccatgtatcagcccctttactcctcgctgtagcctgctgtgaggaagtggcagggggaacgggggggccggggggacagacaagagggtcaaaatcatagaaatgcattcagacttgagcatcctgaatccagactcatgttcaccaccgcaccgtgctgccacccattttccatttctgcccaaataggtcttgtttgttcttgttccttactactgtttgtgctgccgagagtctgtgcatctactcggttcctttggcagggaagtgccagcatttcactccttaattacaaaatgccatcccagtcagttgatatgtcccttgttggccgttacagtgaactgtgatcatccagattttggcagcttataggttcttagttgatataaaaaagaatgccaaagcatgggtaaaaatacatgacataactatgtaaacaagtagaagaacttagggttcttctaagtagggtcagagccaag

SEQ ID NO: 130956 - DNA, 867 bp, Homo sapiens
tggcggtgcggggcgctggcgacgggacagggtttttgctgcccggggcctagtctacctcggcacgcttttctctgaaggagacacgcacttgcacgacgtgggcctctgtgcagctctactttgtccttaactcctctgactcaacgttatcgcagtttgactctggagccactcaggtttttcctaagctcaactctagccagctaggttcctggtgctttgggggctggagtgcagtggtatgatcgtggctcactgcagcctcaactacccagactcaagcgatcctcctgcctcagcccgccaagtagctgggactgctggtgcacgccatgacgcccaggtaattttgtatttttctatagagcctcccaaagtgctgggattacagcatcctacctaggaagtctttttcttgtccaggtgtggtggctcatgcctgtaagcccagcactttggaaggctgaggtgggcagatcacttgaggccaggtatttgagacagctgggcaaaatggtgaaacctcatctctactaaaaatgcaaaaacaatagctgggtgtgggggcgtgccatggtgatccggctgtccggggggctgaggcagcgagagtcgcggggaccggggaggaggaaggtgcggggagcgggaccatcagggacccaagctggtgatggggagaccgaacaagcaagacgaaaattgtacacaaggcagagattcgcaggtataatagaagtaagacaacatagtaggaaaaacaggaaccaggcaacaatgaaggacccagaagtggaggagaaagagggcagacggacaaaaggagcgaaaaagaacgcggaaaaagacacaacaactcacagg

SEQ ID NO: 130957 - DNA, 431 bp, Homo sapiens
catgaaagtggtatgttcttcaactcacaacccattggccagaaccagtaacatgacttcacctaactgcaaactagctggagaattgtgggagagctcatggatattcagtgataaatgtctttgttataaaagggtggtcatagccaggcacatggctcacgcctgtaatcccagcactttgggaggccgaggctggggatcacctgaggtcaggagttcgagaccagcctggccaacatggtgaaaccgtgtctctactaaaaatacaaaaattagccaggcgtggtggtgcgcacctgtaatcccagctacttgaaaggctgcggcaggagaattgcttgaacccaggaggcagaggttgcagtgagccgagatcacaccattgcactccagcctgggcaacagagtgagactctgtctccaaaaaa

SEQ ID NO: 130958 - DNA, 237 bp, Homo sapiens
gcaccactggattccactgtaacagtagtctttcatgttctataaactctctaagaacctgtatatctgaagtaaaagttttcatgctaaacacactatttgctaaattattattaaaatatctctgaacctaccttgtcaactacattcatcaaaatggctgttcatgaggccgaagcaaatggatcactgaaggtttggagtttgagaccagcctggtcaacaaactaaaaatac

SEQ ID NO: 130959 - DNA, 248 bp, Homo sapiens
tgaaggaacttaaacattatacagtaagacacaggcctgttttattacccacattccctattctattctcttagagtaacataatgaccgttctaagtttggtggtagtcttttagcttgttttctttgcatttacagtgatatctatgttcctatgatattgtaatcagtgtttacatttgttaagcacttaagtgtgtgccatgtgctattttaagcactttatactcattaactaattagttttc

SEQ ID NO: 130960 - DNA, 201 bp, Homo sapiens
gaaatatagttcggcaccatgtggcaactctttcttttacccatagatttgcttggcatcttatcaaaagtaaattaaacatatatgtgtgtatgtctagttcggtaatctctattctatgctattggtctatttttctttccttagccaatactagtgtctcctgatagtgtatatttatattaaaacttgaggttctgt

SEQ ID NO: 130961 - DNA, 144 bp, Homo sapiens
cccgtgcatctagaggatcccggtgctatggagttccaccaacaatgtgggagcctaaagccttacactttggcctacactagatgttatcatttctttcatttctgccaatctatgtaaaagaaatgatagatccatattttg

SEQ ID NO: 130962 - DNA, 291 bp, Homo sapiens
tgctgggatgacaggcgtgagccaccacgcctggcccatccatcctttcttatatccacccgttgaatctcctttgcacatctctgtcttgggcttaggaagatgaataaaattgagcctctgttcagatgtgatcataaaaccacagttcagtctggttgtgttctagcagaagctcgaagaggaggaggctgatgctgcctgagtgatgagggcgtctgaactagaccctaaagagggaggccctcgggagggaaagaaggaaggagggatgtcccaggaaaaaggaca

SEQ ID NO: 130963 - DNA, 481 bp, Homo sapiens
tcagtgagaccaagaacccaccaactgcggacacaccagcatttaagaaagacaaattacttgactctttccatggcggaaaaaaaaaaagacagtttaaacctcattgtaattacaacagatacttttaaaaattctctctgggccggacgcagtggctcacgcctgtaatcccagcactttgggaggccgaggcgggcagatcacctgaggtcaggagttcgagaccaacctggccaacatggtgaaaccccatctttactaaaactacaaaaattaaccaggtgtggtggtttgcacctataaatcccagctactcgggaggctgatgcatgagaattgcttgaaccctggaggcagaggttgcagcgagccaagatcataccactgcactccagcctgggcaacagagtgagactacctacaaaaaaaaaaagaaaaattctctctgatacaatagcaaactgttaccgtcttcaga

SEQ ID NO: 130964 - DNA, 357 bp, Homo sapiens
ctgctccgcccctctctggtggggggtggggatgggtgactgtgcctcgaagtcacttgagggagttcagcggggtagagctgacatcagcgatcctgggaaacagcctccaactccatcctgaatggaaaggagctggcaggaatcagaggaggaggcccctcctcacccctgcattggagttccaggctccccctgcagagaacacgctatgagctgtcaccagaggagtggctccttggagggatggggtcctgctgcagccaggggcctggggaagtccctcgcacaggctgtgactgccttgtggagcaggggcctccattgatctttacagccctgttccagagttgaaga

SEQ ID NO: 130965 - DNA, 435 bp, Homo sapiens
catacttgtgcctgggctgctgagattaatgcaggctggcaagggaggggagctgtcaatgtgttgtgcagatacatacacatccttgtgttgggcaggtggtgcacaagagcaaatataacttcttcatgttgctccagctgccaagttgtatatgtaagagatcctgggagagtattagtcccagttcagcttgtattctctttgaggctctcctgtgctaaagcctgtcctctgcagtttgtatgtagaagacactctgatacctgtgagataaatggatgactgggcagtcaagttcagttattgaagtagccccaggctttgttagagaaaccctcagaaaaggagccatagaggtttaatgcaatacattaaaccaaggcatgatgtgctccagcactggtaagaatccccagctggagtcaggagctt

SEQ ID NO: 130966 - DNA, 352 bp, Homo sapiens
atcaggccatttcttccaaaagaaaccaatgctctaggtaccccctacaaaaataagttttgaaaaatcatgtatcccgtcttgcacatttttaagttgacatgtagtattttttacttaagttttaaatccttcaaaggtgtgatttctgccattttgtaaatatttacatttttaaataaaactgctgcaacaatttaaaatacatcaaatgaattctgatcaccatggtgatttaacacccaccctcatctattttaaaaacacctgacccagctctccttcttcttcttttttttttttttttttttgagacagggtctcactctgtcatccaggctagggtgcagtg

SEQ ID NO: 130967 - DNA, 328 bp, Homo sapiens
caagtatacaaagctggaaggaattaattctgccttgcatgtgtgtgtctgagggggtgtatcagggactggaccattcgaattgaatattgccgaattcacacaacttggcaaagagaaagggtattccagggagagagaactgcatgtacaagagcaaggaggtagaaaataccaggaacggtcaccagagcatgccagggtgagtgcaatactgtgcaggtggtacagaagatggggcagagagactggccagaccctgccttctctgccaggctggcctgctcctgtcagccacaggagccagctcagacatttaagcagaagg

SEQ ID NO: 130968 - DNA, 249 bp, Homo sapiens
atataatctatcctggagagtgatccttgtgtactagagaaaaattgttttatcttcctgatgaattgatccctttgtcaatataatgtccttccttttctcttagagcagtttctgccttactatctattttgtctgatattagtatagccaccccagctatcttttggtttctatttgtttggaatatctttttccatcctttcactttcaacctatttgtatctttggtttgtttcttcatttgtt

SEQ ID NO: 130969 - DNA, 204 bp, Homo sapiens
gtacaaaggagcatctggagcccacttgaagccctgatgttccacactgagaatgacataacaacccagagagaaggcacagagaagggaaccagatttgccagagggagggaggaagccatggatgggactggtcttaggatcaatttcttgcctgatagacaaaagctgatcaagtttttgattgaaacgtataaaagcatg

SEQ ID NO: 130970 - DNA, 114 bp, Homo sapiens
agggcctagggacccagtgctgggccaagtgcctatggcagagtgcttgggagctgtctggtttggtcctcagagtcctgttgctaataagcgtggagggggaggacggagcaa

SEQ ID NO: 130971 - DNA, 220 bp, Homo sapiens
caacgctggggcgagggcagggggactcgccctcctggcatgtgattgattatctggtatttatgccattgaggacttgtcagcggtctggggtcaaagggtcatctcatgtgtcttgccgccagcccacctccttttgtacagtgtggaccgggcgagctgtgcacaaaacagctttttcttttccttgggaaaggggggatggggaggggggagtgtc

SEQ ID NO: 130972 - DNA, 547 bp, Homo sapiens
cgatcagagcataccctgtgctttaaattggatcatctcttagtatgtaaaagttttttgtaatagaaacaagcagggcagtatttgacctgttgacagtgtccttggactttacaatttgtgaagcagcgtattttgcttgagttgtacgattgtcgtttttttccccccactttgacaactgttacagaacctgtcaccagatacaggcaagggaggttgggcttcccatctctgcacggcttccctgtgattcacaagcaagcaatcagaagtgcacaaaagtttagaacgcgattttcattctcttctttccttagaaaaactcgctttgttagccttttccagaaaggaaggcactcaattgttgtaatactcaaatcataaaaagaagcctagtctagtctattcagcaaggtgttctgaaagagggaattttttaagttcaattatgcgaagatcttgaaggtgggactcaaaggagagggctatcctgggaagaaggctttggaagatgagaggcgtgaaggggtatggctcctgatcc

SEQ ID NO: 130973 - DNA, 707 bp, Homo sapiens
gaggagagttgttagctgaagaggacatgggtttgctcaagatccctgcattctccactatggctctctgattctcctctctgagcttgtggcagacacggcagatacctcaagcatggctgggcagcagatgctggctgagaggaagtggctgagcccaacttgtccctcctcagaccccagaattgccaagaccagagtcctccataaagacctcacaaacaggcaatcactgcatgcttttccacaattaaatatgtgcacatcttaaggaaaggacctaacatccttcagcagtatctctttccagggcagggagtgactgcgtcagcagcctcaagtacctggaaactgtccacatcaggcaaagtggtgggagagacacagatgtttccaccagcatttaaaagaaaggaaagaaaattattgacaagaagcctccatggtggatcaggcttcaacgttttgatggacctggcctctcttggaagcaaatccctggatggagcccatgtctctttgggcccccaaaggcagcctgaccttgacacggagtgcaaagcagactcagctgcttgtgtttaatggggattcgcatagttggtttttggttttgtttttgttttgttttgttttttgtttttttttgagatggagtcttgctgtgttgcctaggctggaatgcagtagcgtgatctctgctcact

SEQ ID NO: 130974 - DNA, 331 bp, Homo sapiens
gcgtgccaccacgcctggctagtttttgtatttttagtagagtcagggttttaccatgttggtcagtctgatcttgaactcgtgaccttgtgatccacctgcctctgcttcccaaagtgctgggattacaggcgtgagccatgatgcctggccaccctcctggatcttggtagtaaaataacttgagtatactacctaaattactttgaattagtttttttaagattttttttaaatttttaatttttttttgttttgagacagagtctctctctgtcacccatgctagagtaagtacagtggcatgatcatagctcactgtagccttgac

SEQ ID NO: 130975 - DNA, 250 bp, Homo sapiens
ctggggacccagtcctcctggcagaatccaggagcaggcaggtgtggctgccccacggggaggcagaggccgcccttgtccacctgcacttttggtgcctttggcattgcgtggtggggcctcctgccactccgtcaccatgcaccacctgtggccgttggagtttgaattaattaagatgaaatattcctggccaggggtggtggcttccgcctgtaatcccagcactttgagaagccgaggtgggcgg

SEQ ID NO: 130976 - DNA, 150 bp, Homo sapiens
gagagtagcagaaggaagttatttagctttagttaacgattctcccaagcaatgtgggatgggccaggtggtttacactatggaagagccagaggggagttctgacaataaaggaagacaatggggaacggggatcccatgggaaaaatg

SEQ ID NO: 130977 - DNA, 648 bp, Homo sapiens
atcattgcatggggttgtgagagagcgatgtgtttggagtgacaccagggaccctgttggaggtgttcaggcagtggcaatgctgaccatgggaagcaagtttgtggagaaggacttgaggccccaggtggcagtgtcccagtgtggttactcatgttctgggcttagcagacttggcagagaggaatctgtccagagtctcctgcatttccagtcagaggagtaaagggaccaaggcaagccaacccagttcagtgtagacctcagctgcttgtgtgagaaacacactcacccatccaaacccaaagaatggactaaaagacacgaagaacagcgaaagtgagactttcagtaacagtcttgcaagatcaggggactggtgtaggcaggcatatctagggtagtcacaacaggtaatttatctccttgcttgcaagtccctcctccaagatactcattggtccagtactatgaggttacagtcttcccagatgtcgtctaagtttcattatcccccttataacgttaaaccccggtccccttccctgcttaagttttgatttccaataatgaaacattcttccctttcatggcctgacccctcctctacattctgtgtacctattgtgaccttctagatgcatgagc

SEQ ID NO: 130978 - DNA, 496 bp, Homo sapiens
ctatgacatgaggatgatcctgaataacacactttaatcttctcaatcaagccttccatttatcaaggagggatatttggtaaaaacagacccctagatgatatccctgtaagtacagataaactgagaataactcaaagaatccctgacagatgccttaagagaactttctgggatgcagttgtttttttgttttttttttaaatccacacaactgtttatcttttgaaagaaaagaggccaggcccagtggctcatgcctgtaatcccagcactttgggaggccaaggcaggccgatcacctgaggtcaggagttcaagaccagcctggccaacatgccaaaaccctgtctctactaaaaatacaaaattagccaggcatggtggcgggtgctggcaatcccagctacttgggaggctgaggcaggagaatcacttgaacccgggaggcggaggttgcagtgagccgagattgcaccactgcacttcagcctgg

SEQ ID NO: 130979 - DNA, 154 bp, Homo sapiens
attatttaaatatactaaccaagtctaaattctcactttcacactctcatggtttccagtagccatttccattgtctgatgactttgtatctgtattacttctctaaattgttacagttactttgggtagctataacaaaataccacagacaag

SEQ ID NO: 130980 - DNA, 247 bp, Homo sapiens
ggcatgagccatcacacctggccctatatttttctgcttagctttccgcattgagagttttatgggcaaaagttcctactaccgttttttgtgctaaataaatgtggtaagactaaagagatgctatcatttggtgaaaaatggagaaatgaaaataactgtgcttttaggttcataaaaaatgttgacttctagattttagccagcaccttcccttttctctgaattccatatagatgttcattac

SEQ ID NO: 130981 - DNA, 185 bp, Homo sapiens
catatttgagggattgacacttctggtggtggagctgcagaggggtggggagtctcaaacgccagcctaggaggttgggactttgtcctggggtgctggggagctgtgggagggctgggagcaggggttggacaaattcagctctgggagcaagaagaccccttgggggccgtgtgagagacaca

SEQ ID NO: 130982 - DNA, 723 bp, Homo sapiens
ggaggtcgaggctgcaggactctgtctcaaaacaacaacaacaacaacaacaacaacaacaacaaacacacacacacacacacacacacaacagaagaaaagaaaatgtattgactcttagaactgagggtctggggtctgccttcaggactggctatatccgggtgctcacacaatgccatcagaagtctctctgcatcttgactctgctttcctctgcattggcttcattttcaggcagattcttcccagttggcagaccccctctgatgaactgaggctagcagagatctcatatcatttaatacccagattcaaattcccctcgagtgcatttccctttttcttctgcacagaggctcctggagtgcctgcactggccacctggctggctgctgtgttccagacttgcctccatgatgtcccaggctccttcctcagaggacaactcccgccacctccccgccaccttctctctccagtcccagagggaagagaaagtcccttgctctcagtcttccttacccatctacagaaacataatagctgcaaacataatagctgccaccccaaatggcaacagttttacaagccttactgacccttaacatttctatcctgggccagaatttctgcttttttattttttttttaatttttaatttaatttaattttttttggacacagagtattgctctgttgcccaggctggagtgcagtgg

SEQ ID NO: 130983 - DNA, 224 bp, Homo sapiens
atggcaagagggcctgacccagagagagattagggaaggctgcccagagaaagtggtattgaaggagggcttggagggatggttttgataggcaatgatgagtgttaggatttttaggcaaggaaacagcacaacattaggtggaaaatgactgggcctgttcaggaaacacctgcagtttggcataaccctgaggaatagtgggacataaatctgaagaaatc

SEQ ID NO: 130984 - DNA, 527 bp, Homo sapiens
gaatttaaagaacaacaacaaaagaaataactgtggatgcattatctaggttaagaaatagaacatacccgtattttgaaacttaactttttcagtactggttaggtgactcaactggtatttttcttcattcatcacatctgtgtttcttttctttctggccaaatgcaatgtaacataaatttcaactcagtgaacaaaagtcatttgttatagaagtaatatatagctgtgaaacactagtattgcactgtttcataaccataaaaattctggttacacatatgtaggataattctggttttatatatatgtatgtgagtatatacatttgatatttactttactccctagcagagctggtatgttgcttgattttggttgtgcttctgcttagaattttaaaaattagaaagaagggcaataaagcatcataattccatgcactgatttaatgttattggattcatttatacctaaagaaaatccttagactacatgataaaggtttactggtggaaaaaaaa

SEQ ID NO: 130985 - DNA, 272 bp, Homo sapiens
aggggaaattttaggagattacaatgctgaataaaggtagggcaggaattctttgtgccatggactctggcaatctggcaaggtctatgggcctcttcttttaacagtgtttctttaaaatgcataatgtaaaacacataggattacagagaaatccaattatatttacatagagttatcaaaactaaaagaactttgtgatatagtaatatatgtgctttagtaacaaggtctaactataggtaataactactgtaggtctggcacagtgg

SEQ ID NO: 130986 - DNA, 317 bp, Homo sapiens
tcaagtcggtacccttatttccttctttattgattagtaaaacttttaaaatgcaaaacaaatttataaaaaggtttccttactgaagaaggaaatcaacttttaaggccgggcgcggtggctcacgcctgtaatcccagcactttgggaggccgaggcgggcggatcacgaggtcaggagatcgagaccatcccggctaaaacggtgaaaccccgtctctactaaaaatacaaaaaattagccgggcgtagtggcgggcgcctgtagtcccagctacttgggaggctgaggcaggagaatggcgtgaacccgggag

SEQ ID NO: 130987 - DNA, 719 bp, Homo sapiens
atcctaagccaagagaacaaagctggaggcatcatgctacctgacttcaaactatgctacaaggctacagtaaccaaaacagcatggtactggtaccaaaacagagatatagaccaatggaacagaacagagcctcagaaataatgctgcatatctaccactatcttatttttgacaaacctgacaaaaacaagaaatggggagaggattccctatttaataaatggtgctgggaaaactggctagccatatgtagaaagctgaaactggatcccttccttacaccttatacaaaaattaattcaaggtggattaaagacttaaatgttagacctaaaaccataaaagccctagaagaaaatctaggcaataccatttaggacataggcatgtgcaaggacttcatgtctaaaacaccaaaagcaatggcaacaaaagccaaaattgacaaatgagatctaattaaactaaagagcttctgcacagcaaaagaaactaccatcaaagtgaacaggcaacctacggaatgggagaaaattttaatgtatatcttttctttaaaaatatcagaatatttaacatattttataattattcagtataaaactgattttagtgtgattttatatacttatgctttcatacataaattatgtaagaaccttacaaattagcattcctccaaattcttgtggttaaataaaaacaacatggcactt

SEQ ID NO: 130988 - DNA, 389 bp, Homo sapiens
ctggagatcaaaacccatcctttgcaatgaataaacccgggctcttagcaacacggggaaagaagggcttgcaacactgctgtgaccaggtaattctgtgcacataccaaggtaagaaacatcacaagggggtgacaaagtatttccttgatggtcaaaattctggaggttgagtgtgagtgtgcatgcgtgagtatggtgtgagtgggtcctctctgcaaattctgtaatcatttcatatggcttagaggtaagagagggcaaaacaaaaggaaaggagtgaaagagacctccagaaggtgagggggaatagttagaatcctccctgggaaaagaagggtgaaaaacctcaagcacgtgaggttgtttgtttgtttgtttgtttgtta

SEQ ID NO: 130989 - DNA, 402 bp, Homo sapiens
caaggtgctaggagtagaaagcaatagacagattcacaatgttataaatggtggtgatatgaaatgtgaccctgataatggttatgtggtgctttggaaatttacctctcttacagactttgtccttttgtatgtgaaggtgacactgaacagtgtgtctgaacagaatgatgtgtaatctgtagttctttatatcttatcagctgcagatcctggttttgtggagcctgaagcttgcacaacatgggggccgtgttttaatgagaacaatagtacaaaattaaaaatgcaaaactaggtacaggcattggaaggggccagtatttagtgaggatcagcttcattacgcttcatggtagatctgtctctgctgattacatatgtgaaaactgagaatgggta

SEQ ID NO: 130990 - DNA, 343 bp, Homo sapiens
tgctgggattacaggcatgagccaccgtgcccagctacagctgcttttaagacgagtgattcagaacagacttttgaagcaacaaaatttgatcacttctcatcttaaaagagagctgactcatttgtccttacgggtaaatccatcacttggtgataggagaatggtgataggagaatattctgaatattcagtctagactcacttgctccttatttgcctccaggcctctccttgccaggctttctccttactggatgttatttaccaagggtttccactcattaggggtggtgatgcttgttttaaaggtcttctagaaccttctagatagaacacctcc

SEQ ID NO: 130991 - DNA, 193 bp, Homo sapiens
cagatctataaatttcatttattttgaggttcattcacattcagtaacaatctgatcattcaccaaagttccaaaacacatactttataaattagctatcatagtttttagaaatccaaatatatttcaaattattttttaatagcagcaactagagaaaggattttttaccatctagcttactgtagcgctg

SEQ ID NO: 130992 - DNA, 615 bp, Homo sapiens
gaagtgtgtagtgagtttcctattattacttccaggttggagatgagattggtcttcataagaattaactgacaatgtttacgaattcacacagctaacatacaatagagtcagaacttgaactctggtttactggctccaactccagtattctttccactactctgcgaaaagtatattatttttaagttggcattagctttttcaaattaccacgtgttattttattatttttcaaagtcaagtccttttaaagaggaccaaatatcttataaaatcttttaaatatatatatacttagcatacacaaaaatagaataatggttaaatatgttttagtgtgaagcaattgcgagtcactattgatctctgattgtgttgaacttttggtgatgacttcagtattttgtaatcagccatttacagttcatttatttcaggaattttaaggtcaagctgagctacctatatggaatgaaccagcccagttctctgaaattggtcttcctttatgtgcctagaaatatttctctattagtctgacttctgttggtaggcatggcactttacacattagctaggaagaaataaaatctaatttgtctggacagaatg

SEQ ID NO: 130993 - DNA, 324 bp, Homo sapiens
agcctgtcctgtcactgtgcatcccgtccagatggacaggtagtagattcccgctggctgggtgatatccgtgtccttcatctgtcagcctctggagccgccgaggctgggtgccaggcactgccgcctgggacacatgtgacctccgtgctgcaggaccacagtgcaggtgcgctttcacagggccgctcctagggaggaggttgtggacatcagacattccatgattggattccatggctttgagaatctcacttggggccttagctcgagacccatttaaataccacatcgcagagaccagaaggcaagaccatgggactc

SEQ ID NO: 130994 - DNA, 194 bp, Homo sapiens
ggcaggaggactggtcagggaggagttagggcaggaggactggtcagggaggagttagggcaggaggacaggtcagggaggagttagggcaggaggacgggtcagggaggagttagggcaggaggacgggtcagggaggagttagggcaggaggactggtcagggaggagttagggcaggaggactggtcaggg

SEQ ID NO: 130995 - DNA, 789 bp, Homo sapiens
aatgttgttcctggtctgaaatttggaaataaccatttaacaatttggaataattggtaaatcgtcagtctctttacttaattcctaggatttgtaaatatctttagtctcttcccttctactgcattattaaataataataaaattaacatggacatttattaagttttgagttagacactggttttggggtttttttgtttggttggttgcattttttttttttgaaataggatctcactgtgttggccaggctggtctcgaactcctcacctcaagtgatccacccgcttcagcctcccaaagtgctggcattataggtgtaagccactgtacctggcctgcatataacttttgacttcccaaaaacttaactaaatagccttctgttgaccagaagccttattgataaccttaatggtcagttacacacattttgtatgttttttgttttctttccagacagggtcttgctgtgttactcaggctggagtacagtggcactatcatagtgcattgtagccttgacttcctgggctcaactgatccttcctcctctgcctcccgagtagctgggacacaggcgcatgccactataccgggctaatttttctatttttttttttgtagagacagggtttcgctatgttccccaggctggtctcgaacttctgacctcaagcaacttgtcctccttggcctcccaaagtgctggtattacatgtgtgagccgccacgccccatctactgtattcttacaataaagtaagctagagaaaagaaaatgtt

SEQ ID NO: 130996 - DNA, 399 bp, Homo sapiens
aatgttgttcctggtctgaaatttggaaataaccatttaacaatttggaataattggtaaatcgtcagtctctttacttaattcctaggatttgtaaatatctttagtctcttcccttctactgcattattaaataataataaaattaacatggacatttattaagttttgagttagacactggttttggggtttttttgtttggttggttgcattttttttttttgaaataggatctcactgtgttgcccaggctagtcttgaactcctgagctcaagtgatcctccctcctcagcctcccaagtagctgggactacaggtgcacactatcatgcctggcttgtatgaggcatcattttaagtgctttggacggatcaactcattccgtataaccctg

SEQ ID NO: 130997 - DNA, 812 bp, Homo sapiens
attcaaagagagttacagtccttgttcttataatcaattacttgtgctcatttaatcttaaagtccacttaaaatacagtataatatatatgtatgaattttttattttctgtcctttctgtctcatgctctgatattattgtgaaatatatctgtagagatttcctgtgacttgacctttttatttaaaggtcataatctgttcataatctgttcataatcataagtcataatgtgtttgagacatcataatggtttctacggaaacatttgttgcctctcaaagaagcaagaacactctaaattttcaagaaaatagaataatttggtggtagtgctagggagaaagcatctgaccaagagaaaacaaaaatatatgagtttgtatcaggaagaacaatttaaaatttttctaatttgaaaaaataaaagtcttactttaagtgctgctttataaaaaaaaaattctatagtgctagttatcttttttagttttaaatatttacaattttctcttttatctttttactattttctttagtaaaatgttctccttacctcattgtgtaatttttaaaaatatggttctgaaagatgcttcttacattattggtaaggaatatcatttagattatgcctaatagttcacacatacagagaaggtagtttcacaaacacaaaaaaatggaactttagatcattattaatagtacaagctctccatttttacacttctgcagtgagctacaaaatttctatgagacccctcaaaatacatcaatgattgcagactacagatattaaattgtgat

SEQ ID NO: 130998 - DNA, 613 bp, Homo sapiens
gtgggagcgaagatggaagctgtaatggttgggttgggggaggtctgctgattcccactggaatgaaaagtaggtggtagcaagacttaaaccaggaatgcgggtcacatggttcttttttgtttgtttgtttgtttgtttatggagtcctagatacagtgaagataaacaggcctcagcatctctgtatgtcacgctagggtcccaactggctggtatcaagtctgtgtcccagctgaggacttctctggttctctgtcactggagaaacttcatcctactgagaagtagccccagaaattcacctgggaaggcaattccaaaatgattggaaataacacagtgaagtccttagtgagaaaatgtatctcatccctggagatacttggaattgaatatagagaagatgaagtcagtcagacctgcattattaacatatttgtgataagagaatttgttcattttttaggaatttgtaatgtttaagtgaatttgacataccagagttgctaacagattagatttgtgatgctaatttaaaatatatagttgatttagacttgtgattttaaattaaaatcgtaataggtttataaacaatattagaacactt

SEQ ID NO: 130999 - DNA, 377 bp, Homo sapiens
gatctagaggatcccaacacgcattcaagacctgaatgaagacaaaggttagctatgtaaacatctgagagaaaagaatttcagaaagggaaagggttagtacaaaggccctaaggtaggatcatagctaaggtgttagagtaaaagcagagagaggtcccagaatgagcaaggaagagagtaacagagcatgagggcagggtggctatgagggtttagttcatggagggtacggttggttattttaagatttttagattttaccctgagttaaatgggcagctgatggaaagatttgaatagattagttacatgaaaatgattatttcatctgctgtgttgagaagagattttaagagagcaaagaaggcggggag

SEQ ID NO: 131000 - DNA, 346 bp, Homo sapiens
cccctctcctctgggctgttgttcaagcctccaggctctttgccgaactgctgagacttgagggaacaaaggcttttatgacaagttttattagtgatgcctcctgtgctaactctctgagatgggtcaatgctattaaccctgttttacagagaggggaagagccccagagaggtcaaatgcttccctcaaggtcatgcagcatgtgtggggcagaggtaattagccccagcctgtctgttgggccaagggacaaggagggtgtgcgatgcaggggtctggggaggccactcttaatgatcctggaacttggacttcaggaaaccagagatgggcatgggggcag

SEQ ID NO: 131001 - DNA, 366 bp, Homo sapiens
aggcgtgagccaccgcacccggctatttacttcttcttttatgaagctccctcctccaaaacacccccatcacctgttccttccagctctctgaccactccttggattctctgtgaattcccttttctctctttgaagcctgccttcctggtactgtactcttgcacactctctttcctcttgcaagaagccagcacgtggtacagatcttgccaatgacccttctctcactagctgagtggcatgaagaagcagaaaatggttaagagcattggtttggagtcacagaccttcattgattcccagctctgccacctatagctatttgacttgcacaagtcactaacctttcagagactcagcttc

SEQ ID NO: 131002 - DNA, 397 bp, Homo sapiens
aaataattacaattaaaccatcagattattcacctatgtttgtatatcaaagtattttagggcaaaataacatctacacaaaccaaggagaggctacaattaatgctctctggatgccagtctaaccccttgcggggagcgggggggaagatgacacttgtgctttgataatccactgtttaaggaaccacattgagagagtagtcattctgtaacccagattcccttctctcaatgacctttcaacagacctcaacagacagcagctctcagtgaggaaagggaattggaggtggcaggaaaagttgaaaggaagacaatagaggtgttttgctttttagctcagtactccattctgtggcagaaaagccaaactcaaattagcagcacctccctc

SEQ ID NO: 131003 - DNA, 694 bp, Homo sapiens
attgatattcttatggtttatgttatagtattcatggaaatttagcaatggaaaaggaaatgaaaaacttattaatgatgttgttaaattttcaattgtgatgacagtaaggaaaagacataattgagagctacctccaattgtttatatcaaatgtggtaattaagaggattttggtgacctatttatggctgaattaaggcaaaatagcttttatatccgattctttcctcttcccttctcttgttctgtgtgcttactatcataataattgagtatacattaattttctttaagtatttatattttaaataaggttttgatgtcagtagagacttttttttttccttgaaggtaagtaccctttaaaccactaatttgtcactagagtctatagtcgcttccatatataataggtagcacagcttctcaggtcatgtcctgctttgctgctctgctgaccaataatacaccttggagatactggttctggttatatgaatagaacaattaaattgttcttcattagatggatctttgattactaatcttactcagaaaggctcaactggacttggattattctaattgccaatactgtttttgcacaaatgtctgcaaatcattgaacagtaatactgacccctttttcttccaataaagttattgcagtaatcacatcattgcagagaat

SEQ ID NO: 131004 - DNA, 563 bp, Homo sapiens
catagagaaaatttccacaaactaggaaatgtagagagttattctatagaatactcaaaagaggaaagtatgtgatttttggaaacaggaaaatcttcaaacttctttcttcacttccctttgtgtttagctgaccctccaatgtgatcattgcctttggagtttgggagaggtacgggaagtggcctgatccctgcttccatacttcactcctccatccatccttccctccctcttcccctccagctaaatggacaattctagccaacattgagtcactcaataagtctcaacagtgggtgtgtttgctgagattgtccagcagttgagcagtttggtctcacctccctcgctagttgagaccaaaaagagacaaataactttttcatggtctttgaaacataatgcttatttcgtggtcaatggctttaaaaaaatctgtttcttgttttcttcaacaaactcactagttttcccttaaatgatattgtaaaaattaaagtaatcttgaaaatgttttgacaaaagtaaaattaaagggacatcttttcttaaaaaaaaaa

SEQ ID NO: 131005 - DNA, 481 bp, Homo sapiens
acagggaattgtcaggtttcaaggagctgaactctgtgaggtaagttttacgtatctactcattgtaaataaaagtaatgttttaaaagatgttttgccttgacgcagaacataagcaagttccctgactcaaaatattctacgctccactacttcaattgttcagttttcgtaactccccagatccttcaacaggcatccaggtctgcccaggatgcagcccagagatttctggtttgccctgtttagaaatccaaaaagtctggctttttacctttagatagttccaaaacaggaaaataaccctatttcttaagtgttagtaatatgagaggtaataaaattgattagatgttaaaatacacaaagtatgagatggttaaatcagacacacaagaattggagattttaacctgtatcagatcttcctgtacaccaagggatagacataactaactttgagacacaatgaagcgtgaag

SEQ ID NO: 131006 - DNA, 221 bp, Homo sapiens
tgtggagctgcacacatatggttccagctacctgggaggctgaggtgggaagatcgcttgcacccgggcagttgaggctgcagtgagccatgatcatgccactgcactctagcctaggccacagagggagactccatatcaagaaaaacaaaaacaaaaacacttatttctgcagaaaagcctgcatacaaatatgtataagcagctttatataaaatcac

SEQ ID NO: 131007 - DNA, 457 bp, Homo sapiens
aggtcccacctttaacattccctattacaattccacatgagtgttggtagggacacagaatcaaatcatattattctggctcttgctccccaaatcttgtatccttgtcacactgcaaaatacaatgatgacttctctactgtcccccaatgacttatctcattccagcatttactaaaatgtacaaggacttacagaccccatacaagtcaaaaacccagcaggccagtcattgaatcctacagctccaaatcatcttttctgaatctacatctcacatctggagcacaggtgtgtgatgcctgggctcccaaggcattgggcagctctgcacctgtggctgtgcagggtctatcccccacagctgccctcatgggctgggctggtgttgagtgcctgtagcttttcacactcagtgtgccagctgttggtgggtatatgaatctggggtctggag

SEQ ID NO: 131008 - DNA, 416 bp, Homo sapiens
cttcccactcccatcaccttcctgactcaggaatggcactgttgtaagtgacatataaccttttatgagagggaggaggaagaggatgaaaagagagatgaggcagatgatgttaggtactttatagatattatcccactgaagcctgtcatctctttcccatagctgcctccacttaaaagataagactactgatactctgagaagatgaacaagtaacttcctgatgatcacaaagatgaagctagtgttgaaagtcagatgtgattccaaatcaagtgctctttttactacagcacattccactcccacccccaacttaccctattgggctgaggggtatcttgctgaggtttgggcatgactgtgggcatgacttgagtgtgtgtgtgtgtgtgtgtgcgtgagagagggaa

SEQ ID NO: 131009 - DNA, 414 bp, Homo sapiens
ctttttaatgtaaccatactactataataacctttaaaaaattaaaattgtttaaaaatcatctaatatacaagtggttttcaaatttaaattactcccaatgggctcataaataactttttacagttggtttgcatgaaacaggatctaaacaagatctatacttatgttcaattaatatgtttcattcaagtcttttttattttttccaagacagagtcttgctctgtcgcccacactggagtgtggtggcatgatctcactgcaacctccgcctcctgggttcaagcaattctcctgcctcagcctcccgagtagattcaaagaaactggctagaatcgcatagggtgggggaggatttgtggaggaaaagtaggcatataatagctgaaaaagcatcgtagttgatcctc

SEQ ID NO: 131010 - DNA, 327 bp, Homo sapiens
ggcggacgtctcatgctctagattccaaatccatctgtatgcgtctatctcctggtaccttcctagcatcaattctgtatttgtaggagtcaatcaggagacacaaaccactcaacagtttaaactaattcaacaaccacctaaatgcccatcaaaactggtaacatttctttttttggagacagagtctcacttcttcacccaggctggagtgcaatggcacaatctcagctcactgcaacctccgccttctgggttcaagtgattctcctgcctcagcctcccaagtagctgggataacaggcacatgccgccacgcctgcgctt

SEQ ID NO: 131011 - DNA, 726 bp, Homo sapiens
tgtaaagatattaattttttgtatcttccttgtaagcttgacatcattctctttcaaaacacaaaggtactgtcatgtatttgcacatccctcatgtcttctgtcattatttactcttctgaaattatttcttctcttggaggagtactttctctgtgtaattttcaaatgttgtttgtgtatatttctgtgtgtggcaaaacttttgaagtcttctattccaaagagtatatatatttcaacctcactttcaagtgatgaaatatctatatataaaactgtaagccacaagttatttttcttttacactttagaagggttcatccttatcttcttgcatcgagggtttcttatgcccatctaatttttgttccttgtttcgggaagtcttttgaatgtttgcactttctttacttaaaatatactatgatacatctaagtgtaggtttttaattctaaatgttatgtgtgttagtggtgagataggtacaaatgcaatagaggaaactaggaaaaattctcaatccatttggggtgtgtgtgtgtgtgcgtgcgcatgtgtgtgtgtatgtgtgagtgtgtgtgaaacaccttcctccaaatcttaatcttacaggtctttttacctcatcaaaaaaactcagtaggtcaaaaactctgtgttgaattggtacctcttgaaagagcctgatgccccactaacatctgtggtccatcttgaatggg

SEQ ID NO: 131012 - DNA, 493 bp, Homo sapiens
gttggtcatattaacaggtggctaagggcacctcaggtggaggggaaaaagcacaggccatgagacagccgggcagatgaagggccctgcaaatatgtgtggggtcttccagggggaaattggaggtgctgggacatgatcagctgaacagcttggactgagggttccagggaaccagagagggccctgagcagggaagaggcagtgtcagctctggatgcaggaaaatttttcagggcttgtgctgcgagggccacagcatggaggcgagaggctgcagaccgggatgttgggtgggaaatggagcaatcgtcaagaccgaaaagggcctggccatgcagatagaggggaggagacagggaatggagggaggaggaagggcatgatggcagacatttttggggaagtgaagtttacaggaacccctgactcatgcatggggtggttgaaaacaggaggcaactggaataagtcctgggtcctgactgggata

SEQ ID NO: 131013 - DNA, 410 bp, Homo sapiens
atagtttaaatgatgaggttgatttctgattgacaatggcttaagattagtaatatcttaaaatagtctaacccatctcttcaactaaaaaatatacatatcaaagaaaactaataaaaattatgtaaaataatgaatggcttttctgtttatcaaaatttactaaagtatggcaaaggaatcattaggagttgaacaaaaaaagaatctcacatgttaatacacttaaaatctgtttttttcaaacaaatactctgctgtctgattatcatctcatgatataattggtgcaaagtgcaaaaagttctctgaataaagatttttaagttctgctaatagacattatagctcatgtgtgtgtgagtgtgtgatgtggaggctcaaattttaatgtaatatatgactcatgt

SEQ ID NO: 131014 - DNA, 617 bp, Homo sapiens
ccagccatcctttgctgtcagtgtgtggatcagaatgagtaggggagcaaacttacctgaatactgttgttgagattttcagccagccatcctttgctgtcagtgtagggaacagagtgagtaggggagcaaacttacctgaatactgttgttgagattttcagccagccatcctttgctgtcagtgtgtggatcagagtgagtaggggagcaaacttacctgaatactgttgttgagattttcagccagccatcctttgctgtcagtgtgtggatcagagtgagtaggggagcaaacttacctgcatactgttgttgagattttcagccagccatcctttgctgtcagtgtgtggatcagagtgagtaggggagcaaacttacctgaatactgttgttgagattttcagccagccatcctttgctgtcagtgtgtggatcagagtgagtaggggagcaaacttacctgaatactgttgttgagattttcagccagccatcctttgctgtcagtgtgtggatcagagtgagtaggggagcaaacttacctgaatactgttgttgagattttcagccagccatcctttgctgtcagtgtggggatcagagtgagtagg

SEQ ID NO: 131015 - DNA, 433 bp, Homo sapiens
actcagtttttgcaatgcaaaagcagccataaatgacatgtaaatgaatgagcgtgatcagtgttccagaacaactctacttacaacatcaagcatggggctgcgcttggtcccctggccataggatatcaacccctggcctaaggtattgtgcagactaaatgagatgagattcattcctgtaatcccagcgctttgggaggctgagatgggcagatcacttgagctcaggagttgggagaccagcctgggcaacatggcaaaaccccatctctacaaatagtacaaaaaaagtcactgggtgtggtggagtgaacctgtaatttcagctactcgggaggctgaagtgagaggattgcttgagcccgggaggttgaggctgcagtgagccaagatcatgccactgcaatccagcctggaagacagagcgaga

SEQ ID NO: 131016 - DNA, 149 bp, Homo sapiens
tatgaggactgaactgactgacttgtacataggacgtatcagaataaataacttagggcaagagtaaaggtagcttttttacagtaacttcaagcttatctccatgtagtaccttttttttttttttgagacagggtctctgtcatcca

SEQ ID NO: 131017 - DNA, 720 bp, Homo sapiens
tgcagtggctcacacctgttatcacactttgggaggccgaggcgggtggattgcctgaagtcaggagtttgagaccatcctgaccaacatggtgaaaccccgcctctactaaaaatacaaaaaaattagctgggcgtggtggcatgtgtctgtaataacagctactcgggagactgaggtaggggaactgcttgaaccagggaggtggagggtgcagtgagccgagatcatgcctctgtactgcagcctgcgcaacagtgagactccatctcacaaaaaaaaagaaagaaagaaaagaaaagcctcatgaataagcagtacacagagaattgtgtataaatgtaaacactcaaaacagctattataattttccaagtttattaagcttcctgacttcttagtcactcatttaataaatattttagagtgcctactttatgcccataaaacagaaaatgggaggaaggaaagaagtaagcaggtaactgaggcagtcaggcagtcagtcagtcagtcactcacagattcctaacatagctagaattggtcatttcaaatacactttccctctttccaactgagaaatttccaactgaggattccctccctctttccaactgaattccaagacctacttaattcttgctctccactttccatgttcctgctcctactgttatcaaaatgcatctaaaaacatggatcaaattctttttatgt

SEQ ID NO: 131018 - DNA, 289 bp, Homo sapiens
gggaaacagtcagagaagccagcaatttgctcaaagttttgggctctacttttctctgtttggttggaactggggcttaggggatcctggaacttagtagaagctcaataagtacttgatgagtggacaaatggatgagtactatattttcaggtacacaccaggccttttttccctccactcacagcccacagcccttctgataggccgggttcctgcacttgatatatgctacatcccattaagagagttccttcccctccctaggctttggattctccacatgaga

SEQ ID NO: 131019 - DNA, 345 bp, Homo sapiens
attgtgccaaataattgacaccattctccttttaccattagtagcaattcgagatggggcaaagacactgcaactaaactgctgaatgtaacaaccagattactccaaactgatccattgtactattttgcggggagggcttagacttttctctttaaaagtgaattttaacgaaatagccttgcagatgggcttatctataagttctacaggttggttaaaatttgtggtgggcctttagttagccgtttacattttatttgtttttttttataggctgtgaagctcaggaaaagggtaggcaggtaaaatttgtttttaatgagttgatactttttagaaacc

SEQ ID NO: 131020 - DNA, 264 bp, Homo sapiens
agaacaatttggttaatgtccacctctaggaggaacaataaacatcggcaggatttgtgtttctttagtcttctattcccaaaattaacaatttgtttaagttagaggttggacttggactaaagatccatagtaaatggaaattaactccactgtctccctacatgtttaaatactgcgagttttatatgtcatcttagaaattcactcatcaaatatttttccctctagccaaagcagaagcccttaaataaacaagccatg

SEQ ID NO: 131021 - DNA, 588 bp, Homo sapiens
aaaaaaaaaaagaaaaaaaagaggaagaaacctgactttctaagtttgcacagttactgagtagtggctgaggcatggcttgggtccagggcctcttcctgtggttcccaagtgcttttgagtacaggaactgggctgcctcttcaccagggaaggattagtgtttattaatgtttattaaacatcttctgtgcttatgaagctgctgggcttggtgctttgcatacttttatttcattgcattctcatagccaccctctgaggtgatgttacttatttctgatttaatgatgaggaagccagagatcaaagaggtcatcaagctcgcaagagacagagccgtggacccaaacccaggtttctgattctgcagcagctataaattctgatcacagagatctaatgacctctaggagtcttccactcctaggaggtatgtagaatggaccactcactaggtagttggatccactaccagcaatgtgaattctcacactgagtcaaaatgtgtctctacctactgatcccagaacagtcccctgctgccgaattgaatgaatctcatctctcttccctgagtcagccctg

SEQ ID NO: 131022 - DNA, 471 bp, Homo sapiens
cgtgctaagattacaagcataagccacggcgcccaggctttgtctctctttttaagccccatccacccacagatacaatgatcccagctagtcagaatggatgtttccagttttttcccttagatcaaaatcatgacatcttgatttcaaagatcatcaaggagagagtgttcccaagtcatccctagcataccagctccaagaccagggactataatgtttaacatgacctgagcaaggcggggtgtctctctttcctggcctttggactgagagggacaaataaaaagtcaaattagcctcaggaccaaaagcaagacatccagtgtgactcagatttgtaagaaaggcaggggctccttagaccagccttcagggtcagttcataatcccttctgaaacagcacagcctttctgaaaacaaacagcttagggaggccctgtgtggcggctcacacctataatcccagc

SEQ ID NO: 131023 - DNA, 768 bp, Homo sapiens
gaaattcagtaacttcaccaaaatatgtcttaaaggtgaagacatcactataagactataggacagaatgtactttcagtctaaagatacaaggttctctttattttagaatatatgtgtggtggtggaggtgattaaaaaactaaggagttggccgggcatggtggctcacatctgtaatcccagcactttgggaggctgaggtgggtggatcacctgaggtcgggagtttgagaccagcctgaccaacatggagaaactccgtctctattaaaaatacataattagctgggcatggtggtgcatgcataatcccagctactcaggaggctgaggcaggagaatcgcttgaacctgagaggtggaggttgtggtgagccaagattgcaccattgcactccagcctgggcaacaggagtgaaaccctgtctcaaaaaaaaaagaaaaaaagaaagaaactaaggaatttccggccaggtgcagtggctcacacctgtaatcccagcactttgggaggccaaggtgtatggatcacctgaggtcaggagttcgagaccagcctggccaacatggttaaaccccgtctctactaaaaatacaaaaattagctgggtatggtgatgggcacctgtaatcccagctactcgggagcctgagggtggagaatcgcttgaacccagaagacggaggttgcagtgagctcagatcatgccactgcactccagcctgggcgacagagcgagactccatctcaaaaaaaaaaaaaca

SEQ ID NO: 131024 - DNA, 432 bp, Homo sapiens
ggctccaacctctcattccaactccctttcccatggtaaactccaccaaccttccattctagcagcatcatgccactccacattcagatgctgtgtgttctcactgtgccttttttttttcttgtgacaggatctcactctgttgctgaggctggagtgcagtgttatgatcatagcatgctacagcctcaaactcctgggctcaagtgagtctcccacctcagccttccgaatagctaagactacaagcatgcgccaccatgctcagctaatttcttttattagtatttttagagacagtgtcctgttctgtcacacaagctggagtgcaacagaatgattatggcttactgcagcctcaaactcctgggctcaagcagtcctcctgcctcagcctcctaagtagctgggactacaggtgcacaccatcac

SEQ ID NO: 131025 - DNA, 814 bp, Homo sapiens
gcatccaaaaaaatttttttaatttgttttagacacaactttcaactaatcttcccaattgcctgcgtcactccttgataataacttgagctctgagggagtaacatttacactttgaatgtgtgtctgggcagccattcataaccttcagataattattgtgcttcatccctctttatttgagatcacaaaccttgccagatctcctgacttgtgcacttagatgttctgtatgttatgcttttattttaaagctaagatcccttgggatctttggagaaaccatagtgtcccaagaaggggttgaaaatctctgcattgcagtttcccttagtcattttatctagtccatttgggtccttgagaagattaaatttatgatcctgttatctgtgtaggtctctccaaaagttgagctcagacttttatacaattactttgtagtgccggattttctgatgcatttattgactttattgctaatcttcccaatgcatttctaaatgatagtctttggctgctgaaccattcctcttattgctcctgctttctgctttccccctctctagggattgaaacccagggtgagtgacattgttgcacccagcatctatctacaaggatactgatgatttttaaatccttcataaatttgaatgttgaactttactgttggctgtggaggaataatctaccttcaaatctcagggaaacatccaaaagagaaaaggggaaagcgtaggagaatttactttagcgctgctcatatatttattttgaaggctggcagaatctaaaaatggggctgtaaatt

SEQ ID NO: 131026 - DNA, 358 bp, Homo sapiens
ggagtagacaggaagtgatggggcacctgtgttacacgtgctcagggtatggatgtccttgagcctgtagccttttccatttgttcaatccacacacaaatgttgaatctgtccttagccagagttggtgccagagggaaactgaagcccatgaggccagtccctgcccctcagagctcgtcttccagctgaaaaataggcctatcccacagactgctccatgcaaagctgtgtctaatttttgtgcggaggaaggaaggctctaggaggtcagggcaggagggaccacaaggagccactggcattttagctgacccttgaaggatgggaggggttcacttggtggacttggagtcag

SEQ ID NO: 131027 - DNA, 214 bp, Homo sapiens
aagttttcaaattttaatatgggtttttaaacgtattataaacttctgtggggcttttaaaaacctgtacctaggccaagcacggtggctcatgcctgtaatcctggcactttgggaggccgaggcaggtggatcacgaggtcaggagatcaagaccatcctggctaacacggtgaaaccccgtctctactaaaagtaccaaaaattagccagg

SEQ ID NO: 131028 - DNA, 341 bp, Homo sapiens
gggctcaagtatggctcaggccatagcttctgaaggtacaggcagcaaatcttggcagtgtccatgtggtgttaagtctgcagatgcagagaatgcaggaactgtggaggcacggcttcctctctagatttcaaaagacatcacaaagagcctggggctccaggcagaaacttttcagaagggcagagccacacagcagttcctactacagcaacacctggtggagccatggggaaaaagccatcccccaaatcccagaactgctgagctaccagggcacaccaccagcctgcaagagctgcaggcacccgattccaacccaagagctatgtgggctgcac

SEQ ID NO: 131029 - DNA, 294 bp, Homo sapiens
tccaagaaaggagaaacatatttgctctgcaccccacagtctcttgagctttgctgttaaccgcaaatggtaaattagttctattgcaggagaaccaaattctactcactttctaaatgcacgtaattgccaagcataggagattaataccctagaaactaacctcagagacagtttgtttaaaaacaaacaacctaactaaaaacccaaagccgttgagttccagaaacaaccactctgaagccagcagaaatttctgcatttaacccacctgcaccccggccctcccccagt

SEQ ID NO: 131030 - DNA, 322 bp, Homo sapiens
aaaactgtgcactggttgatgaaggcaggatgaggcggacaaacaaggatggcactagctgaggggcctcagaacatgcgtcagggtctgaagctgctgtgaaggtgcttggagctaaagtagcattattgcaataattggggaggtgttcagagaggaccctcactttgttgaagggaggctcttaaaatacttcctgttatttcactttcccaccctatggagggcaagtatttgattccagcttgaatcgtagttgttgttaacaataaaaatgatacagacacacacagaaataagctgttcccttttcctttcctct

SEQ ID NO: 131031 - DNA, 709 bp, Homo sapiens
gttctgagtttggttttcaacacatttaaatggaatttatatttaggtttcagtagttattagtgtgagggatactcttgaaatttgtgccaggtacttttctggctcaaactattatggatcaggcgtagggtagctgaagttctagattattactgtgaaatcaagtgctgtttttgttaatgttcatttgtctggtataagtttgctctggggctaagctagatctatggaaagacttaacccttttccagaaagcttccaacttagggaaaaaaatttttttttttctaattctgactgttccacttctgaaaaaaacagatccacagatcagacttgtaaatgatctgttttcttaagatatcttctaacagaatgggtctccagggaactgagtgacaacacacatttagctgggagtggcagttcatctccctaaacgtaatttaacatcacatttatctacacactacagttttggaggcatacttggagattgaacttatacttctcttggcttattttattttattttatttatttttgagatggagtctcgctctgtcgcctaggctggagtgcagtggtgcgatctctgcatactgcaagctccacctcctgggttcacaccattctcctgcctcagcctcccgagtagctgggactacagttgcccaccaccacgcccggctaattttttgtatgt

SEQ ID NO: 131032 - DNA, 391 bp, Homo sapiens
cgagaggatccccgtccagtagtctgtgcccactgaccacacaatagatccctctagatatcagataggtatctcaaaattaacttgtctaggactaaaaccctgattttcattccactgaacatgagacaaaacaaaacaaagcaaaacaacttcttcccatctttcccacttcattaaatggcagcataatttttgtaactgcttatccaaaaaaaatctagggggtttccttgtctgtttctcacaccacatatccatctatcagcaagtcataataaaatctaaatcataattttaaataatgaacacgaatgatgtagttttgtagagtaggattgaatgctcacataattcacctgcttttttagaacatgggcatactgagaag

SEQ ID NO: 131033 - DNA, 347 bp, Homo sapiens
gcttagtgctcctgaagttgcagaggtttacaagctctcaagaatatttgtactccatcttcgtacagggagggccgacccacgtgaccgtctcactcaactgagaaaaactctgagttggagggacagagtagtcatttaatttgttattttggaaatgaggtgtcatccttgttggaggctttgggagctggcagcttgcaagccagagaagggaggggctggggattgatgggagccttgttctcagcttgcttggtttaggttggcggacgaagagtgaagagtgctccctgctcagaaggtgaattctgataaagcaggggaatgtcttgtaagagggcgcg

SEQ ID NO: 131034 - DNA, 623 bp, Homo sapiens
gtctccatttccaaaaacgctccagaatctctagatatatttaaatcttccccaacacacttggtccaacatgttgcttctgttttcattgtctgtcaccatgcctagggcacagcaaacaagagtagtggattgataacaagtgttagttgatgaacatgaaaaaaacgacataggccgggcccagtggctcatgcctgttatctcagcactttgggaggctgaggtgggcggatcacgtgatatcaggagtttgagaccagcctgaccaacatggggaaaccccatctctactgaaaatacaaaaaaaaaaaaaaaaaaaaaaaaaacactgtgttggccccggccctgggccctgtaggaaaaagttttctaaaaccattctggtgggggggcgcggcgcccgcacgatgggttagcgttgacaaaggggccatagcgcgtgctccccataaggaaactccgggctccatggccaaatcgcggctgtggttctcctccccattaaaaagaccgccggggggaccccggcgccgtttgtgaacaaactcccgaacggggggttccgacgcgcacagcggggatcttcccacagaggctcaggcgagccgaaataaattacg

SEQ ID NO: 131035 - DNA, 415 bp, Homo sapiens
caaaacctgcatacattgctggtgtgagaatataaaatggtgcagccacttcggaaaacagtctggcactgttcaaatggttaaacacagatttatcgtatgaatcagcaattccactcccaagtatatacttaagaaaaaggaaagcatatatccagaccatgagcagtggctcatgcctgtaattccaacactttgggaggccaaggcaggaagattgcttgaggccaggagttcaagaccagcctgaacaacgtagctgggatttcaggtgcacaccaccatgtccggctaattttttgtattttttgtagagactgggcttcaccatatctcagttctttaactcctgagctcaagcaatcttctcgtctcagcctctcaaagtgctaggactataggcgtgagacactgc

SEQ ID NO: 131036 - DNA, 375 bp, Homo sapiens
ggcgttcaaaatcagcctgggtaacatagcaagaccccatttttacataaatttttttaaaaaaaattatctagttgggggggtgcatccctgaagtcccacctacttgggaggctgaagtggaaggattgcttgaaaccaggatttcaaggttgcaatgagctatgctgctatgattgggccactgcactccattctaggtgacaaagtgagatcctgtcttttaaaaaaaaggggtgaggggccaaaaaaattgaatagacatttctccaaagaagatatacaaatggccaaaaagcacatgaaaaaatgctcaacatcaccagtcactagggaaatgcaaatcaaaaccgcaatgagatacaacttcacacc

SEQ ID NO: 131037 - DNA, 251 bp, Homo sapiens
aagaatttaataaatgtgtgaatggtaaacggggagcaatcaggaaatcattcagaattaatcaacataatttttgtatttaaatttaagtaaccaggccaggtgcggtggctcacgcctgtaatcccagcactttgggaggccgaggcgggcggatcgccagaggtcagaagtgcgagaccaccctggccaacatggtgaaacattgtctctattaaaaataacaaaaattagccggctgtagtggcggg

SEQ ID NO: 131038 - DNA, 545 bp, Homo sapiens
ctctgccttgtgtcatgtgtctgctgtcatcttaggctggcatcctaagtatgactgccagcaataatctgggctgcatgcttcttcctttgcattcaggagtaggagagtgattgcttttcacactaaactaacaaaattcttcaactttactctgattcttccaacctgaacctgtcattgtgtccagggtaagctcaggtgccagtcaggttttgctcacttctgaagcaaccactgtgataaaatgaaggaaattggattccttgacttacgctactcaaactacatggctgatacgcaatggggaaagggtagttccttaaagaaagattcttaggtagtaggcagagtggggatagttcttgggtaagcaactgatgaatgtcctgtgcagatgacatggattctgttaccaactcttacttccaggcttgttgagggaagtggaacaattcagggcttcagagacaagcccatctgcattctggcctcatttatgtcacatactagtgcataacctttacaactcttataaacatcaa

SEQ ID NO: 131039 - DNA, 394 bp, Homo sapiens
agctgggactacaggtgtgtgccactaagctcagctaatttttgtatttttagtagagacgaggtttctccatgttggtcaggctggtctcaaactccaggcctcaggtgatccgcccaacttggcctcccaaagtgctgggattacaggcgtaagccaccgcacccggcctgaacattttctttagagtaggatccgatgctgttcttgcaaagacatgaaataatgaaacagaccgcgtttgcggttacttcgaacggtgcacagctgtgagaggactcggcggatgagcagtcgttgagaaaatggtttccttcactcgctcactaccttttaatcagaaattttggtctctgtcccgatagtaaaacccgtttgcgtggggttggcagta

SEQ ID NO: 131040 - DNA, 484 bp, Homo sapiens
ctcctgcctcagcctcctgagcagctgggattacagttgcctgacactgcactggctaatttctgtatttttagtagagacgggttttcaccatgtggccagtctggtcttgaactcctgacctcgtgatccacccaccttggcctcccaaagtgctgggattacaggcgtgagccaccatgcccagcctattaatttcttaaggctgccataacaaattgccaccaacttgagcctcacagttatggaggctcaaggtctgatatcaaggtgtcaacagggccatgctccctctaagaatccttccttggggcttccaaggttctagaggctctaggaatgttttgatgcaccttggcttatgggtacattgctgtcatctctgcctccttcattacttggccttcttctgtgtctgattgcacatggccttcctataaggacaccattcattggatttagggaccactctaatccagtatgc

SEQ ID NO: 131041 - DNA, 494 bp, Homo sapiens
ctctggatcaagtgtctactgcccacggctggccaggcaggtgcacgacagccttcctcagccctccctcctggctctgcttcagccagccctgcccacagggccagaggcccactgcttttgcttctgggggactctgaacagccagctcccggccctctttcagcccacctcagggaccctggtacacaacaggaagtcatggaggggacatgcaggtggggtgcaggggcaggatttgtccaaaccaccaacattttagtttcttttttttcttttaagacagagtgtcactctgttgcctaggctggggtgcagtggcacgatcttgtctcactgaaacctctgcctcctgggttcaagcagttctcctgcctcagcctcctgagtagctgggaccacaggcgtgtgccaccatgcccagctaatttttgcatttttagtagagatggggtttcactatattggccaggctggtcttgaactcctgacct

SEQ ID NO: 131042 - DNA, 668 bp, Homo sapiens
atcctgggaattatgtgcttaatcctgtttcctggatccaatggctgtcctcttttttagtattatatctgtggcgcatcctccagtagattgctgagaaagcttgcataggagatttttttttggaaaagctttttcagatattaaaatgtcttcattatgttctcatatttgtgacaggtttgcttggtttaaagttgtagattgaattgttacttgggattttgaaggcattatcccattgtcttctagcttctaatgatgctgatgagaagtttgataccattcttatttccagtggtttgtatgtgacctattttttaaaatctctggaaggttttaggatcctctctttatccctggtttggaattttggaattttacatttatattttaaaatttatttgctaagcactgagtatgcccattaaaactcctttagttctggggatattttttgaattagtcctcctctgggttcttctgttcactttttctaaaattctcttagatactggatttccaagattattctgtgtttttaaatttttttaatctcctgttgtttatctccttgcatctttactttacatttggtctctttctttaactttattatctagacctttaataggctccccctatacagatttaaaagttttctaaga

SEQ ID NO: 131043 - DNA, 166 bp, Homo sapiens
acttctcttttttctttctccgaatttatttgctatcatgaagctcagcagatacgtgatataaagtaaacattaattctacttcagagtttctccaggttgtaattggtagctgaagaaatactgcagacattttaagttaaatgtaacttgaatttatctgggc

SEQ ID NO: 131044 - DNA, 428 bp, Homo sapiens
agtgaagctctgccttccaagtcagaatacatctgacaaagtgcccaagccactgaaatattactacacctacttattctggcctctgggtgaatacttattaatttattctaagagcttaaattaatcaaaatggcttgaaagcactaagtacttccaaagcgcttgaaatgataaatgcaactcaatagatagccttcgtcctggtatcttacaaaaagtaaataggatttagcaaggttttctccctttagttaattagttgggagtttattctggcttaccagaggcatagttgagagcacaagctgtcactgacttaggaactttacaaaatgctgcaaaacagcaatgattgtgaaccaactttctgcctgctgtctatttattccttacactgaagattgcttggtttatccttttactga

SEQ ID NO: 131045 - DNA, 433 bp, Homo sapiens
tccagactgggtgacagactaagagagtctgtctcaaaaaaaaaacaaaaaacaagcaaacaaaaacctcccaagagttaacattaactgagcatacattaaatggtaagtgtcacacactgttctatgtatgcatagctcagtttttaacttaggaagtaaattctaataatattccttatttttttctgatggggtaattgagggcagctactctcagtaacattgaacccgatagcacatagtgaagactcattatctttatcaatgatgtgtcagttggaggtaaaaattaggtccttttcaatatccagtggtgactgtgctcctaggaagatcagccaaggatacacagtccgaaaagtttatagcttaggtaggtaggattaagtgcagtgcctctctagtacacacctggatgtgactcttgtgt

SEQ ID NO: 131046 - DNA, 531 bp, Homo sapiens
gctggggactggtcggactgctgaaggaatgtaaaccggcataaccttcagagatgtgagttggatacatcatgtccaatctttaactgacccctttgagcaggcacaaaacctcacttctgtgaatttatttctgtgaacttataatcaaggaataattcagggaatgtattggggtctttcattcatcaagtatgtattgtacacagacacaaaccctgtgtcacagactgggtttttagcaaagaacacggagctagctttgtggaatttggaaaggccttgacaaagaagaggtgtttaagtaactgaagagggccagtggggcaggactttcccaagacaggaccaaggttctggtgaggaaggcaggggttgtgtcatacacagcctcctaggccatcttcaaggattgcaagtgcagccttggagtgtcatgattgtaagggcatttgtcaaagggtttggtctaggtctaggtcccattgagggaagctgcaagtccggaagctgacaggaccctcagaaggt

SEQ ID NO: 131047 - DNA, 564 bp, Homo sapiens
ggtcacacaggagatgggaggagagaaagcagctaccgtgggttaggtgagagaagaaaatatgttcaattactccgatgttggtagaagtatttgactggataagagaaaagcaaaagcaatgaaaactttttggggatttacacagtaacccaggattgaaatatacaaatcagggaagtgaaaataaagacacaataaatccaacaggaagaatttaaagatggctgcatagtatcagtgctgaaggcataatcaacactataaaggcacacgggccaggtgcagtggctcatgcctgtaatcctagcactttgggaggctgaaacgggaggactgcttgagctcagaagttcgagaccagcctggataacaaagggagacccttgtctctacaaaaaattctggaaattaggtgggtgtggtggcacgcttctgtggtcccagctacttgggaggctgaggcaagaggatcacttgagcccaggaaatggaggctgcagtgagccgtgatggcgccactgtgctccagcctgggccacagagcaagaccctgtcaaaaaa

SEQ ID NO: 131048 - DNA, 595 bp, Homo sapiens
aaacagagacatctcatccagtctgacgcttctgcatctgcccaatgcaggggagctaaatgagaacctggaaaggtgaatacactttacccaagaaaggcaataaatctgtgcaaagagaatggaagtatgaaaagcacaacagaaaaatgaagctttctgaaattagttttttagaccagacgttggaaaactttttcaattaagggtcagagagttaagtattttaagcattgtggtccacatctctgtcactactccactctgcctttgtagcacaaatgtagccagagaccataattaaatgaatgagttcatttaatattccactgaaaagctaaaatttgaatttcattaaactttcatgtataatgaaatattattactcttttgatttttgttcccaaccacttaaaaatgtaaaacctgggcagatcacctgaggtcaggagttcaagaccagcctgaccaacatggcaaaaccctgactctactaaaaatgcaaaaattagccaggtgtggtggcacacacctgtaatcccagctactcaggaggctgaggcaggagaattgcttgaacccgggagacggaggt

SEQ ID NO: 131049 - DNA, 310 bp, Homo sapiens
taatacttcgttgtatcagcagctggatatgcacccgttaccaggaagcaacctacgtaagaagccctagagagtgctttgagttctgagagtaagagcttcctttgcagatgggtggggctaggatgattagaattaagattgtttttgtgttaatgctgccttaatgcacaggacccacacgggatccacactggatatacactggatatacgggatccacggaagcagtgatgattgctggttttgttcatagatatatcctgagtgcctagcctggtgcatagtaggtcaatagtaaagacttttc

SEQ ID NO: 131050 - DNA, 186 bp, Homo sapiens
ttcctttccaaaatagtttcagtttgggtcagccacaagagaaatttgcatgttctttgtaaggtagaagtgaagagctgtatttctgctcagaaggttggtatatggtcaggcactgttgcagctcacacaccctgtcactgacttggctgtatcaccatgttggcgtttggcttccagctcctc

SEQ ID NO: 131051 - DNA, 312 bp, Homo sapiens
ctcctgaatgtctctctagttttgtgctcagccccacctccttgtgctctatgatcaaatcacattgcactccttccagttcctccaatcttccatgctctgcctagccaccagaagcttgcagataattttccttctgcctaggatactcctgtcacactcttttgcctgattaactcctatcattgttctgatttccatttcaatgtcacctcctcagagaagtcttcctgactctgctggcttcacttaatgccttgctgtcaccttccatgcttccccatcgttaattgcatgacactttacccttca

SEQ ID NO: 131052 - DNA, 311 bp, Homo sapiens
aaggaaaaacacgtaatatgtaacaacaacaacaacaacaacaacaaaatcaaacaaacaaaaaccaaaccaaaagattgctgccacatttgactgacaccagatgacaggactgcatctccggtacaccattctaacccgaggctcagttgtatgagattatgtgagattgtcagccaccaggccccatccatttccacctagttaagcaattacaggaatgttgcaagtgcagccagggatagctttgaaacctggcttttttttccccactaacattaagatttcactttggttacatattacgaagg

SEQ ID NO: 131053 - DNA, 309 bp, Homo sapiens
caatagcaactgaaatgtttacgtttttggtgattatatcaacatcaaagaaatgcaaatcaaaaccacaaaagattgctgccacatttgactgacaccagatgacaggactgcatctccggtacaccattctaacccgaggctcagttgtatgagattatgtgagattgtcagccaccaggccccatccatttccacctagttaagcaattacaggaatgttgcaagtgcagccagggatagctttgaaacctggcttttttttccccactaacattaagatttcactttggttacatattacgaagg

SEQ ID NO: 131054 - DNA, 715 bp, Homo sapiens
atcacccgccatagctaattgggttccttctcctccaccatccctcaggtgatgtctgatcaccctcgcctgccttcaacaagaatcctgttaggtcattttagccagaatcttctgtttctcctgatggctcctcttagtaattttccatccactgactctatattcccatctttgggtctaagtttccacttgccaatcgtgtattcaaagttaagcctagttctatactcagatctcttttcccctattgcaataatcttgaataaaatttgtttttaccactttaagtattgtccatctctggttttccctgacacaaccatgtgacttcttacattgtttactgtttgcttatcttaactcattcttcaaagctaagatgctgattcaaacacttatttctacttgcgtgagaaatataaaagtctgaggtctagtgtggtactaattcactataattgaaagaagtgcttgacctataaatgaagcttatgcttaccttagaattgaaacatatggctgggcgtggtggctcacacttataatcccagcactttgggaagccaaagcaggcagatcacttgagcccagaagttcaaaaccagcctgggcaatatggtgaaacatcatctctaccaaaaaagtcagaataattagccaggcatggtggtgtgagcctgtagtccccagctacctgggaggcgaaggttgc

SEQ ID NO: 131055 - DNA, 776 bp, Homo sapiens
ggtttttatatctcaggatggactatttatttatttgaaacatggtgtctgtctgtctatctatcatccaggctggggtgccgtgttgtgatcacagctcacgccgcagtcttaacctgttgggcttaagtgatcctcccaccacagcctcccaagtagctggcattacaggcatttgccaccatgcctggctgattttttttactttttgtggagacagggttttgccatgttgcccaggctggtctcaaactcctaggctcaagtgatccatgcgccttagccgcccagagtgctgggattacaggcatgagccgctgcgcccagcccagatggactatttgtattaaacgtttcctggcaacttgcaatagcttaagccggtaatcccagcgttttggacggctgaagcaggaggattgcttgagcccaggagtttgagaccgatctgggcaacatagtgagaccctgtttctacagaatatttaaaaaatgaggccagacacggtggctcacgcctgtaatcctagcactttaggaggccaaggcgggtggattgcctgagctcaggaattcaagatcagcctgggcaacacggtgaaaccctgtctctactaaaatacaaaaaattagtagggcacagcggtgtgcacctgtaatcccagctgcttgggaagccgagacaggagaatcacttgaacccgggaggcggaggttgctgtgagccaagatcgtgccactgcactccagcctgggtggcagggtgagactccatc

SEQ ID NO: 131056 - DNA, 392 bp, Homo sapiens
actatgttgatgggtgctgctaaataactgagaagaaatcactagaatctgtgtgccaaagaagacaaaataaaaattaaaaaggctgagccaggcgtggtggcacatgcccgtgtagtgccagcgacttggaaggctgaggcaggaggatcccttgaatccaggagttcatggctgtagtgcactacgatcccatctgcgaattcccaccatattctacctgggaaactgggatactaggacctggtgtctttaaaaaaaagaaaaaagtctaccagcccaagtaaaatcaatattatttattgaaactgtgctaaggactgtacatgattatctcgtggaatgtgaacaccaaacccataagggaggtccagttattatcctgattttac

SEQ ID NO: 131057 - DNA, 532 bp, Homo sapiens
agagacagcccagcctgggccatggaagaaaacccgaccttggaatcagaagcctggggctcctctagggggtggctggccccccgggaggccagaggaggcccatcgctgtcttctgtgctgaacgagctgcccagtgctgccacccttcggtaccgagaccctggggtgctgccttggggggcgctggaggaggaggaggaggatggaggaaggagcagaaaggccttcacagaagtcacccagacagagctgcaggaccctcacccttcccgggaactgccctggcccatgcaggccagacgggcacacaggcaaagaaatgccagcagggaccaggtggtctatggctctggaactaagacggaccgatgggcgcggctacttcggaggtccaaggagaaaacaaaggaaggcttgcgaagcctgcagccctgggcgtggacactgaagaggatcgggggccagtttggcgccgtgcacggagtcctacttctccctgcctgcgcttcctgctaccttcttaacgtgc

SEQ ID NO: 131058 - DNA, 342 bp, Homo sapiens
gtatatgctgtctcaaaaaaaaaagaaaaaaggacccataaggcttttagaagaaaatacaagagaaaacccttgttagccagacagtggccccgctaggcagactccttcagactcagtagatcccaccacagatgtcaggaagaaagagaagcaggagctccttctgtctactagtggcaaagcagcatttttatcccccaggcttctgggaaaggaaccttaaatgccttctgaaagcaggtctcaacctctcccaacggctaggcctccctttacagctcttaattgacaaggaagaagagaatgggcagcctggagtccaagatcctgctcccaagc

SEQ ID NO: 131059 - DNA, 1013 bp, Homo sapiens
ggaggatagcctgaacccagaagttcgaggctgctgtgaactgtgatcataccactgcatgccagcctggatgacagagaccctgtctcataaaaaaagaaaaatggtttacagtgtagttgtttgaatctggatccaaatcagctccatacattataattggtggatagggctcgtgaggccttttctagctacaggtcccccctctgcctcttgtccttagcagtctctttgtagaagaaccagtcatttgtcctggagggtgtcccccatctggattttgctgttggtgtcctttctgcgttcccccgtgtctcctgtatttctgtaaattggtagttagacctcaggccctgctcagagtctgttgctgttttgcttgtttgactgttgtgttttgctggagcatttcaccagtgaggaggcacgtgtggacgtccatctctttttgtgatgttagtagctgttgatgttcgcctagcctgctgctttattgaggttggataatgccttttaaggtaaaagaatcttgcccccaaaaatcacagctctggcattgtaagtgagagcactgacactttggccaaccctggatagtcttcagtgttagaaaatgaaaacgtgtcattgtcagcgtatttatcgtgtggataaagcttggtgaagaaagtactgtcgccgccattcttactgcagggaattggataaatggaagaagcctggttgtaagtatcagtgtactcagtaatgacagattcctccttacttagcactggggagtggaaaggtgacctggcttcattcttaaacctcttcgttggctggatcatgacattctgtcagtgtcgggagactgccagcgcacggtgcacgcctcttaccggcttcccacttcctcgggcagcagagctttaagcacaccactgtccccgagggccctgacctggagggttgggctgagctggggctgcctgcagggggtgacctggtgccctgcagcctccaccagcgca

SEQ ID NO: 131060 - DNA, 751 bp, Homo sapiens
ctaatttttgtattttttgtattttttgtcagagataggattttgccatgttgtccaggtcggtctctaactcttaggctcagggaatccacccactttggcctcccaaagtgctggaattacaggcatgagccactgcgctcagctcagaccacttctcacaccagattctgttatttatacctgagaaaacgtatgggtggtagcatgggatgagaaaaaaggaaaattctaggacaatcgttggtaaaaatcaccttaggatgaaaaatttgaggcacatttttttaaaatgacagaaaaagataatcatctcattggttgaaaaggagcagcatgatctctggaagcatcaatatccctcgtcgtgatgtgttgaaagctctttcactgttttggattcctagtttgaatagttgtatgcgaaatttgattcctatctggtgtatgttttgggtgcgtacaagggaaacatttggtgttattacctgttgacattgcaggacgaagggatgctttggttgtgaagatgtatctggatatatgttcatgtaataatgacatctatatcagagtcttattaatttaatctaatgaaacacacacaaaaaaaaaaaaaatatttggggggttggccagaaatttaaacatgtgtggggggggccgagtataaggaatgcagtgtccaaaactggctagtggtggttcacaaaagcggggggggggttgaaccaggtgggttggtaaaggc

SEQ ID NO: 131061 - DNA, 724 bp, Homo sapiens
aggctggggagagtatttagcccctctgaagcatgtttctgcttagagcagggtgcgtatctgaaaaagtggaaatctgtaggaaggaaaaagggggaatggatattttataggcaataaacagtgtctattattggaaatatgttttaactgagggaatctgaaaatatttttaaagaaggaaagatttaaggtggtgcttggaggatgggtaagtttcagtagattaacatagggattctagacagagggtcaccctttacagggtttgaaactatgagggtatatggattttggaaaaatggcacatacgtaagaatgactggagaataagtagggtagagaatactaggggacaggaatggaaaatttccttggctttgcataccaagatgaggaatttcagtaatgtaccttttaaataagaagagcagtattaaatgatctaaattcccccagccctttgtaattgaattggaaaaggtttacttgaagacaaacatatttaggattactgctataaattaaaggccaatgagtgtaaaatcttgagtttaggtattatgtgtaaaacataaagatgaaatattgtaatagaatgcatagtatttgattctttataaattagatggaggaactgcagatgtcttttttttcaagtctaagtatgttggaagatcacaagttttgtttggttgtgctgagcctgaaaccgtgtgaaatg

SEQ ID NO: 131062 - DNA, 388 bp, Homo sapiens
ttagccccacttcatctctgcagcaaacgttccaatgtaagccttaacaattgcttcgctctattcaaagaaatgtattagaaacataaaatatgatctcgcccaagaacacttggacctgaggatggccccaaactcccttggctcctctacaaaatcagggcacttttcagggaggacagcgtcccacgatggccacttatttatgtggtctgtcctttgcaacagtctccgcaacagccttccattgaattctgtctcattggacacctttctggggactggggacagggcaggcctgggcccgcaggttctcagcttgcagctgacagggcacggacaatgtgccaggcaggagcggaggcccttgccaactgcattcctctcc

SEQ ID NO: 131063 - DNA, 268 bp, Homo sapiens
  misc_feature (22)..(22): n is a, c, g, or t
  misc_feature (33)..(33): n is a, c, g, or t
  misc_feature (77)..(77): n is a, c, g, or t
gtctctgcaggatccccggcgnagctcctggantcaactattcccctgctcagcctcccgagtagcttgaattatangcatcgccactacacctgactaattttgtgtatttatagtagagacgagttttcactcatgttgtccgggctgatcacttcggcccaggagtttgacaccagcctggacaatacggggagactctgtctctactacaaattttacaatattagccaggcgcggtggcatgtgtctagtcccagctacttgg

SEQ ID NO: 131064 - DNA, 678 bp, Homo sapiens
gggagtgaccgttttggagtggtctgagcgctacagattggtccccaggtgggcctgtttgcaagcaagctgtggccccgaccagagtccctaatgctcatccatgtatattcagtgggtatagcccctctttagccagggttcttactttttcatccaagaaaaatgaaatttgttcctaaaggccagtgtcctcatcagccctcgcccaacgtcccgcctcatcgttacattttccattgtctttgctgtgaacccaaccctgactcctgaggtcagcctgcaggagcggcccctgacttcatgcttgcactcagtccattagggcagacagctgtaaacggaagcgagtgctcactgtctctctggagcattatgtggatgaaggaagccaagaaattgggtttaaaaatctggagtccgttattagaagcctgaggtctcttgagtgatctgagcattacaaatcttcagcccaggatacagccatttacgtttaataggaggttgatggatgtgggtaattttcaaatctaatatgaaatctatttttaaaggaatttgatgtcatcgaaattaaactgggggaaaaaagatcaaggcagaatcctactgaagaaaagattcttggccaggatttgttcttgctcctcatctgggcacaatttctcctcatgg

SEQ ID NO: 131065 - DNA, 132 bp, Homo sapiens
tttgagaccatagtgagaccccgtctctactaaaaaattactttaaattaactggacatgatggcatgttcctgtggtcccagctacctgagagaccgaggcaggaggatcgtttgagcccaggagttggag

SEQ ID NO: 131066 - DNA, 298 bp, Homo sapiens
gaaattcccaatgcctgttaagttgttggacccaagtaattatgtgattaaaaaaaaatttaaactccataatagtcctatcttttaaaatttctttgaaaatagaagtgagtgtcttgtttcatttttgtccactggtaatttgggaaagagaaattgttgacttggctaaggtcacaataaaggcaagcccaactcctttaccttatatttatttatttatttttttgagacagagtttcattcttgttgcctaggctggagtgcaatgcgtgatctcagctcactgcaacctcct

SEQ ID NO: 131067 - DNA, 334 bp, Homo sapiens
ctcaaatgagtccctaactctcttcacccccacggctgctgcttcatccaggactttgtcacctttcagacacattcatatcatcgccctctagctgatctctgtgcacgtagcccctttaatccattcttcttattggcaacaggagcatctttgtaaagcacagctctgacctgatcatgtagttccaaaaatactacagatcccagggctccaaacaatatttccacaagtgtagcggataagatgctttggaggaacatacaaatgaatacatttcatttgaatagttgtggtatttttagagctatctttaaaaaataaatctaataaa

SEQ ID NO: 131068 - DNA, 254 bp, Homo sapiens
ttttaagcttctgaagagaagacaagacgtgacgaatctggtgtgactgtcacattgacaatatccttaggcaaaaatacccatactatctaaatagaaaggaataacaaaccaggccagtgtggtggcatacacgtataatcccagctactcgggaggctgaggtgggaggattgcttgagtccgggaggtagaggttgcagtgagccaagattgtggcactggactccagcctgggtgacagagcgagaccc

SEQ ID NO: 131069 - DNA, 321 bp, Homo sapiens
tgctctaaggatcccggtgttatcgatgccacatctctgcctattttgtagagactgaaagggcaagaatggaagtaagaagattattcagaagtgtgttgtaggcagagatgtggctagtttgcattagagtgatggtggagataggcagatccaaatacatttcataagtaaaattaatggattaaatgcgggagatgagggaaagggaaatcaagggtggtgccttagataacccaagcaacagaatgggtgatattagagaaggcagagaacaggttaaggggagaaggaaagtggatggctagttttgataataat

SEQ ID NO: 131070 - DNA, 427 bp, Homo sapiens
  misc_feature (410)..(410): n is a, c, g, or t
tgctctaaggatcccggtgttatcgatgccacatctctgcctattttgtagagactgaaagggcaagaatggaagtaagaagattattcagaagtgtgttgtaggcagagatgtggctagtttgcattagagtgatggtggagataggcagatccaaatacatttcataagtaaaattaatggattaaatgcgggagatgagggaaagggagaatgctgcgtttgtgaacaccgtatcgaactcagtgctgccctgtcacagtagaaagcaaagccatgtggctgaactcagctgacagctgcccacagagggagcatttaaaccagccctagccagaggggaattgctggtcccagcagtctgaacttgagttccggcaggcctcaccactgtaggctaaagggctctngggtactaaatacactt

SEQ ID NO: 131071 - DNA, 153 bp, Homo sapiens
cacactggtgacacctagggcctagctgtaggaaacatgtctggctggctgccccgcctcctcacgccagtgcttttcccagcctgagcatctccatctctcagtgatatgctgtccaggcttggaacattctgctcctttggccactccagg

SEQ ID NO: 131072 - DNA, 354 bp, Homo sapiens
ggcactagctttctttctgtctgatttttgtttttagagggagttatagttaaaataggttgatcaaagggcctaatcttcactcagctactttttaaagtacttggttgagatcatgtcatatgagtataattcttctatgactttgagtgtgtatagcaaacctattatatatgtgaacatgagaaataggatctttatatatggagaatgtgcttcaagtgaagaagagaaatgcatgaaaagtacctatgggccaggcgcagtggctcccgcctgtaatcccagcactttgggaggccaatgcgggcggctcacttgaggtcaggagttggagaccagcctggccaacac

SEQ ID NO: 131073 - DNA, 477 bp, Homo sapiens
cggggagtttgtgcctcgaggcgacacgtgattcaggaacctgtgtagttgagagacatgaggaaggtcccaagacccagccccggggagcctgtgttcacagggccacctgtagagggtgccggaggatgggagctggcacagggcagctggagggaatcggcatagaggctgggctgcttccactcccagcagttgacaaggccgaaggagggggtttggcccctacagtcaggcctgggtgtgctgaagtcggtggtgagatgcactgttattccccagcaaagtgtgggctccctgaaggcagggatgaggctgagtcactgctgtgttgcagagcccaggtggagcttggtacaggagggggctgcaggaacaggggtgcccgttgaaagaggacaattggggcccctggcaggtggcaggagagggtttaacagctctgagcccctctctaccagggtgcccaggtcatga

SEQ ID NO: 131074 - DNA, 410 bp, Homo sapiens
cccacccctgtgcctggagtagcttgattctcagcacttgggggatctagtatgtgtacgtggagagggatagtggggtgggggagaattgccactccgcctgctctgccctgaaccctgtctttgccgacgggcatttgactgtgctctccccaaatcccaggagaaggcctgaccttggggtgtagcagcccctaagggttttttatgttggccacacccatcttggatacaggcaagaccaaggccaggctcttgggatgtgtcccccgtgtctagcacaggcctgacgtgtagtaagtgctcagtacatatgtgtggagtccgtgaatgacagaggcaaagattggtccaggattggtctgtgagtcttcagggaatcacatgtctggggaggaggtggagaccag

SEQ ID NO: 131075 - DNA, 294 bp, Homo sapiens
aggtgagtcctctgaactctctttcccctccttgctggctggaatctgtatgcaccaccacccagcttcagccatgcttgtgatggaaggaaaaactgcgccggggagagcacccacctccagggccactcacttacactgttatgtgggagagaaaggaaagtctttttttccccaaagtattggtgcattcttttgcttcagtagctttccctaactattgcagtatattttcttctagttttcttccctatgaatatgtgtacagtcatttttcacccattaccccattag

SEQ ID NO: 131076 - DNA, 434 bp, Homo sapiens
tcaaagtgaagctgcatttttaagttataagtcttaagtctgtgaccatctgtcacctgttttggtcctctttaccatatttgcattactgctataattataataccttcacacatagctccacatgtaagatttgtgtttgtagtaaactggctaaatactgtttggatacatacttgggaatccaggtaaatgtgaaaaaggccaatttttttaaccccagaatatgttaacagaaaatacatctagcggttaaaatggagaacagtaagtcaggaatccttcagtttcataacctcaagctacagtcagtactttctagactctgtaggtaatgagacttgtttttaaaagttaagatagaccttttaaaatacaaaaaaaaaaaattttaaatgacagtaagctaggctctcatacagttgtgaggctta

SEQ ID NO: 131077 - DNA, 899 bp, Homo sapiens
gtctgatctctctttcccccacagtaagacgttgaaaaaaagtctaatagctcattgttgaataagagaacttttgggtaggatgaaattcacaaaagaaagttttgcactttttttttatgctcttgaaggttatttttatgtaaaagggagacaattcaaaatattttatgctacaaaattgacattaagttcatctagcacccagatcatggcctttaaatacaattcttcactgaaaggaacaagggcttttcagaaatgactgatttcatagaatgaaaggggcttaatgtaaaaattaaaaaaaaaaaaaaaaaaaaaaaaaaaaaactttggggccccccggcgcccctgaaaaaagcattcaagaaccacttggttgtgggcgcgcaggcggcgcccagaagggttaagtggaaacaggtggctcaaaagcgagggatcccaaaaggaaacctcggggcgacacgaaatggtgtgttgggtctctccccccaagtaaaaaacacccccgggggggacacagagggttttggtaccaaacccaagagggaggaagagaggcacaaaggggcaactacaacaagggatgacaaggagcagctcaagaataaatatccgcgacgtcgctgtgaaaaaagaaaaaagaaaaagagaggaagacggcaagtgaggaaaggaaggagaagaaaggagaaagcagataacaaaaaaaaagaaaagtgtgaagaagaaaaaaaggacaaagaaaaggaagaagagaaaaataagaaaaagagagggacaagggaatggagaagatagtgaagagaagagaaatggaaaagagagacgggaaaggaaaatagatgaaggaaggaaaaataaagagaataaagagggataaaaacaatgaa

SEQ ID NO: 131078 - DNA, 425 bp, Homo sapiens
cttggcttcccaaagtgctgggattataggtgtgagctactgcgcccagcctcttttttctaacatttattccatatagtaactgtagcttctatattttataatgcttctgatcatgttgacctgtggtgataatggaattgataataagtgatgttaattagaatatgagatgtgtaggacttgctccccaaaagaagaccctttcctttgaggagatcatccctcatctacgtagaggcttccagggaccacacgaaactgctggtctcagttctgctcttgggagaaatcacaatatgccactttgttttttcatctacgtatcaaccctccacacaagtgaacatgtctctcagttcccaccctgttagccttgtaagaagattaagttcttagacttttagcattgtgtctcaccaatt

SEQ ID NO: 131079 - DNA, 739 bp, Homo sapiens
ttctgcttattttaaatccctgcatcagaagtcagaacctaatataaaccagtataaaccaaagaagcaaacaattttcaagttcatgtgtgcagttctatccttgtgccatagatcacacttcttcatttacactgaattatcgtatcaaagattttcaggtataaatatatagattgctgtataatatactactacagttgtttggttccaaaggaatttcactccatttcctcaaacaggtctccatgtgaactgactataagcccaagaagcaaacaatttgcaagttcatgggtgcagttctgtcctgtgcattgtagggtgtttagcaacatgcttggtctttatctacaagattccagtagcattcccttacacttgtgacaaccaaaaatgtctcaatgtcaaatgtatctagaatcagggctaggaaattaccttcagtgaagaatctctaatctttttcatattttaaagatagaaacaatgaaaaactctgtccctctggatttttcctaaacttctttcaatttggtgcagagattcgttacatgactgccaaaaccagaaaatctataaaggcccctgctcccataggccaaacaaaaccttcaaggatattaccctgcgaggaatacatctgcttcctatttttctcattcgaaggtaatacacatgcaccaatatatttatgattatctttctaaattcggtaagtccgctattcctattatgg

SEQ ID NO: 131080 - DNA, 618 bp, Homo sapiens
gattaggtggatagcgtatataaaataggtaggatacaccaaacatggttattattgtagctgttgttttatttctcagtttgaaattttggggttcaactgtcatatttttattgtggcataaaaataaaaacataaataataacattaaaatatgttggctggatgtggtggcacacacctgtaatcccagcaatttgggaggccaaagagggcggtaacttgaggtcaggaattcgagaccagcctggccaacatgatgaaagcctgtctctactaaaaatacaaaaaattagccagatgtggtggtgcatgtctgtaatcccagctacttgagaggctgaggcaagagaatcgcttcaacccaggaggtggaggttgcagtgagcggagatcgcaccagtgcactctaccctgggcaacagagtgaggcttcatctcaaaaaacaagttatatttaatatgccaaaaataatatacaactgaaattagtggcgcttaatacattcacaatggtatatgagcataatcactatctagttacaagcattttagttaccccagaaggaaaacctgtacccattaagcagtcactcctcattcccctctgacccccaa

SEQ ID NO: 131081 - DNA, 422 bp, Homo sapiens
cttgagtgatccacccacctcagtctcccaaagtgcggggattacaggcatgagccacagcgcccagccccacatgtacatttaaaaggaaacagtacttgacaatatggatgggagacaaaaaagcaaaagatgtattttttaattctatagatgtcaataattctaataagaaaatgcagcagacatttcctgtgaaagtagtaactctagtagtaaaaagtaatatcaatatttgatttctcagggcctgacatacattaggaacttactgtcagtggactgaataaatgaaggggatgagtaaaacaatgaggctacatagtttctggtgtccaatttttaaaggacatatatataacaggagagaaacaaatatgcatatatacagattaatatcatcaatcttataagaacgttat

SEQ ID NO: 131082 - DNA, 224 bp, Homo sapiens
ccaacttcagacatgaattcagttgagaataatattcattttaaaatcccagaaaccaaagctagaatgtattgggtttatacaaatcccattataaagctttggtcttgacaacagtgagctactgatatagatatactacatatatatctatatcatatgtatatatataaatatatgtatatatacatatgtatatatatacatatgtgtccatgtatatg

SEQ ID NO: 131083 - DNA, 179 bp, Homo sapiens
tccagaaggggcagaagagttccaaagactcagtgcaaggcagataaagtgggaaagggctttctgggtggaaggagtagcatattcaaaggtctatgctacaagagcagtggcatgcccaagggccattccctcattcatggagacacttggcagagtccttaggcccactgcagcag

SEQ ID NO: 131084 - DNA, 357 bp, Homo sapiens
accatcacaaaagaatatttaacattaacattaggaaaatgtcacctacccaggatcatcattcctctgagaaattcagaactgcatatgtgtgtgtgtggataatggctagtggggttgaaaatgaagaagaaatggcatgtgtgagtttcacacctactacatgcagaccctttacatacagcatctcactttgtcttggcaacatctctgacttggacactgccaagcccctttgtggattctcgctcttgctttcattctttcatttgacaattactcactgggctccggccatctagcagttgctgtcaagtgctgaacaaaacaaaggttagacaaagtagaatggctggg

SEQ ID NO: 131085 - DNA, 947 bp, Homo sapiens
caaaggcccaacagcctgactgcaggaacatccttgccatatcctgccgggcagcaagctctaccgcccacacccctccatcctgtccagcaggatgggctggtcagtgggatagcctctgtgcacattttgtggcaagtaggagtgacacatcattcctgggaggccccgtggttcctgccaaacccaaccccagaattctccctgaggtggttttaccaaacccataacccagaactgctattgtggtttgggggtcagcacccaccagtgccagggcactactgggaggctgggacctgaccaaagcccatggtgtctgtggcctgaggacagggtgtcttggggccatgaggacaggccaccaatggccgttgggtcatagggcctgagccccagtgtttgtccttccctggctccttctggttcagtcccatcagggctctggatcccaagacgcagcatccaaggttccctccaggaatcctggtggctcggcttactttgtcatgtttcatctgatagcaaaaatatcagatcggctgcacagaaaaatggctcaaagtgcttaatgaccagaagaaatctgggagtagcaagaaggtaatgtggagaggggaggacctccatgactggtgtctgcagagccaggggtacagggacccagtgcagtgacctggcaccacctgcctctcagagggtgggtagcacactgtccttacctgggggacagcaggcctggtcaccggcttttctccctgtccctgcaagcatcacattgctggaagagaatctcatgccagagcttggaccatccctagcttgggggttaggggttgtctcttggtgacctaaatgaaaaaataggtccagatcagagttcgtgatgcatagcactcacccactctttgaatcatgggaggggaggcctagtcctaggtaaacct

SEQ ID NO: 131086 - DNA, 433 bp, Homo sapiens
taaattacccagtcttgggtatatttttatcagcaatgtgagaagggactaattctggtatgattaaaatattttgtgctttggtgtgtctttccatttctatcattccccacacctccataagcacattatcatttcatacgccaatctacctgtagtttactgttttgacatagttttctaagggctatttattgttgattatgttctctgagcttcgagttcccttcactctagctaaattcttcttactctttgaaatctggtttaagtgccctttattttgaaagcctttccgtatctaaccccaagatatgattcatatactccctgtatctctcatctgaatacctcctttggactcacaatgtcttttgctttcttgattataatatttatcaccatatcatgacagttgacactcttgtttagt

SEQ ID NO: 131087 - DNA, 439 bp, Homo sapiens
aagctagtacctttacttatcagaaagtgaaagctgggcatggtagcttacatctgtaatcccaacatattgtgaggctgaggtgggcagatcacttgaggccaggagcttaagaccagcctgggcaacatagcgagaccccttctctatttatttaataaaaaagcaaaagtgggagcaaggaaatgtccagtggctagaccatctgtggtagactttctgtgaacgcaatggacatagtaagaacttttaaataagaaagtcagagacacagctgggcagatcacctgagcccaggagtttgagaccagcctgagcaacatggcaaaaccccatctctacaaaaaattagctgagcatggtggtgcacacctgtagtctcagctacttgggaggctggggtggaagaatcaactgagcccaggaagctgaggtggca

SEQ ID NO: 131088 - DNA, 678 bp, Homo sapiens
ctcaggggcaaagagtcgaaggggctgaggaataaaagatgacaaattgggttcagtgtatactgcttgggtgatgtgtgcaccacaatctcactaaagagttactcatgtaacaaaataccacctgttccccaaaaacttatggaaataagaaaaaaaattcaagattatcaatattttctaatagaatcaatttgtatgacataaatttgatagattgcttaattacacaaattctagactttctggatgacgttttaatgtgccattgctttggtttgttagtatcggttttaggacttttacatctatattggtgaaatcagtcttcagactttacttttcaagctatctggataggctttggtatcagaattatacctaataaataggaggtcctctcaagattttctgtatcgggaatatttacgtcttgatgctttttacagaatttaccagtgatatagacttggatcttcttttggaagcaatttctttcaaagttttcatttatttgtgctttaaattcctctttgactcaatacaaattttctcttaaagttggtccattttagtatgactttcaagtcattatagagaagtaatacatagatttttaataatttcaaagcttttatcacgtgtcgtttcctgctttgcaacatatttttttcacaa

SEQ ID NO: 131089 - DNA, 422 bp, Homo sapiens
cccagtgttggaggaggcgcctgttgggaggcggttggttcatgggacagacatccctactttctgttctcatgatagtgagtgagttctcctgagatctggttgtttaaaagtgtgtacctctctcttctctctttcttcctcctgctcctgcgatgtaagaggtaactcctccctctttgccttccaccatgattgtaagtttcttgaggcgtccccagtcatgcctcctgtacagactgtggaactgtgagctaattaaacctcttttctttgtaaattacccagcctcaggtagttctttatagcaatgcaagaacggactaccacagggtgagaaaaacttaagtatgacttcaagatacttttcctgaacaactggaagaagggagtggccctttactgagctagggaaggctgga

SEQ ID NO: 131090 - DNA, 232 bp, Homo sapiens
aggtaaaagctagcttaaataatttagaaggaaactaaaaactatttttaaaaagtggcatagcagatttaagaatgaaataaatggaaatttctgaattgaaaaatacaaccaaaattaagaattcagtgggtggtttaatagcagatttaatagatactgttgaattaaagaaccagtgaactggaaaacgggttggaaagaaatccaatatgaactaaaaggaaagaag

SEQ ID NO: 131091 - DNA, 264 bp, Homo sapiens
caacgtaatatgtaacaaatgagaaaatcattttagtctgttttcttctggacagtttttgataattattccttctttattgagctctctgttgtcttattctaagcctatctttggcttcttatttgattttttaaaaacactgattttcttcctttaacactgatttttattttcacgtttttatttgatgagtaataatcctgtgaaataatttccaaagtgaacactgggcattccctgggtgactcaatctccaaatgg

SEQ ID NO: 131092 - DNA, 329 bp, Homo sapiens
aggataaatctagcataccctgcttctaaatagccaacctctgggggcactcagcttttcctcccccaaccccagtttccatcctttggagacacactggtggtcagccaatcagatgctggtattgaggattgagaaaagaaaattttttgtgtgttttgaaagagtctcgctctgtcgcctaggctggagtgcagtgacgtgatctcggctcactgcaacctccatcttctgggttcaagcgattctcctgcctcagcctcccctgtagttgggaccacagttttgcgccaccactcccagataacttttttttttttttttttttt

SEQ ID NO: 131093 - DNA, 329 bp, Homo sapiens
tcccagctactccggaggaccagctgtctcctctggatgaggggtatcattagactaaacaggggccagggtctgggaaagaaaaggcaaaacacatagaaggcaaaggcagctcccagcaaggttacatggagccttcctcaacagcgggaggtagagtggggaagaggtgttacaagattggggctacacggactcagccccacagcggcctcctcatcctctgtggtggcatcctcattccacttctcatctgccaccttctccaggcgggcctctagctttctcatgtactctagcaattcctgtttcccctcctgtaactgctc

SEQ ID NO: 131094 - DNA, 203 bp, Homo sapiens
tgctacgttgcccaagacggtcttgaactcctggcctcaagcagtcctcccacaaaggcctcccaaagtgttgggattacaggcatgagccaccacacccagctcacttctgttcttgacagcttgcgaagtgcattctttgtcagggaggccacactgggagagtcgccaaagcgatcttgttgctcatctagtgttcccac

SEQ ID NO: 131095 - DNA, 644 bp, Homo sapiens
ggagacagattacatctatcatcagtgaaacataatagatatacagtgactcagagtcctccgcgggccatcaaagtgtcatacacaaattttcttgaaaaatttctagtgcttacatctttgattcatttagccaatgtgtacatattaagccttgactttccttggtgtttccatctttctttgacagataggcaccacttgattttctccttttggactaatatatgacccaaaccaccatctcagtgtgtttgtaaaaatattttaaaatagttatcaacgccatctttcatgagcacatttgtcttcagtttctcaatgtttttattttgcaattggtattgtggcccaaagaagatggtcaaaagatggatgatgactaagtcaatctgatacaggggttctattattataaaatgctctcattagttaatttattcaggaaacacatgtttcttggtcatctcctatatttcaaagctattggaaaacagcagtgaaacaaacaaagccattgagccattgttatcatggagctcactttcttgtggaggcaacagatgacaaaccaataaatatcccatgtcaggtggtggtgaatgtgaaggaaaaagaaaacaggataagtagacagaaaaaga

SEQ ID NO: 131096 - DNA, 333 bp, Homo sapiens
agctgcgcctggcaggcagatcctggctgaattcagcctcccctagtcccagctccacccccaccacatcccccagaaagggccacggcaggtttctccagctccctggcaaatgcccactgccctccagccctccttccccggaagagacacctgggaggagggaaggtggcctcgcgtcaaggtaccagagccacctggctttcattgggatggcattctctgtggccccagccacagccatctgtccagcttccagcaaacaggccagcctgggcgctcacttgacactaaggaaaactcgtgctacttgaaaacgtcagagctggaatg

SEQ ID NO: 131097 - DNA, 688 bp, Homo sapiens
ttacttaatgtcatcatatcaatatttcacttcactttatctttctcatgatttttgcattattttaagtgagatgatatgcatggtatgagtctgagtgtcataacacattctacattctaagcagtgatcattgcaggagctcagccctatatattatgagctgctgaatggtgtccccaaagccacttcaggtgtgtcagaacctagaggaactgtttactcatggttacagtttattacaattgaatggatacagattaaagacagccaaggccaaaaaagcatggagccaagttcaggaaatgttcacaggtaaaccaagaagtggaagataattcaaatccctgtggttccatgctttcctatctagagaaaaaatgaaggtagaagtggaggaaaaatagtatccctatggtttaatgttttcttatctaaaaaaataaaggaaagtagattgtacatatacaaatactgatttttttcaccttttggtggtagttttccgcttatgatatattgttcagtggataatgtgtatctgcataaactggcacaagggaaaagcatggacaactttcttgactccctacgtccccactcaactcaaagcaatgtgattaagacttttgctatttcttgtataagttaagcagccataaatgaaatacaaacaaaaaaaataaaa

SEQ ID NO: 131098 - DNA, 628 bp, Homo sapiens
gcaggacgatcacctgagctcacgagtttgagatcagcctgaccaacatggagaaaccccatctctactaaaaatacaaagttagccgggcatggtggcgcatgactgtaatcccagctactagggaggctgaggcaggagaatcgcttgaacccgggaggcagaggttgtggtgagccaagatggcaccactgcactccagcctgggcaacaagaggaaaactccatctcaaaggaaaaaaaagattaacatcaaactgatacaggtggacaagacttggaaagggcacattctctctagtattctgtagacccattattaaggcctctcataagggtatgtctgtcttcatttaaaaggcctctgtggaatgagatttctcttggctccactacttctctggccctgtaaccaccttcactggaaatggtgaaatgaaagaaattctggagttgatttagttcagtctcgtctttttctgtatcagaatgccaggtactagagaggttaagtaatttgcttaaacagcaaataagcgacagacctgattggttctaggtcccatgacttccaaactggtactccttccattataccagaatttctctataacacatttgaaactca

SEQ ID NO: 131099 - DNA, 529 bp, Homo sapiens
ctcaagtgaggtcatctcacgatcaatcacattttgacatgtcttcgctggttccgcggttaattttttcaagacatgaaattggaatttggttcctaaagacactgtaaactttcagtgtcaccttacatttctgtagtagtgttaagtttctagcgtattttacagccatcgtttcatctcattctcacaatgacccttagagggagggaatgcagataagtttatccctgcattatagacaacaaccaatgaacaaaaaagtgcaagctctccaacacacacaaggtcacctcctttcctgtccctctactctttccactaaattatcagtggcagtgatggcttgattcttgatttggaaaggacattctaacatcccattcagaaagaaagagacagagaacttgacagtaattttacctaaatcagccgaatcgacttgaccagcaatctggcattggatgcagcatcaatttccccaagtggatctaagccttgggtgctcactaaaatcaccggggagtat

SEQ ID NO: 131100 - DNA, 485 bp, Homo sapiens
tgaagtatttttcaagtatttatgtttcagtatagcttaacattaccagtgtgtatcaaaagcagtattaaaaacagttgcatttgattttcttagttgatgatgggggtccccaacccccggctgcagctgtgggcaacagtccacggcagtggggccagcattaccacctgagttccatctcctatcagatcagctacagcattagattctcacaggagcgtgaaccctattgtgaactgcacatttgagggacttagactgtacgctccttatgagaatctaactaatgcctgatgaaaccacccgcctaccctctgtccgtggaaaaactgtcttccataaactggtccctggtgccaaaaaggttggggaccactggtttacacaataaaatgaaaaacaggctgagtgtgaaatcagctgtcctccagaacacctgaggcatatgctctgtctcagccactgtgaaatatcagactaat

SEQ ID NO: 131101 - DNA, 695 bp, Homo sapiens
tgcagtggctcacacctgttatcacactttgggaggccgaggcgggtggattgcctgaagtcaggagtttgagaccatcctgaccaacatggtgaaaccccgcctctactaaaaatacaaaaaaattagctgggcgtggtggcatgtgtctgtaataacagctactcgggagactgaggtaggggaactgcttgaaccagggaggtggagggtgcagtgagccgagatcatgcctctgtactgcagcctgcgcaacagtgagactccatctcacaaaaaaaaagaaagaaagaaaagaaaagcctcatgaataagcagtacacagagaattgtgtataaatgtaaacactcaaaacagctattataattttccaagtttattaagcttcctgacttcttagtcactcatttaataaatattttagagtgcctactttatgcccataaaacagaaaatgggaggaaggaaagaagtaagcaggtaactgaggcagtcaggcagtcagtcagtcagtcactcacagattcctaacatagctagaattggtcatttcaaatacactttccctctttccaactgagaaatttccaactgaggattccctccctctttccaactgaattccaagacctacttaattcttgctctccactttccatgttcctgctcctactgttatcaaaatgcatctaaa

SEQ ID NO: 131102 - DNA, 328 bp, Homo sapiens
  misc_feature (115)..(115): n is a, c, g, or t
gaggtgatctagaggatcccgtaactatctgaaaaattttagccaaaaagaaaaaaaacatatagttaaaatataggctggctgagtggctcgcacctgttaatcccagaacttngggaggctgaagcaagtggatcacttgagcccaggagttagagaccagcctgggtaacagtgagaccctgtctcaaaacaaaaatattaatttctataacaaataaattttatttagtaatatcatgtttaatacccatgttacattcattattcttctacactttggcctttaggaagaggcagtgtgtgtgttacagttaaataggaaaca

SEQ ID NO: 131103 - DNA, 754 bp, Homo sapiens
aagctcttctcaggcggggctgcctgcaggctcccgttttctgagcccacgctgcccacagctgaccccagcgcagccccgggcacgcggcactttacatgggggcagcttgggcccagactcctccgctgtgtagcagatgaggaaaatcaggccagaggacaacaggctggcgttttgttgggaactgaagaggaatctgttgaacacagcgaccagatgaccttccatttcaccggcggcagcagtttcagcgtgcagttcccaaaccccaaagctgaccctgcgccccatttgaatacggccagagcctgctggttcactttgggtagagccgtgcctcttgggcaggctcccatagtgaccacgtccccacgaatgggaaagcacgttagtgggagggacgtaggacacgtgtggaccgccaggccctctcagtccattttccggggctgctcggtgctgctgttaagacgtgagtgcatttcacttggaagaacccattgtacaaagttcaaggctaagagttctgaattctggcgtcagcttcctcaggattttcttcagttgcaagtacctttccactgaaaatatgagcatgcccgcctggctagtaggcatctgtaagagtgtcgccaggcccgcgccagctgaggcctcagactagccaggcaagagccgtctgaccagttggctggcggtggttctggtggagcacgagggagcccgggtggtgccctgagcctcgagctgc

SEQ ID NO: 131104 - DNA, 250 bp, Homo sapiens
tcaaattaatttgcgcttgtgcaggtttgttagaaactttgaagtgcttctgggtctttccatgggggttctggttaggtgtcatcacccaggccaggggattcagcgtctcccatccctttcccacctttccatgacacccaatggcatgttgactcggagggcgctcagtaactgaggaatggactgctgactgatagtgcagtttatatgttaacgggggagctatagagcctggggattggagcct

SEQ ID NO: 131105 - DNA, 371 bp, Homo sapiens
cctcaagtgatccacctgcctcggcctcccaaagtgctgggattacaggcatgagccacggccgaccagccttagtctcccgtgttttaaatcttggctcccccatttactgcttctgggacctgaggcaaacctctttgttaggtttccttgtttaaaataggaatgttcagttgttaggattaaatgagttaaaacatgtatagtggttagagaagcacacgatgaatgctattgttagcagcatttctcaaagtcagtcatacatagaatacattttggcaccctcataacacattcccatggaatagtattcttgtaggacaaccattgttatcctacctttcatcaggatttggggagatagatat

SEQ ID NO: 131106 - DNA, 688 bp, Homo sapiens
gggtttggatgaaattactggttttttcccttggaaaaaaaatctgaatatattttataatttgttagtattgtaagtaacagcctaaaaacctgagcatgtgactgtttgacactgtgcttcctatatatctgtttacagaatatttggaaaattttaaattcttccagttcttgattgctgcttgcacagaaccaatgttaaaatgttatgactaagactagagagacaatgataggtttctcggtgcacacttagtgctaggaggtcttcccatacctaccgggccagctttagagaaacccctggtttccagttgcctggttcagtactttgttagagcacatgctttaattattttcagtgttcttaggtttggttgtggtaatgaatttcttcataaagtagatctctcttttaagtgaattattaggaaatacttgtagcatgatttaagaaaaatatttcagcttcagctggaagcagaaaaatggacagaggggaagccagagagttcaggtaggttactcggagaaacagttgacacaaagcattccttattttcttattatgtatctttagaatgtaatttacacaaattgaaccatagtttacattttattctgaaccttttttctaaaaacatttcttgccatcttcctatattacaaaaataattccatctcat

SEQ ID NO: 131107 - DNA, 350 bp, Homo sapiens
cggcaatttctccttcagaacatatagcttaacgataaacttaactcacaaatatgcataaagtctctatgatctacgtgaaagcttagaacaagcatctgtctacattattttttgtaggtattcactataagcagctcaaaagcccttttataaggtaggtacacagtatgtcaactaaaactatcaagggaaaaaaagctaattatttgtctaagtatggtcctctatttgcctgtcccattccggcctctagtcccaaaagaaaactaaccccagccccttcatgtcctaccctcaagagaagagatgataactttgtgcacttagtacatgccaaacactttaag

SEQ ID NO: 131108 - DNA, 549 bp, Homo sapiens
gtactggcaattaaagcttcctccaaatggaagatatccaaattcccttttctttgagtggtttgagcaggatcgtcccaagatactggttttgcatttagactagagaacctgtaaggtaccttcagttctgagtttctgtaactgtattgaaaccactagatggacagattaaaattatctttattttgtttttttttatattacattttattttactaggattagatatggggttttgaaaaccaagggaaaattgtaagtagaagaaaatgattcttttttttttgaaaatgatttattttaagcattttttttttgttggtattttgttttgttttgttttgtttagcattatggttaagagtatgagatctggagttgtattgcctggattccaattctggctcacttacctactataagcctttgaagaagttatttagcttctcagtgttctacttccttatcagtaaaatggacatagtttgttatttatttaacctaccttatgagattatcgttgctaggattaactgaagtgataca

SEQ ID NO: 131109 - DNA, 751 bp, Homo sapiens
tcacattccgatattattatataaccacattctgacctcaagttagaatgaggtcgttagggtaagccccaatccagtatgactgatgttcttacaaaaggggaggtttggacaaaggaaaggtgatgtgaagagacacagggagaaggcagccattgacaagcccaggagagaggcctccaaagggacccaccctgcccacaccttgatcttagactttccgactccagaaccgtgagacaatagatttctgtcatttaagccatcctgtctgtggttctttatcttaacagccctagcaaacaaatacaggcagtaattctgattattacccccatttgacaggcgaggtaaccagtattcagagagatcatgaccttcacccagagtcacatgacagttaagtgcaggtggctccactaaatcccagacgggcctggctccaaggtgccggtttcctctgttctctcaatgcgccccgatgtgccacattattgaagctggagggacagcgttcctgggaaaaccatttagatttcattctccttcctttctctgacagaagctgctggtgaggaaggtaatgatcttgatcaaaccatccccagaatgcatgcctgcctttggaaggagcagactgggatgaaattctctactctgcgtcttatcaaccagaggacatgaggcaggtttcttaacctctctctaggattccgttttcttctctgagaaatgggcagattggaacgga

SEQ ID NO: 131110 - DNA, 555 bp, Homo sapiens
aattaatttaaaaaagtttgagagtaagttgcagttctttcatagtcactacagtgataaaaattgggaagttaatattgatatgatgctattatataatctacagacctcattctaaatttcaccagttatctcactaacatctttttctggcccaagagccctcatagtttttctttttcagtgttttcttgcctccatttatgcataggttatgtgcatgggttttttttgttttctccatttgaactttactctcaatttgttgagctccataaaaaatcttattggtatttttactaggattgtattaatcttgttaatttagggaaaactgatgtatttatgaggctgagttgtcctgtcaaagaacagggattatctttttatttattcagttctgtctttgtgtctttcaggagtgttttaaagttttcttcatatctaagtgttttatttcttgttaaacttattcctaaataccttctttaattcctttaatcatccttgctgctgctattgcacatggacttttcactggtgttatatcctcca

SEQ ID NO: 131111 - DNA, 424 bp, Homo sapiens
cctggtggttttaaaattattgtgctgtttttccccctcagggtggtaggggagtgattcttggacgtttattaactcaaaaagaacgcagaagttggcagaacagaactgcctggaagaaaggggctgttttccttttcactattattattttaaactttgatgggctgctgacgtcagcaaatatgcttgacgcctgtaaagcaaataagccacatcacaagcagaaagcctgtgggattttctggtgccctatttctagaaccttccctgttctgaccatttgaaggtgcttatttagtcaaccgttcaggcagctgcgaggctttattgataacaaatggcagcctatttggcccattttttttcttttatccaaatcaattatattcctaaaaggcactctctgtgagtagaagaaagg

SEQ ID NO: 131112 - DNA, 687 bp, Homo sapiens
gcaagaagatgatcagcacaaacttcagtagaatagctggtactggaagggaatcaggagaactagagaggagaagagcaataggtagatgtaatttattagtaatgttttaattctttggttgagtggtggtttcacagatgtgcattacattttaaacaaacaaaatttctagcacgctccagcagttcaagaccagcctgggtaacatggtgaaaccctgtctctacttaaatacgaagattagccaggcatgcctgtagtcccagatacttggaggggtgaggctggaggattgtttgagcccgggatgtggaggttgcagtgaactgagatcgtgccattgcactccagccaagttgacaaagtgagaccctgtctcaaataaataaataaataaataaaaataaaacaaagaaaaaaaaaaaaaattgttggggggggccgtgggccccggaaaaagtttttctaaaacctccgggtgggggggggggccccgttggtgtggcggaactgggcctaacgggtcccaagagaaacccggccggagacgagggcggggtcccccccataaaaaagcgccgggggaaacggaggcgtggaacaacccgagggtcagagccacgggtctcacggggcaaggaccgtatacccgcccgccggagaaaccacaaaacaacagagaga

SEQ ID NO: 131113 - DNA, 363 bp, Homo sapiens
gtaatcccagcagtttgggaggccaaggtgggtggatcacctgaggtcgggagttcaaaaccagcctggccagcaaggtgaaaccccctctctacgaaaaacacaaaaattagccgggcgcggtggcaggtgcctgtaatcccagctacttgggaagctgaggcaggagaattgcttgaacctgggaggttgaggttgcagtgagctgagatcgcaccattgcactccagcctggacaacacagagagaccctgtctcaaaaaaaaaataagaatcagcaagataattatccttcctgctcccacaacactactgctatcttactacacttctactcctaccttacgtcactactaccacctt

SEQ ID NO: 131114 - DNA, 332 bp, Homo sapiens
caggctggagtgcaatggtgcgatctcggctcactgcaaccttcacctcccaggctcaagcaattctcatacctcctcctgagtagctgggattaaaggcatgcaccaccatgcctggctaatttttgtagttttgtagttttgggttttttttttttctttgagacagaatcacccagcctggagtacagtggtgtgatcacagtctactgcagcctccatctctcaggctcaagtagtcctccctgctcagcctcctgagtaactgggactacatgtatacaccaccacatgtgactaatttttgtatttttgtagagacagggtttcac

SEQ ID NO: 131115 - DNA, 637 bp, Homo sapiens
gctaaattctaacctcaagaatcttactctagagctgttggtttcctcagatcagctcatctcagtgcacaatcttatggactaggatgtaaaaacacaacatgcaactctgtcactcctgccttctactgctgtcatactctgctgcttagcgcttgtcaccctctgaaatatgcacctgtttactttgttgtctgtcttgcctcctagaatgcaagcacttatgagaccatggactttgcctgcctccttcatcactatatccccagtgcctagaacagagcatggcacagttagagcgtgaaaggaagaggcgacatggagtcagaccccacattgactccttctccctcacttaccagcagcctagctggacaggtacctaaacatctccaagcctcaatctcctcataattaaaatccaaagaatgggccaggcacggtggctcaggcctgtaatcccagcactttgggaggccgaggcgggcggatcacatgaggtcaggagttcaagaccagcctgaccaacacggtgaaaccccgtctctactaaaaaaatacaaaacttagccaggcatggtggcccatgcctataatcccagctactcgggatgctgaggcagggagaattgcttga

SEQ ID NO: 131116 - DNA, 565 bp, Homo sapiens
ccacattcctgacaggaggatggaagaagaaacaaacaagatgacaaaaggaaaaggacggtgtttgctttgttgtgcaagtgcttcctacaagttaacaaacagaaattctcctttcatctcattggtcaaacttagtcacattgcattacctagctgcaagagaggctgggaaaagtgaatttatcttaagcaaccatatgcccagctaaaaattagcaagaagacattttaaggaaggcaatcagcagtctccatcacagatgtcctttcccacatctccttgtattatttggggtgttctgtgttgctgctgtggtccaatcttgttaaagcctgtgtatggatagattgatgaatgctatctctcttgttacccatatgggttaggtaaatgaggaccagttgttcctgttgcctgggtgtccctcacagtggagtaaaatacccaagaggtttagacaagtcaactgtactgctagggtatttttcaaatctaattaaaccttttttttcttttttttgctctgtcacccaggctgaagtgcagcagcacacttatagc

SEQ ID NO: 131117 - DNA, 137 bp, Homo sapiens
tcctaaatgatgacttttgataaaatttctgtattgattttttggtggtggttgttttgtttttgaggcgcagtctcactctgtctcctaggctggaatgcagtagtgcaatctcagttcagtgcaacctccgcctc

SEQ ID NO: 131118 - DNA, 252 bp, Homo sapiens
gatgtggattatttgagagaaaacatgatcccattcatcatttggtgaaagttgggaaatggggtgttgcctgggtcaaatggcacttacttacacaatgggtgactcagaatgtcatctaaggtcctagcccagccccagtgagggtggcagagctcagctaagaatgcagcaataaggttcccatttcaggccacaatgacattgaaacccagcatctttaccaaacttgaccttatttttgataaatcc

SEQ ID NO: 131119 - DNA, 475 bp, Homo sapiens
cattcatgttaagtcccttatattgataaaccatttttttatttttcatgctttttatactttattttttatttttatgccttttatctttttatgcttttttaccgtaccttttgtatgttacatatgtgtagatacacaagtacttaccattgtgttaccattgcctgcagtattcagtacagcaacatgctatacaggtttgtggcctaggagccacaagctataccatatagcctaggtgtgtagtaggctataccatctaagttcatgtaagcacactctatgatgttacaacaacaaggaaattgcctaacaatgcatttcttagaccgtatccctgtccttaactgacacatgactaagtttttgcccgtatacaatttttgtactgatttaattcatgtctgctttaatgtccaccacttggtttccatttttttctttgttcttattcttccaatatttctgtttt

SEQ ID NO: 131120 - DNA, 401 bp, Homo sapiens
gcttatgtcctcagagtggtgagggagggaagcactatgtcagagagaaggagaggatgagatcgccttgagaaaatgtcatctgggcacagatctgaccggtgtaaaggagtaagccagaaatgcaccccagttggagcaatggcaagtgaaagattctggggctggaaaatgcttccatgtctgagggctgcgagcagagcagcatggggaggaggaacaaggaggacggtaagggagaagcatgggcagaacgggtgtgctcgcaggctaccataaggactagggacttgaatgaggtggggtcactggaggagcctgagagaacccccaggctggattactttatgtcaaatactgtaaaaataattatttgggccgggcgcagtggctcacacctg

SEQ ID NO: 131121 - DNA, 176 bp, Homo sapiens
ttgtttctctatgctgttcatcttccaattaatttctactttgacttcccttccttccttccactggtcaatctaaatgcattcctggccgggcatggtggcttactcctataatcccagcactgtgggaggccaaggtggaaggattacttgaggccagaacttctcaaccagcc

SEQ ID NO: 131122 - DNA, 622 bp, Homo sapiens
gaaaagtagaagttacacatctattgccttgaggtagctttttaaaatgtttgtcttatgcatacacactgtacatagttgtaattctagaaaacataccattttatggcctttctctacccagcattcaagtataagcatttttttcattgaaaacaaatagttttcaatggttttgtaccataataattgtttccctttttaaaaaaattgtagataaaacattggtgaaaatcttactgcagatagtttgggggttatataggaaggtgatttttgttttgcttttttgattaggagtgtcaggatttctttcgtggtacatgagaaccttactataaagtggctctttaggaccgttctgaagtcagccttatgaaggtgaaatagactctgatgaaatcaccccaagtctgtggcttttgttgtaaggcagagctgctctgtgtcaatacctggtgtgtgagaacaggacgtggtagctgtcatgggaccctctagcccatcattctctagacctgcactgtccaatacaggatctactagccatgtgtggttatttaaatttaattagaattaaataaactgaaaattaatttccttattcacactggccatattt

SEQ ID NO: 131123 - DNA, 316 bp, Homo sapiens
gcactcttctacgtactggggatgtagaaaagaatgaggcaccattatggccctcagggcatttctggcctaatggagacccagatgtgtagataactcagccacacacagcatgacaggagctgcaggaagccagtatgagctccctttggtggtgctgaagaacatttcccagaagaggggccattcaaaatgggttctgatggatgagtaggagtttgccagctaggagcctgcctcctctggtgttgatgagagctgactggggtgcagtgacctcttggagcttccaatattcccagaacacttgtcctca

SEQ ID NO: 131124 - DNA, 385 bp, Homo sapiens
gtgtctccctttttaatgcaaagtgtcctcacaggtctcctctgggaactccaaaaagaatactccctttacacatgatcaagggaaaactgcctcaaggcatccatcacgttcttcctctcctgcctggagccctgacatatatcccctgtctatgcctccaagggaccactgtcactactactgctgagaatgcccatgtcctagcctatgacgatgccttctgatgctctcaaaaatccaagaatgtcacactctatcacttggagcagggcaatggagcaccaataatccacagagtgtcttatgagaacaatttcttcagctattatatgcagccctattctccacacagccatacatacgtgacttcatgcattcagtc

SEQ ID NO: 131125 - DNA, 253 bp, Homo sapiens
atattgttctggactgcattgacttttgcacccagagttatttggtttgacagactgccaaatcctgaggttcaaaagaccgtccgtcacaagtggggaaaggggccagcattcttggggttggattcccagaattctccaaatatgagtgtccataagtaagcctctcagtctaagcctccctcaggatggtggtttggttttagagatagtccctctccccaccgcaaagaatgttaggggaattctgacg

SEQ ID NO: 131126 - DNA, 688 bp, Homo sapiens
ccttgtttttgtgcaacccattagttcaggtggcgacaaaaacataactatccagaaagaaacaaagtggtgagacattttaatgagagatttaagctttagaactcaattttttttaagataaaggtggaggggttcataaagttaaggagtgtgcacactgtcaacaagatacttcctgaagcttaaaagatgtggctgtagatttaaaaggcaaatacttaagcatgacctgcagtttaaaaagggagggaggaggaaccacggactacacagtcaattcagaaatttgaattttcatccatacctccgttattcttactctactcgctcaacaacaggttctgataatgttacttctgccatttctgtttgtctttatttccagttccacaaccctgcttaggctattgtcattcgtggaacaaatatttattggacagattcccatgtgcaaggctctgttttaggtattaagagtcttgctctcttgatccttacattcttatgaaaataattttgattcttgtcagatttttaaccagctgtctttcttgttttagatgaaaactactccaatcaacttcttcaatctgttctgccacattttagccagagtaattgaaaaacaaaattcccattgctctctctttaatcattacccgccatcgttagaatgaagtttaaa

SEQ ID NO: 131127 - DNA, 256 bp, Homo sapiens
ccttgtttttgtgcaacccattagttcaggtggcgacaaaaacataactatccagaaagaaacaaagtggtgagacattttaatgagagatttaagctttagaactcaattttttttaagataaaggtggaggggttcataaagttaaggagtgtgcacactgtcaacaagatacagccacatcttttaagcttcaggaagtatcttgttggcagtgtgcacactccttaactttatgaacccctccacccagatc

SEQ ID NO: 131128 - DNA, 1035 bp, Homo sapiens
ccttgtttttgtgcaacccattagttcaggtggcgacaaaaacataactatccagaaagaaacaaagtggtgagacattttaatgagagatttaagctttagaactcaattttttttaagataaaggtggaggggttcataaagttaaggagtgtgcacactgtcaacaagatacttcctgaagcttaaaagatgtggctgtagatttaaaaggcaaatacttaagcatgacctgcagtttaaaaagggagggaggaggaaccacggactacacagtcaattcagaaatttgaattttcatccatacctccgttattcttactctactcgctcaacaacaggttctgataatgttacttctgccatttctgtttgtctttatttccagttccacaaccctgcttaggctattgtcattcgtggaacaaatatttattggacagattcccatgtgcaaggctctgttttaggtattaagagtcttgctctcttgatccttacattcttatgaaaataattttgattcttgtcagatttttaaccagctgtctttcttgttttagatgaaaactactccaatcaacttcttcaatctgttctgccacattttagccagagtaattgaaaaacaaaattcccaaagtgctggaattacaggcatgagccacacaccagcctgaaatctggtatgtattttctaacgactactttaccatgttggcttcatcttctttttttaagactacttttacatgttgcttcattcgtaaggaagaacagaagatattgaacttgatgggttaaaaggtcacttcattatctttggggtctatgacagtcttcgatttgttgtgaatgaaatattttgaagagttacttaatttctagaaaatggtctataaacacttggggaggattgagctggttttaatacaacttggggcccatggacatggaaatcaccgaaaaatgctcaggggaggtaggtacgcagcatgaacagaacaaagatggtatagaaagcaaaaatgcgta

SEQ ID NO: 131129 - DNA, 242 bp, Homo sapiens
gagtgagaatggttcaagctaggtattgttccttctcataggtttgctgcctctctccccatcctattcataggaagtgggcagaaggaaagtagggcagccctcagtctctatacctttactatgggattcacttagatgggggaacaaggtcttttttttccttgctgctgcagcacaagacaaaaggggctttaatcagctatctctgccatacaggtatgccatgaaaggcatttgac

SEQ ID NO: 131130 - DNA, 139 bp, Homo sapiens
ccggtaagatggaccttaaaaaatactcacatcaaacgttccgcatggaggaggaggagcagcaagcctcttcaggtggctttcttcctctaggtgtgcagggaccgctctgagataagacagaggtccaatcttccgg

SEQ ID NO: 131131 - DNA, 243 bp, Homo sapiens
taagatggggtctcgctcagttgcccaggctggaatgcagtggtgcaatcacagctcactgtagccttgacctcctgcgctcaagcaatcctcccacttcagcctcccaagtagctgggaccgcaggcacaagccaccatgcccacgcctggttaatttttggttggcttgtcttctctttttttccctttagtttttttttctgtgacacagattcaggagggcctgatgacatgtaccccc

SEQ ID NO: 131132 - DNA, 637 bp, Homo sapiens
gtggccaagtgctaacatgccttggttcaagggatggaaagtcacctgtaaagatggcaaatgccagtataaacaccctgcttgaagctctggattgcatcctactaccaatttgtccaactgacaagcccttgtgtctgtctctccaaaatatctacaaaattggtggtattggtactatctctgtaggccaagtggagactggtgtcagcatagaggtcaccttggctccagtcaatgttacaactaaagccaaatctgttgcaatataccatgaagctttgagtgaagtttttcctgggaacaatgggggcttcaacatcaagaacgtatctgtcaaaaatgttcatcatggcaatgttgctggtgacaggaaaaatgacccaccaatggaagcagctggcttcactgctcaggtgattatcctgaaccacccagtccaaatcagtgctggctatgctcctgtaatggattgccacatggctcacactgcctgcaagtttcctgagctgaagggaaagacggattgccattctggtaaggtgaaagatggccctaaattcttgaaatctggtaatgctcccatctttgataaaattcctggcaagcccacacgtgtgttgagagcttctgacta

SEQ ID NO: 131133 - DNA, 370 bp, Homo sapiens
aacttcccaggaacacgcacgtaatcttgccactttctgtcagccacagccatgctagcttaaaacccaggcctggcctgtatccccaagcctacaagggacctgccccagagcagccagaatatgctttgttctagggcacagccactgaagggcaggactacttgtggatgtggcagcagttcttgggatgactgatgcttctggagcgagaacttgctgttctcagaagcagagacttagaaaacatccccaagcagaaagcttcttcctttgtccgttggaaaactctgtggcaagacatttgtagctaagaattggagtgttcaccaaggacattatctctgccgtgccttaaaatcaatcaata

SEQ ID NO: 131134 - DNA, 567 bp, Homo sapiens
gcgctgatggctcctaaggtgcccgattgaactaaaagatttcccacattctccacacccataagatctttctctagggtgaactcgctgatgtagaatgagggtgcctttatgactaaaagatttcccacactctccacactcataaagtctgtccccagtgtgaatttgctgatggttcctaagatgtccttttgaactaaatgatttcccacattctccacactcataaggtcttgctccagtgtgaactcgctggtgtagaacgaggttgcccttttgactgaaagatttcccacattctccacactgataaggtctttctccactgtgaactcgctgatggtgaacaaggctgcgcttatgactgaaagatttcacacattctccacacttgaaaggtctttctccggcgtgaactcgttgatggctcctaagatgtccttctgaactaaaagatttcccacattcttcacacccataaggtttttctccagtgtgaaatcgctgatgttgaatgaggctgctcttttgactaaaggatttcccacattctccacattcata

SEQ ID NO: 131135 - DNA, 228 bp, Homo sapiens
aggtaactttacccttctgaacctctctcctcataaataaataacagtatttgcctctcaggtttgttgaacagatttagtgagaaaacatattaaacaccaaatagtagaatgattaaaaatcattcccggctgggcgtggtggctcacgcctgtaatcctagcactttggaaggccgaggtgggtggatcacgaggttaggagttcaagaccagcctggccaacat

SEQ ID NO: 131136 - DNA, 360 bp, Homo sapiens
aatgatgagacttttgggcactcctggccttgggaagttggcctgacatggtctgacttcagggccatcaaagcactgtcttgagggactgctctgaccagtcacagctgagtgacagagcttaagttggagccagcttccttgtgcaacggtgagtgagcctacaagaaagacatttcctacaggagaggcctggcctcctctggacatggaagctgccctcctatggtgagtgtgagaaggggcacccagtgtgcttcctcttggggtgcagcggtgtggccggcccaggtatgtggaagagctgctccttgttctttcacttagagaagtctttgtcggttctattagccaggggtg

SEQ ID NO: 131137 - DNA, 935 bp, Homo sapiens
cagctgacagcacagagcctcaaacagacacatggaggggctgccccaggaccaggccgccaggacgcagccaacctcaaacctcatccttccccaccagctggagccagagggaccgcctcctgcccttgaggccatgtctgaacgggcagaatccttacagcctatcctgcttgtggactagcagagccagggctatagtgaccacagtgtgagctcattgacagcggttatgggatggggagcggagggtcagaaaacctcaccccacccagctcagccgatcagccttacggagccctgccctaggccacgagcctccagaggccactcagcccagtgtggagtcaccgagtctgtgtcctgggagagggaatatgttgtcaccagcattggatgcggaggatgagggggcagctgattccttagcacgaccaatctttttctaggttttcctctcaccgcatggggccaaaacagtacagagcatgagtttggtaccccaagcctgagcagcgggtctacgctgatgccagggaggatccggaccgtgcttccgggggcccccaaccagcatggccttctcagcctggattctgtatgggttagaggcaaatgcttcatttttctgcacagtgtacacgttccttaataagcgaagtgtggggtgatttctaaaaggatttaaatggccctcatcagccacgtcctgctgagcttgctgggtaagccctttgaggtacctgatgtattgcagggagcagggaaaggaaaaaggattttttttcagaaatgcctgtaaagtgaatggagactagacaccgtccagcttcaagaaggctcaggactttcaacaaagggagcatacctgacctgagagctgtccccatcctctctggaagcataaagaacagtgagcactggctaatcccatt

SEQ ID NO: 131138 - DNA, 495 bp, Homo sapiens
taaaaattaacaccaatcctcctcagacttttccaaaaaacagaggagagataacttatttcagcttattctgtgaggccagcattaccctgtgatatggtttggccgtgtgcctacccaaatctcatcttgcattgtagctcccataattctcacgtgttatgggagggacctggtgggatgtaattgaatcactggggcgggttttcctgtgatgttctcataatagtaaataaatctcatgagatctgatggttttataaaggggagttcccctacacaggcctcttgcctactgccatgtaagacgtgactttgctcctcattcgccttttgccatgattgtgaggcctccccagccatgtggaactgtaagtcaactaaacctttttcctttataaattacccagtctaggatatgtctttattagtagcgtgatacaccctaatatcaaagccagatcaaaaaaactacaagcagctgggtgcagtggc

SEQ ID NO: 131139 - DNA, 1205 bp, Homo sapiens
aattttctcagcattacatttgatgctacagtaggcacccacacatttatgtttcttttctgtttttcaactattgttggttgttctgaggtattttcgtaaggtttcacttctgttttcccagccatgagtgatacatgagcacaactgttttgctattaatcaccagcattgggtgtgaaaatttactcaaagttttgctaaatttaactggagtagaaatgggccatgcatttgtgcgtacttccccagatgctttttagaacagtgcttgtgtaactgaccagagtgtcaggtgaggccattgttggcagaaaggtgccttcctcgggagaaggtgggttacacagcttttctttgcagatgaatggtgagagccaaacccgaagacccacaggtttcaagctggccatgtggcttcactaagtttggcctcaacttcccacagtggcacagaagcgaggtagaactcagtgttcctacccgaaccctggacattctgaaatgtccacagcccgaggaaagggatgacctgcatgtcactttccataccctccactgcacatagatctgtctcaggcattgaatcagagggatgtgtgactttggacaaattatgtttacctttctctgcctcatttcttcatctaaaatcaggtgacagcaatgtctccctgtaatattgcagtggggattaaatctgttaatacttgaaaagtgctgagatcagtgcctggcacataagtagtgctcaataactgttgtaaacctgggtttggatctcacttccattgctttctggaggcccactttggtcaaatggctgacctttctggacttcagcttcatctgtaaaatgggattatggcatctacttcagcatcatgttaggggtttaagtgagaaaatgcatttcacacagtgtcctgcacataaagggcccaccatatatgtaatgaaaaacaaacaaacggccgggctcagtggctcactcctgtaatctcagcactttgggaggcccaggcgggcagatcacgaggtcaggagtttgagaccagcctggtcaacatggtgaaaccccgtctctactaaaaatacaaaaattagccgggtgtggtggcgcgcgcctgtaatcccagctactcaggaggctgaggcaggagaattgcttgaacccgggaggcggaggttgcagtgagccgaga

SEQ ID NO: 131140 - DNA, 388 bp, Homo sapiens
ctggtagaagcctctagcctcaacctcgattcagtgaccccacgaccactgcacctgcacctcccagggtggcaagaccaatggaggacagaccccaagccagagctcaagtctgttctcatcccagctagggtggggagcccccaaattaaaggctcctctttaactcccccagctccacccagcccccgaggctggcaggagcaggcctggcatgtcccagcagtgcccgcccaggcgtgggtgggcaggaacagcagctgggtcctggcacacacagctctgtcagaggcagggaagccaggagagtcctggaggaagtcaccctccccatctacactgaactatgcccttccctctgccccacctggctaaggctcgtgtccat

SEQ ID NO: 131141 - DNA, 277 bp, Homo sapiens
atttttagtagagatggagtttcgccatgttggccaggctggttttgaactcctgagctcaagtgatccacccgccttggcctcccaaagtgctgggatcacaggcgtgagccaccgcacccagcctcctttctctacttcttaaagtcttaaggcttattgtacatatttaaggaaaagcccaggtcagatgttcccactagctttggtaaaatgaaggggcttgcaactttctgggagtattactcctgtttattttaagtttcaggtttaagca

SEQ ID NO: 131142 - DNA, 176 bp, Homo sapiens
tcaagaactcctgctccagatacgccaccagaatggaagaaaacatctggccctatttgatatcaaaccacattagaaaatgccacagtacgattaagtctttcataagataaaaagaaaagcttcaggccaggtgcggtggctcatgcctgtaatcccagcactttgggaggcag

SEQ ID NO: 131143 - DNA, 415 bp, Homo sapiens
cacaagctaaaatgtgctgaatatcatcagttatcatgaaaaagtaaattaaaaccacaatgataccacttctggtcaagatggagtgaataaaggggaccagatatagcctccttgcacgaaataataaaaacctaataaaatgaatgaaacaacagcactgaagatattggacaagcaacaaaacacagtcatccctggaagacaaaaaacaaatgggccgcacgtgtgcccagcttactgccttgagagagtttccaggtcgtggaacagggaggaggaacccaggcagagcctgtagtctccccaagttgaggaaatgaagctggaagtccaaggaggccaaggtgcctagagctcacagtaagcaataactacaaaagaaaacactgataaattaaacttatcagatata

SEQ ID NO: 131144 - DNA, 515 bp, Homo sapiens
agtacttctgattctacttcctaaaatccattccttttcctcagttcccactgccattgtcttagctgaggtcttaattatctctgcttcccatctctctaagccagcccccatctggccaataattctttttccaaacacaaatctgaccggatccttcctctgcttaaaaactcaaaaatggcttcctataggagggagttcacccttctcagtctagcagtgtaattcctattacacgctattccctacctgccattgactttgcataccctctttcctttgttcaaaacacactttccctaggaactcctagtcatttccaagaccctgctcatccatcacttctgtggtgtggacttcacagataattctggggaaggatctcctgccctctcccctggattagtcagtgccctgtagctactgctattacaatgtatattatcctgaactgcagtttatttctgtatctgtctcacttaccagactgaagctcctcaaaaacagaaacc

SEQ ID NO: 131145 - DNA, 443 bp, Homo sapiens
tatagtctttgactctttgctccctcaatggcttctggctgcttctagtaggtaaatagatgctaccttcaacttgggggtaggttttggagacatcacttttaaccatatctggaaatcactttagccattacattcaagtacaggagtagatagtattgaaagaaaaaactatcatttcattttaatatactgtgatttttcttgccctcctgtctcctatcactgacaacctgacaactgtacctgatctctctctctcttttcctaatgattccaagcttcaaaactaacagaaaaagcagttttgcccttctttttatttcttatctctttgttgatgatccaggatgaagtttaattgaagttggaatgttctatacttaaaaaaaaaaaacccatgctatcttgctatcactattctatgaatcagtagaaaacta

SEQ ID NO: 131146 - DNA, 224 bp, Homo sapiens
ccaaaacacaacggaactcctatttgcactgaactgagtttggggatatgagatgagtgaaacaccatgcctgctctcagaaagcagacaacctaataaggagataaacatgtaaacaaacacaagcattttactccttgtcacttctttgctgccaggccctccccttctcctggacctcttcatgttggagtgcccaccactcagttcctggtcttcttctt

SEQ ID NO: 131147 - DNA, 168 bp, Homo sapiens
agcctgggctacagaaaaagatcttgtctttttttttaaaaaaatagctcaataagcatttgctgaacaaagaaataaatatgagataccattaacatataataaaactgctacttaataatactgaattattattatcaggtccaatttaataatgatatggctcta

SEQ ID NO: 131148 - DNA, 251 bp, Homo sapiens
aaggaatgaagataaactagtcaggaaaatctagaaagaagatattttcatttgatttcattatgctggtaagctttgtgtgattttgaaaatgaggcagatggctaatcggagaaaactgccataaaagttttattttgaggtatctgggacaagtcaacataatcttttaccagttcttggggtcctgaaaggttttaaaatggccttgataatgatgagctgtaaaaattaaacatcctcctcccccc

SEQ ID NO: 131149 - DNA, 527 bp, Homo sapiens
gactttctccacacattctaagatgtatacttagggcaagaaagatgcctgttacgaagcagcactgcctgtctttcctgtctgcctcgtgcctgagtgcaggaatgaaagagcaccaaaaattgggggcagcggcctgtctgtccgccatctgtcctcagcacactctcttcttgtcacctgactctccctgcatctctcccacttgctcgccacctcaaccgcatcacgttcgaacgggtgatgggtggcaactatccaaagagggaatagaaagagagtccctgtaggtattaaataggtgggagttaggggacctgggctccatgctgacatgctgggaccacaggcaagccccttacctggaagggcctgcttcctcctccctcttctataaaggccctttcaggtcatgactgaatgaagtgaggtgggggaggagtggcttggtttagttaggatctctattttccactttgctttggccttggacacctgacctaaggtgggtccatcacccacgttac

SEQ ID NO: 131150 - DNA, 592 bp, Homo sapiens
ggtggatgtggctaggtgggtgggggcaggagaaggtgttccaggggcagcagcaggacaggcaaaggtatggagtcagggcaggtaggaagtgggtgtgcagtggggcaggaatggtggggctcccagtccagctgaggcagaggtgctgggggagtgctgaggaggtaataaagggagtgggctgtggaggtctccatgtcagccctgggagtttagcccagaccctgaagcaggagggagccactgaagagttcgagcaagggcatgcccaatgaaagatatttccaggtggctggaagtcagtgatgggtggcaactatccaaagagggaatagaaagagagtccctgtaggtattaaataggtgggagttaggggacctgggctccatgctgacatgctgggaccacaggcaagccccttacctggaagggcctgcttcctcctccctcttctataaaggccctttcaggtcatgactgaatgaagtgaggtgggggaggagtggcttggtttagttaggatctctattttccactttgctttggccttggacacctgacctaaggtgggtccatcacccacgttac

SEQ ID NO: 131151 - DNA, 356 bp, Homo sapiens
agggtccccctgcggcccttcagctcctcagatgcaccagaggccatggaatccaaaccccaggcaggcatctcaccactgcagaagcccagatgtcagggcatggtctctcagtagaggtcctctcacaggccaaggtacatatgaggactgcctggggcctggcagaccccagcaccctgatgggggtgtcacattgcccatgggaattccacagtccttggctgtcatgacaacatgctgcagtgatccccgagctgcatggcacccctccatcgtggtggacagctcatgtccctccaccttcaggcagctctggacccacccctagcttggctaggtcttcattcttaagc

SEQ ID NO: 131152 - DNA, 423 bp, Homo sapiens
ttttttttttcttcagagatagggtcttcctctatcacccaggctggagtgcagtggtgtgatcctagctcactgcagccttgtccccttgggcttaagagacactcccacctcagcctcccaggcagctagggctacaggcatgcatcaccacacctaggtaatttttttgtttgtttgtttgtttttatagagacagtgtcttgctatgttgcccaggcaggtcctgcgctcctggcctcaagtaatcttcctgccttggcctcccaaagcagtgctgggattacaggtatgaactacctcacctggccctaataagtcttaatattaaactttccttgtttaaactactatgcagtttctgctcccagactgaactgatgatatactccctttactagtagcatttctgcagtaggccca

SEQ ID NO: 131153 - DNA, 195 bp, Homo sapiens
tgcatctcccacagcatctagcacagagctctgcatatagttggggctaaagaaaagtttattggacaaaagggctgtttctgtttgcacagactaaaatctagttacttgggcatactaacaatttagatggctcttgagccgtttgcttgagcctgctcctgctatgtggagtgtactttcatttcaataaat

SEQ ID NO: 131154 - DNA, 114 bp, Homo sapiens
tgtgagatatatatggtttgcaaatatgttctcccagcctatagcttgtcttttcatcatcttagtaaggtctttcagagaataaaagttttaaataaaagttttactttaatt

SEQ ID NO: 131155 - DNA, 403 bp, Homo sapiens
tattcacttttcagtgagggccagtgacatttatgctgcctaacgtcatcgcataggaaaagttaccttttattggacgggatttgactatagtgtcccaaatgcgcttctccgtcttagcccatctcttaaaacaccctgattaacgatatactaacagtcttactctcttgagaataggctgagaattgggataggtgaaggtttggataggtgaaggcagagaaaattattttgaacattttactggatacagttgtacctgaatttatatgaatgtgattttacggttctgtgtttttccatttttcagtacttcgatatttgtttggaaaggaaagaacttagagatgtaatagcatttcatattgaggatctcaagcaatgtaaacaaatgtagctt

SEQ ID NO: 131156 - DNA, 567 bp, Homo sapiens
  misc_feature (51)..(51): n is a, c, g, or t
ctagacatcgtgtatctgtgctggtgtgggagaaggcacagtgtcagaatngcagcctggtaaggctggtcgctttccctgcctctctgttagctgtggaggaaagaatgggatcagcttggttttcctatttccaggccatccaatggctggtggctttggaatataacctgatcttaccccgaccacctcccttttgttccaaatgggtgagaaggtaaagaaacagatacagaaacctttttttgctgtttctctttcctctttctttctagatctctgaggcattccctccccactgccctccctttactggaatataatggaatacagaaacgtctcctttcgcctcatcttccattcccttattattattttagctactaggaattagcattaggaagaatcccagcaagcaagaggtgtaataaagataatcatttccaagaagggaccagcccagtgttttgttttgttttagattttaggctctttgagtgcaattttcctccagttggtgataaatttttagccgctatgaggtcttttcactttttatcacgtatc

SEQ ID NO: 131157 - DNA, 258 bp, Homo sapiens
tatctagagatccggcgagtgatggtcatgctgtatcccagcatttgcgagcatgtggcagatcacagtcaggagtcgggagcagttgacaatggtgaatcccgtgttaataaaaatgtatataaataagccagggtggtgggcacctgtaatcccagctacttgggaggctgaggcaggagaattgcttgaacccgggaggtggaggttgcagtcagccaagatcgtgccactgcactccagcctgtgtgacagagc

SEQ ID NO: 131158 - DNA, 570 bp, Homo sapiens
gtgtctttcaggaaagaaggggaaatttaacattctcaaatgttgaaaaactaaaagaacttgtcaacattagatctatcctaaaagaataactgcaggaagttctctcaacagagaggaaatgataaaagaaggaatctgggaatgtcaaaaagaaagaacagtgaacaagttaaaatgtggacaaatgcaactttcttcttctcttgagatttctaaattatgtttaacagttaaagcaaaaattatagcactgtctcttatggttctaaacatacacagaggaaatatttagggaacgattttataaatgggggagggtacagggacataatggcaagtaaggtttctacactttacttgaactgtaagatgtaaccatatgtacatagtaataagtcatgtatatatgtaatgtagtacctagaacagccatttcaaatgctattcaaaagagatactcaaaatcaccatggatagatgaagatggaattctatatttagaaacacattgattggaagaccagaaaaagaactcagagacatgacagagaacaaacagaaaacaaa

SEQ ID NO: 131159 - DNA, 623 bp, Homo sapiens
tgatctggccctccaaggctctaacagacagctggtgtccatcacaaccaatcttgtggacctggtatggggatcagagaggccaccggttccaaatcaacccatttatgccctgcaggaggcattcacagggagcacttggcaggagaaagtatctggcgtccgaagccagatgcagaagcatcaaaaggtcccgactgccgtccttctgtcggcgcttgaggagacggcctggctcttcaaccttcgagccagtgacatcccctataaccccttcttctattcctacacgctgctcacagactcttctattaggttgtttgcaaacaagagtcgctttagctccgaaaccttgagctatctgaactccagttgcacaggccccatgtgtgtgcaaatcgaggattacagccaagttcgtgacagcatccaggcctactcattgggagatgtgaggatctggattgggaccagctataccatgtatgggatctatgaaatgatacccaaggagaaactcgtgacagacacctactccccagtgatgatgaccaaggcagtgaagaacagcaaggagcaggccctcctcaaggccagccacgtaagtccacgttcaggcagac

SEQ ID NO: 131160 - DNA, 749 bp, Homo sapiens
gtcatcctgagtagacgcacccatccatcatagtgactcaaggccaccagtagcaagctcttcagaaaagttatggagtagtactttgtgttaaatgagctaattaagagacacaaaccaacatcatttttttttaatctctcaggatgaggatgttgtgtggatagattactattctgatatttagaacagaggtttgtttgtttaaaaattgtatttatttaatctcccaaaacaactgagaaggctggtttttctactcctggtatgctaccatatactagatttgtctcagcatcagatcttggctaatatgagctcttctgacaactgtagacacagagaaattggggtgtgtttagttagaatatttactgttcttatgtgtgttgagaatatctcagttgtggtatagcctcacctctaagcaatgacatcatgacatatattcaaattatattctgctttttttgtcttagatagaaataaacaattacatggaattttcataggcaaattaattaagatgagagcaatcagtctttgcctagtctccttcccaccttcttctcaaagtgatttattaataaactgcatctgaaataattaagaggtagaaaataaaaatctgaagaccatatttcatagcagacttcaattttatatgaaggtctcaatttattcattcctccatcaccaccatctttcatagccaaagtactcatctctaaatggaaggtttctaaaat

SEQ ID NO: 131161 - DNA, 398 bp, Homo sapiens
acaggtgattcttatacatgatcaaagttaagaactagaaattttatacatttattttctgtcattaattccctcctccatttcttagtctaattacaacatattgatatagttaagcacctttttaaaaatataattgcaattagacagtgttagaaaattaggtttaatttgtttttcttttcccagttgattatcgcaatagctgccatttattcttatgctatgctcatccatttttccctgttgtataaatgatatttaagggattagtatcaaaatagtatttttaagagaaagtcttattaaacattgccacatgggagacgtaaatccagggcaattctaccaggacagcaacctctctttattccccatcctgcctcgataccaattta

SEQ ID NO: 131162 - DNA, 755 bp, Homo sapiens
agaaatagatttaatagtaccaaggtacattgttgttataatgaagaaggcgagaatagtttttattaccttaattgacgcgcttttataaaacgtcatttgcatctggattctaaagggaacgtgaattatttttgcacgattatgatttggagtaatattgaaatattaaaaaaattcatccttttattcttaattgaattccaatgcagtaacttcaaaacaatggaaatagcatgaggccagaaaggggaaagggagtagttgacactttgcataccaccagtaacatggaataggagggatgctacaattataggatgctactaaatatgaaaatttattcattaattcagcatttgtacactgagcatctactatgtgtcagctatcaagtatgtaatgatgagcgaagaaaaaaaaacaaaaaacaataatcaacccaaaaagtaatactgtcatgtagattatagcattaagattatccaaaacttaaacattctacaaatagatgtgaaattaattacaagtgttaaagtgttattactgctacaaaagaaaggtaatgttttgcaagatcatagaatagtcaacttaaccttgtagaaagatcaaggaagtcttcccaaggaattaaatgatactttcattatctttgctttacctgtgaagagctgaagtacagttaaataacttgctaaagttttcacaactgctaagtgataaagacaggactgggatccatgcactggtgc

SEQ ID NO: 131163 - DNA, 358 bp, Homo sapiens
aagttttagtagtctgaatattgctatacaaatcgaggctctttggtggttaaaatcacactatgaaaatatttaaacaaagattatgattcatagcattgtaatttcagggctaggcacggtggctcatgtctgtaatctccacactttgggaggctaaggtgggaggatggcttgaggccaggagctccagaccagcctggtcaacacagtaagactctatctccacaaaaaaaattttttttaattagcccagcatggtggagagagcctgtagtcctagctacctgggaggctgaggtaggaggattgcttgagcccaggagttcaaggctgcagtggatcgtgccactatacc

SEQ ID NO: 131164 - DNA, 262 bp, Homo sapiens
ccagctgctggcagggcccatggtcaagatggacagtgggactggagtaggaatcaggggagggaagacaaagaaaagccagccattgccattcactgagaatcactgttgctttctaaagtgacccagttgatgtggcaggactcctgaagatgagaattcactgtgtgctggtagggaggtttacttcatccctttatcaggctccaggcctttgatgccactgccctgctagggtggcaagtgggtttcattccacctg

SEQ ID NO: 131165 - DNA, 468 bp, Homo sapiens
agatgagctcggtaccggtgttatcgatccaccaaatggatctgctttttccttccagtcttcccaggtgccttggccaaactcaaaccataaataaaaggaacacagacaccaggcatggtggcttctgctgtaataccaacactttgtgaggctgaggaggaaggattgcttaaggctaggaattcgagaccagcctggcaacatagtgagaccctgtctctacacaaaatgtaaaaattaccctggtgctgtggcacggacctatagtcccagctattcgggatgatgaggtaggaggattgattgagcctgggagatcaaggctacagtgagccgtgttcatgccactgcactgcagcctaggtgacagagcaagaccctgtcccaagggggaaaaaaaaaggatagaacatctgcaagtccaaacagtgtgccatattcttcctttttttttttttttgagac

SEQ ID NO: 131166 - DNA, 379 bp, Homo sapiens
  misc_feature (108)..(108): n is a, c, g, or t
aagagcataccctccaatgtcacccgattatctttgtataaaacacattcatgtagatcagtctccctcacttaagcaataaaataagcaatgtcaaggcaggctggntcctggcagtccaaactccggcctgctaagccacaggtcctcataacttgatcttcagagagtgaccatttacagtgtttacattagtgctacacaacacgtaagcatttggtaaggtgctcatgtgaaattcagtgtccctgaaaaattactccccaaatataagcaaactaattccaggacatcattttcagattcttccataacttccaaggtttagttcttgaactcctctactttctcattggcaagttaattaaggaaggataaa

SEQ ID NO: 131167 - DNA, 636 bp, Homo sapiens
tgtggtggctcatgcctgtaatcccagcactttgggaggcctagccgggtggattacctgaggtcaggagtttaagaccagcctggccaacatggcaaaacccagtgtctactaaaaaaaatacaaaaattagccaggcatggtggcaggcaactgtaatcccagctactcgggaggctgaggcaggagaattgcttgcacccagaaggtggaggttgcagtgaactgagattgcgccattgcactccagcctgggagacaagaaagaaactccatctcaaaaaaaaaaagacaaaaacaatacaattttaaaatgggcaaagggtttgaacagacacctctccaaaaaaagagatacagatagtaaataagtcatcatttgtcactagggaaatccacattaaaactgcaatgagatatcgctacacaccttttagaacagctaaactgaaaaaacctgacaatactaagtgcagccaaagatgcagagcaatcagaattcttatacgtttctaatgagaatgcaaaattgttcagttattctgagaaatcgtttgggaattgcttatcgagttaaacatacacttatgtgatccaactaagccactcctaggtatctacctacaataaatgaaa

SEQ ID NO: 131168 - DNA, 406 bp, Homo sapiens
tgggttgtgtggggttgtcttaatcattggtggtgggggtgggttcattataaattgctggaagagggcaaagggaaaccagtgctgaatcctagtacctaagtctgaactgtagtcccagatggctccaccgggaagtccaaagctcagcaaactttggtgccatgtggagagggttgatgaagagggaggaaaccttcccggccccactcccagtctcccttctaggcctgtacctggatgcggctgcctcacctggaaaggtgagctgtgagcctgactctcatcctctcagccctcacactcaccttttaccatccgtgccctgacgctaaccctcttttcttcaatcttcaccctcctgtacttgttaaggagtcctccccaatatgttgcctgtcacatc

SEQ ID NO: 131169 - DNA, 760 bp, Homo sapiens
tcttaataaatatcatctcatttagtctgtacaaaatgctgtgagtttggcaggattatccctatttgaaatatgaagaaactgaggttaagtagcttacccaggaccatgacactgagcagcagagctggggattaaacccagattcaaagtccttcttcctcttgtataatacatgcagcaaaaacatgtcagattctactagaaatgatattcttcctagtaattgctttttgtttaataatgaagaaaaaaatctagatgattaagaggaaatatgtgaagacaagttttttcattaaaaataattggggctgggtgcagtggctcacgcctgtaatcccaacattttgggaggctgaggcaggcagattgcttgaacccaggagtttgagaccagcctgggcaacatggcaaaaccccatctctacaaaaaatacaaaaattagccggctatgttagcgcatgcctgtaaccccagctacgcgagaggctgaggtgagaggatcacttaagcccaggaggcaaagtttgcagtgagccgagattgtgtcactgcactccagcctgggtgacagagcaagaccctgtctcaaaaataataattggttaaacttttggaaaaagtcacacaaacctttaccagtgtgtgtggaaggcagtgggcacttgtaaacactgttaaatgggtttctttactaatggcaaatagcacagagaaaagcaatgagaacattctgaattttagagcacatctcat

SEQ ID NO: 131170 - DNA, 552 bp, Homo sapiens
gcataatatcccggtcccatctccttctctcctgaactacagttgacaatgccaacaaacaactcgagttaaaaagtgggccatgccggctgaaacatcgttccaatgcctgtgatttggctgatctagactctggctggtcatagttacagctctgtcccttagttctcatctggggtgcagactgtattttgagcaaaaatctcttcttcaccaatgttcttttgaatgtgaccttgccatagagaaaccagcttgttctagttttcctgggactttcctagttttaaaatggaaagacccatgtcatggtaaccccctaagtcatggggaaacaaagaagttttatcactctaccttaccattttcctatgaaaagggatagtctaattcctttcttctacaatcttgtctgtccttaatgacagccttgtgccagtagaatgttcccaaagtgatgctatatgacttgcaaagctatgtaaaaaaggctgtgtagcttctactatttcttggaacatttgctgtttagaagctttcatctgggacact

SEQ ID NO: 131171 - DNA, 730 bp, Homo sapiens
gaataagaagtattgaggatttattttattttgaattggttttaagtatggaataattgtctttacagttataaaaagtaattagtggtgtttacgaaatgttgggaatttctgctttgacaaatagttaagtcccatggccttcagagagagaggcagtagtagaaactttcgaaaaagtaacatttctctggatttaacatggaactagaaaaatttaaagaataattaaaaaaccatggtaaatgaaatttggtgattatatatagttttggatgttaatgctagttgagagaagagagaaaaaatagcaagtagaagcagagaacaggatcattggaagggacctgagaaattgctgctttatccattttagcaaacttattagcacggcatgtaccagtactaggatcttgagtaagagtgtgtgagtttagctctgcctaatatattactacttgtgggatctttgggagactatgtcctctttgagattgaatttcttctataaaatgagcataatgctaccttacttaaatttaagggttatcatgaagataagtgaaatagtaaaggactacaaaagaccaagggaataatgaattttttttttgtagtggagaaacgcctggggagaatatatgacctaaggtttctgtagtttatgacctaaccaggcccagaacttagtttttcaaatcctagtagtgtgttttttctgatgtgccaa

SEQ ID NO: 131172 - DNA, 626 bp, Homo sapiens
taccaattttgagccccatcagtagtcctcatattcatctgacatttgataatttcagaattaaaatttttttccatctattgaggttgtgtttgagatatattgagatattcttcatagtcttttaaaaaagattttttgttttgtcttccatatttaatctacctgaaattgatttttgtacatggtgttagaagtacagtttcctttcccctgcacctaaattatcatattagcattgtgtaccaatttattctaacctccttaactattcagtagtgctagctctattgtaaatcaagtttctctttatatgcatggatttcttatgtctctgttaccttgatgtgtttgtctgtgcctataccaatatcatgttttcttaaatactaaagctttgtgttaaatcttcatgtctgtctgtcaacctttttcttcataagagtcttgacttggccttttgctctgtgacaaatttagaatattcatgagaatgctcccctccaacacaaaaagaagtattgagtttgtaagtggaattgcattgactttagttttctttgtggaagaatcgataagtttatgtattctttcatgttttctctcaaagttttatatttttttca

SEQ ID NO: 131173 - DNA, 240 bp, Homo sapiens
ttggacttgcaaacactagcaacaatttccttagaaaagcaattctgaaaaatcaggagtccctgttcaaagaatgctctccaaaagctatcgggggcagaggaattaaggagcagatcgtaaaacaaaatacatcaaacatataaagcatccaagtaggaggctttggatctccatgaacagttggacacatcagccatagcagagcagtactgggcaattggatatatgcagagaaat

SEQ ID NO: 131174 - DNA, 344 bp, Homo sapiens
gtatgaccataatggaattacattattatctatccatctatgcgcacgcatacacacacactttaaatacagggtctccttctgtcacccaggctggagtacagtggtacaatcacagctcactgctgctttaaactactgggctcaagcaattctccttcctcagcctctcaagtagttaggactacaggtgtgtgccaccacacccagcaaatttttaaattgttttgtagatatggggttttcctacatcacccaggttggtcttgaactcctggcctcaagcgatcctcctgccttggcctcccaaagctctgaggttacaggtatgagccactgttcct

SEQ ID NO: 131175 - DNA, 308 bp, Homo sapiens
gctttccaagggagttgtacaattttattttaagtcctagtctctactcactgtgaccagctctaatgcttgatgatgagtttttttaaattactgctaattggataggtagtatatggcatctaattaatttgcatttctttgttgctagtgaattatatagttttatgtgtcaggcatttatatttcctccttcataaattggttatttcttttgcccatttatctgttagagtcagtatttttggcattgatttggatgagctctttgttgagaacaaactcagcaactctttaggttgtcattt

SEQ ID NO: 131176 - DNA, 245 bp, Homo sapiens
ctccttttactgtaaaatgagtacaatacctacttcactggattcctgtagtgattaaatgaaataatctaggtggaagcgcccagcatcatagctgtcacatgaagtgtgtttaccagtgtaaactttccgcctccagaaacaatatatgtttacagtgtgcaggttcccatcaccttcagcagcagcatgaaggtactagaaatgataccaaatattgccttcattttctataaagttattgt

SEQ ID NO: 131177 - DNA, 598 bp, Homo sapiens
cggaacacccgcccaggagtccctctctctctctctcctcctgccagagagagagttcttttctctttcctcttgcctattaagcctctgcccttaaactcacttcttgtgttttggagccctcgatttctttggcgtgagatgacgaacctcggtcatttaccccagacaagatgccacttcatttctacttttgtatatatttgaatttttgcataattaaaaaaatttaaaggctttgttaaactactagtcacattttaaaagggggatagacaatctttatttgtcagatatttttaaataaagaaaaggaaaaggggagaggataagtatgcgaggtgttagatgtgttaattagcttgatttaatactttgcaatgtatacatatattaaaacatcacatcgtacaccatatatacagtttgtcaattatatcttaataaagctggaggaacaacaaacaaaacaaaaaaacgcaaacacacattgtggggcacgcccccggcgtccggcgaaaagctcttcgaaaaccccttctgtgggcgcgcccgcgcgcccccctggggtcagggtccacacgggcccccagcgggc

SEQ ID NO: 131178 - DNA, 296 bp, Homo sapiens
ctcatgtctcactcagtttaaatgctattgcctcagaaagaacctcttgaccttataatctaaattgggtctccctgtttttattctaagtacccttcttactttttatgactcttttcataatctgtatgttgactgattaaagttccattaggatagggaccatgtgtggtttgttcattaaaccacccagtttttaaccctgtatacccagagaccagcattgtgcctgtcaaatggaggtactcttttgcagaatgtatgaatggaatgaaagaaattaaatgagagtcaag

SEQ ID NO: 131179 - DNA, 803 bp, Homo sapiens
cagcattcactttaacatttctattttcctttatcatttctgttacttgagtgtgtaagagtaatcaacataaataatctatgtttacatctcttatttctctctgaaacagttccctagaatccacaccacatgaaacacaaattgagtagtgtatgacccacctgaattccaaagcattctaaaactcccgtattttccagcctagcagttagctcctgctctgcaagacacaccctcttgaccttgctgctagactgtatgggccccctgaagtcatagtagctggctcttactcatccccacattcacttggcatagttgatgttcaacaaatatctcttggttgcataacattgaacgagccaagtcacctaagaaatccttaatttatacacaggttcttagggtacctgaatagggcaacacatcagaagtacaaattgagaactatacaaagagtaaaataattcttgggttcaaataccctagagccaatcaagtttagtcacaaagaatttcaattcacttcaatgtggacagttaagaagggaatttatcagccttaggtggaaatcagagccaccatgagtaccacgtgcagcccctatagtgtttagctttgccagaagtcaccagagaaagtggctgaggaacagaattccagctcatatctggctaacagtggcactatgggagtttatatgatctgttcattattctgtggcatcaccttctaagagcagagatgtgacccaataccccttgttttccttaaagataaccattaaattatatccatg

SEQ ID NO: 131180 - DNA, 1219 bp, Homo sapiens
gatgaacaaagggctagatttgaagtttgggatacttggaatattggcagataaaacagcctatacattgttacactttagatctgctaaaggagctctaaataattcacacgcccagtcacagatttaaaaaatagatgcagagatgtatgtttttttctgataaaagagtttacatcatttgtatagtgatagagtagatcaatgcatttcaccaacaactcaaatgaagacaacccattaattagaacaaacacattgtcttatatgtgcttggtagttgaatattacatattaagaactttgggctgggctcggtggctcacgcctataatcccggcacgttgggaggccaaggtgggtagatcacctgaggtcaggagttcaagactagcctggccaacatggcgaaaccccatctccactaaaaatacaaaaattgagctgggcatggtggtgtgtgcctgtaatcccagttactcaggagattgagggaggagaattgcttgaacccatgaggtggaggttgcagtgagctgagatcacatcactgtactcctccagcctggatgacagagcgagactccatctcaaaaaacaaaaaaaaaagaacttgcattggacattgaatgaatatgctagaatcatcttttattgtaaaatagttgagggggaacctgtgattgtctaagaaactttattgttttcttctgtagtatttttatatgaaacaaaatccgtatcaattacaactttaataagtgattttccaacctacatgataactttattccttgtgctggaataaactgtctcttgcctcttccttcctttctcctctgaagcctttaggaagtcagtgattaacacatgtccctagaggacccaagtggtgtggaaaaacctatgacttgaggagaaaagcaagggtttttcaccatgatcttcctaaagactcttacctaatttctactgcgtcctttccctgttggtttttattatcattcttcccactttcaaaagagggaatggttggccgggcgcggtcttgtatgtgcttggtagttgaatattacatattaagaactttgggctcggctcggtggctcacacctgtaatcccaacactttgggaggccgaggagggcggatcacctgaggtcgggagttcgagaccagcctgaccaacatggagaaaccccgtctctactaaaaatac

SEQ ID NO: 131181 - DNA, 279 bp, Homo sapiens
ttgactctagcaggatcctcacgtaatatgtaaccgcacacgcgagggatctaggctgcacattccttatgagaatttaatgcctgatgatctgaggtagacagtttcatcctaaaacgatctcccctgtgcccctactcgccgctgtctgtggaaaaattgtcttccatgaaaccagttcctcgtgccaaaaaggttggggatcactgccttaactaactgtgtgaccttcaccaacatacttaaccactccaactctgtgtcctcctttgtaaacta

SEQ ID NO: 131182 - DNA, 353 bp, Homo sapiens
  misc_feature (24)..(25): n is a, c, g, or t
  misc_feature (44)..(44): n is a, c, g, or t
  misc_feature (135)..(135): n is a, c, g, or t
ctagaggatccagactcggcaccnnttcagcaagaggatcgtcngccggagcccagtatcggagtgtgatgcagaagtacctgcagagagaaatgaaataacctttgacaagattttcaatcagaaaattggttncttgctatttaaagatttttgcttgaatgaaattaatgaagctgtacctcaggtgaagttttatgaagaggtaagaagtaactgttttacaaggcaggcacaagaggaagaggcgcaagtgtttcaggccggggaactagcgtgtacaaaagctcagaggcaggacacagcttgtggtgttccagaaagagaaaagcctggtgtatgataacttaggg

SEQ ID NO: 131183 - DNA, 340 bp, Homo sapiens
tgtgcctcccgcagtctgcccttctgagtaagtgggtattagacaaccattaagtgggctgacccagcccccaatctgagactcatccctcaagctcttgtctctcactccccattctttccagcagcaaaccccacagacttgccttcaaaatatgcctcagatccaccccttctctcccatgcacttcactccagaccaacagcacctctccagtctaccagtctctctgttctaccctcctggcactcgctttggggaactttaaaaactaaaggtatttgtgtcagtcctctctgcaaaccccagtgcagcttcccacccaaacagaaccaaatcc

SEQ ID NO: 131184 - DNA, 352 bp, Homo sapiens
aaacagtagatgctggggactagtagagggaggaggaggcagggggccagggttgaaaaactacctcctgagtactatgctcacttcactatctggatgatggattcaactgaactctcaacctcagcatcacacaaaatacctttgtaacaaacctgcacacgtaccccctggatctgaaataaaagttgaaaaaataaaatataaaataaaataaaatgtgttgtcataatttgggttatcaactaaatcacctgaggaccttttcaagctatagttttcctaacactgctacagagatagaaagttcacaggcatggtatagtccatccagtagcctgtttttttgttg

SEQ ID NO: 131185 - DNA, 678 bp, Homo sapiens
tgttgtgaaaatagtgaaaaatctctaaattctgcgtgctagaaatccatcactattaaacatgagccaagatagacccagtgagtagtagtactgtaaattcttacacccctggctcagtaagcagtaactttagccttgtatttcaaagttttagtaccacttggtcaaatatgttcaggagtatgataaagttataggcccaagagagtggtaatttggctggaagacagaaaaaaagaaaaatataattgcttttttttggagaatatatagacagaacactacatatttaggaaataatatacttaaataaatgaaagtactaaaagagttttcaataaggaactttatctccttcccacagtcagagatgcatctaatccaaccctgactcaatgggtttccaattatcagaaatggaaatgattcagtgtttatatgctctgttgctgaacaagcctcactgtcacaaagtgattccttatatttcacctgtaattgtagctatatgttacagcatgaatgagaattggaaaagagggtagttattttgattgatgtagacagccaaagtgggtaattgagacccctgaaacttcctttaggatttgaatgatcctatttggctgtcttggggagtcacaacagtgggataattaccatatttttactcca

SEQ ID NO: 131186 - DNA, 279 bp, Homo sapiens
tacgaaggaaagactagatagtactttatctcccagaatctctgcttaagcagaagacttactccttagccaaagtatgcagaactcataataaaaaccatgaagatcaaaatggaggcctgagaaggtgtagttgttttgtttttgcttttttaagctgaactggtatcccagatatacagccatgattaagaaataattatctttttttctccccaagaataccaccaggatgataaatacctgtcaacaataaatactaactttggacaattgtta

SEQ ID NO: 131187 - DNA, 745 bp, Homo sapiens
ggaagacatatgtgtacataaagagtatgaaccttgagtcttacagacttgagcatgtgtgtcttttaaagctctgtcatttatcggctgtgagaacatggccaaaatactcagcctctctgagcctcagttttctcgccagtaaaatgggtctgattacacattctttataacttttatgacaaagatggtagcattgtatccagcatgttgtatgtgctcagtaatggtaggtgttatcagtgtttatgcctacagttctgtaacatgtttaaatgcaaagggaattcagactcagagaagtctgtggaaaaaattgatgaaagcattatgtaggcttggtggtggggagaatggaaatgtcatatgtgggagtcatatgctagtttggagagaggaggtggcaagtggggaagtgggattgatagttgatttgggacctgtgatctggtctctgcaaaaaggagcctttttggagagacaggaacccgaccacctggatgcagtctcagctctaccacttgctgcatgtgtaattttaggcaggttacttaacttctctgtaccttagttttccccatctgtaaactgggcaaatatggtggaccacatatagctgtgaaattaaatgagttaacatgtcaagggcttagaacagtgtctagtacagtctgtagtaaagctgcatacatttttatattaattttagattatggagctaaagcgatttttttatatttacact

SEQ ID NO: 131188 - DNA, 466 bp, Homo sapiens
ggagctcggtacctacttttccacaggtacttttccggggtcaaagaaacatgttggacacaccatggtgacagagcaggagtctcttaaccccggcgtggttgaggctgccgttctggtgggatctggggtcagtcaggggttaacagtcgctcctgcttgcctgattgacacagtaataaaggcagtgacaccaaactaggtctcaggaatgtgtcctcgttagaaagactcactaatggttgtgggggggtggcccatgagtccttctgggtggtggcgagaagtaggggaccctttgggctttgccctttttggtcataggacttcactccacagacataattgaaccgttgggtttctgcagccaaattcaaatgtcaccaatcttggtcacccctttcatctcttgggtcctctgtaagttatagctatctgatagtttactgaaaaataaactgaaaat

SEQ ID NO: 131189 - DNA, 217 bp, Homo sapiens
ctcacacccatatgtaaagcctctctagcactcctttccaaaatctgtagcttaattatgctaatgatcttcatttatcatgttggtttacttatcaggacattttcctatttctggtcagatgtttttccagggattcaaggcatggaatccttcattaagtggggaagaaccaacagaatttgttccacatattcctctgacacatccccaaaag

SEQ ID NO: 131190 - DNA, 245 bp, Homo sapiens
ctccctttttggtctccacaaacactaaagtcagtgaatccttccctggtgcatttaagagatcaagcagaaatgaccgtttatctggctcttccacccaaactacttcctgtgtgatagtctcagaggtagagcctactcttcctacagccaaaaagatatattcatccaaaaagtcacgagcaagcatctgtatttcgttaggaaaagtagcactaaacatcatgatgtgatgaatgcccttc

SEQ ID NO: 131191 - DNA, 685 bp, Homo sapiens
ctgctcctccctctctgcatcccatctctcactccatcttagccatactgactgcctggctgttcctggaacccacaaagcactctactgccttggggttttcacattcatgttctcttgatgagaaacctgtcatagatgtttgctcttgttaaaggtccctctcctttaagattgaaagagggagaacctgcaggtgatgaggctatctagaagtattcagttaagtactaggagcatcttttagaagacaaaagaacaaaagcaaagcgcaaaacaccaactggagttttgtaagaagaggactctgccaaagaagtcagtcatccagacacgtggcttaagaaagggcgatgaatgtggatggtattgacaagacgtgtatgattgaaaacgtgttggtttttcgctgggagatgaagattaaaaacctttgatttttaaacacgttgaatttgaggtggtgatggtgacaagacattgaaattaacatgtcctgtagataaaatatagactgtgcttgggtgaagtggccagatgggaagaaaatattgatttgggcaacatcagcttaaaaattaatgagttctctggggaacagtaagggtagaaagggaagatggccaagagctgagacttggggaatgttcaagtggaggaggcaagacctgggcagaggagggga

SEQ ID NO: 131192 - DNA, 785 bp, Homo sapiens
attacatagtggtaaagtcaggtcttttagtgtatccatcactggagtaatatacattttgcccattaggtaatttctcatccttcaccccctcccaactcccacccaatggagaccttctgagttttcatcgactattacttcacacatattaatgtgtaataatgtacatattatttagctcccacttataagtgagaacatgcaacatttgtctttctctgtctgattcgtttattttgagttaatggcctctagctccatccatgttgttgcaaaatacattatttcattccttttcatggaatactagtatatgtgtgtgtgtatatatacacacacatgtatacgcacatacatgtatatatatatgtatatacaaacacacacagggtagatactgttttacataaaggttatgctaattaacattcccaccaacagtgtataagaatttccttttctccatatcctagccaacatctgttatttttttgtcttttcagtaacagccattccgattggtgtaagatgatatttcactgtggttttaatttgcatttctgtgatgattggtgatgttgaactttcttcatattcttgttggccatttgcttttctttttttgaaaaatgactattcatatccttagcccactttttgatgagattgtctgtttggttgttgagtagtttgagttccttgaaaattctggatattagtcccctgttgggtgtatagtttgcaaatattttctcccattctgcaggttgtctgttcactct

SEQ ID NO: 131193 - DNA, 717 bp, Homo sapiens
cgtggtggctcaagcctgtaatcccagcactttgggaggccgaggtgagcggatcacaaggtcaggggtttgagaccggcctgaccaacatggtgaaaccccgtctctactaaaaataaaaaattagccaggcttggtggtgcacacctgtaatcccagctactcaggaggctgaggcaggagaatcacttgaacccgggaggcggaggttgcagtgagccgagatcatgccgctgcactccagcatgggtgacagagctagactcagtaccccacacacacacacacacaaaaaaatcacctaccaatagcacagtccctggaatgatttcttctactgtaaactgactaaagaaatacaatttggaattatgattcttaagaggttaagtgtataggctttgttatctgcctgggtttaagtataagatctatccttattagctatatgactttgggcaaagtatcaaccactcgaaactgcagcttccttttttgtaaaatggaggaataaaaatacacagggtggttgtgaagattaaatgaggcatttcatgtaaagtgcttagaaaaatgtcttgacgcacagaaagccagtaatattgttactactacagggactagagcttgggtgtggttggtggagtttttgaagtttgtaaaccagcctccccaggctcccctctttcatttgcagcagacctgaaaactacagga

SEQ ID NO: 131194 - DNA, 317 bp, Homo sapiens
tggtccctggggtggtttagattctcaatcaagtcctttagccttattgattaaaatagagacatttactatcacaaaatgatgcccccaaacagcctcaaacctgacacattagtttccctttcctgcctctgcccaaaatgaatgtttttctttctcttcccttgggttcttctctccctcccctcctcttccctccctctctcccttctctattcttccctctccctctctatttgtccttctctgctccaagtcctgccacaaccccaggattcatcagcctccctggacacatcccatccagctcctgaccg

SEQ ID NO: 131195 - DNA, 225 bp, Homo sapiens
cctgcctcagccttccaaagtgctgggattacaggcatagccactgcacccggctagaggtacattttgatcaagggagtacttgccagtcactggcattctacatcttcagagattacaagtcaacaataaacctctgtttcagtacccgctggcccctcatttgtcctactaaggaacctgtcagggtccatggtccatacgtgctgacagctcccacctggt

SEQ ID NO: 131196 - DNA, 305 bp, Homo sapiens
gggataataggcacttggccattggagccattttagaggaagcctatcacaaaagccaatactgagagaaacagacctgagagccaagaagtgactgagtccagtgacttcacttcagcccttgaatgttgccattaggttttgtcatatgcaatattctgaaatgtgctagaatggctgcccaaacattagggggaacaattcatccccatttgcccaggactttcctggttttaacactaaaagtcctatatcttgggaaactcctatatcccaggtgaattaggacagttgacacctgacat

SEQ ID NO: 131197 - DNA, 576 bp, Homo sapiens
ggtcttgaactcctggcctcaagtgatctgcctgtcttggcctgccaaagtgctgggtttacaggcatgagccagcctgcctggcctcttttgcttactttctaattggagtttttttttcttcttacccctgaagttttaagaattctttacatattctatatctgagttctagtcagatgtgtggtttacaaatattttttccccagtctatagcttgtctttgcatttctttcgtagagcaaaagtttaatttgataaaggcgagtttattgagcaagaacttttccttcatgggttgtgtttttgatgtgtcaaaatttttaccaagctttaggtactgaaggttcccctctgccattttttaaaagttttgtctattttgaatttttatataatgtgtgagatttaggtggagggttttttccttgccttttttgttttgtggggggtgtgtgcgtgcgtgcgtgcatgttttctggtcttcagatcgtatttaatcactccagcaccatttgttgaaaaatgtatcatttctccattagatagcttttgcatctttgtaaaaaaaaaaaa

SEQ ID NO: 131198 - DNA, 329 bp, Homo sapiens
gctaattcctttttggaatttagcttgcttggattcctttacattgtcagctctttgaagagtttctgagagactataactttatagtagcttatatgacctatttttgttgttaggattggagatgatggtctttttcattgctctatatcaggaactgattttgaatgaaaaacagctccctgctagtatagcatgaccttactccacaatgctaagattctgcaatgaagtggttctattgaggttctctagagactctatacattatataacttgacaacatattcctggcacaacgccatgaatgtctgctttttgtcatccca

SEQ ID NO: 131199 - DNA, 295 bp, Homo sapiens
gcaagctctgcctgccgggttcatgacatcctcctgcctcagcttccagagtagctgggactacaggtgcccgccaccacgcccgactaattttttgtattttttagtacagatggggtttcacctgttagccaggatggtctcgatctcctgacctcgtgatccgcccgcctcggcctccccaagtgctgagattataggcatgagccactgtgcccggcctgtgcaacttattcttgagcctagcaagccgcctgcatttgccatgcctctgcacatggcttgggtgttcccc

SEQ ID NO: 131200 - DNA, 302 bp, Homo sapiens
cgttccttctcatttgggcctgagatgcagggcaaggaaacggtaagcatgccgctccaagtcactgcatttgaaatgaaacagttaaactcatttgccgtcatggttgcaagagcttcttgaaaggagttgctctgaggttaatgagcatgataggtcaattctatgtgtgctgaaattcttggaatctgaaaacatggcagttgtagctagtcagctttcactgaaaaatgtacatgtgttgtcttcgagggtatttacttaactaaagacgtacgtttccacagcttctggacatttat

SEQ ID NO: 131201 - DNA, 235 bp, Homo sapiens
tgtttgctgttttggctactgagtgctttattcattcaacagacaattacagagcaccatctctgtgttgggcacattctagatgagaatgaaggaaagtccttgtcctcagtgggcttacattcaagttgggaagatagacaaatgaaggaatatacaggtgactcttgaaccacacgggtatgaattgagtgggtccacttatacatagattttcttccagatctgccactcc

SEQ ID NO: 131202 - DNA, 789 bp, Homo sapiens
atttcccagctagagacatgacagtgccctcctccccaggctgctggtggtagaccagcattctgcccagggccaggcaaggcgtgatgctctggaggtagtgggctacgaggattcctgaacccacgaggacgtctgggtttccccagggttacggctgctgtgagtcagagccccgatactccccgtccacctgccagttcacaaacttcgactgctgggtctggatggccatcttggacctgaggcgggggcccagctggtgaatgacctgagcgttgagactgccgctgttgtccatgtcacccaccaatacaaggaacgcctctgtgggactcagctgctttgtccccacatacgtgaccccgaagtggtagctggactccctgattgtgctgagggctactgtgtggttcacctggaaatggttactcaaccctttgttgactatgagcttgacaccctccatctgaatgggaaacagctccttgcacttccggtggcactccccgaatgtgcccgggttgggcaggcagccgcaggccccatcctcggcggcccctgaggcgctggcagttgcagccccgggggtcagttccgaacctcgactcgtactggtgccggcgcccaggccgcctcccagcggcggcagcgtgaagcccggcggcgagggcggaggtggcggcagctccacgagggccggcgcaggcggcggtggcggccctgcgggcggcgacctggcggccaacacgttccccatggtctctggcagaggcgcctgctcccggc

SEQ ID NO: 131203 - DNA, 388 bp, Homo sapiens
ttttttttttttttttgagacaagagtctcattctgttgcccaggatctcagctcactgcaacctctgcctcccaggttcaagcaattcttgtgcctcaggctcccaataactgggattacaggcatgcaccaccatacccagttaatttttgtatttttagcagagatggggtttcaccatgttggccaggctggtctcgaactcctgacctcaagtggtctgcccacctaggtctcccaaagtgctgggattacaggtgtgagccactgtgcccggccggcctccctcttaatagaaaagctttggctacccatgctctgctttaggcactggtgctagaggaaggaaccaaataagagcagcaccagcagcaccagcggtagcac

SEQ ID NO: 131204 - DNA, 309 bp, Homo sapiens
gatcttggagtgaagtccttggactgatgaacagagggtttttgccacagtgtccctcctaagtccctctcctaaacttgcaacagcaacaaacagctggtggagatttaggagttcaagattctaacctagtagctttccagctcatcatgagttaaatactcttcttacccctttagaggtaacagtactgaggctcagagcaattgagcaatttgcccatgacaagccttaataaatgtgggatattctagctctgcccatccacctccaatgcccatgccctgtcatgagcacacacacatgcac

SEQ ID NO: 131205 - DNA, 187 bp, Homo sapiens
tgctgagattacaggtatgcgccactatgctgggccaaaagatatatttctagtattagattgaaataaaaacccattctatataactttagctaatttaaaacgcaaataatagataattacatagatacacaaaactttataatatttcacttagtattgctattactatgtacttggtgcgcag

SEQ ID NO: 131206 - DNA, 426 bp, Homo sapiens
gaatcaatccccttcataggctatgccagtttaagatagagtgtttgtccctttgcagttagaattactgactgacacattggacaatcatttatttgaaggaaggcagagactcaggtgttaaggatccagctaacatctggcccataaacttgaaagagaaataaaagcgggaatagaatgtgttaactctgtcagtggctatcattccctgtacaagacattattgttagttttgtatagttttctaatctgggctttaacatttcaaggataattttagtggcttctagccatcatgaggaaagaacatgtcttgagaaacatggggaaaattgaaaactgtacagagaatataagtttttggcaatgttgtatgttaacctaatagccttaatggtaccatgataatttctgggtaaggaa

SEQ ID NO: 131207 - DNA, 191 bp, Homo sapiens
acttttactaagaatatattagagatgttgaacaagaaaagatttttataaaggcacaattctattaatgaaattttacaccctccgaacatgtatataaatcatatacacacatggtatgcaggcagcattagtgtatatgccgaaactctggaaggtaatactaagttgctaagcatctattatctctg

SEQ ID NO: 131208 - DNA, 217 bp, Homo sapiens
ctgtaaaatgggcataactatagaccccacctctctgggtaatggtgagaattaataataaccaatattagttgaatgcctactatatgtcaggtgtcttttttgcatcctcacggcagaccatgagggaggcattattattctgcttcttatacataaggaaactgaggcacaggggaggcagagagactgcaggattaagacttccagccaggcg

SEQ ID NO: 131209 - DNA, 554 bp, Homo sapiens
tattgagagtcacctgttgaaataaatttggaactgactgtagtaaaacctgttacgtggagaccagccttcctcttctctctggtttcttagaaatatatccaacaatggagccgagagtcctagcatctcaggaaacctatgagcagcggtgagagcagacagtacagaggtacccgcaggagtctgctggcagataggaacagcttgattgacttttcatgaaatgagacagaagagcagggatttcctgggagaggtggagagtaattcaagaagggcactgagtagtggaggagctcatctaataagatggtaaagagcatgtactttggagtagcctaccttcacatcccagctcctctgcttactgactttgtgacataaggcacacagcctctctgtgctgcctcacttgctttctataaagtaggttattgaccctgagaagtcaaatgagttaatacttagcattgtacgtggaacacaggaggcactccataattgtaaactgttttatttttgttatacgtatcaacacttcgcagggtttt

SEQ ID NO: 131210 - DNA, 155 bp, Homo sapiens
atacagcttctttattgtattcctttcatctcaaaataccacacagaaggatgttcaatccagagcagcccgctctgggactgaacttcccagcatagcggtgggagaatgaatgagggaaagaatgaagagggaaatgaacacttcaataaaga

SEQ ID NO: 131211 - DNA, 244 bp, Homo sapiens
gaagtgtgctgcttgaggagtgagctggaatgaagggcgtgtggaggtgtgagaattaggtgggtgtggctgggatgggtacagttttgatgggggtcattaggccagaattttccagttaagaagcttggggggaggaaggtaaaaattgaattggagacccatccaagatttgagttgaggcaggtgggtgtcagattttaccatctttataattgaaccgagagaatgcaaaatacaactg

SEQ ID NO: 131212 - DNA, 418 bp, Homo sapiens
ttcagatgggagaataaatgcagtccctgtttctctaagttgcccagaagtggaagtccctggcatagctgctttattcttaatagccaaaaagctggaaacaactcaatgcctaacaacaggtgaatggataaacaaattgtattatagccatgtaatggaatactactcagcaataaaaaggaacaaactaccgttatacacaaaaatacatatttgtgattaaaataaagtatgcttacttaaagaagtcaaacacacacacaaaaaaactaatgtaaaatttcatctgtatgaaattctagaaaagactaaattaaagtgacagaaagtagagcagtggttgtcaggtaccaggggtaaagagaatagacttagtacaaaatggcataaggaaacttttgggataatgaaaatg

SEQ ID NO: 131213 - DNA, 477 bp, Homo sapiens
tctcataatagatcccagcatacctatcagtccaaactttttgtattattcaaatactggaagtgtctattttgcctgtcttgtgtgggcaccatctatgtgtaaatctgtaaacattaatttaaaaaaaagaccccataatccaccctattttttctgactgtgaaactagaggtggggtgtgataactcatggtcccacttctcttacagagtccctttctttgcaatgtcccttcttttacagattcagtgactgacaacttaactttcttgggtaaagccagaaaaaacaggatggcctccaggccgagcagtagaaatgctggggaatggggtgtctggtgtgtgtctggtgtgttcctgcagtgcctgcaggccatgtgtctgtatggtgactgaaacgcaagtcggcatccagccaggatggcagggaccgtgtgcctgggggtgacggcaaacacacagtgagaagctg

SEQ ID NO: 131214 - DNA, 647 bp, Homo sapiens
gaaacaactaactggactatgtgggggcatctgagccatgaggaggcattacataggcattaaaagatgagctgggccaatcaagttccctttctcttgggactctccatgcagacatctcattctgagagaacaatgattcatggcacagtgacttagtcagtgaatgcctcaggtacgaggtggaggtggacccttcaggagtcgtagccatccaaagttatgaggaggttcaaacatggaggagcagccatgaggtagacaaaagataggccaaatacagggtcagaaatccacttgacagtgaggagggatggttggaaacaactgaagagaagctgagtcacgtgtaggctggagttagacagtgagcccctgtccttcagcttcagccgccagatgcgttccttgaggctgtgtgatttggcttttcttgggttcccttgtatgtgcatccttatattaatcccttactctaccctcctaccttaaaattaattcagtgagactgttcttcacagctaaaagaacctaagtaaaatgtttcttctaggccgggagttcaagaccagccttggcactatgtttggttctatgtttagtgagactccatctctgcaacacacactgtggcctaccatggggga

SEQ ID NO: 131215 - DNA, 927 bp, Homo sapiens
tgagccgagatcatgccgcttgcactccagcatgggttacaaagcaagactccatctcaaaaaaaaaaataaaaaattgatgtttgacacactgaatttgagatacctttgaagtatccagtttagatttttctataacagcttgattaatatataatttaccttttaaaaaattatctggtttttaatatattcagagttatgcaaccatcatttctatctaaattattttttaatattttcatcactccaaaaagaaaatttcatatcctttagcagtcatttcctattctcccttcctcctaacccctggcaaccaccaagctgcttttctgtctctaatgctggccttggattcggccttcatgagctgtaatggctttccctggtggcatccattagaatatttaaggtgacaattttttttttcccattctgggagccaaccacttcaaaaaatctttgtcaggtcactgatgactctatagatagtagaacagaaacctcagtggccaaacgcaactgtgaatacacactttgcaaaaaaaaaaaaaatagtttgaaaaaatcagttaactagtggacagcagcagccttcaaaaagcaaaaatcagcaatcactgaggaggaggagaaattgatttccaaagttaccacattacaaaacgcaaaatatccagttcttaacaaagaattacaaagcatacaaggaaacataaaagtatggctctttcacaagataaaaagagttgaacagaaaccactcctgaggaagcccagacactggaattactagccaaagatgtcaaattaactctcttaaatatagtcagtaggttaaaggaaaccaagaaaaagtctgatggaaaacaggagaataatgtatgaatgaatagggaacgtcaataaagaaatagtaaaaaagaa

SEQ ID NO: 131216 - DNA, 337 bp, Homo sapiens
gaatatttttcattagctactacagtgttactaatccatacctatattattcaccaagattagtaaggaatccagccaagttatttccccatctcttcctactttatttccaactaagggactcacttcttcacttggaaactgttctgctctggtcagtctccttagtccaatattccctccattctcaggattcactctttgttcaaatcctctgtagcatccagcagttgctaacagagacaagcagttaaaacgcagagatgccaagcatcaggaactgtggctggaggaaataaactggaggttttggggctggctgcagtggttcacgtct

SEQ ID NO: 131217 - DNA, 341 bp, Homo sapiens
gtgatggggaatgggcagagtcctggcctccagttccaactttgtcattacctcacccagtaaaatgtaaaagttctctcacctccctgagcctcagtttcctcatttgtgggtggaggggcactaaccaggtgctcactgaggcctctgatcctccatggttggctctttggataaaggtaagacagatttcctccctgccatgaaataattcctcatttagtaatcccttcagaaagtgtctgctaagtccctgcggtgcagaccttggcatcagaggccaagcctataagaaagggaagacaaaatccccattctcaaggtaaagggggaatataatg

SEQ ID NO: 131218 - DNA, 558 bp, Homo sapiens
agagagacaacaatcactgcagttcggctcacaggaagccacatccataggaaaaggaggagtatactacatcaagggaacaccccgtgggacaaaagaatctgaacaacagtcttcagccctagaccttccctctgacagagcctacccaaatgagaaggaaccagaaaaccaaccctggtaatatgacaaaacaaggctcttcaacacccccccaaaatttctctagttcaccagcaatagatccaaaccaagaagaaatccctgatttacctgacaaagaattcaggaggttagatattaagctaatcagggagggaccagagaaaggtgaagcccagtgcaaggaaatccaaaaaatgatataagaagtgaagggagaaatattcaaagaaatagatagcataaagaaaaaaaacaataaaaaattcaggaaactttggacacacttttagaaatgcaaaatgctctggaaagtctcagcgatagaactaaacaagtagaagaaagaaattcagagctcgaagacaaggtcttcgaattaacccaatccaacaa

SEQ ID NO: 131219 - DNA, 618 bp, Homo sapiens
tgtttaatccttatgtttaattttttgtttctgctatcacatttttaattttcaagaactctttttttagtctctcttttttttttttcaaaccatcttattcttgtttcttggttgtggtatcttctctgaggacattaatgataattttctccatatagtctgctttttgttttctccctaaagcacattgttttgtttgtttgttttggtatattttatgttaaggacatctctcagatataactgtatctcacctaaactctgaggtttctccagggcaaggactatacatgatttatctttgtgttctcagtgcttagattcaagaatgccccacacaccaaaagcattttgtaaattctctttgcagttactattattattaaaagcttttgtcaaatcccttttctattgaacttccaacaataaaagcaataattttctttttcttaagaacatcgatgaatgctagaattgaaggtagtagctactgtagacaactcagttacccacattcataaggatagtttgttaatacaaaaagctggaaattttttttttagatggagtctcgttctgtcgcctaggctggagtgcagtggcacaatctggact

SEQ ID NO: 131220 - DNA, 425 bp, Homo sapiens
agacagccatctggagagggggacttctgatggacagccagtgggtggtctagaacaagatgacttcttgtgacctaacctggcactctggttctgagggtctatgacagtttggtggtttagagggaagcattggcctcaagatgccaccattgggcacgtttaatgagtgacagctttggttactcttttaacatagtagagtttcgtagcacctggttcagccctgtcattctttggggagaatgagaaggatctaatctcctgggagaaggaggattccagctcctttgaatttcagacctgcttcttgccccctgtgacagatttcagcacctctgtctcctcggtgttggatgcgaacaatgaatgagtagcaacttgctggccaaattcctattccttaagtgagagagaagacagat

SEQ ID NO: 131221 - DNA, 715 bp, Homo sapiens
gtggaaaggggtgggggagggatgattaactcttgactgtattgaagaaagcaagctgacacttctgccctaattgagcacctaagtaattgagttctttcttcttataaagtacattactttgtagggtattaaagttccaggcaggaattcttactagttttaacccacgaatttgatggtctaaagtaaaagcacttttcccgtttttcctttgaaatttaactcaggaatttgcacccccttgtggtcaaatataaaattcttagttttcaaaagaccgttttttacaatcgggctctctgttcaggcataggaactactgtatgttagttgattttgttttctcccattttagcaaatcaagaagctttcatgaaagattttttcttaaataagactttaaacacaattagacttaaatcttctaaaagtgacttacacataaactttagtctctgcaaaatagagataattgcacccacttaatgagttacatgatgattcgatggaaaaatgcatgtacatgcttagcccagtgtctgacacatattaggtcttcaataaatgttatcatttatcatcatcactttagaattctcttgacatattatatctaaaaggggactaagataaaaaattctacagtgaggaaaccagattgtgctacttacctatttgtaagttctagtacaattttacacatgtctcccaa

SEQ ID NO: 131222 - DNA, 708 bp, Homo sapiens
gaattcaaggcaaccaaaactaacaaagcagctgccatggtctgtggggaccaaggaaatgaataagacacaggtgctgcctgccttcggggagctgacagtccagtgtggggcgattgggtcactgttgaaaaatctctacccaatgcagaatatgcctgtgaacacctagaggaccccagaggaggtctcatccatctttatagtccctctgcaacaagcacaatgacctgcatgtgatgtgcaggcaagtactgtgtatttaagggccctgaaagaagtaccaacagaatgctcttggggttggtggagaaggagggacagctttgtgaaggaggtgacatttgagctgtgcctggaaggatggggaggtttttcacaggcagtggggactgggggagggcctttgcagtccccaggaaagagcaatggcaaagatcctaaggaaagagaaagcacggtgtgatttggaagagcaccaagcagtctagtgtggccagaggacaaggaagcagtaagagctgaagttggagagaaaagttgagacctaagcagagagaccgttggacagcaagctaaataatttcacaggggaatatcattgaaggtctgagcaaggggagtagtgataccaccaaggcagggcttcctgctgcatcatcctgttctgcccaaggaggcctcccttgccttgttggtagtatgagt

SEQ ID NO: 131223 - DNA, 467 bp, Homo sapiens
  misc_feature (444)..(444): n is a, c, g, or t
  misc_feature (458)..(458): n is a, c, g, or t
aaggccaatgtgaaagaaatctgggcaagtgaacagaaaccgggaaacactgccgttagaaagacattgaaacgtgatgcattaaagggttctttattcctctcctttattcaaactttttatttaaactacctccttttttgtaattcatccactaaactactaaaaactccattataattatcctcggattgaaccaagtcgatgataccagccctgtggtccgctagtgtatcattactgtgaacggtctggcctggctttgtgctttaattgcttggggaggctgacaggggagcagccctgggaggaagctgctggttcccggggcacagggaagtgcttgttccttgttctgggagactcaagacattcccaggaatctttcttaaggcagagctggctggggggagtagcccctgttaggcaagttaccatggcttnttggacaggcagcntgagagcgt

SEQ ID NO: 131224 - DNA, 384 bp, Homo sapiens
aaggccaatgtgaaagaaatctgggcaagtgaacagaaaccgggaaacactgccgttagaaagacattgaaacgtgatgcattaaagggttctttattcctctcctttattcaaactttttatttaaactacctccttttttgtaattcatccactaaactactaaaaactccattataattatcctcggattgaaccaagtcgatgataccagccctgtggtccgctagtgtatcattactgtgaacggtctggcctggctttgtgctttaattgcttggggaggctgacaggggagcagccctgggaggaagctgctggttttagccaaacagaaaacacgcagctgtggagccaagtcccagacttgaggcctcagctcat

SEQ ID NO: 131225 - DNA, 185 bp, Homo sapiens
ccacaagtgtgcaggacgcaagctgggttattggaagcggacgacaccaaggaggcgttgccgcggatgtggtggacgatgccaagtcgtcttttaaaaaaggaagtgaagaatgattaagagggtcacgccctctaccactccaacctctctaatcagtctctttctgctccgtctgctgtaca

SEQ ID NO: 131226 - DNA, 236 bp, Homo sapiens
ccctccggtaacatttggggtggggactgaggctcccaccatccttctggggcagagaggatagaaggaagaagaggaccctgagcattctattagaacattagcaggggacacatagcatgatcttggccttgaacattttaacctaaccactgtgaggtcatgtcttagatgtgtttagaactctaacttcatagtcagagatgaccctcatgtccttggatgcttgtccctag

SEQ ID NO: 131227 - DNA, 348 bp, Homo sapiens
ctcatgctgcaaaacagagaaaggaaggctaccatagtcttcccatccatgcatccctgagaacctttttgctgtgcaagagctttgattcctatcagtcaccctgtgtggccaaatctactatatgtggttccagggacagggacagtctaggaaattcagagcaacagatggtagtaagtctcctccctccaaacactttttcggggatgactggtgaaaatgatgacgcagagagaagcctgtttgtatatacacatcaggatggatgaagcagtgccaaagatgattaaattagatcagattagattggattagattagattagattaacctgcagattagtgt

SEQ ID NO: 131228 - DNA, 407 bp, Homo sapiens
aggcaaactcccctttataaaaccaccaggtctcatgagacttattcattatcacaacagcacaggaaagacccgcccccatgattcaattacatcctacccgctccctcccatgacatgtgggaattgtgggagctacgatccaagatgaaatttgggtggggacatttttaattttagtatttaaaagttgtaggggagagagaaatggctttcctccaccgctctgggtttcttggctgggttatgaattgacgtaagacaaattaacagaaagaaaccccatatttaataatgtaggtgcacatgggagtcccacaaaatatgagacttgaagaagggtcacacggttgaaactcatttagcatcctgagctatggaacggaataggggcttggggcttctgg

SEQ ID NO: 131229 - DNA, 944 bp, Homo sapiens
gggtctgccagagcctcagataccaagacatatgggtctgccagagcctcagatatcaatattgggtttagaattttagacccttaaagtagtctgtgtttgaattaagctgggatgtaattctgggtgggctgaaggtactgagcaggtaataaagaaaggaacgtagggacaataacacagacacaatttcaatggtcaggactgtgacaaatggcagaggctgggtcttatgatataggttttcattcatatattcaccctcattattcatgtattctttaataaacaagtgtatattgaacatccgtgtatcaggcattggggaggacactggaatataaggacaaacataactattttgttatgtgataggtgtgacaacagaatacataggttatattttagaagcacttgggtgaatcattcaaaccagactaggaagaaggggagagaaggctttctgaaaaatgtaagatgtaagggtgtagtggcgggcatctgtaatcccagctactctggaggctggggcaggagaatcgcttgaacccaggagacagaggttgcagtgagccgagatcacaccattgcactccagcctgggggacaagagtgagacttcatctcaacaaacaaacaaacaaatcattgaatgtcaaatatatgccgactaactaactctaggacacaaagttaagtgggagggagggtcctttcttcaaaagcttacagcatgatgtgatcattatataatcagatgtcactaatgagagttggctacatcagataggaaagtgaaggaaacttacgtaggtagtaaaatttgaatgatgagagaattaattaggtgaaggtggaatatatgtttacatatattatgtacaacatataaatttattctaggcagataagaagtttgtacaaaagcacagagatgtgaaatg

SEQ ID NO: 131230 - DNA, 256 bp, Homo sapiens
  misc_feature (248)..(255): n is a, c, g, or t
gacgatgagtgggtgtctctgaattagaagatgagttttaggattctcttacccctgcctcgcattctgtggactgcctggtatgtcatggtcgctcagcaagatttttagaaacgaatgaatgttgctgctcggaatctgagaagtgcataatgacgctgcgagtatcatcgtgattagagctgggcctgccacacagctcacattcagtcaacacgtgctgaataaacaagtgggtatccctgcannnnnnnna

SEQ ID NO: 131231 - DNA, 267 bp, Homo sapiens
tgctggcctttcctcttctgccctagctcttctgatctttgctttctcttcacctctcagatctcagcacagaggcctaccgtgctcactcaaccatgcaagtatgcctccatcacgtgaccctggtgtactggctcagagtctccaaaattacaacatggtggccgagcgcagtggctcacacctgtaattccagcactttgggaggccgaggtgagcagatcacgaggtcaggagtttgagaccagcctgaccaacatggtgaaa

SEQ ID NO: 131232 - DNA, 420 bp, Homo sapiens
tgctgtgagccaccactcctggcctgaaagtatttttcgtaattggatttttccatatgtgcactaaggtctgcctttttccctgaatgaggcataacaagtatttctgtggctgtgttctctgtgggaatattattgtgacatgcttgtaagaagtaagtgaaaagcacaccagcacggtattcacatagcacagaaggttataaaaggcaaacgcagacatgggtgagggcagagttgttcttggtttgtcacaagggcgtgtgaacgcggttccccacctgccctgctctgctcagcagctttgggatatgagtgccttgggtgcctggtgcctttttgggccagccctgtggtattttggagtatccgttggtattgagagtctggaacttacttagtgtctggggcatgggccgt

SEQ ID NO: 131233 - DNA, 781 bp, Homo sapiens
gattttaagcaggggagagatacaaatattgtttgatcagtggtttagtaaaatcactctggtggcagtgaggagggctgcagaagatgatgatgattttgcggtgggaggtgagtgcagggtacatctaaaagctgaactgttaaatagaaaggctgttacaatgatccagttgagggatgattaagacaagacagtggctggaggagttgagagcaagggcaagactgacaatttagactgtgcatgaaagtgatgaatcacatgacaaccatttgagtcccttcccatgctctgatttcactccaaagaagatcgcagatcttcagattcaatattgaccacaaaccttcctgcagaagtagaggcatctgtagcctcttgaaacctacagtacatccttgcggtgaaactgctttgttgataaaaatgatccctgtgtgaaacagatgtcactggtgctggcacagagagatgaggaaggataaagaattacagtggagttgaaaacactgttaaaaaaataaaagacctaacagtatagcacagcaaagaagcaaaactgctttgaagctacatattttttctgcacctgacagtgaaaacctgtgaaacttcatacttcatggaaaaaactgaagtgaaatttgttacagtagctcccttcaatttgtgctatacatacgtcttatctctttaatatgaccaagagcaacctgagggaaggtacctagccatgtgtctcctagcttattttaataaccctgtgcctatgtttata

SEQ ID NO: 131234 - DNA, 2472 bp, Homo sapiens
aacagggaaagaaaacagaaggtggggaagaggaaggaagagagggaggaaggggcagggtacttgagagaccatgaggatcccagatcagtcccacacatgattacactgaattatgaactaagatatttaccgaaacgttttccattaatgcatatttgacttgctttttctgacctaatgaatttgcaaaacgatgacaatcatgtagcaaatgtacatggactagtactcacaattaattttttattttctatgccagcaggagacaaagatgatagaagaatgaaattcatttttgacccagaaatcttattttagctactgctttatctgctcttaattttctaggagtggactttggggccgtcgtgccggatcctccctgaatgtggagcgatggggggttgcacacaggccgttctgccccagcagctaacaagaaagacccttgcattcctccctgcatctctcccttttgggtcctactaatgtctgttgaatttctcttttttccaaagcaaaatccttctctgcattttgtctgcttgtctgtttcccagagccgcagactctctccttgtctggagttccagagagcccccactttctctttctaagctgtgttgtgtgtttcctgggtacattctaggttccccaaagataaacatgactaaggattggaaaggaggaaaggccgcgcagattgtttaatctggaaagtcaatccccggatttagctctcaaaaatggctttatttttgggagaaaagcaatagagtaaggacagaaggacttaacgcttgcagggaagtggctttctgccatgtagagccaggctggcaacctgccctctgccatcagggagtgagcatgaacctggaaacctctaggacgcaagagcgaggctggctgtcccctcgtgtgcagtgcttagaccttcttgccacacatcccgtccctcacctcactggatagcccccgaatcaactgttcacacgaaagcagctgcctggttctgagtggccatgctcactcccaagcacaggctgaatgaaaagaaaactgtgcaagtagcttgtatggtgggaagcccccagcagaggctgagggtgcagccaggtgctctggaagccttgaggcctctggtgtcatcttcctcacctctaaataagagatgggctaggttggtcaaggtcctccctgtcctaaaacactttaatgaaatggaagaaaggctgcaggctgatagaggagggacagtctggtttggttccctcaagtcttcaggagagggctcaaggacagtctcccatttcttgttggcaaaatgtaaagtgcagtctggaccctgtccattgagtagagactcaggaggccaaccaagatccctgaaaagctaacagcgtggtcagccttcccacagacagtgcacccaccgtgggaggacacttcgccccccattgttaacgtccaccgcgcccagactcccacagcgagctccttcccttcctccccatgtttgcagtggagttcccactcgagaagacagcacagtagcaagtagaggctggtcctgggacactcgcacccatgtgtgtcaggaagcccctgcggtcacacggcccatgaggaagccagaggggctgctggggctgatgaggccagggcagggcggcctgctcttccataaatgacagctggcaccaaagcccagagctggcagcctccacctgaggagtggcatctccatgaacggcttgtgttctcgcacagccccattgcgtagatgaggaaactgaagctcagagaggttcctgcccttgcccaaggccacacagccggatgagctagaaaggtgctaggggactgggaggtgggggagctgagacgctgtcccgctgctgccaggatgcggccgccccccgtgccagccaggcctgcctcctccctctgtccggctcagcagccccggcctcctgttgctcccagtccgagctatggccaagggagactgattcctgctcaccctgggagagagctcaggattttgtctcaaaaccttataaaagatacgaggctcgacattttactaaggccgaggactcttgatctcccagacagatcctagaaccacagggcacatgtgaccagaatccaatctgtgcaaatcaatcagcaaaaggagcccccagcaaaggcgcaggcgggggcctccggggaccggcaacctacacagcgcacagccccccagggtccgagtcctccaaacccgtgtaggcaggagcttcctttaccttgattttgcttgatgtttgctaatcttctctttgaacaccccacagcgtgaaggtaagcaactgttccctaaacgacttagatccttaaaatatgtgtggttgggccgcatatctcatgagagagcctccgcccaaaccagagccctcctctctctgcggccaacaccctggt

SEQ ID NO: 131235 - DNA, 1513 bp, Homo sapiens
aacagggaaagaaaacagaaggtggggaagaggaaggaagagagggaggaaggggcagggtacttgagagaccatgaggatcccagatcagtcccacacatgattacactgaattatgaactaagatatttaccgaaacgttttccattaatgcatatttgacttgctttttctgacctaatgaatttgcaaaacgatgacaatcatgtagcaaatgtacatggactagtactcacaattaattttttattttctatgccagcaggagacaaagatgatagaagaatgaaattcatttttgacccagaaatcttattttagctactgctttatctgctcttaattttctaggagtggactttggggccgtcgtgccggatcctccctgaatgtggagcgatggggggttgcacacaggccgttctgccccagcagctaacaagaaagacccttgcattcctccctgcatctctcccttttgggtcctactaatgtctgttgaatttctcttttttccaaagcaaaatccttctctgcattttgtctgcttgtctgtttcccagagccgcagactctctccttgtctggagttccagagagcccccactttctctttctaagctgtgttgtgtgtttcctgggtacattctaggttccccaaagataaacatgactaaggattggaaaggaggaaaggccgcgcagattgtttaatctggaaagtcaatccccggatttagctctcaaaaatggctttatttttgggagaaaagcaatagagtaaggacagaaggacttaacgcttgcagggaagtggctttctgccatgtagagccaggctggcaacctgccctctgccatcagggagtgagcatgaacctggaaacctctaggacgcaagagcgaggctggctgtcccctcgtgtgcagtgcttagaccttcttgccacacatcccgtccctcacctcactggatagcccccgaatcaactgttcacacgaaagcagctgcctggttctgagtggccatgctcactcccaagcacaggctgaatgaaaagaaaactgtgcaagtagcttgtatggtgggaagcccccagcagaggctgagggtgcagccaggtgctctggaagccttgaggcctctggtgtcatcttcctcacctctaaataagagatgggctaggttggtcaaggtcctccctgtcctaaaacactttaatgaaatggaagaaaggctgcaggctgatagaggagggacagtctggtttggttccctcaagtcttcaggagagggctcaaggacagtctcccatttcttgttggcaaaatgtaaagtgcagtctggaccctgtccattgagtagagactcaggaggccaaccaagatccctgaaaagctaacagcgtggtcagaagccttcggccacgctagtcctgaactcccgacctcaggtggtccgcctgcctcggcctcccaaaatgctgggaatacaggaacgagctaccactct

SEQ ID NO: 131236 - DNA, 183 bp, Homo sapiens
atatgcagggagagaaactgaggcccagagagctgaagcaaattgccccaagtgccacagctcttaagtgatgggaccaggactcatattcaggtctgtctccaaagcccgtttctctatattcatcagctgttgatgctgtgctcggccaacctaatgccactgctggtgtgggcagtgact

SEQ ID NO: 131237 - DNA, 522 bp, Homo sapiens
gagtaggagtcttgcaggccccagttgaagacggggcgagggtgtagtgagcgggggcattgacgtgcagatctgggcgatcccaggaaggtcggggaccccagggtaccccagctggcctggggagaagggcagaggcgggctcggaggagatggcaggatgcgtggccaagaggagcctgatcggctgggtaccgggcaggagtcccaagatgaggtgagaggggaaggaactgaaaaggggcggaatggaagggttgcccctaaacaagggaagcgcacgggagccacttggaggctcaagtgtgggggcggagagtgggggcgccgggctgggaatgtgaagggtgaggggacctctcttcccctccgatcacttcttggttgcattgacatcccttcccaccccccaccccttagcatccccctttctcgatgcctcttgcttggctctggccagccccagctgtcagctctgaggccgggcggaaggggtcggagcagggaaaaggaatgtaggaa

SEQ ID NO: 131238 - DNA, 186 bp, Homo sapiens
ttctttctagcacttttctcattcccgcttttcttctttctctttttatcgtgtgtcagctaaggctacctaagtgaacttgatccatttatttagctctcagtctaaatatgccataattaaaatggttagaaaacactgcaaattatagtcttatgataggtccgctgaacacacaataaagaa

SEQ ID NO: 131239 - DNA, 708 bp, Homo sapiens
tgcagtggctcaagcctataatcccaggtttaggaagccgatgtgggacaatcacttgagcccaggagttcaagactagcctgggcaacatggagagaccccatctatacaaaaataaaaaataaaaaataaattagcaggtatgatggtacacacctgtggtcccagctacttgggaagctgaggcaggaggatcacttaagcccaggaggtcgaggctgtagtgagccatgatcacgccactgcactgcagcctgggcaatagagagcctgtctcaaaaaaaagggggagggaggaggaagccaaaaaaattatttgccacctctggcattagcagtgatcatttcaccaaaactctttactctgaaagatcattcctccaactcctaactctgaaatgttcattctttccttctaatctgcctcttcagtaggaactgtaagcaaccaggtaatgaaacaaaactttcccttaccagaatgcagcaaataaatgtaaaagaaaagttagatttagaaagccatcattttgctacaactgactccagcgaatatcatcaatggatgcataaaaccattaggaaaaaggctgatgaggaaataaatattttcatattgccaaggctgcatcgctgtgcagattacttgccatctcaagtatttaggaagaagagattttgctctcactaccttaacccagtaatcca

SEQ ID NO: 131240 - DNA, 223 bp, Homo sapiens
ccactttgataaaaatatcatttattcattcaacataggggacttcaaaaacagagtaatattctttcttgcttttttttttttttggtttaactaggtgttagaaggtaggaaccacttttattgtcattttttattctttataacttgatatgttataaacattatttattatctactaaatagcaaatacaaatgataactcttcattgttgatgaaagc

SEQ ID NO: 131241 - DNA, 365 bp, Homo sapiens
tcaaactcctgacctcaggtgatctgcccaccttggcctcccaaagtgttgggattacaggcgtgagccaccacaccatataataaacaagcaaacataagtgtttccttgagttctgtgagagccattatagcaaattattgaacctgaggaggggatccggggaacccctgatttatagccaagtcaaacagaaatttgggtaacctggagatcaactacctgtgattggcatctgaagtaggggagagtcttgtgggactgagcccttaacgtgtggggtctgcactaactccaggcagtcattgtcatcatagaatagaggacacccacttggtatctggagagctggagaattgcttagc

SEQ ID NO: 131242 - DNA, 453 bp, Homo sapiens
gcagaatgttctcctctctggtcctggagtcccatcatctctcaccttgcctttcacctgctcttctccttctcagtttccccttctgtaaattatattctgtgacattgagagctattcctacaccctgacttttaattctactcttagggaattttgacctttggggtttagagttctagtcaagatacatcatgtctgggacagcactggttgaccagcagcagaaaggggccgagggcatggggaactagagttggtttggctggagtgagcgtggggttagggtaagacccttcaattttagggctgccaaggagcaactgagaacagcagagagcaatgcacaccctccttaatcccccagtatgcctgagctcttggccgctgaaagcaagctccatctatcctccttaggtggggtccccttgggtgccacactccaaataaagc

SEQ ID NO: 131243 - DNA, 294 bp, Homo sapiens
agggcagtagtggtggtgaagtcccagaaaaaaggcatatggaagctgtgagcgtggttgaaggtagacatttcagtcagctgaactggaaggtaagcccccacaaaagaccactctcctgagaaactgaggcaccctctgggagggactccagctaagggaagggagagtaggggatacatgcctaacccaaggacaatgccttggtcactggaagtgggagatgattctaagtgcagtgtggtgctggtcacttgcatatttctccctgccaggcctctggggacagggaca

SEQ ID NO: 131244 - DNA, 393 bp, Homo sapiens
ctgtatccaaacactgccccgcgggtgacctcaactgtaaaccaagggagagcgccacttcttcaggataagattagagaggcttcaagtgcccaagagtgaatttaaccctctctgaactggacaaaattgaccaagagttgagctcagtgaacatcaccatatctgcaaattttgagacctctaaagctcaatctgtctcttgtacaccaagggagtcttgaatattcatataatttcaataaaagctcaagacattaaacattatgcttgttttcacaacagcatccaggacaccaggggttcttaagaatgctacaggtttcatatcagctttggagacgagtaatagaaaaggtttttacagtttcacctctttcttatcagacatga

SEQ ID NO: 131245 - DNA, 92 bp, Homo sapiens
atgccagtccgcgcctcattgtcaagccggatgttcacaactcaccataattccagaggctgagggacagagaagaggctgcagcaggtggg

SEQ ID NO: 131246 - DNA, 457 bp, Homo sapiens
ccagcacagtccacgctgctcaatagatggtccaaaggtgcctgcatcagacaaataagggacatggtttctctgagaccacatgaaacctgaagggtagccatcagtgacttccagagagaaaacccagaaggcactgagcacttggatgatgctggttctcagtaggcacattagctgcattaagctaaactcactagccaccctacagtcctgcagagggaaggcctgggaaatctcagaacaagaggcagtccgcaggccttaacccagcagcatccctccctactcatatcaaatacataaaatgccactgagagtcaatttaacatgctgctttaattttttgttttaaatgactgtcaaatctatcagggctctcacaggtgtatgtatcagttcagtccctgttatgattaattgtatgtgtctatttgactgggctacagcatatcca

SEQ ID NO: 131247 - DNA, 723 bp, Homo sapiens
cggacgcgtgggcagctgtctttgtctggggcggcggcagcgtggcaggagcgaggggcgccccgacccgtcccctctgccctccactacccctgccggctccagcccgtccgtgtctcaccgtctttatttaacaaagaacggagagactataaatgaccctgagcagagtggctgcgagcagggcccctggggcgtcccacgggcgtcatcctagccgcgtgagcgccgagcttgggcaccgggggggttggcgtgcttgtacacttgctccgttttctctaaactgccgcgatgaatgtcagtccccagagccggaaccgttcccggttttctctacttggatctgagaactctgtccctccagccctgcgagcgctttgccagggtgacgggcggaaatgtccccgcatccgtgcctgctttcccagatgggaccctccagcagtcccctccactgcccgtgcttcctcctaaccacttccccccagcgaccgcggaaggcgcttcctcccccgcagcgcgagccccaagctcctccagagccccagctctccccgcccccttcccgaccttgtttcatatgacccctcccccgcacatactcaatttcgtcttcccaaggcgcccactctccacatcctgatgaaaaaaagagccggctgctgtcctatgttattgtcatacttctttcctcccgtgcactacacaacttgaacaact

SEQ ID NO: 131248 - DNA, 266 bp, Homo sapiens
cgccacaggctgccctttatcaggggagcaagtgaccaacttccctgcctgttctgaggctgcaagacggtccactgctggtgggtctggcagggctgacttatggagtaatttctcccagtgtctggaagcagctttctgcccatgcctggggtcagggcaggacagaggctatggggaggggttgagtgtcttgctcaaagtcacaaggcagctcaagagtggtgacgcaaggactggaccccagatctgacttgtgtgccctg

SEQ ID NO: 131249 - DNA, 349 bp, Homo sapiens
ccggtcgcacactgcaacatattcctgtttgagttaatgtttaatcattaaagtcaaacaagaatattttgcagtgttttcgcatgcaaggaagctttataaataaaaaggtttatatagtttccactccttaaactttcaggtcatccttgtgtaatttgagatcacttttctcaaatactatggatgaaagattctagattaaataaaactttttggttttggcaaaaacaggacacatttttaagctcttgtagatgaaggagtgggttatttttgctttgacagccaagatttgagcagtgtaaggctattctaattttgaagctagtgttgcagtgtgcttccg

SEQ ID NO: 131250 - DNA, 390 bp, Homo sapiens
tgctgggattacaggagtgagccaccacgcccggcctcttgccccttttaattgaggcttaacttacatacagtgaagggctcagatcttatggtattgcgtgatacagttttacaagtgtgtacacctgtgtaaccagcacccacatcaacaaattgagcacttcctcctcaccggtaattttcttcaggcttccttctagctgatacccctgtacccctaccaaaggcaatcactgttctgacgtcttccacggtggatgagttttgcctgtttctgagtgtcatttctgttgaatcgccccatgcatcctgtggtccttgtgtctggcttctttggctctacatttagttggtgagatccatccgtgttgtgtgtgtatcagcagtg

SEQ ID NO: 131251 - DNA, 490 bp, Homo sapiens
cccagactttcaccaaggaattgataaactagtcactgcaaatatattaatgggctttcagatgatggcttgtcagctaactaacttactttttaatggagagccttcataaggcaaagctcagaacaccaataatttattctactgacatatatttcaggctgtttctctctaattttatcatgtaggcagcttctcctgtgccaacatgagccaaatgtttagaaaaatgagcctatagaaacacttttcttatgatttgtctactattcattctttaatttggcttttgcttatgactctctcagttctaactttacacagttccaactcaggtcatcaagaacttcctcttttctaaatttaatcaacacttcccagtcttttgacccggagaggcattgtacactgctaattattaccctggtgttgtttaaaacaacacaactaacaacactaaaactgacagcaattgtgtgtccactgcatc

SEQ ID NO: 131252 - DNA, 434 bp, Homo sapiens
caggcgcgcgctaccacgcccagctaacttttgtatttttagtagagacggcgtttcaccatgttggccaggatggtctcgatttcttgacctcgtgatccacctgcctcggcctcccaaagtgctgggattacaggtgtgagccaccacgcctggccaacatggatctttattcttaatttcttttattaattctccagacattgttgatcaccattacttggcttccttaggaaacagcttggggttggcacaggaggcagggaaataattcttacccccttaagggctattaacatgaaattgatttcatgccattgtgtcagttaaaggatgttgctctatttcttgctgttctttgcttttggctttatttctgcattgtttagtgtttcaaggcttgagcgttttttttttttggcccttcagtttga

SEQ ID NO: 131253 - DNA, 239 bp, Homo sapiens
ggctgtaatagtagtttggaatatacttcatttattctagttcttttctctattttattacctttctgaatgtgctctctgctcccctggggcccattcccaatccagtagcggcaattaccattgggataaacctcctacctctgaggcccacagttttcctgaccatctctctacagcctcacttccacctctacctctccataaaacaatgtgtatacttctgttcatcagctaaa

SEQ ID NO: 131254 - DNA, 190 bp, Homo sapiens
ttttgaaatgttaggcttcagcatgatttagtgccctggcatttctgagctagtttacagtaatcaggcatttgttaatgctcactttctcctccacggactgttgctgacacaggaattttctttgttgattagatttagccctgtgctaaacagtaaccgggggagggtagtaagggaagcctggacg

SEQ ID NO: 131255 - DNA, 877 bp, Homo sapiens
ataaacataacagaatttgtttgggcaaagaatgatttgtgaattgggcagcattcaaaactggaagaggtttctagagctcttctctctccttaaattctgcctgtatgtatttgttaaggtggccaagcatgggggtgggtgacttggtagtcagggtatatttccaaaatggtctgtctcaaagggcctcattctttatgttatgtgcaaataagtcattaatgagatattgtgtcctggagacagttcaaggaaactgtcccactttaggcattatgttagccttgatgttcatgattataaaaccatgagcaatctgaatttgttatctgccctgcctaccatccatagtttgttgccatctccttttcttctcaaaattaccagagaaagacttcctgaaactgattatttctcccaaatattttcttacctactgctctgttgaacaaaatgtgagactaagaagcttagtttggtttttagtaatccattttcaaactggcatgtaccctccaatgttaaataacttactgtccccaagcatatgcaaatatactggttagccctctgaggacaaaccagggtctttgaaacaaaatcagtttgaaaatttgctttctatcttcttcacagtttttcttctctttttattattctgctacatttctattagagatgccagaaaagggcacagaggaggactttgggagggtataaccagaagaaaaaattgatgagggttaggtgagaaccaccgttatattgccatatataaaaatacatggagggccgggtgcggtggctcatgcctgtaatcccagcactttgggatgctgaggcgggcagatcacaaggtcaggagatcgacacc

SEQ ID NO: 131256 - DNA, 408 bp, Homo sapiens
gtgaggcttgcccaacgccaggtggcttccattagtctgtgggtggggccgagggtgaggctgctgggctctgtccctcctcccctccccgtccccaacaacactggggaggaatgccgcagacaagctgcctggactcctgcaccactgaggcccaggagggaaggctgatgtgttcagggacagccctcttgtttgccatggtagcccccatgcctggcatggggtacatgctcaataaataacctgtggattgttatcagagacaagaggcacctggaggatgggactagaacctctcccttcctcccctagacacttctatacctgcagggtgtcctggcccacttctcagccagcccccactttctagtgaaccctggaagtcttgtaggcccagggaaggct

SEQ ID NO: 131257 - DNA, 455 bp, Homo sapiens
tgaaaggtggtaggtagtacgcctgtatcattcgaagaaagtctccgaggggattttcatacatcttatttcaccctctgttgagactcacagactcatctataagcacttaatttagctcttcaagatcctagattctgaaatctgctaatagctctttatattcagataaagtcccttatctttgcccagtgcttcagtatatagtaattttacctctttacccaacctaaacccccaccatgatccattttaacaaagtacttccaatttagaaactcatcaacttaaccttcctacatctccaatttaaataaactcaagtagtatactacggttatgtgcttaaactctgagagcacacagattctagctggtatccaagctcaaatatgaaaacagtaatcaggaatctgaatattggccaggcgcagtggctcacacctgtaatccca

SEQ ID NO: 131258 - DNA, 399 bp, Homo sapiens
ggctgaggcaggggaattgcttgaacccagccaggaggcagaggttgcagtgagccgagatcgcgccattgtactccagcctgagcaacaagagcaaaacctccgtctcaaaaaaaaaaaaaaatccgagaaagcatgaatctgttgtgctttgccacagttgacattgcacttcaggaggattattttcttttatgaaggtatgtaagtgtccttgcatgcctagactaaaatgaggttagggcttcatttggcaaagacgtttggattctgattgcaagttaaccctgagtccgatgctgaaaaacgaaaaatggtttaagatgtgcccctgcccttggagtccacaatccagttagggaaataagatagtatattctttatttattcctgtctttc

SEQ ID NO: 131259 - DNA, 610 bp, Homo sapiens
aatacttctccccaccccactgccatcgtcatcgctagagacccatgatctcttgcctggattacaggcatcccagccttcagactcgccctctccaatctactttgtagtctgttgtgacagtaattcttctaaagcgacatcagataaagactgtacttacttttctatgtctccctcaatgaaagtttgacctcagcataatgcccactttgtgaaatggcttataaaggagccctagtttatctatctgttttcctcttccatcccttgctcccttactcactatgtcccagtcacaccacagtttgtctgttccacctgccctttcatccttcagaactatgtccatgctgttgctgctgccactaacacccttcctttccccagcccttatactagtcaattcctattcacacatcaaagctcatcttagctgtcattttctccagaaacccttgtaatactgtatttgctctaacttgcctgtattcccaaactgactgtatatattataaagggagggtatgtgtctgactcatgtaccactgaatccccagtggcttgcagtgcccagtaaatatttctctttatttagtttttaaacttg

SEQ ID NO: 131260 - DNA, 455 bp, Homo sapiens
gtttattgttgttttgctttaagtagattatttacataatgtatgcagaggtggaaagttttgaatctatagggatattactattaaaatgaattaacagtcttacacaatggttatgagtttagccagtgttagcagaaaggctagagataaatccagtataattagtttagaagctaaagttaaagctaaactcagccccctctccatatgttttgggtttgtttttttagacggagtctcactctgtcaccccggagtgacaggctggagaacggtggcatgatcttggctcaccgcaacctccacctcccaggttgaagcaattcttctgccttagcctcccgagtagctgggattacaggtgcctgccaccatgcccggctaatttttgtatttttagtagagacgaggtgtcatcatgttggcaaggctgatctttaactcctgacctc

SEQ ID NO: 131261 - DNA, 419 bp, Homo sapiens
ctccatatctccaaatctcatcctcagaccttcccagaacattcacagacaggtaggcactaggagaataataagtctcagaaaacattccttttggttccccttaaaacaagatgttgccacttttaggggctgcattgtggaaggaaggaagggagaagaaagaagtgaccttctcacagtcacttgatctgactttccttatctgaaatcaaaatataatgcaagctggccaggcgcggtggctcacgcctgtaatcctaacactttgggaggccaaggcaggtggatcacctgaggtcaggagttcaaggctagcctgaccaacatagtgaaaccccatctctactaaaaaatacaaaaatcagctgggcgtggtggcaggcatctgtaatcccagctacttgggaggctgaggc

SEQ ID NO: 131262 - DNA, 459 bp, Homo sapiens
gactcattgtcttcctctgatggcatcttaatggaattcaatacaaaggccaaaattcctttgttttgaagccacaagaaaacacagccaatggaaaagccgtgttagtgctgcctgtcctattctgataaggtgaatacttaaaagctatgaaagaagcactgagtactgctggacagtttgagttcatttggctggtagaattgagtggaagtcaattctcatgccatttaaactggaagaaactgaagattctccaacccaagctcctctttttgcagatagtcaactgaagccctgtaagactgtagttttatagataaaaaagagccatgtgaatttcctaaatcacataacagtcagtttattatttgacatttatggtacattcacatggaagagaatgattagacatttccaggagagaatacgactcccaattccctgagttaccattag

SEQ ID NO: 131263 - DNA, 320 bp, Homo sapiens
ctttcttctaggatagttattaaaatgcataccactttcaattgtgtatccggcattctttccgtgatgttcagtgcctcgctagtcattttcatttaaagagacccaaatacttccatagaacagtacatagaaattcctgggtcaataattaagttgtaactaatagctcatagtcagacatcatgttattacaggtaagattatcttccacctgtatcgtttttcacagacctacagacatgaacgtatttgtattttcctgcccccccctcaaaattttatgaaatttatttcatttgagtcctttatgtctggtt

SEQ ID NO: 131264 - DNA, 288 bp, Homo sapiens
ttctcctcttcttttgcctcttcttcttttttgtcttttgcttttgcctctgcttctctttttcccttcactttcagatcaggacagacaagtgttctaggagactgcttcttcttttgctccttggtgattcagcatgtctctctgcagtactaggcctagagaaagcttcacttttgttcttaatttagcactgatgaaggtcaccagtttagtctctctggtataccaaaaaccttcccacatgttgcttttaagtgaaatgtcatggtgaacagatcctttacc

SEQ ID NO: 131265 - DNA, 678 bp, Homo sapiens
gtacccactgtcaacacttcaagtataatcctcaagttccagtcaatgcaataagataagtaaaggaaatactcatttaaaatatttaaaagaaacaaatttttatttaaaattccagacttgcctacagaggagactcaaaagaatccattgattgtgagatttgacacaggaggttagtaaagtaactggatatgagatcagtatactaatatcagttgcttttctctcttctaacaacaaatatttattaattattttcatcagttttattaaatgcctactacataccacaccctgttttaggtgcttggataaattaataacatatatagccaacaatccttatcctcatgagagtactttctgtaatgactcctacatttacaatgacaagagcaagcaaataaaagatacttaggaaacctgggggctggggggaaggtcagttttgtggagaaaatttggaattatagccatgaaagtttacctaaatgaatgaaaagctctaccatgtttatcaatagaaatatttcacttcataattatattgttttctgcaagtgatttctaaattcattgcatttccgaccaaagtggaattttggggatttttgtgaaatgtgatgttttattttaaaatttatatggaagaatgaagactcaaaatgggtgaga

SEQ ID NO: 131266 - DNA, 560 bp, Homo sapiens
gaaatcagcctcaacccaggaacctccataggaagagaaattatccttgttactggtttagtatgaagcacttctcgtctagagttctgtatagccagctgaaattcttcgttgtgtactcagaacatgtcaaagccttctgtgtatcttgtagttgaatggtcactcttaggttctagatgtcatctcagagatagaaagagctttgggttgcaacggttagagctttgaggcttgaaccaaaggcggggcagctgtgcacccagtggctcacatcagcctttcagagcccagatctttgaaaatgacagataatcctggaatctctagtttttggcctgctgcttttctaccatgcgtgtttcctggggaatgaaccagcagcatagtggctttgagtttcagaagtttttccctctagcgtcttgtgcctgagctaatgaacggaaggaatggttataaaattggccaggtcaaggggaggaggagataaattcaaggggacaaatcctagtccccataacagcagcctgtgttatgacagcacaccacagccccaa

SEQ ID NO: 131267 - DNA, 338 bp, Homo sapiens
gctggaagaatgaaggatgaaggatgaggccaaagggtcgtggcagaagggtctgagagagagctttccaggcagaggggtagcctctgtagagcaacaagtgccccaagggaagaagcaaggaacagaaataaggcctgtgtagctggagtgtggagatggagagaaagcccaagacaagcagagaggccactgttagataacgtagcattaggcgtagggttctgcaatttggtgtttggtcatggagcaatgattgatggctcagcagggataagacccgttggatttgcattttagaagatcatcctagctgcaggtggagagtagattccagt

SEQ ID NO: 131268 - DNA, 743 bp, Homo sapiens
gagtggagaaggtcaaggatagcttctaacaggaagtgacacatcagctgagacttgagggatggcaggggatggtctggggaggacgcaggggcggggagtgcatgcaagagaaaagcttgtgcagagggaagcctggaagccagccaaggcctggggcctttggagaagagaaataactcagtttggcaggacccgggagcactgcagtgggagcaggagcttgtggggacagaggctggggagggaggctggtccagcacggtcctgctagagagtttagatactatcccaaaagcaagaggtggagtggtgttagaggccacgccagctgccatgggggtgggctgaaggggccagcctgaggctggaaggccctttagaaggcgcctcacctagggacgaagcaggggggagcagttggtgaattggcacccaccacgtagcacttgctggcaggtttacgggtgggagaggtggagggtggagtcagggtttctgggtttctgatgagggggtggatgttgccctcactgaagtggggagcactgtaccccaaacagaaggggaacacagcaagtgctcagacactgaaagaaatcataattcaccatccacgatgctaatgccagaatgatttataacatcaaaaattaaaaacagtggcttacacctgtaatcccagcactttgagaggctgaggtgggaggatcactgaagcgtaggagttccagaccagcctg

SEQ ID NO: 131269 - DNA, 668 bp, Homo sapiens
gtatacaacttgtgaggttatacttgttttcagctacttttctatagggattgtgggagatgggtgctgagaggggtgtttgcctgtgctgtggggatccccgttcttccagggtcttggcagcctcctgcaacaaacttgctggggcctgctgtgtgtacacactgtatcaggctgggtgtacctcgttaagcacataggtggtaaaataagtaccacggtaaaattatggcttagggctcagggtaaaattataaaaaaggaacagattacatcccactgtgggcaataagaaacactttctgcaggattctgagatgggcctggaagaatggatgatatttcaacagggggtaatgaggaaatgcagtttcggtgtgggcacctgaacggacaaaaggacaggtgtcatggaaaacaggttctgggaaacctgcatcacctaattcactggagagggataatagtgatgctataaatagcaaatgaagtcagttgggctcttatatgtgttgagcaccaccatccatctgaatagttgcttaagccagaaactggggagtggccccagctgcttcttccttcccttcatccagaaagttagcagttcctggattttcctcctctagaatgtccctcaaacctgtcctcttttgtcttttctcatg

SEQ ID NO: 131270 - DNA, 153 bp, Homo sapiens
cctacagtagttcccattttccagacagatgcttggtgggtaagggaaccagaaacaagattacaaactgaataggtactgcagggaagggttgtgttgctaaaatgtcctgttccttaaacaagaagaaaacgtttattatgaaacttttca

SEQ ID NO: 131271 - DNA, 194 bp, Homo sapiens
gatctcccacactggcgacgtggggttcctttcaagcctgaggaatgagcactatattttggccacagcattctcactaatgtcctaggatagcagcttagtgttggctttagaattctctgtcatttaaatgtcatgcaaaaacaaacgtataaaagaaaacattaacccagatatctttatggttccttgtc

SEQ ID NO: 131272 - DNA, 558 bp, Homo sapiens
ttttattctcaagattcaaattttaaaatattcaatatgcttcagatttatactaactgtatggtaggtgatatggcaggtcagatactactacttacctggtcaaaacaatcagatataaagaaagacaaagccaaaccaatcaactaaacgcgcaccccaaatcttattaggattcaaatctttaaaattaaaaagtagataatgacatacatgggaagacaatcatataaagctacaatttagaatatgtatagctctttgcaatgcacatcatcttatatgtgagttagtctacgaacacagttataagcttggctactagtatatgcgttagtctgtgaacgtaattttcagtatataataaagttatttatagacaacttgtaaagctgaaataaaacaactcttttaccagcctgggcaacatggtgaaaccctgcctctataaataccagccttggcaacatggtctaaacctgtctctacaaaaaagtacaaaaatgagccagatatggtggcatgaacctgtagtcccaggtattcaggatgctgagg

SEQ ID NO: 131273 - DNA, 336 bp, Homo sapiens
cgaggatcacaccgtaatatgtaaccacacctaaacagaccctttttcaagataatgactgactctctccaaggatcatttaaattccaaagagaactacctacaagttaatttctgttccctgatccagtcattctccctagcaatcatttattacccctcatctaatctaatcccaaaccctaaatctaataaaatacttctaaaatctgcacccctaatgccctcccacactcaaccattccacttactttgtaatttagagaggcctaaattttgttaaaatagaggcacagctaatagatgtttgttacatattacggttgagtccttttg

SEQ ID NO: 131274 - DNA, 726 bp, Homo sapiens
tatgtgtatccgctatggaatagttggttataacttttagaattctagaggtctaaaaccagcatgatagctcattcctcatctcttggtctgaagaggagggaggcacaattgtttataaacataacggcactgaggtggggtgtatgggtatgaaatcctagtgtttctacatggttactttatataggttttactgagttaaagctctgtttttaatatgggtcaagactcatatatatatatatataataccataccaacaagccctgcatccctagcatgatcctttgaacctctagtaattagggcagtaactaaattggccctttttattttccactggtgtcaataccagctaagaggattacatcttgcttggatattaagactcttttcataactgaaagcatctaatcctgattattcactgtttgtatttataaaatatataaaactagaaataaatctctcaactgaggcccaaatgtcacagtcaaattaaccttccttgactactgattcactttgactcacagctaatgaggacagctccttttttttttcttctatttttctctcagtgcctgtagaataaatcctacatagaactggaaatagattttattgtgcatatatttacttatctcctgtgcccttcacattgcttccagttctgtatcccctgtgcccttcacaattgcttccagttactttggagatttt

SEQ ID NO: 131275 - DNA, 501 bp, Homo sapiens
tatgcattctttctatccgagtctgccattagtcttgcatgaagcctcagtgccatggaaatgatggcatctgtttaatttggtgaatgaaattaagcttaacgcttgttactttcaggaaatagccttcattttaataactcgagagggttaaacaattcaaaagtgctattcagttccgtaagtttgatggaatgaaaattggtatttgatgatgaacttcaaggtctaaacctcaagggaactcaacttggttgtttcagtaggctgtgaatttatgttttcagttcaactttggtgcttgattttctcatagtttttattaagcgttaataacgtaaggtggcttcattcaaaaagaagacttatttgaaatattttaattatgccttttatgtgttttgtttaaagtaatctagcctgtcctcatttgcagtgtggtatagtttatcatagctaacatagcacatcccattaaaagttatgcctagatagtttcag

SEQ ID NO: 131276 - DNA, 398 bp, Homo sapiens
tccgcctacctcggccacccaaagtgttgggattacaggcgtgagccactgcactctgcctcctcatacaaacttgtactctgcctctgcctcaaacttctgtttctcactgtcacagttcttggaaaagcagcccccatttgctgcctttataattctttgccctttaacttaatgatatggcttactcttctctcccacccaattgtatagaacctgtcagtcataaaagtattagcaacctcctgattatcaaatgagattcttctctgataatatttatcctcttttctggtattattgctcatttcctctgcttctcttttggtttttatgacattccctccttggtcttctctctctcaaatcacgtttgtttttcactgacttccctcccc

SEQ ID NO: 131277 - DNA, 372 bp, Homo sapiens
atcttctgaattcttaggaagctattcttcttgtagatatatactagatacataaagttttaaccgatacacttgaatttgtatttctaactgattcataatatcagttagcttaaaaacataagaaataggtgaatgatttctgctattgaaactgaagatataaattaataatagctgccatttattgagtccaagctatgtcccaggctctaggtgaagtagtttacaaatatctcagtagatcctcaaaatgatcaagcgtggaagaagtattgtcctcattctgtaaatgaggacatggagactgagaggaataaaataatgtctgcaggatctcccatttaatatgtggtggagcctaagttagaa

SEQ ID NO: 131278 - DNA, 300 bp, Homo sapiens
ggcggggctctgttactgggtaattttacctagtatgtttgcttattagactgatttttagcagtcgtcattttgtaaaatagataggaatggtcatagccactggatttccatgggtagggttttgtaaggtaagttgcagtataagccccaaggaataatggtattaaatcacaatttgtgagatatttggtctgtcatcagtagatctgtgggccattgtgctgcaagctgtggtataccattgagatgatagtgactgtcttttccctcaaagagcctgcagtctagacctggcag

SEQ ID NO: 131279 - DNA, 713 bp, Homo sapiens
tagtgtccctgtggagatcttgtcagtttaggtctggtttttattcttgctgatccagttagtaatcagaaagtggcttggtgaacacagactcagaataaaggaagcagtagttttgaaggagatttcattataccttagcgaggactgatgtattaagtttgctttatagtacaaaacatttgtctctcaaaatcataatgcctgctgagtcagtatccattttccttggacagtgttgggtgaatactgcgaaattctttttataaccccctccttctttctaaaaactccatttatactactgtcttctgttaatacattctttatatgaatttcagtatcattaggttacgtctttatatatgtcatttttttttctgaaatacctaattaccttattggacttgggctagaggaactcaaatggtctttttatggtggacgactgttatagatagagataccatccattatatgtttaccctttctagattcatgtttagttttgtcttctaaattctgagtatactttgttctcatatgtcgattaatctggtgtttgtttaatatttcatagttatgcaaataaagttcacatatatcatgttgttttatccagttcagaccctgtgtcagttatctgcgagtgtgtcgtgattcccatttttaaaaacaaagaaactgatgatcagagaatataagtgactttt

SEQ ID NO: 131280 - DNA, 327 bp, Homo sapiens
ggaaaacttgggagtgggggttcctttatgagggaggtcacaccccctgcacaaaaacatcccaaagagaactggcattgagcttgtgttggagaggtggagataccccagggaggaagtggcgaaaggtgagcatgggaacacccctctttgatcccacaaggtgcgtcagggaaagttggatttcatttagtccgggatggtgacatctctccgcacgctgccaccaggctcagtgggtcagaggaagtgaggctcccctcctctccgacctcaggtgatgcgtgtgcgaccccagccatgggtctgacctcctttcgctcccgc

SEQ ID NO: 131281 - DNA, 480 bp, Homo sapiens
acattccatgcatgtttgctgaataaatacagaagtataactggggctggagtgggaggagaaacctgggagaggaaaataattctttttaaatctaatctccaaaaaacaattataaaaaagtagcacagtgcttagggcacagcactggcagagcagatgagacctttgtggcataaggaacatgtatctggtctctgccccctgttcctggaacagaacttctaaaacccctgtaatttctcgggtgacaggaacgtcttttgttctaataaggtgactcttggtgggctcctggatgggggctggtcaccagaaagactgagccatgattagaagctgggaacttccagcccacccccatcctctggggaggggagaggagctggagctggagttaaaaatcgataatgccaaagtgatgaagcctccataaacatcctgaaaagaggagattcaggtttcagagtggtgaacaca

SEQ ID NO: 131282 - DNA, 438 bp, Homo sapiens
ctgagacaggggtctagaaacaatacgcttgtggtgaaacgcccatccagtcacacggcacggggctcctgagtcggagctacactttgtggtatgcatcttaacacatccagcctctcaccattctccaaagatcttggcacctccgtggagtgtcaaaactgcagtgtgggccatggctcatcaggcccagcgttttccagaggcccagggtgagccctgagtttggccgctaaactgtgactcctgagttcgcatgctctgtctggtgctggctctgttgtccactgccttgggaggatgcatcacgaggactttaatctcctactgtcaatagctttaaggtaaagtacatgcagggtaagctctccaaatgtcagagccaggcgcaggctttgtgtttggtgctgatgcatggcatttactctgaaggttcag

SEQ ID NO: 131283 - DNA, 215 bp, Homo sapiens
ttgacacacaggtgaggactcaggagtccatggtgtgtttcactacagcatcctcatctgatttcctttatgccccaacatacgttaagtgatagagatactgtcagggtttgataacccttgagtaactagttaacatagaggagggtaaatccttttttctcaatgttgtagtttccagaaatatttttctctggtgggcctcttagtcggag

SEQ ID NO: 131284 - DNA, 771 bp, Homo sapiens
gatggagttagttagctacgttatgtttctgtaactgttacgtcttacttgtaggattacaacatctacttggatgaatggtgatgtcattctagcatgaggagcaggtgggattaggttgaggttgaatgggaccatagttctgtcaggacgtgtcatctttgtggagcccaggggtcatccattaagcagctgggaatacagttctggggctcagcagagacctcagcctggaagaacatgtttagaagtcatcaacatctcattaggaaagagaaagagatcgcccaggagaggaaatagagcaaggagagaaaatggtcaacaagggaaaccatgctgggattgagtctctgtggtaccaatggtcttactattgacgtcagagttaaaaaagaagagagttatattcaaattctggttgagttagtctcttattaacatttcctgactcaccaactggtaaatgtccaagaaaaatatatctttttgttttatcagaaaatatacatgctatttgatcactcttcaggcattaacaaatggtgtctatgagaacattttaacaaaatgtcctttctactgttaatacccacagcaaccaacttggaaatcagtcatcatagaagatgactgcaggttctggctttcccaaatcaccaataattcacacctttgtacatggttctgtgcatgatctgttcctaatattatgcaacacttgtgaaatctttaggactttaagtaattcatcgttttgccccaaaccta

SEQ ID NO: 131285 - DNA, 402 bp, Homo sapiens
gttatagtccccctagaaattaatacaggattcatggtctgccaaagtctcattccctgctcagaccgacaatggatagtgggatcctttgtgatatgtgctctgtgagttagaagtagtaacttagagctgttgaggacaatacctttgcaccccatccactgaattttgttttcaaagatacagtctgaaactcccagagggtgagtgcctttccagtgtgtcagagccattagtggctgagcagaccgctgagcatgtagatttctaggtcagggccctctccccaaagaatcatactccctggttgaactgaacctaaatcaggtttaaaactagacagatgccaaccaacttaaaattccaaagatatccaagacctgcccatggccctgggatttg

SEQ ID NO: 131286 - DNA, 280 bp, Homo sapiens
gtaacacagcatagtccactataaaatgaataccatatatgtattgacattcaggggaaatttttaattataaaagtcttatccagcacacagcaacagcacatgctgaaaaacattcttttattttcaactatgacacaattgttttcacatcaaatgaaggcatccagctaccgacagaggctactccagataacggacatttggtatcaactaggtcctttaatttccacagtttacaagcactgggttaaatttaagtgtgagccaagggattgtc

SEQ ID NO: 131287 - DNA, 604 bp, Homo sapiens
ttagcagctctttcatcagcagctctcttacgctgtctcttctgtctcagctgcttgagccagtcgctcccgcgcacagctgtgtggccagctctcacttgccttcagggtcagcagcttaactctttctctgggcatgagctcctgtacagtgtcaacagggcaattataccttttacagacaatagtggcttagagccaagtgatggccttccgtgttatggctacatggctgtgatcacaagtggagttatacacctgtgctctaaactcactgagtccctctggcccggatgtccaccttggcctatcctagaccaaagcacagccatgtaccttaaaccatcctgcatgcagtggcacaggaatgacttctctgaaaggtcaatctaattatctacctccctttgacaaaaatctgtcagtggcttccccttaccttagggatatggtcccaacctgtcatacaagagcacagcccatctgtcacccttgcctctcccagtccttgtgcccctcagatggctgccaggtcctccattacaccatccctcccacctctgtccccttgctctcatacttagatcctttaagactcaatgca

SEQ ID NO: 131288 - DNA, 796 bp, Homo sapiens
actctagtggcttaataaaactctatgaggttgccttggggggaagtagatgttgagtagtaggtgagtcatccaccaaatctttgactcacagttgatctcctacacagcagtcactttaaacctccacaactggactctgaagataaaataaaagttcaagatgtacgtgtgtttttaaagttatgtaagtagtatacttaaacatgtttttgtgatttccttttctacccaactctttaaatgagatttaaccatgttgatatatttatgtgtagtttattcattttaatggatgtataatattgcattattttatgtaacacagttgattaattagattgttctcagttttctgtatcatacactgagcttcaaggaacatccttatatgacttttgcctcctgatatatatgagtaaagcaggcaagcttgacctgaaattgctgggacactgaatgtgtacatcttcaactctaacagttattgcccaatcactctccaaaatgattataacaatttacactcccaccaacagtatgtgagtgttcctagtttcttacatcattaccaatactaggtagattcagatttttaatttttaccaacatgagctcatatatatgcaacaaaaggattaaaacaagcatagaaaaaaaaaaaaaatgtgggcgccggcccggaaatttaaacattgttgggcgggccagaaggaaaggcacggccgagccggcgagggggttcccaaaaccgggccgggtggaaccggcggccgctaggcctaccccccggggg

SEQ ID NO: 131289 - DNA, 379 bp, Homo sapiens
tgcaatactattgtcactcatgcaattagtataattaccttctagctggtctcacttgtctccttatcgcctcccaattcatcaggctttcccaggttaggaaccccagtgactccctattctgtaaaatcaattctaatttgtgcttggtccttcgcactccccatattttggtagcatggaacctatccagcctcaattcccaggactcttctgtaacctggtcttctcacctgctgtgcaaactcctaccttcaggcctctgttgattccccctttttgcctccaattccctcactcctccactgggctttcttcagtggttaagttctgttaagctttcattaccttcatagcccaccaagatctcttccctttc

SEQ ID NO: 131290 - DNA, 383 bp, Homo sapiens
cagggtagatacctgatagtgatacagcaaaaagtggagctcccggggggctctgtgttgttctcagaaggacccggcgtctcctgactgtgaccttccaggccggcgtgccctgctatcggcctgcatctctgacctcagtcagatcactctttcactgagttccagctgctgtttgttcaattctcaagcacgtggtctctttcaccgcaggatcacttgtgttctgttctctgcctggaagtctctgcctccagctccagcctgcctggtagctccttctcagccttcaggtctcagcccagatactcagagcacagctgactgcctgtgtgaaataggcctgcctaaccctcagtctttcctagcattttctttctttc

SEQ ID NO: 131291 - DNA, 2576 bp, Homo sapiens
caggcacctgccaccatgcccggctaatttttgtacttttaaagtagacatggggttttaccgtattagccagaatggtctcaaactcctgaccttgtaatctgcccaccttggcctccctaagtgctgggatcacaggcatgagccaccgtgcccagccacatttatgttttagtaaactgtcaagctgttttccaaagtgctggttctattttacattctctccaccagtgtttgagagttcgaggtcctccctatcctccccaacacttgctatggtcagtctttttaacttaagccattcaagtcgatggtagtgccatctcattgtgattttcatgtatgtttccctgatgaataattatgttgaacatcttttcttgtgttgataagtctgttactttggcatcacttcacatccagcttactctgtgcataagagaatttcactcttttaactgattgcattggaatgctgaccaacatgtcattaggaacaactgtggattttctgttactttatatttaactgggcatgtttgtgaaaggatccagaacatcctccaacttaattttctttgtatgtgttaggttatttcgatgctctaaaattttgaccaaattgatttttaaggtgtggcctgatttcaaggcaaaattaggggttatcaacttattttattagatgtctaattctgtaaatgaatatatatacagaagtggatttccacttgaaataagctgtaatattgacatctcgctatattcagaaataagatgtttgagttgggagggaccttagcagtcactctcttcagccattcccttcatgccccctgcagcactcataagggggttcatctttccactgtcagagattcgagtatctggaaggaccttgtacaataagcatacaacaaaaaaattctccttttgtagatggttgctaactgaccttcatttgaaattgttttatggtagttatttgatgggagttatcaggtgagatttagccatccagagcaagcactgcctattaagaatttcattgctgtgtttttaaatatatgtaaagcgtaaaaaggggtgggggagtaggcagaaagagcctagaatctgtattcccctcagtctgtgatgaaggaagccctttgcaagccttgctttcacaacctcaacatggcatgggctttgctgtcagtcaggtctgagttggaatcccagctctgcctctccttctccatgaacggggtcatgagggattatgggtattttgtgggtagggaggtatattataccctcctcgtggggcagctgggatgcctacctgagataggagatggagggcactggcaccaggaaagcactgggtctgtttccttttcttacctctttctctttctcctcttccacatgttttctctcatcacttaggtcacttatagaaatcgttctttttacttctatttcaatcaattttggaaatttctccaaaaagataataatggtaatgaatacttaagcagtaacatttagcaagtcccttttatgtaccaggaatatcaagtacatttcatgcatttttttttcatttacttttcacaagaactcatgaagtaagctgcaattaaggcagagaggaaacggaatgagtgatggagtcaaggtgtgaaccaagccctaactgaccccagagctcttaatcactctgtatattgcccctatatctaattttaggaatgctcagttgtctgtgtttccacccccatccagatgatgataatatgaaaacagtaacagctggtgcatacctcgcactgagcactggtctgcctgctttccacatattaactcatataaggctcactgtaacctgtcacaggttctattgctgtctccatttttgtgatccccattttttaggtgaggaaatgaaggtgcagagacgctaagtaacttgcccacttactcaggttcacatagagttacaattgatgttcagtctgtcgttcctaatgcctccggtgtctttcccctatcacttcatcatttcttaaaattcattttaagcccatttcagaccaatcagagaagagatgggaactccctcctgcttagcttagacatccgagctactctttccagtaacctgtagaattctttccttatccttgctgcagtctttctaaagtggtgatatattggacacttcatccaaaggctgaactgagactaatgcctaagcaagaaagaaaaaatagcaaattcattaactaggaatctatttacagtcaattcccaaggctcattgtgcagtcagtggttctgcatcatttagagttgctaataaatgaaagtctttgcgtctttccaagtgccttgatatttacaagtctcatattttaccataggaaatggcttcaacaagcatattcatgtgttgacagttctaattaatacaagtaattagccctgacagaactgtgaaaaggagacccattcataaatttgctaattatgttactctgctcagaatttaatcgcagtctagtctttaatcatatctgtatatgggc

SEQ ID NO: 131292 - DNA, 348 bp, Homo sapiens
ggactgtttgagctgctgagcacagaagctactgccagcatgaccagaaggtatcacttaaagtggcatccttcagccatctctgtgtgctctgagactgtggataagagtcctctagtcacccactatctggcatccccctctcactcccctccctgtccccagagctcctgctctctgcttccctccctttaatgcagggtggataggcagagaacacaggacgcttcctgccctgggccctgctcagacctcagtggttcaaacacagccctccccacagagttctcactacctgctccccattatgaccacagcctctctgcatcacccacaggtaacatggcc

SEQ ID NO: 131293 - DNA, 539 bp, Homo sapiens
tagtaatgtcatccaggagctggggcctggaatgggggtctcacaactctggccagtgccccatcctactgtggctgagctggtatccaagaggtaagacaaagtcctcctcagtcttccctgtcctgtcctcaagtgaaaggaaggggtctctttctcattgctgcgagctgcactgtctggggttgggggaggagtggtgcaagcactcccttagccacccctgctggtgtctccctaagtcacatgccaccctagtacactggttctaagcttagcacagcactaggagttgcctagaaattgcaatccttgtgccctagactgcctttcaagtttacctagaaccccagagtactttggcctgcgattggtgaggttactgagaaacttaagttcaagctgctggcatgagcgattcccatctggttagggctgatccaaatgctcccgccatgcctgggtgcttgttgagcacagcacaactttgttcccctctgtggcagggcagcactaagttcaatgtaaagccccccagt

SEQ ID NO: 131294 - DNA, 296 bp, Homo sapiens
atcaaaagcactgccagagccctcagatggaacggccagagtggcccaaggcaaatggcgtcgagttcactggctgtcctcctcctcccccagctctggcacaggaagcccagtgggtcagcagcaaagctgcatgcttcatctccaggtcctgtgggacacccggtccaagggacactctggtgtgggctcccccagccccactcctatcagaggcagagatgaacctgctaaggcaaacggtgacggagccttacaagttctctttatgggccaggcgcggtggctcacacctg

SEQ ID NO: 131295 - DNA, 214 bp, Homo sapiens
ccccgactagcccgacagccccgactagcccgacagccccgactagcccgacagccccgacggtcctcctgccctatctcctccctgaccggtcctcctgccctaactcctccctgacccgtcctccagccctaactcctccctgaccagtcctcctgccctaagtctcctccctgaccagtcctcctgccctaagtctcctccctgaccagtc

SEQ ID NO: 131296 - DNA, 787 bp, Homo sapiens
tatagatgcagcagttaagaagcagaagatttgggtgaggtgacattaaatttgcagcagttctggagcaaatgtagattagttagtgcagggaggttatcacacaatgatctgacatgagatagtctgtgtttgtatgaacttgagcacatctgttaaaatttctaggtccagtttcctcatctgtaaaattggggccgggtgaagtggctcacgcctgtaatcccagcactttgggaggctgaggcgggtggatcacctgaggtcaggagttcgagaccagcctggctaacaaggcgaaaccctgtctctactaaaaagacaacaattagctgggtatggtggtgcacacctgtaaccccagctactcaggaggctgaggcaggagaatcgcttgaacctgggaggtggaggttgcagtgagccaagatcacgccattgtactccagcctaggcgacagagcgagactccgtctcaaaaataaataataaataaatacataaaattggaacaacaacatctgccacataaggaaataatctcatgtgtagcaaagaataagtattcaaataaatgagttttatcagagtgggaagctaaattttattatttgatctgttctcctcttgtatgtttcatatattcaaaattaaggatgaaaaaaggagctgggtgtggtggctcatgcctgtaatcccagcactttgggaggtagaggtgggaggactacttgaggccagaagtttgagaccagcctgggcaacacagcaagacctcgtctctaca

SEQ ID NO: 131297 - DNA, 375 bp, Homo sapiens
tatagatgcagcagttaagaagcagaagatttgggtgaggtgacattaaatttgcagcagttctggagcaaatgtagattagttagtgcagggaggttatcacacaatgatctgacatgagatagtctgtgtttgtatgaacttgagcacatctgttaaaatttctaggtccagtttcctcatctgtaaaattggggccgggtgaagtggctcacgcctgtaatcccagcactttgggaggctgaggcgggtggatcacctgaggtcaggagttcgagaccagcctggccaaaccccatctctactaacaaaaatacaaaaactagctggcgcaatggcggcacgtgcctgctaactcccagcctaactcgggca

SEQ ID NO: 131298 - DNA, 503 bp, Homo sapiens
ggaatccactgatatcatccacacaggcccgcctccccagtgtggtgggtccccaggagagagattcatggcaagtgggcctagtagggcaaatgggaactagccagcctgtagtttaactgaatattttccatttccgtacccatggagtcttccccaggtggttacagatgtaccagagtcaaaagaaaactttctatttcgtcgttgacaatgattgtgtctaaatttagtccaaagccaggaagttggattcatggacagtgttcagctgactccagcctttctacccatgtcataagttgcctttgctttctaatcacatgtcctttctctgtggcccctcgggctacacaagcaaataaatgtggacacaggaaaggcagcagcaatgaggaaaaacatttcatcattagctctcataaaccgcagagctgcttccccaaatcactactgtgtcccccagtcccagagctctggaaaaggacctcagggatttctca

SEQ ID NO: 131299 - DNA, 2561 bp, Homo sapiens
  misc_feature (1059)..(1059): n is a, c, g, or t
  misc_feature (1274)..(1274): n is a, c, g, or t
  misc_feature (1308)..(1309): n is a, c, g, or t
  misc_feature (1348)..(1349): n is a, c, g, or t
  misc_feature (1404)..(1404): n is a, c, g, or t
  misc_feature (1453)..(1453): n is a, c, g, or t
  misc_feature (1464)..(1464): n is a, c, g, or t
  misc_feature (1476)..(1476): n is a, c, g, or t
  misc_feature (1494)..(1494): n is a, c, g, or t
  misc_feature (1507)..(1507): n is a, c, g, or t
  misc_feature (1520)..(1521): n is a, c, g, or t
  misc_feature (1523)..(1523): n is a, c, g, or t
  misc_feature (1540)..(1540): n is a, c, g, or t
  misc_feature (1598)..(1598): n is a, c, g, or t
gcctcgtgccgaattcggcacgaggctgaagagaagctatgaaaagcttcagaaaaagcaaatgagggaattcagaggaaataccaaaaatcacagggaagatcggtctgaaattgagaggttaactgcaaaaatagaggaattccgtcagaaatcgctggactgggagaagcaacgcttgatttatcagcaacaggtatcttcactggaggcacaaaggaaggctctggctgaacaatcagagataattcaggctcagcttgtcaatcggaaacagaaattagagtctgtggaactttctagccaatcagaaattcaacacttaagcagtaaactggagcgggctaatgacactatctgtgccaatgagttggaaatagagcgcctcaccatgagggtcaatgacttggttggaaccagtatgactgtcctacaggagcagcagcaaaaagaagaaaaattgagggaatctgaaaaactattagaggctctgcaggaagaaaagagagaattgaaggcagctcttcagtctcaagaaaatctcatacatgaggccagaatacaaaaggagaagttacaagaaaaagtaaaggcaactaacactcaacatgctgtagaagctataagtttggaatctgtgagtgcaacgtgtaaacagctgagccaagaactaatggaaaaatatgaagaactgaagaggatggaagcacataacaatgaatacaaagcagagattaagaagttgaaagaacagattttacagggtgaacaaagttacagttctgcactagaaggaatgaagatggaaatctcccatctaactcaggagttacatcagcgagatatcactattgcttccaccaaaggttcttcctcagacatggaaaagcgactcagagcagagatgcaaaaggcagaagacaaagcagtagagcataaggagattttggatcagctggagtcactcaaattagaaaatcgtcatctttctgaaatggtgatgaaattggaattgggtttacatgaggtacataaatagaaacttaagtttttctactntccaagccttcaaaaaattactttgtaaatatttacattataaagagagaattaagatcaacttagatccttttgcagaaattttctcaaagaaaatgaaggtaaaacaatactggaagtgagcaaaatatgactctccactccagcagcaggaagggtttttgtttgtttttttgagacggggtttcactcttgttacccaggctggagtgcantggcgtgatcttggctcaccgcagcctccacctnncgggttcaaatgatgctcctgcctcagcctcctgagtanntgggatcacaggcatgcgccaccacacctggctgatgttgtattttcagtagagncagggtttctccatgttggtcagctggtctcgaactcccaatctcaggngatctgcccgnctcagcctcccnaagtgctgggattacagncatgagccaccgngctcggccagganngnatttttttatattatgnatgtgataaatttacctacagtctgtgttcttagttggaagaatgtatatgaaggacntagcatatagtacatagtacctgacacttagtaagtatgcaatacatcctagatggtggtattattattattattattattgttaatgattattatgtttgttatctttttagaaagtatattgtctttaaaataatttaattttaattttatttctacaagatattcacataataaaatattttagaatcttttatatccaaggacttttagtaggtgctataatgaacacaggctgaataagatagcattcttgcctttaagagagattttggatcagctgcaattactcaaattactctagcctttaagagactagagtaatctagtagcaaggataagaaatgcatacaagcttctgtgaaaccagagagaacatgattagccaacagtgaattacagtatagatgctcttttaactgttttgttacaaaattcctataatttgcaaaatgactcatctattctgacccatcttttcttggtgtaggtcagatgtctgaaaattgtataaatgcttttttcctgcatttccagagagtattcctccaaaaagatatatggttccaacatgctccctgtttgctctgaaaaattctaatttcacaatccaggattgtggatactggggtggaagaacatgcaaaagactattatagagtaccttatttcaactggaaaaatgggggactatttttgtaatctttcagaagggtaagattctccaaacatcatgacgccatagaggattttacaacataaaaatgtgaagtttctggatggtaaaaggccctattaaaaaagactaatagggagaaaacagtttataatcagacaaaaggttaatgtaaattattaatatataaaaattccctacaaagataataaggaaaagataatctagtagaaaaataggcaaagaatgtagatagatacctcacagaattaatataaatatctagt

SEQ ID NO: 131300 - DNA, 2449 bp, Homo sapiens
  misc_feature (947)..(947): n is a, c, g, or t
  misc_feature (1162)..(1162): n is a, c, g, or t
  misc_feature (1196)..(1197): n is a, c, g, or t
  misc_feature (1236)..(1237): n is a, c, g, or t
  misc_feature (1292)..(1292): n is a, c, g, or t
  misc_feature (1341)..(1341): n is a, c, g, or t
  misc_feature (1352)..(1352): n is a, c, g, or t
  misc_feature (1364)..(1364): n is a, c, g, or t
  misc_feature (1382)..(1382): n is a, c, g, or t
  misc_feature (1395)..(1395): n is a, c, g, or t
  misc_feature (1408)..(1409): n is a, c, g, or t
  misc_feature (1411)..(1411): n is a, c, g, or t
  misc_feature (1428)..(1428): n is a, c, g, or t
  misc_feature (1486)..(1486): n is a, c, g, or t
taccccttcgcaatatatatatatattttagtgagccaatgcctttatgtttttatggaaataatagtttcattttagtcttattcattgattattttatcatttcccttttacctattgattgatagtctgtgtttctaggctcagcttgtcaatcggaaacagaaattagagtctgtggaactttctagccaatcagaaattcaacacttaagcagtaaactggagcgggctaatgacactatctgtgccaatgagttggaaatagagcgcctcaccatgagggtcaatgacttggttggaaccagtatgactgtcctacaggagcagcagcaaaaagaagaaaaattgagggaatctgaaaaactattagaggctctgcaggaagaaaagagagaattgaaggcagctcttcagtctcaagaaaatctcatacatgaggccagaatacaaaaggagaagttacaagaaaaagtaaaggcaactaacactcaacatgctgtagaagctataagtttggaatctgtgagtgcaacgtgtaaacagctgagccaagaactaatggaaaaatatgaagaactgaagaggatggaagcacataacaatgaatacaaagcagagattaagaagttgaaagaacagattttacagggtgaacaaagttacagttctgcactagaaggaatgaagatggaaatctcccatctaactcaggagttacatcagcgagatatcactattgcttccaccaaaggttcttcctcagacatggaaaagcgactcagagcagagatgcaaaaggcagaagacaaagcagtagagcataaggagattttggatcagctggagtcactcaaattagaaaatcgtcatctttctgaaatggtgatgaaattggaattgggtttacatgaggtacataaatagaaacttaagtttttctactntccaagccttcaaaaaattactttgtaaatatttacattataaagagagaattaagatcaacttagatccttttgcagaaattttctcaaagaaaatgaaggtaaaacaatactggaagtgagcaaaatatgactctccactccagcagcaggaagggtttttgtttgtttttttgagacggggtttcactcttgttacccaggctggagtgcantggcgtgatcttggctcaccgcagcctccacctnncgggttcaaatgatgctcctgcctcagcctcctgagtanntgggatcacaggcatgcgccaccacacctggctgatgttgtattttcagtagagncagggtttctccatgttggtcagctggtctcgaactcccaatctcaggngatctgcccgnctcagcctcccnaagtgctgggattacagncatgagccaccgngctcggccagganngnatttttttatattatgnatgtgataaatttacctacagtctgtgttcttagttggaagaatgtatatgaaggacntagcatatagtacatagtacctgacacttagtaagtatgcaatacatcctagatggtggtattattattattattattattgttaatgattattatgtttgttatctttttagaaagtatattgtctttaaaataatttaattttaattttatttctacaagatattcacataataaaatattttagaatcttttatatccaaggacttttagtaggtgctataatgaacacaggctgaataagatagcattcttgcctttaagagagattttggatcagctgcaattactcaaattactctagcctttaagagactagagtaatctagtagcaaggataagaaatgcatacaagcttctgtgaaaccagagagaacatgattagccaacagtgaattacagtatagatgctcttttaactgttttgttacaaaattcctataatttgcaaaatgactcatctattctgacccatcttttcttggtgtaggtcagatgtctgaaaattgtataaatgcttttttcctgcatttccagagagtattcctccaaaaagatatatggttccaacatgctccctgtttgctctgaaaaattctaatttcacaatccaggattgtggatactggggtggaagaacatgcaaaagactattatagagtaccttatttcaactggaaaaatgggggactatttttgtaatctttcagaagggtaagattctccaaacatcatgacgccatagaggattttacaacataaaaatgtgaagtttctggatggtaaaaggccctattaaaaaagactaatagggagaaaacagtttataatcagacaaaaggttaatgtaaattattaatatataaaaattccctacaaagataataaggaaaagataatctagtagaaaaataggcaaagaatgtagatagatacctcacagaattaatataaatatctagt

SEQ ID NO: 131301 - DNA, 1253 bp, Homo sapiens
gcctcgtgccgaattcggcacgaggctgaagagaagctatgaaaagcttcagaaaaagcaaatgagggaattcagaggaaataccaaaaatcacagggaagatcggtctgaaattgagaggttaactgcaaaaatagaggaattccgtcagaaatcgctggactgggagaagcaacgcttgatttatcagcaacaggtatcttcactggaggcacaaaggaaggctctggctgaacaatcagagataattcaggctcagcttgtcaatcggaaacagaaattagagtctgtggaactttctagccaatcagaaattcaacacttaagcagtaaactggagcgggctaatgacactatctgtgccaatgagttggaaatagagcgcctcaccatgagggtcaatgacttggttggaaccagtatgactgtcctacaggagcagcagcaaaaagaagaaaaattgagggaatctgaaaaactattagaggctctgcaggaagaaaagagagaattgaaggcagctcttcagtctcaagaaaatctcatacatgaggccagaatacaaaaggagaagttacaagaaaaagtaaaggcaactaacactcaacatgctgtagaagctataagtttggaatctgtgagtgcaacgtgtaaacagctgagccaagaactaatggaaaaatatgaagaactgaagaggatggaagcacataacaatgaatacaaagcagagattaagaagttgaaagaacagattttacagggtgaacaaagttacagttctgcactagaaggaatgaagatggaaatctcccatctaactcaggagttacatcagcgagatatcactattgcttccaccaaaggttcttcctcagacatggaaaagcgactcagagcagagatgcaaaaggcagaagacaaagcagtagagcataaggagattttggatcagctggagtcactcaaattagaaaatcgtcatctttctgaaatggtgatgaaattggaattgggtttacatgagagatggggttttaccatgttgtccagtctggttttgaacttcgggattcaagcaatccgccagcctcagcgtcccaaagtgctggaattacaagtgtgagctaccaccactggcagttaagaattttaacaatttgtcaatgaaacaagaatctcaattagagtctttatatacaatctgtactgttggaattttcaaataaatattgtaaagaaaattaaaaaaa

SEQ ID NO: 131302 - DNA, 929 bp, Homo sapiens
gcctcgtgccgaattcggcacgaggctgaagagaagctatgaaaagcttcagaaaaagcaaatgagggaattcagaggaaataccaaaaatcacagggaagatcggtctgaaattgagaggttaactgcaaaaatagaggaattccgtcagaaatcgctggactgggagaagcaacgcttgatttatcagcaacaggtatcttcactggaggcacaaaggaaggctctggctgaacaatcagagataattcaggctcagcttgtcaatcggaaacagaaattagagtctgtggaactttctagccaatcagaaattcaacacttaagcagtaaactggagcgggctaatgacactatctgtgccaatgagttggaaatagagcgcctcaccatgagggtcaatgacttggttggaaccagtatgactgtcctacaggagcagcagcaaaaagaagaaaaattgagggaatctgaaaaactattagaggctctgcaggaagaaaagagagaattgaaggcagctcttcagtctcaagaaaatctcatacatgaggccagaatacaaaaaaaaaaaaaaaaaatgacacacacaacaaaaattgcttggtgggccggacctggagacccataagaaaaacgtctttgatgagaccccacactgtgtgttgtggggcaccgggtccccccaatgaaggtatgtcagtggcgacccacggctgggccaatagagcggtgtacccccctaaggaggaactccgggggtgccaatgaaccatgagtcgctgggcgacttcccccaccaaaagtaaaaaaaaaccgccggggggcgaaacacgcagaagggttctggaaacaacaaccccagagaagatgggagtgcacggcagaggccaccaaacagggggactcacaatacacgacgggagtcc

SEQ ID NO: 131303 - DNA, 1429 bp, Homo sapiens
gcctcgtgccgaattcggcacgaggctgaagagaagctatgaaaagcttcagaaaaagcaaatgagggaattcagaggaaataccaaaaatcacagggaagatcggtctgaaattgagaggttaactgcaaaaatagaggaattccgtcagaaatcgctggactgggagaagcaacgcttgatttatcagcaacaggtatcttcactggaggcacaaaggaaggctctggctgaacaatcagagataattcaggctcagcttgtcaatcggaaacagaaattagagtctgtggaactttctagccaatcagaaattcaacacttaagcagtaaactggagcgggctaatgacactatctgtgccaatgagttggaaatagagcgcctcaccatgagggtcaatgacttggttggaaccagtatgactgtcctacaggagcagcagcaaaaagaagaaaaattgagggaatctgaaaaactattagaggctctgcaggaagaaaagagagaattgaaggcagctcttcagtctcaagaaaatctcatacatgaggccagaatacaaaaggagaagttacaagaaaaagtaaaggcaactaacactcaacatgctgtagaagctataagtttggaatctgtgagtgcaacgtgtaaacagctgagccaagaactaatggaaaaatatgaagaactgaagaggatggaagcacataacaatgaatacaaagcagagattaagaagttgaaagaacagattttacagggtgaacaaagttacagttctgcactagaaggaatgaagatggaaatctcccatctaactcaggagttacatcagcgagatatcactattgcttccaccaaaggttcttcctcagacatggaaaagcgactcagagcagagatgcaaaaggcagaagacaaagcagtagagcataaggagattttggatcagctggagtcactcaaattagaaaatcgtcatctttctgaaatggtgatgaaattggaattgggtttacatgagtgttccttgcctgtatctccccttggttcaatagctaccagatttttggaagaggaggaactgaggtctcatcacattctagagcgcttggatgcccatattgaagaactaaaaagagagagtgaaaagacagtgagacaattcacagccttaaagtagcctcttaaaaaaatcacaatcttggaaataaaaataaacaccaaagagttactgtcatctgaagtagcagctctttaaaaacatgaagagataaaattataaaaatgatacatctaaagcagtggtgaagaaagctgaaaaactgatacttttgataggcattttctctgcactggtttgtttaaaggacttcttccagcaataagttgaaagaataaaccactttgctagaaaaaaaaaaaa

SEQ ID NO: 131304 - DNA, 850 bp, Homo sapiens
gcctcgtgccgaattcggcacgaggctgaagagaagctatgaaaagcttcagaaaaagcaaatgagggaattcagaggaaataccaaaaatcacagggaagatcggtctgaaattgagaggttaactgcaaaaatagaggaattccgtcagaaatcgctggactgggagaagcaacgcttgatttatcagcaacaggtatcttcactggaggcacaaaggaaggctctggctgaacaatcagagataattcaggctcagcttgtcaatcggaaacagaaattagagtctgtggaactttctagccaatcagaaattcaacacttaagcagtaaactggagcgggctaatgacactatctgtgccaatgagttggaaatagagcgcctcaccatgagggtcaatgacttggttggaaccagtatgactgtcctacaggagcagcagcaaaaagaagaaaaattgagggaatctgaaaaactattagaggctctgcaggaagaaaagagagaattgaaggcagctcttcagtctcaagaaaatctcatacatgaggccagaatacaaaaggagaagttacaagaaaaagtaaaggcaactaacactcaacatgctgtagaagctataagtttggaatctgtgagtgcaacgtgtaaacagctgagccaagaactaatggaaaaatatgaagaactgaagaggatggaagcacataacaatgaatacaaagcagagattaagaagttgaaagaacagattttacagggtgaacaaagttacagttctgcactagaaggaatgaagatggaaatctcccatctaactcaggtggtgggggtccgagctgaattc

SEQ ID NO: 131305 - DNA, 316 bp, Homo sapiens
acaggcactttagagaaggggttgttcaccaagttggctaggctggtctcaaacttctggcctcctgtgatccacccgcctcggctcccaaagtgctaggattccaggtgtgagccaccgtgcctggcgacacagcctactcttgaggaatggggactcatgctcacctcttcaaaggtgaattgtctgcataaattatttgggattcttctgcctgacagttttatcttttcttcccctgaatgacattttactcacgtatgagtttgtaataccattgaatgttggaaaatagtagtttactgggttatagaga

SEQ ID NO: 131306 - DNA, 693 bp, Homo sapiens
tttacatggaatatctttttcaattcttccactttcagcctgtatgtgttcttaaagctaaaatgagtctcttgtgggcagcatataggttggatcttagttttttttaatccattcacccactcggtgtcttctaattggagaacttaatccatttacattcaagcttattattgatagggaaggacttacttctgctattttgttaattgttttctggttgttttgtagagcccttgttcctttcttactcttgttttcctttgtgatttggtgattttctataatgctgagctttgattcctttctctttattatttgtttatctggggtggttttttgctttgtggttaccatgaggcttatgtagaataaattgtagttagaatagcttattttaaactggcaacaactttagatgtagaaagaaatttactcaacgtaataaagactgcttatgaaaaacccaaagccagtgtcataatcagtgtggaaaaatgaaaactttttctctatgatctggcacaaggcaaggatgaccactctcatcacttctattcaacatagtaatggaagtgctagcaagagcaagcagacaagaaaaaaaaaaggcatacaattagctgaatggtagaagttatgtccatttgcagatgacatgatcttatatgtaaataaccccaaaaactctac

SEQ ID NO: 131307 - DNA, 349 bp, Homo sapiens
accgctgtgtgtgactgttgctggctcacgcattcgttagtgtcttaaggatgtccagccctggaggagtgtgtgtgtgtgtgtgtgtgtatgtatgtgtgctcatagacttggaacgttgtgtggctcatctttgggaggtgtgctgtgcagcctgtctggcctaagggcagaaagatatgaggtgcccaccggcaacacctccccttggctttcctggcctatgccattcatgggtgaggaaagctgttcagatgttgcctccctgactccatgaagattgattgtgctggggagagtctgagtggagagtatcttggggtagaggaggaagaggagagctgagata

SEQ ID NO: 131308 - DNA, 340 bp, Homo sapiens
tcaaacacaatttagacaaagatacagagactgaaataaaaggatgtaaaaagatatcatacacacatacaggagctggaatggctatattagacagaacagacgttaaggcaagaaatgaaactaagacacttcataataaaaaggtcaatacaacaggaagataaaatgatgaaaaaatatataccctaaaagcaataaccaaagagaggaacgacagacactggggactatttgacagtggagggtgggatgagggagaagaccagaaaaaataactacagggtactaggggtgatgaaataatctgtacaacaaccccccatgacattagtttacc

SEQ ID NO: 131309 - DNA, 187 bp, Homo sapiens
tgggattacaggcgtgagccaccactcccggccatgtttccatcttaatcagacttctgtggctacttgggtgcagaaaacctattaagcaaatggactgtatttcatcatatcaaagatgccattgaatttaataagccctattattttatgtcctactaagaaaaagtgatgccaattaaactgt

SEQ ID NO: 131310 - DNA, 113 bp, Homo sapiens
agtgaatctttctgggtctctgtttcctcatctgtaagatgagggtgataaacctaaggaggtaatgtttgtaaaggactcttcacatatccctatcacacattaggtgctca

SEQ ID NO: 131311 - DNA, 818 bp, Homo sapiens
catcattataaaatgaaggacttgggcttgacatgtgccaaggtccttttctagccccagaggtaattggttaacttctggaattatgactccttcatgaagttgaaacttttaggtctttttatttttactttttaaaaaactttctatctagcgatcctatataaataagtctttgctaattaggatatgtttaactttccttctttattcattttgtcaaaggtaaacaaagctgcatactagctaaagttctaaggacaggttttagtcagtaatacacttttgcaatagggaagagagtccagtatgaaatgaagtcaatgttgatttgcagagatgactgggagttttaaggggagcatggcaggggacttggcagggtggataaacggaatctgtagactcaaagaagtgaagaatttaaaaagattggtcaaaatatggtgattaggccagctgtgcctgttagctgacacttgtgactggggaatagataccctatttttcctgatggttacatttttaacggaatggctttcaggtccttgagaaagacactcctgagttgtaggagtacagctcaaagggacagaggaaggattcaccagttgtaagccctttttagtaatggatctacagaggatagttagggcctatcttcagatgctggctagaacaaacagtagattctctggcagcttgaagcttttaagaggcagaaaattcgacagaggccacggtccaaccacggaggtaacctggaaccggccacaacggccaggatcaacaccacagccggacatagaggagtgagc

SEQ ID NO: 131312 - DNA, 312 bp, Homo sapiens
atttgggctagtttctcttcccctgcgtcggcaccaacgtttgactccatggttgtgaaattgaagaagtcgtgataagcttcaatgcttggggccaggccagaagtggtgggaggcaaactggtagaattcaccttttactttttatttttaggtgatttggtttatggcacctgatcccttatctcctctaactctgcattttggttctcttggtataagccttatcttcaaggtttcttccccatttatagtagattaaggggtactcttgttgcccctaagttgcttctctcccattttccagttttt

SEQ ID NO: 131313 - DNA, 637 bp, Homo sapiens
tgggtcgagggatatccatgtcccagtgttagtgttgttctgacaaaactcatgctttcggctgggcgcggtggctcacgcctgtaatcccagcactttgggaggccgaggcgggcagattacgaggtcaggagattgagaccatcctggctaacacggtgaaaccccatctctactaaaagtacaaaaacaaaattagccacgcgcggtgcggacgcctgtagtcccagctactggggaggctgaggcagaagaatggtgtgaacccgggaggcggagcttgcagtgagctgagatcgcgccactgcactccagcctgggcgacagagccaaactccgtctcaaaaaacaaaaaactcatgctttccctcccctccctcgttccttcgttatcatatagcactgttgaggatggagggtggactgtgctcttggtgaacacgagctgtgtaaggaccataatgcctcctgattagaaattagcttaggtgatttacttgggttaaaaaaaagagagagagaataaatacaagagatttattggggttaaaaacaaaaaagaaaaaaaaagaaattatctaaggttatttattggcctcttagatcctgtaagctacctaatgtaagaaaagtggga

SEQ ID NO: 131314 - DNA, 707 bp, Homo sapiens
gtgaaattgaaaaggtttgctgaatgaagtattttactattgaaaggtcttctagaatgtaagtttcaaacacatcgtctggttggtgcattacttaatctattcctgtttggctgctgcttggtatttcccacgcaggagttcattgacttcaaggcaattgaatgcattattagccagaagaagaaaacatgtgagtctccttcacccaacaatagattttttaaaatacattgtgcacagtcctcttaaaaaaggcatcaatggcaggtgggtgtgaacagaggaatttcctcctccaccctggctgttgctgagctgtaagctgtaaacattgtgagagacaaaaagtatcaaggtctcaactttctttcggatattgctttgtatttctgtttactagtatgaatgaaaattttcctgaaaatgctggctaaaactgaattttggtgttgtctttctaatggaatttctgatcaacaatttcctttatgttggcaattgcttaatctgctgaagtaggtaaggtagttgtgctgccttaaaatttatttttatatttgtcattaaaaacaaacatgaaacttggaggttaattttgtctgtttaaattttgatgctttcattttgacaaaatcttttaagaataatgacgaggctgcagtgattgaaatacaatttgtgtggcttttaggcaagtgagcatt

SEQ ID NO: 131315 - DNA, 270 bp, Homo sapiens
attaacagttttgtgggccaggcccagtggctcatgcctgtaatcccagtattttgggaggtcgaagtgggaggatcgcttgaggccaggagtttgaaagcagcctgggcaacatagcaagaccctgtctctacaaaaacttaaaacaatttgccaggactggtggtgtgcacctgtagacccagctactgtggaggctgaggcaggaggattgcttcaacctgggaggttgaggctgcagtgagctaggattgcaccactgctattgtc

SEQ ID NO: 131316 - DNA, 877 bp, Homo sapiens
  misc_feature (310)..(310): n is a, c, g, or t
  misc_feature (318)..(318): n is a, c, g, or t
taatttttgtacttttagtagagacggggtttctccatgttgctcaggctggtctcaaactcctgacctcaggtgatccactcgcctcagcctcccaaagtgctgggatcacaggcatgagccaccgtgcccagccaccctgcaatatttaatttgacttggaacatcagtattaacttactttttgtgtttctgaaagataaacatctcctagctatgcccactgaaaagacctaaaaaaaaaaaaaaaaaaaaaaggggcacccttgttggcaccccgggcccaaatgggggccccggaatggcccanagttgggnaaggggcgcaagtgccagtgcgggggggacggaactggccaagatagacccctggcaccactacttttgggcgcccacaaatacagcggcacccactcaaagcgctcgcgcgagcgggtcacaaggcacacccgcggaaacacatccgggacggagggccccagatgggccaacgctgtgacgccctcaaaaataccccaacgcgcactggctggaacacccaacgcctgcaatcccacaagcttgggtcactgatcaattcgttttaaaaacacagtgaaccccacgggtaccactctgggcagccggtgaaggacctcatctggtgtaccccaacaatgtggctagcgccgggagcaagactctcagacttcttcaatagtgtttcccatcacaacctatttttcgcttatccactactcgaggaggacaccctctcttttgggaacccctaccgaaagaatacgggggctaacgtgaaatcatcatggctatctagcacagcacacgcagcccacgggtggcaggtccgacacttaggcaagggcactacagcaag

SEQ ID NO: 131317 - DNA, 887 bp, Homo sapiens
ctattcagtgttcatattttcctgtctcaaaaatgtatttttatagttggtttgcagttgctttggttgatatactcttaagtctcttatgttagtttgccccttacctcccttttctcatgcgacttgtatgtttttctgtagaatctcccacattctggatttaatagtccactttttttctggtgtcatttaagttgttcctctatccaccagttttcaagtaaactcttagtgaaatctagaggcttaatatgattaaagttcaatttttaatctaggagacaaatacctcataggtggtgttgaatattattgcatcacagcaggaagcacatatctagttgtctcattttcagtgattgatctttgatgaatttaagtgatgatatacagtcatgtaacgtccaacacaatgaacatacaggatttcaccctaaaatgcctttttgcagttgatcctctcttcctggccctagaaaactattgatctactttttctcactgtagttgtaccttttcatgtacattgttcctatcaatggagtcatacagtatgtaatcttgtgtttgactttttaaacttagaatgttgattcattcttgttgctaatatattaatatatctttttattactgagtagtttcagtagtgtggatatatcataatttctttatcattcaccattttgtggactttggggttctttccagtttggggtgttatgaataatgcttctgtgaatattggtgtgtaaggttttgtgtagatgtatgttttcatttatcttgggtaaactcccaggaatgtgattacagggtcatatggtgagtgagaaactgccaaaatgtttttccaaaattgctaaaccatttttcatttccac

SEQ ID NO: 131318 - DNA, 649 bp, Homo sapiens
caaatagtgtgaaaaatggtacctctgcataaaaataatttaatattagtgctaaagttgctccttgttttcctttagaggaactacaaaaggatagttattagattgccaaatcctgcagaacctccagcaggcacaagttggtttttctccctcaagaaagagaagtgagccaagcgtggtggtgcatgcctgtggtcccagctactcaggaggctgaggtaggagcttcccttgaacccaggtgttcaaggctgcagtgagccaagatcacactactgtgctccagcccaggcaagagaatgagaccctgtctctttaaaaaaaaaagaaagaaagaaagaaaagaaatttttgggccggcttgggccccgaaaaagtttttaaaaccttttgttgtggggcgggggggccccagtaggtgatagagtgaaacacgtgtggccacaacgcgggttttcccgagaggaagaacctggggctacgtgaaaaagcgggcgggggatttcccccccacaaaaaaaaagccccggggggaacacggagttgtccgcaaaacaaaccccagaaggagcccgaaacgacaaaccggggcccataacacgggggctccaggggaagcccaatataaaattgcgcgaccgggaaa

SEQ ID NO: 131319 - DNA, 830 bp, Homo sapiens
gagaatatttcagttaacaaaatccatctcattacaggatactggcaactgcatcaaatctacattttgcttgcaaatgttcatccagtatgaaagagagaataaaaatattaggataaaataatttttttaagtgaggagataggcagtcacacattcttttgtgacacaaaccagttctacagtagaataatgaaggcattgttcagcagtttgaaggtttgatttataaaactaggtgttaactgattggcaatcaaccaatagaaggtaaattgctaaactagtctgcatgtgcagatgctagtaagaaattttcaaaggcacagctgcacttttatacaaagttccctgatcatctacaggtacttccccacatgtggtcatgacctttgatgacacccattcaggatatcagtcgccagtttgtttataaaatgattcagatgtacttaattagattattcagagtttctgtgggagtgcaggaatgtcctgtatttcttgtccctttctcccataacttctacctccctacaaaggcctaaatgctctgcttttgatggaggcgtgcaacttcagataagctccggtaagaatataggtgtttttgataggctaaaatggaaagcacaaatttctgaaaccccaggaaaaaggtgcaaactctacatacactgtgcaatctgcatgaaatccaccataggagaattgagtagtgattaagtctggtttgaaaattctgcatcaaattcacagagttttactttcaacccatttgggtgaaagaaataatgtccttacaacatctcttccacttctttccttct

SEQ ID NO: 131320 - DNA, 1097 bp, Homo sapiens
atattggtctgtagtcttctttttttgttatgtcctttcctgggtttggtattagggtaatactggctttattccatcttttggaatagtttcaatagcattggtaccagttcttctttgaatgtctgatagaattcagctgtgaatccatctggtcctcgattattttttcttggcaatttttcttattactgtttcagcctcactacttgttattgttctgctcagtttctgatttatttttatttgtggtttaatataggagggttgtatatttccaggaatttatccatctcctctaggttttctagtttgtccacgtaaaggtgttcatagtaaccttgaataatcttttgtcttggaagacaaaatggggtgcaggagggatggttttggcctaaactgtttcagctcagatcatcaggcattagttagattttcataaggagcatgttacctagatcccttgtatgtgcagttcacaatagggttcacactcctatgagaatgtaatgccaccattgatctgactagagttggagctcaggtggtaatgcttgcttgatgccactcacctccagctgtgtggccggtgcctgacaggccaaagaccagtggcagtccgcagtcctgtggttggggacctctgatctaaagaactaactctatcaaagagaaactgagatcaagttaggtcagatcaatgaatacatatctaggtgtcagagctaagtcttctaaatccattttgcgtcctcagttctggcgggataatgatatttttgtgttttattccctatttaagatttgcagataatcagtttgcaaattagtgaagagtcaccataattttgtaggtacttgatatggtttggctctgtgtccccacacaattccatcttgaattgtcatccccacgtgttgagcgggggatggtgggagttgattgggtcatgggggcagtttccctcatgctcttctcgtgatagtgacggagttctgacaagatctgatagcttaaaaatggcagtttcccctgccctctctgtctcttctgccgccttgtaaagaaggtacctgcttctcccttgccttct

SEQ ID NO: 131321 - DNA, 787 bp, Homo sapiens
gcaacaaaaggtgacagcaagtatgggggaaacaaatatttcatttatttgttgtcgttctgtcttttgacttgaatttccagggatgaaaaatgcaattgtttgtgcctttttttttctttgaaggtagtaggcagtattctgagttagtactttaaagtacacacaggcaaattttatataatccattcagtaagtattgtgtgctggctgctgttgtaggcattgggaaaagggttatgaataagacagggacttgtgacttagattctagtgcaagggagataaacacaaaaggataattttagatatttattggtgctataaacaaaactttgcatgccaaataattaaaaagttaaaaaatataaaaaattttttaaaataaaacttgataggatggagtcttgaatcatatattttttatttcagccacttaagtatcttctctgaaaaccatggtgctagatgcaacaggataattaaatatgagtaaatgatcagtacttaattgttctcagacattatattggtgtttatatttgtagtagggatagagtttgcaaggcaaggataagtgaaatacatatgaataactgatataggactgaataaggtaaatgcatgaacaccgcgcccggccgtgttaaaccattcttagcttgcaaaggtggatgagctggattgggcatggaccatagtatactggtctcctggtacaaaggaaagggttaacataagggttgtaggataaaaaccagcagagactaaaacctcaggaaaatgc

SEQ ID NO: 131322 - DNA, 332 bp, Homo sapiens
caccaatctctgcctctgtcttcacatggcattctctgtgtccctgtgtctttacattgtgttttttataaggacaccagttggtggactgaggtccttccctaatccggtgtgacctaatcttgattacatctgcaaagaccctgtttccaaaacaggtgacattcacagcttccagggcttaggacatcaacacatctttgtcagggacacagttcaacccatagtatcttccttctaccaccaactttatagtgataccttctccatttagttggctgacctccacttagttgaattgaatccaaacagccgtttcatttggacagtta

SEQ ID NO: 131323 - DNA, 600 bp, Homo sapiens
ggaaatagttgattttatagtattccagtgctgtcacaatgtaatactgaaaactaaaagttttcattttgttcattacaattttttgatcctcaaatatggtacaatatagataaataattgttgtcatattttcgagagttcagaaaagacatatacattagcagtttgtgaagctatttttgtactgataaattttaataacagtttgattaccttgatagaaaatgggctcttttaaacactggttatatttagattcttctaatgtttagataacgtgttctcatggtgcttctagaatttatgtatttttggggatattgcatgtaccttctattctgttaaagagattgttttctgccacattatgtgtttccaacagataatcattaaaggatgtatgcagaaatattattttctagcatattagtcttgctttatatcagtataactacagttttatcacaatgtatgacatctgtatgggtttactccatctgtatttatcatcaaagttttagaaacactctaaaactatgactaggaatttttgtgcaatttcaaaaactaaatttcactggaaattttacatagcat

SEQ ID NO: 131324 - DNA, 321 bp, Homo sapiens
gaaaatctggggacagattctggagccctgaaagcattccatgttaaggaatcttaatggcaataaggaaccatagaaggtttcagataaaggaatgttttgatcaactgctgcttaggaggttaatcgggtccctggttgcaggatggatggggcagaggctgtgggcagagatgtcaggagtgacatgatgaaggtctgggcagggcagaggtatggagctgagtggggagcgttgatgggaaagcgggtcccagtagggaagtgactaacttggtgaccgaccagaggtacgggctgggaaaaaggcaaggggaaagg

SEQ ID NO: 131325 - DNA, 767 bp, Homo sapiens
gatgttgagcatcttttcatgtgcttcttggccatttgtatgtcttttgagaaatatctattcataaagttctttgcctgtttttgaattggatcatttgttttttttggtgttaagttttaggatttctctatgtattcttgatattaatccccttttagatacatgatttggtaacattttctttcattttacaggttgcctttttactgtgttagcagtggcccgtgctgcacaaaagttttaaattttgatgaagcccaacttgtctgtttccgcttgttgcttatgcctttgttgttgtattaaaaaaaaattgccaaatccatgtcatgaagcttttccccttatgttttcttctaaaagttgtatagttttagatcacaaattttggtgaattaattgattttaagtttggaatatcatgtaagggtccagcttttttttacgtgtagatgtccactttttccagcaccatttgttggaaagactgcctttgccccagtgaatggtcttgacactgttacagaaaatattttgactgtatatgcaagggtttgtttctgggctttctattccattccattggtctgtatgttcttatgctgataccagctcactgttttgattactgttgctttgtagtacattgtgaaatcaggaaatgtttttccgtcaactttcttctttctcaggatagttttggttattcagggtcccttgagattctgtatgaatttcaggagagatttttctttttctccaga

SEQ ID NO: 131326 - DNA, 795 bp, Homo sapiens
cacaaattcctcctaactgaaactttgtagcctttgaacagcacatgctcatttcatttccttacccccactcccatctgctggtaactaccgttgtattttctaaggcagtggcccccaacctttttggcactagggactggttttgtggaagacaaattttccatgggcaaggttggggtggggatggatttgggatgattcaagtgcattacatttattgtgcactttatttctattattattacactgtatcatataatgaaataattatacaactcatcataaggtagaatcagtgggaagccctgagtttgttttcctgcaactagatctaggtcccatctggaggtgatgggagacagtaacagatcatcaggcattagattctcataaggagggtgcaccctagatcccccacatgcacagttcacagtagggttctcatcctatgagaatctaatgcagctgctgatctgacagaggtggagctcagacggtaatgtgagcaatggggagcagttgtaaatacagatgaagcttccctcacttgccctctgctcacctgctgtgtggcctgtggctcgggactgctgtaagacatgatgtatttttggttatttgaaaggtggacatagtaatgaaaagaattttacatcaaacatttgttctacttaagtatattttaaaacaaaaatgtttgaggattttagatttttaaactttaggaatccacttttctattttgtttctttgagaaaataattcttgaaatatgagacttgtacaatttcc

SEQ ID NO: 131327 - DNA, 137 bp, Homo sapiens
catctctttctgttctctctctctctctcctgacctcttgatttttcttcttctctccttatttctgcctctttacctgcttgctcctgttatggtgtctgcctgcctgcctgtctgctcctccctgactggctggc

SEQ ID NO: 131328 - DNA, 316 bp, Homo sapiens
tgacctaagaaggcacacgaggaacatcagcaaaggactgacagaaaaagactcatatttttatataaggaacacggggggaaaaagaaaaaaaaattaaaaggaaaagatgaatagatgatatggccagaggtttaaagaaagagacaacgagataaaagcaggaagccccagcaacactgggctgcctccccaggcccttcccagcatttcctgccagcagggcccctgccccaagccaaaaaggaaccacgttcgcctcgtcagggctgttgcacgacagccgcacacacctaagaaacaaactccttctggg

SEQ ID NO: 131329 - DNA, 148 bp, Homo sapiens
tgtttttgaacacatttactttttcattgcaaaagtattcataatattttggaggctgaagatctttcagctgtttgtttacaagcatgtcagataaattatgaacctgactgtggttgatacaaagtaatcccttccttaaaatatt

SEQ ID NO: 131330 - DNA, 368 bp, Homo sapiens
agagcgcaagggagacagacagcagagcctggttccctgaaaagagccagtaaagatttattaggcaaagcgcaggaattgacatcagggataaggtatgcaggctgggctgggcaaagcatgtgaggggtagagtatgcaggttagcaaggctggttgtgatggttatcttgagtacgagttaactggtggtctgtctggctggcaaaaacaaggctggaaatcagttgttcagcattccttccagaggtgagacactcaacaaccttggttcgattttggatctcctaaggccagtttctggagttctttaagcacaaggcatggttaaacagtatgagagcacagaagaatggctattttctttg

SEQ ID NO: 131331 - DNA, 386 bp, Homo sapiens
aatttttattttaccactgcactgccttctaagtacctgatacaggttcagtgtattatataactttcagaagactaaaaaattactgcttttcaaactttctgcctggtaatgaatgacctgttaagtaatcaaagcagaggccagagaaaagaggaaaaagatatctgttaggtggttgtcatgcagatttatctggagggaactgtttccaggtcatgatcatcagtaagttctgaaatggcaaacttttttccttttaaataacacttttcttcatggaagacgacaaactcttatttttaaatatattttcacaattccagaattatatgaagtcaacatgaaactaaagcagtatttttcacagaggtgatttataatta

SEQ ID NO: 131332 - DNA, 319 bp, Homo sapiens
aataaggcatggtccctgaggatcaggacttttagttcagcgtgccagggttccctcaggacaggtaaaactctgctaataacaaggagagaaaataagcagttttgtttgcagcgtcaggaattcagacattttagtggtgatgggagacagcagtgctgcttctaagaagcttttggctctttatgcccaagtgagagaagggttgggaggaggttgtagctggtgaatagcttttttcttaattgtagtagtttatcttactttttcaaaactctctttgaattgctgctgggtggtttgtaggatagggaaggag

SEQ ID NO: 131333 - DNA, 196 bp, Homo sapiens
caatatatctaatgttttcactattattttatctgttatagtgatatgtgatctttgacatttctattatcattgcggggctggcacacaaactgcacctgcagaagaaaaagaacttaatacatatgtgtttcaaatgctccactcactggccattcccccatctctctcccactcctcatgcctccctattccc

SEQ ID NO: 131334 - DNA, 119 bp, Homo sapiens
ttcacgtgtcagccacttagcacagtgcctggtaggaaggttaatgtgccataaacatgaaataatagttgttattattaattattgacagggcccctccctcttgggctcatttttct

SEQ ID NO: 131335 - DNA, 305 bp, Homo sapiens
cgcctcggtcttcccctccagccgacccggctgtcgccgctgttgcctgccacacccgcgagggacttcgagaatggacctagatgccgtagtctccactccccctttaccccactcccgccctgaagctaaacctgctggagaggaaggcacctttagaacttacagcactctctagtacccccacactcctccagcacccaaaatggatatattgtcacatgtgcatatttggttgtgggaagtcgtggcttcccacgttttgttgagtggaatgagtcatggcatcttgccgccatgaagtc

SEQ ID NO: 131336 - DNA, 176 bp, Homo sapiens
caatccccggactaggggccggggtcggaccccagtggagtagcagggtctgggcgtggagagctcggcgccgcacggggtgggggcgcgcggaggacgcgcgcgcgggaagggcacccccttttgcggctctctcccttccccctccgcccccggacggccgctggggcgcgcgc

SEQ ID NO: 131337 - DNA, 393 bp, Homo sapiens
agtccctccacgggtgcactgaggacgttcctgcacatcgagggcaccctcagagctgctctttctgtcattgctattttgtttataccggggattggcaaactttttcttgaagggcccaagagtagacatttttggctttgcggccacagggtctctgttagcaactccctctgccacggtggctggaaagcagacatagaaaatagatgcaccagtgagcatagcctcgttccaataaaactttatttacaaaacagggagcagtggaccagcgagtccccaaggacaagggccaggttaccagagaatttccaggcacatccgttggaggcaggggagacaacaaaagccgaggaacgagccttccccagccgctccccaaaggcacgg

SEQ ID NO: 131338 - DNA, 397 bp, Homo sapiens
tgctgggattataggcatgagccaccatgcccagcctgttcccatcttcctccccctgccaacacacgaccactgatgcgggttctgtcactgtaggttagttttcattttccagaattttatgcagatggaatcatacagtgagtactcttttcggggggtggttggcttctttcactcggcacagttattttgagattcatccattttgttacatctattagttactcattcctttttattgctgagtagtattccattgtagagatacagtacactttgtttatccactcacctgtctgtggacattttggtttctagttttgggctgttaagctgggatgaacgtatgtgtatgtgtgcagctttgggatgaggtgtctaacatgagccacat

SEQ ID NO: 131339 - DNA, 151 bp, Homo sapiens
cagagtgagactccatcatctcaaaaaaaaaaaatgtatgtgtgtattagaatatgcttagaaaaaaggcttcaaagttacccaccaaatgtaaaaagctgttatttctaggtggttggataaaaaggacactttcacttcatttaatata

SEQ ID NO: 131340 - DNA, 210 bp, Homo sapiens
aaaggaaaatgagaatactgttaattatatgtgacctatgtaaaaatagacatttctaggaaaatattacttgtaaaaaccgagggagaaattaaaagtctgaatcttcccacaaagaaagcaacaagcccaagtgatttgccaataaataagtctctaccaaaattttgaggaatagattattccaatctgttgcaatcttttaaaatt

SEQ ID NO: 131341 - DNA, 150 bp, Homo sapiens
gtgaccgccctcttcccctttggcaggtcctgtctcccactttcaacaccctcacttaaggccaggcagaacccttcctactgtcaccagtcattaaaataaggttgcatccctcccttcctaacctcggctgggaagagtgcgagcttt

SEQ ID NO: 131342 - DNA, 469 bp, Homo sapiens
acaacagagaagcctgtgttttaggaagatttattttagcaatggaaggcaggatggatcagatggcagggagacctactccttatgaggtgcaaaaaggcctccaatcacaaaacacttctgcacctcaaagccacctgtcagggctctgtcctcatgctgaggtccttcaagagggctgagccatgtacactctgagagtgatgcagggagaacctaatacttccaggccttagagcatcaaactgctttcctctgtgctggtgatcatttgagcagctggggacatttaggagggtgtgagaagagaccaagaggagaaaaaattggacactgtaacatgtaactggagcctaagaaatcccttctcccatgtccccatagtgaatatttacaatttcctgatttcaaaaaacacctttaaaagctggctggaaagaactgtttactgggcatcttttaaatgaaa

SEQ ID NO: 131343 - DNA, 719 bp, Homo sapiens
tacatataagtggtttcaaaaatattagagaaacaatacgttaagaaatagattattaccagtccctatgaagttcccctgtgtgtccctcctcattcaaatttctctcctctctctaaaggtaactccaacttgaattttaccacttttctatgtatccccaaacaatattgtttaacttcacctttttcaaatattataccatttgaaatcattgtttgcaaccttctgtgaattgcattttttcattaaagatattgataaaatcaaaaaaaaaaaaaaaaaaaaaaaaaaaaaaaaaaaaaaaaaaaaaaaaaaaaaaaaaaaaaaaaaaaaaaaaaaaaaaaaaaaaaaaaaaaaaaaaaaaaaaaaagaagcatagagtggccgagaaacacaacaaaataagtaagaaacacgaacgacaagagcaaaaaacagtaacaaaacagacaaaaaacacaaaacgagtagaatcaacaaagaaaaaaaaaacgagaggtagagaacacgagagctataaaaaaaacataaagataacaaaaacagaaaaaaagataaaggcgaaacacaagaaagagggaaagagagggacaaataaaaaaagacccgcagtgaagagaaaaaagtgatcacaaaacgaaagagaaatgaaaagaagacgaaagaacaaagagagtaagagaaagacagagaagaagcagacaacgcaaaggaag

SEQ ID NO: 131344 - DNA, 442 bp, Homo sapiens
gttaaaatataccatgatttgatgaataagcaagcacaacacaaagcaaatttgaagtaaactgaaatttagtttgccttgggcaatgtttttacccattctgtatgctacttagacagctgttatctaatccttaatgctgatgaaaatttaagtcatggctgggtgtggtggctcacgcctgtaatcctagcactttgggaggctgaggtgggtggatcacctgaggtcaggagttcaagactagcctggccaacatggtaaaactccatctctactaaaaatacaaaaattcgcctggtgtggtggggtgtgcttgtggtcccagctacttgggaggctgaggcacaagaatcgcttgaaccaggaaggtggaggttgcagtgagccaagatcatgccgttgcacgccagcctaggcaacaaaagcaaaactccatctc

SEQ ID NO: 131345 - DNA, 384 bp, Homo sapiens
gtgtctgcagggcctgagtacctctcagacaaaatcactcatgctgcctcccactagtgtgtcatccgaagggccttttaagtctaaggagctttgtcctgagcaattggagacacttcgggaggtggactctcatctcaagtgtgcactggcacatgttttatcttcacggaaatcaaatggaagaatcaacaggagattcagggcaaaattaatcatcattaataatcctcgacacatacatgcaaatcctgaagggagcctgggagagcaagacttctataaccacaccactatcttaagaagtcacagagagtgaagaaagaaaatttccaattgtgggaataaatgtgcaccttctattaacttggagagacaataaag

SEQ ID NO: 131346 - DNA, 276 bp, Homo sapiens
gcaaaactccgtctcaaaaaaaaaaaaatcctcccaaaacttaacaacaaaataaaattcttaaaagaagcataggagggagtaaatcttcatgatcctggggaaagtaatagtttcttatatacattaccaaaagcacaaacaatttaaaaaatcaataaatcgatttactgaaaatgtaaaacctttgcatgtcaaaaacaccaacaccatcaagaaagctcaaagagactgagcacagcggctaatgcttgtaatcccaacactttgggaggc

SEQ ID NO: 131347 - DNA, 331 bp, Homo sapiens
gtagctgggattacaggcacccaccatcacacctggctaattttgtatgtttagtagagacggggtttcaccatgttggccaggctggtcttgaactcctgacttcaggtgatctgcccaccttggcttcccaaagtgctaggattacaggcatgagccaccgcacccagcccaaaggcatggaattataaaaccacatgatgcatttgggaaatcacaagcatttcagtctggctggagcaaagggttcaggattaaaattagaggggctgatgagtgtgggatcataatgggccatggatgctgaagtaccctaaactctctaagggat

SEQ ID NO: 131348 - DNA, 418 bp, Homo sapiens
caccctaattccatggggagggggccccaagtcctcaaggctccctgggcctccctggaggggactgtggatgaatagtgaggccctgaggtgactacttggcaatgttgcgtccggatgggcctagagtcaccctgctcttcctggggtctggggtctggtctttgcctcgcagtggagtcgtaactgagcctgacttggcctgcatggctcacagagtcctcagtttcattgtctgcctggtgagcgtgaggcacggctgcatcttttgacctgtgagtcccacagccctgcttgtaaaatgaccagaccttttctcagcctggtcacatgggactgggtttaacgcaggtcaccatcccacaggctctttctgaagctttgctgcctcaaataatgccatggatttgttcaggtc

SEQ ID NO: 131349 - DNA, 419 bp, Homo sapiens
aactctcctcactctactgaaactgctgcagccgaggttactagttatttaattaacaaaagcaatagattttgttttttttaattgcattatactctactattttttgacatttaaactattgacaatgtctttcttgaaaatgtgtcctttttgtttttttcaaaacacgactttctccttgatgtcctcctttttctctcattatttcacctttacattctctgctgacacctttcaccttaccaaaccttaattaaatgtgtatgcttcccagtctcccgttcttggctctcttcccttccctcttattgatcattattgtattctgtgatctcaccaattctcttggctttaacaataaccagatgactccagaaaactattcaaaattccggacctatggagactttgcaccc

SEQ ID NO: 131350 - DNA, 362 bp, Homo sapiens
gctccgcattggccaattcaatagattcacagaaaatatcaccaggacccacctccaacacgggggattacaactgaacatgaacgcagagccaaaccatatcactagctctgcctggagacattagagacaggttcccagcggggaggcttccttagcccagagatgaattaagaacagcattgactggatggtgctgtggtttcaatgtcccctcccgaactcacatcaaaacttcatcactagtgtggcagtgtcctttcagaggtagtgggatcatgaaagctctgccctcaggagtagattaatccattcatgaactaatgggttaagggatcagtgtggtataaagacgaactaag

SEQ ID NO: 131351 - DNA, 420 bp, Homo sapiens
cgcagtggctcatgactgtaatcccagcacttttagaggccgagacggtcagatcagttgaggccaggagttcaagaccagcctagctaacatggcagaaccccatctctaccaaaaatacaaaaattagccgggtgtggcggcacgcacctgtagacccagttaattaggaggctgaggcacgagaatcgcctgaacccaggagttggaggttgcagtgagctgagatcatgccactgcactccagcctgggagatacagtgagactgtcaaaacaaacaaacaaaaacaaacaaaaaccaactatttattttgggtttgaatcttgtttttcaaccttactctgaaactgtcctcaggagtcggttgccactcaactatcctataaacattttttcaattcatcgtctaatcctggac

SEQ ID NO: 131352 - DNA, 484 bp, Homo sapiens
tcccagccaccccaagggaagagagtactttcccatttataccaaagattccaccctcggcttcaagtgcacttaaacagaaacactacaggtgtctctccagaactctgcatgaattctcaccctctctaggtctacctgatcaatcagactctcccccagtatagtcctgctggctgctgaaagtggatgtagcagctgacaaagatacatcgttccaaactaaggtctcagcctagcttctccagggaccatgtggcctcctcgaaaggtggacacagcctttaagtggagtcttatcaatggatcacaccaaccagtgagattgtaagatgcaccatgtattgagacaccctctatggtgttcccacttcctgtcagaaggatgcccaccactcttgcttgtcttagaaaacagaagtaacagataggtcctcggttcaaagaacgggtggggataccagggggggccccgcgctcgact

SEQ ID NO: 131353 - DNA, 357 bp, Homo sapiens
caaatttctgattttttcagattttttcagaatatttgcataataccagttgatatctcaaatccaaaaatccaaaatatgaaatgttccaataagcatttcccttgaagatcttgtcagtgctcaaaaagtttccaattttggagcattttggacttggggatttgggatgctcaacctgtatgcagaaatatttgctgaatgaatgaatgagtgaataatacagactagctgggatctgaatcttaggacatgctgatgttcgtaaagtgcttgtgatacaagctgtgttcacaaggccttctatttctgctaagggtgctacccattggtttacgtaaagccttgctgaatggg

SEQ ID NO: 131354 - DNA, 470 bp, Homo sapiens
tccagtaaggtgtgccaaaaagtaagaaataaaaataaaaccaagcgtgtgcccccactaccggggcacatgtcatcaggacctcctgaggctgtcatgaactggtctcaggtgatccgcctgcctcggtctcccaaagtgttgggattgcaggtgtgggctgctgctcccagccaaaaataaactttctaaattaactgagacccttcttagatttttacggttcccaccacgaagcctggctaattttaaaattttctgtagagatgggggtgttggcgggttgggccgagggaagagggtggtctcactatgttcctaggcctggttgtgaactcataggctcaagcaatccccccatctctgccatgcagccaatacaagatttttttaaagttcctcggagaggtgaggaggctgaggtgcgtgttcaccgactcctgtccctcttgggttgaaggttgctcgtg

SEQ ID NO: 131355 - DNA, 335 bp, Homo sapiens
cgtaggctattggaaggacttttgcttttactctgagtaaaaagaatacccttaaggagatattttttaaagggatataaagagaagaatgtgtcagtattacagaaaaggagattttaccctaatattatggcaggcccatcatagcatttctgaaaactctcagatgatttgttgcttttagctactcagctgaccaacattcatattctttttccattttaaaacccagcttaatactttggaatgtaaaatgcaccagtaagatacaagttgatttgtatttcttttgtttttttttttgaaacagagtcttgctctgtcgcccaggctgg

SEQ ID NO: 131356 - DNA, 644 bp, Homo sapiens
caatatcttccacactaaatacagttttgaaccatgaaattgagaaattagaaaaatcttagatctcagtaattaacacaagcgctcctagcatttgtatgtatttcctttgactttttttaatgccttgtgggatttttacataatcttagcttatatataattttgtatactttttaaaaattattaacattttcccaccttgaaacttagcctagtaaccattatcttgttacgtgcatagcaaattgtaatgagattttgggctaataataggattttacaacagaacttattataagccacagattaaaactggttatattattttctgtttcagtaatcttttgtcacaaatgacctcaaaactaaattatttacaacatcaaaaaaaaaaaaaaaaaaagaaaaaaaaaaagaaaaaagagaagaaaagaagaaaagaaagaagagagagagagaaagagaaagagagaaaaaaaaagaaagaagaagagagaagaagaaaacaagacaagaaacagataacaacacaagagaagagagagaaagagaaaaagaagagaagaccagagaagaatgaaagaaataagaaggagagggaagaagacagaaggggaaggagaatcatctaaagaaaaaga

SEQ ID NO: 131357 - DNA, 370 bp, Homo sapiens
accttattctactctctactttgctcaaaacatgccagccatatgggccttcttaaagtgctcttatatatgctgggagacagttctctattggtctctccattctgcaagctgggagcagagacactaaactgcctttgttctaggctatctttccaaagccgtttcagcctcataagacaaagcagcacaggacaggcaggtttactgccagttataaggctgaggtggcctgaacatggagttcctctcctctaacgtaacacactcaatgtacaaggcttcaccttaccctcttcttagctgccccataggaagtggggctaagggaaccaaaagaaatgctgatactctggctacgctattgcta

SEQ ID NO: 131358 - DNA, 337 bp, Homo sapiens
taattctgctggtgataactatttagtaaaatcccagaaagcaaggactgaaagcaaggtatttaatccacattttatagtgcagagccaataagatcccttgaggaagagacaaagaagaggaggggaaagaaggcttcaaagaagtagctttgctgcctgcagacacagctaactcctttcatgaacaagtctgtttctagagaaaatgtgcactgaacatttgtacccaaggcaagatggagttgaatagctccacgcaccctgactcttatcttaccaggaaaggtctcttctcctacccaaccttctaggctcagctttgcccagttcaaag

SEQ ID NO: 131359 - DNA, 440 bp, Homo sapiens
ctcactctgtccaccgtgttacagaaccaaaccagcagctcaaggttacccgaggtttacagacacataatttttcatctgcttttattgcctctctttctggtctgtttaccaggccctgaattttgagctggatactgattttaagtagttgtccaggctaccgactcaacaaagtctcaccagaaacaaaacttcttcctgagcaagctcttaaacgtcaaagagctttgagcaaagcctcaatcactgtcaatgccaaaccccaactgaataattctgcaaaccacagtaacagtaaggcactcgtatgtgcaaaactgatttctacacttaggagggaaagagacgatttctatataagagcagatgggctctgaatataagactaagaaagacatgaaaggcagcagtgagccactgaaggtttgggagcagag

SEQ ID NO: 131360 - DNA, 578 bp, Homo sapiens
tcccctagacacagagggcccataggggtccttggtgagcatgcactggcttccttagccacaaagctgtcctgggacctacgcctggttgagggtccttgaggcagcagccctggccttggctgccctgggaggcatcattttaatgaaagcagctatttctgcaacagcgaaaagaccatcagtgggattgcaggtcacctttgcagctctgggctgtccatccccagatgcaacatgatgtgggaggccggaggctctggcaggtccacgctgggaggactggcctcttctctcaccctgatggaacccctgcaggcctggccaccagactcagggcccacgacctcccagctttcattccagctccattcccaaggaagcctgggaagttgggggtgggctgggggaagtggtatgtcccagcggcctgtgcctgccaccggagctcttcaccatccaccaagaggcgggggcccctggggggagagtgggggacacctgaccctcctttgctgggagcaagaacttcatttgggagaccagcgatgtgtttctgcagctccaggacgatgata

SEQ ID NO: 131361 - DNA, 559 bp, Homo sapiens
ttttgaactcctgacttcaggtgatccacccacctcggcctcccaaagtgctgggattacaggcatgagccactgtgcctggccttttatttttatttttatttatttttttagacagagtctcactccatcacccaggctggggggcagtggcacgatcttggctcactgcaacctccgcctctcaggctcaagtgattctcatgcctcagcctcccaagtagctggcattacaggcgcccaccaccaaggctaattttttttctttttgtatttttagtagagacggggttccgccatgttggccaggctggtctcaaactcccaacctcaagagatccacccacctcagcctcccaaactactgggattacaggcgtgagccaccacgcctggccctttccccattctttcttcattttcctgaaactattttgtgaaatgctgccatcttgggcccctttcctcccttctctatcccacttcccaatccccccattagctttttaggtctgtacagcacccaggcatcagttggctctgaaagctatagcaatgt

SEQ ID NO: 131362 - DNA, 314 bp, Homo sapiens
atataagggcactagaccatttatgaaaggcttgaaaaaggagagcccaaaaacatgctctgcaattgccagccaaacacactttgagggattacaagaatacagaagagtctcagtggagaaaatcatcaatatgctgcagcagtttccctcacatatcctttccattctacctataccattgcccaccttgtggagggaacaagaggggaagagagtagaatctttttctctggcctcagtcacatgagaagaggcacttcctggggactattcaaagtagcccttcggaatttaggttttacagtaaaatg

SEQ ID NO: 131363 - DNA, 118 bp, Homo sapiens
atttatttgttttcttaaatattgtctctggaatcccaagttaactcttgtagctcactttagctagagttagtctagtctgccagttaatgtacactttacagtgttctgtgttttc

SEQ ID NO: 131364 - DNA, 253 bp, Homo sapiens
acgtatgtttgggggtagatggtttagagttctattaggagagagatgaaggtattctaggtgagtgttgagtggctgactgctgttagagggcaaaatgggataatcttttacaaaaaacttgaggtacatgatttagtactttgattatcctagtgattgttacactgaatcagaaaatgcatttaccttaaaacctttattgtaactaggtgaaagtaaatgtggtgtaacttttggtttgactataatg

SEQ ID NO: 131365 - DNA, 389 bp, Homo sapiens
aggtatcctgcaaagtagccttcagggcatggatgattgctaactggagtgttgtcttggtggcaggtgcatcaaacagggtggcccacttaggcctttcaaatccatcagtccttgctcctcttgatagttgtggtaaatgatatagtcagatgtcttaagtgagtctctatgaacatttaactcctggaagctgacgtgtttgggcacaggtgttgttgttgtttttccagttggctttctctgaaggaggagatatgggaaaaagcatgactggttggctgtgatgatagtgttgaagaacaaaacttactcccctctgtgcttacagtatcggctgatactgtgatatttccttgagaagaaatgtctggtacatcttttaagta

SEQ ID NO: 131366 - DNA, 401 bp, Homo sapiens
ttttaaaaggagtatcttaagagactaattttatagaaggcactttttaaaaaaaaaaagaaatacaggtatatcaggtgtgcaagctgtccttccatatccactcttctcttcttatatgaatcagaacctgttatttttagcttggtgcatggccttccaaatgaaggctatgtttctcagtaccttcatgagtgaattctggtcagtgtcatgtggacagaaatgaggtgcatcacttccagaaggtgcctgaaaggcaaggagcacattgcccctttctccaccctgctacctggaatgtggatgtagcatcgtatcacagaggggatgctggagccattggtcaacgtgggtctaggtccctggatgaccctggagatttgggccagtattctagc

SEQ ID NO: 131367 - DNA, 396 bp, Homo sapiens
cagcctcccaagtagctgggactacaggcgcacaccaccacgcccagctaattttttgtatttttggtagagacagggtatcaccatgttggccagactggtctggaactcctgaccttatgatccacccaccttggcctcccaaagtgctgggattacaggcatgagccactgcgcccagccggtttttcgagagcttttaagagctcagagcactttgcagaggtggctcttgatcctctgagccacctgtctctcttcaccacctttaggaagtagatcgtatgacccaaaaacaccaggtcattcacttagtctcagacattggtacattcctttatccatctacccacatgttcagtgagcagtcacttgtggcgcgctcgatgtgccaag

SEQ ID NO: 131368 - DNA, 304 bp, Homo sapiens
tgctggggttacaggcatgagccaccgcacccggcctgcttttttgttttattcgatgcttcgttttgttttttttcctgctccagactagtttcttctctctcagcacctgttgatgtggggtccctgaaaccttaaggacaagactgagatcatatgtgcaaatcaccaatatggtttggccttgggtggtttgtccaactgcctccattttagtttttgccaagatgtttaagaatatcctaagcaacggcacctaagggaaatggtgaattcaaagatattgaagctattttgaagccca

SEQ ID NO: 131369 - DNA, 246 bp, Homo sapiens
tttaagttgtgattgtgtctgatgaagaggaatgcatacttacatatttgtgtaaggaagatttccttattgtcatttccttccatcgcttggtccataaaagcaaagaggaaggaagggaggtctgtggtcatacacactgtcacccatgctaagagaaaaggtagttgagagctctgcctgcccacgtgcccatctgctgggtcatccttgtcctatcaggagagaaagagcacttcctttcct

SEQ ID NO: 131370 - DNA, 814 bp, Homo sapiens
gtgctcgcttcggcagcacatatactaaaattggaacgatacagagaagattagcatggcccctgcgcaaggatgacacgcaaattcgtgaagcgttccatatttttgaagcaggaaaattgcttgaacctgggaggcggaggttgcagtgagccaagattgtgccacagcactccggcctgggtgacagagcaagactccatctcaaaaaaaaataaaaaataaaaaaataagagcttaattataaaatatgattaattatgtgcatttatctatgattcccacatatttttaaaagatttaaggaagcataatcaataacttctttccagtgcaaataatagaaaagcaagttgtcttgaaatttgtcttttgctaaagatgtttaccaactttgctcccttttatgtgaacctctaccttacttcccataaaccctaggctcaaaaagtgttacagcatactagttggaaaactgattcattctgctaattattttttatttctaaaaaatctcttaaaagagaagccataaccataaaaactctaggtttctaaatttttacatctttattcaggcactatcaatgtaaattaatattgattttttacttacttttttgttcaaagtaaaaatataaaggagttctgcagcttctgtattttttaaaactaggtgaatattcagtttcaggaatatttaaaaacttacaagacctagcatttctttcattttatatatattgagcttaaatttgaattctctatgttcccttcaatgcccttaaattttcacaaatgaaaagctagtgtg

SEQ ID NO: 131371 - DNA, 152 bp, Homo sapiens
gaataaaaatactgctctccccatgccccactggctgtaggaaaattgagggaaatggttgttattttctctttgtaggttggattactgaacctcggagtgagatgacctgtgagttttatttatttttatttatttcattttatttattt

SEQ ID NO: 131372 - DNA, 807 bp, Homo sapiens
acttatgattgctccaatataaaaccacatttacacctcagtggccactgaaccattcagcacagcttccttaactgtcagctgttagaagctagcagtgtaagcactgttgactatttttttcaggctctgaatagctgtcaggatctcagtaggagttggaggagttagctcaactttggcttaatatctaaatgtggccaatctaggcttcaaatacgtcacagcagtgttcaccagcgctggagcctcctcctccaggttccagacaaatcagaccatggttttaggatgaaaaatccatggccccaaatggctagctaattatacttttaaaattcctcctatctttattgctaccttcatctctttcatatttccatttctttactgttatactttctgtactaatttacctttgtaagtcatctcagaattttttaaatttaatttttttaaaatttttcatatggcatgaaaaaattacttgtagacatctataacataatggatctcttattggtaatttgtttgggaactgacttggtactaactttgatttctctcactggattcctagactctccaggatgttagaactggctttggcctgtggaacacctcgtcttgtgcattctatttcctgaataaagggtcttctttgttttccctgcaacgagtggtcttttgctcctcatttctgtggtcctttacccattctcccaacccaatggcatttcaaaactatttaaaatttaaaaaaattattaatataattgcttacattattactctgtgatttaataa

SEQ ID NO: 131373 - DNA, 140 bp, Homo sapiens
agggggttgggtgagttcatttctttcatttttaagaaaaaaacaaacaaaaacatggtgtggcttggcacaaaaacacaccttacgaataaaaatgggttgctagaccctcatggctaagccatcccaccattttcttg

SEQ ID NO: 131374 - DNA, 720 bp, Homo sapiens
cagaatatcctgagctcatttgtaccatgataatgaacagcagggcactgaatctttttagttttattggcattgtatacagtaagttattaaatttcatctctgtaatatacctgcagtaaaataacaaaatattggtgcacttaaagaacatgtgtgtgtggaacaatgccctccccatcatttcagccccctgcaaacagctgcttacagatttcaagatccattgtatgtattccctcgagcccacctctaataatcgagacacatctgccattgcagtattataggcatatgtagttttattgaaaactatacctgtaaaaaaattaaataactcctgcctcaattaaattggcaagctaccttttgcaaagatcatattgcagacctcttgagacccaagtgagttcattttattcttacattacaaatcactaaatatgttatttttatttagctgagtagctagctttcctcgtactttgatggtaagttactttcatccattctcacttttgttttccttctcccctcatctttacatattaaaaaaattatgcaaattgcatgaagcaaacattttgagaatctgaacagaataaaatcaaagggaaaggaccctaacatgcagctttaactctgaagtgattattaaataaatacatgcaaaggttacaaaattggggtcaaatttataactcacgttgtggcttgtga

SEQ ID NO: 131375 - DNA, 847 bp, Homo sapiens
tttttttctgcccaatttcattattggggtgtgaatccttgttgatgtttactgtctatttattttgaagatactaatcctatatttttgtaagtcaatgtcctccggccaggactacaagaaaccaactttaattaagcaagttggttttattactcagtcatgagttatggagaatttcagggcatctcagcacgaggatgttaggaagatcctatacagattttgggcttttatttggggattttggaaagggttgaaggaagcaggctttgctccagactgaatgctgcaggaagatactcagtacagtgagtatattttatatatcttttgtatagggaggacaggtgagagagatactaaagctgtaattggtcaagaagtagcagctatagtactggtataaagatagatacatcgacctgtctctattctggaacagaacaaacccttgcgtgtggagtcctaattagggaaaaggagtcaggctggctggacgaagggaagcaaaaggagaaagcagacaagccataagtctgcctttcttcgtggtccaggacacatagccctgctgtgcaaataactcacaatctgcctgtgcccagccatcaccagaccctcagctgatagaaaaatggaagttagttcactgcaaccctggcattattagtactgcacaaagccctcttccacccacaacataagcaccattctacaaaatccccagcaagcctttgtttcctagcagtcagcttctctcttgctgacctgcctgttgcacccttgcaatgtattttcatactttatctaataaacctgcctttctttacctaacaaaaaaaat

SEQ ID NO: 131376 - DNA, 423 bp, Homo sapiens
ctgaaatctttttcttttcaaattatgaaggcactgcttcactgccttctagctttcagctctgctgttaagaagttcaatgctattctaattcttaatctgtcttatattaactgcctttttccctctgcaaacttcatccttggtgttctgaaattattcactgttgtggcctgaagtggcttccttactattcctctattaattacagtgggtacttagtggaccctttcagtcaagaaactgaagtcctagctctggaaaatagacttgtatttttggtatttttgttattggataatttcctacattctgttgtctctattctctctttctagaatttctataagctagatgttggttgtcctgaaaggctcaattcacttattcattcaacaaatacttactgggtactcactatgt

SEQ ID NO: 131377 - DNA, 145 bp, Homo sapiens
tctcaaaataaatagttttttaaaagtaaaaaaacttcaccatttactaaacagtaaagaattataattgcatactataaactttgaaaagtagcagccaaaaataggaacacagattgtagtcaagaaccgagattcctggctg

SEQ ID NO: 131378 - DNA, 532 bp, Homo sapiens
cctctgcctcccgggttcaggtgattcttgtgcctcagcctcctgagtagctgggattataggtgtgcgccaccacacctagctaatttttgtatttttagcagagacagcgtttcaccatgttggccagggtggtttcgaactactgaccgcaagtgatccaccctccttggcctcccaaagtgctgggattataggcatgagctaccgggcctgtccctgccgcctcttataaggaccctgtggttacactgggctcaccagatcattcaggggcaccttccgtctcaagatcctcagcttaagcaactctaagggtccctttgccatgtcaggccacatagtcacaggttgaagggagtaggatgattagggccattattgtgcctatcatagcaggggagagtgaggctggtgggcaggcaatctaaggcctggaggtgagtgggtgcttggctttggaggggtgctgggcgcctaagtacctggaggaggagctcctggaggggagggtgagacagcagagggcctt

SEQ ID NO: 131379 - DNA, 313 bp, Homo sapiens
ctttaatctgcagctccacagtttgaacaaaaacagactgaaggctgggcgtggtggctcatgcctgtaatcccaacactttgggaggcctaggcgggcagatcacgaggtcaggagatcgagaccatcctggctaacatggtgaaacctcatctctactaaaaatacaaaaaaatagctgggcgtggtggcgggcacctgtagtcccagctactcaggaggctgaggcaggcgaatggcgtgaacccgggaggcggagcttgcagtgagccgagattgcgccactgcactccatcctgggcaacagagtctc

SEQ ID NO: 131380 - DNA, 236 bp, Homo sapiens
gatgtacagagaccaagggaagcaaatgattaatcttctagaggtatggaggagtttggtataaataaatatttcactgaaaatggtatatttgagctgagacttgaaggatgagttagaatccactagatcacaaaggggatacttggtcaggggtagttggtaagcagcacagggagggaagtgcagggagaagtaaccttgtctgcgagaaaacaggagtagaaaggccccgg

SEQ ID NO: 131381 - DNA, 297 bp, Homo sapiens
tgggggttgcaggaccggttgagtcagttcctttgtatgagtcacatacaaagggtggcatcagttggttcaccagaatgcaaaagtctgaaaaatatctcaaagaccaatcttaggttttacattagtaatgttatctattaggggtaattgaagaagttatatatcttgtgacctccaggtacatgactcctgatcagtaagcaaactagggaacaatagctggttattgcttaactattcatagatcttagcaaattcaagactctaccataattctaaccttgtggcctttta

SEQ ID NO: 131382 - DNA, 694 bp, Homo sapiens
atctatcgttttgatattcttctgtttatctcatttctttggtaactgttttatgtctttctgctgctgtctgtgttaatatgatatttttaaaattccattttagtttatccactggcttttcagttacacatttttgcatttttaagtggttgaggacatgcattcttagagcatgatatcacaaccaagaaatgaaaattagttcttgtagaggcaataccatgccagatactgtagtggtttgtagtcttccaaagagctacagtacataagtaaatattcagtatatttgtgttattaaaatttcacatggagaggaaaataggaaacaaagcttactatggggagtataatgaaaaagtgttctaggcttatagtatacatccttaaattagatagtgtacatagatgtactattctgccactccatgtaaaatcagagatatttttataagtaagatctacttgaaatatagtattatttcaacagtgcaacattaataccatagaagtatagatttgatagggattttaaaaatttcttcagccatcatctattaagtacctcttattttcaaagaggagcagtaaaacaaaatactctatcataaaagcacccatttcttgtgattcattgtgtcagctaagaagttttgtagtaaatttttaaaagttcagaaaattaaaggat

SEQ ID NO: 131383 - DNA, 408 bp, Homo sapiens
tgataatacataaaatgttcagtctaatgcccactatattgtatgctcttaaaacatggaactacttttattatcattgatctaagatgaacatagcaaacacacaagagaatatataatgaaaattgggataagtgctatgcagaaagtggggtggtcattacccttaaattgctgggagagctgaggatcgcgaggagggtcggggaatgctccgaagaaggatctttggagcctctgagatgtgaagattggaggaatgtagtcagttgaagggtgaagggaagaatcttccaggtggggggaacagcattaatgaaggctctaggcctggaagatcttgacatacaagaagcttgggaaaggtcatgtagctagagtatggggagtgagagaagggtaagtggc

SEQ ID NO: 131384 - DNA, 419 bp, Homo sapiens
cggggcagaggacggcagcagctcaaaggagggcacctctgtctgagtttcctctttggaaaaagaagttactgttcaacttaccaaaatgccttacacattccttacaaataaaccaaccaacctacacagcgttatccaggcccaacttccggtactccgagagaagccatgagagacaaatctagcctcagcccggtttcccagctccgcctggcctggtgctgcgtcccagggtttgggacagtctcgtctggtggtgtcccttggttggacagtcagtctttggccttgaggcagcgtctgctagtgagggagtggcatcctgatcacacgccttacgctggaaaggcaggcctccagctgcccccttttcctttaagtctccttctgtaactccggaacattcctcccagctc

SEQ ID NO: 131385 - DNA, 440 bp, Homo sapiens
ctctgcctctttgtctttactgagaattagtcctaggtaggtaaatagcaccaggcctagggcaagactagtttttcttaaaggcgatgcattcactttgtaatgaaataatgcaagtaattgcaaagaatgtatcactgtaattaagagccatgtcaacaaataaaaccctttgggagactgattgtttatttcagttgttatagccaatcagattggagagaactttgtaacttcttcaataattaatctgagttattccatcagtggtcataaattaacttatggaagaccaagtctacaaaactggcatatttattcatgattaaatagatttttggtgccatttgatggtataaattttacctagtaaaagacagtcactgattcctagtcatctttgagggaaaaaaaagatgttgataaagtgatacagatgg

SEQ ID NO: 131386 - DNA, 379 bp, Homo sapiens
agagagcctctcagactaggccaactgctcataatcctgccgaccctctttggcccctatgatgttgtaaaggcaatgtggcactcatatcagcagcacacatactataactggcacaacacagaggtcagcatgggccccatgcacagatgacacacaaattcatgaagtgttctacatacatatatgtataatttttttttttgaaacagggtcttgccctgtcgcccaggctggagtgcagtggtgctatcatggctcactgcagcctcaacctcccgagctcaagtgatcctcctacctcagcctcccaagcagctggaactacaggtgtgcacccaccacacctggcgaattttttattttttgtagcgatgag

SEQ ID NO: 131387 - DNA, 432 bp, Homo sapiens
ggcaactaacagctattaaactagttaacatttataaaccattaactctcacctacaccccttgtaaactattaactctcagctacaccccttggtaaatgttaacagttaaagttctctttcattcattaaaatgcaaatagcttaacatgtctgtgacaatacacactaataatttcccactttttattaaatgtttaatagcactgatacccaatctgaaaaaacttcccatattagagagatagactgtggtgctaatattttcctagcaaacgacagaatttttaaattggaacagactttagagatcatttcatccagcttctcattttaaagattaggagatagaaccagagcctctgaaatgtccaaagccacagagtttattagtaaatataaaatcagaacacccagggtcgggtgcggtag

SEQ ID NO: 131388 - DNA, 486 bp, Homo sapiens
gcacttgtgacgcaatttagtgagcaagttaagaaacgtatcctgtttgaggtagcatcttataatgtgaaaccatgaattgcgctcagcacctggtatactgcttaggtagtaggtacagtgtaagtggtgatcatatgaataactatgcatagatgaatacatgaatgaatgaatgaatgaggaagacgggcatcaacactcacacaggatactgatattaaatcctaaggcatttggctttggattttgaaaacagtaaatgctcaataaacaacaactgtgttgacttgaattaaaagatgtgctttccatgtgtccagactccaagagaaggcagagtgggctgaaaataaatcacagagctatactagaagacactctacttaggagatctagttcaaaaacttgctgtggtgacttgggaaagtcaactttcttctgtggattttagttttcttttctgtaaacagactaacctcactt

SEQ ID NO: 131389 - DNA, 364 bp, Homo sapiens
cagactttgctagatcaccataaatctccaacagatcccagtcactggaaagagctggctacttgcccagcagagtgcaaaaacaaacaaaaaaaacttgcaggccagcatatctacctataggtggccaatgggtactgccagctcagatgtcaccctgaagtttgtatctgttttctcagacacaaccaatatgaattccccaacaatagttctttattgggctgtaccaacattctttactacacttgagaagtccacaatcagtacaagaaaaaaggtcaggtcctcatttcacaacaaaataggcctcccacctgaaatgctaggctgagaatcagaaatgtgccattagatcagataa

SEQ ID NO: 131390 - DNA, 427 bp, Homo sapiens
agtgggccaccctgatcccagcccccaggtctggagtcaccatttccagttcttcaaacctgcctgttgccgacatgctgggtgaccttgggcaagtcacttcgcctctctgtgcctcgaggcctcaccaatagaatgaccctcactggaagctgataatcaagtccgcccacccacttggacattccaggactgttcaatttcagtgccatatagacttacataagcagggctgcatttctttaatttgagtaaaatgcaaatgctcctggtggatgagtctgcacttctcaaccccaagcctgctcaggtgcatcacttgggcgggagggagaggtcccacccagacccacggacctctgctcttggggtggacaggccctggagattggcattttgcagagcctcctgaggaggggagttcaga

SEQ ID NO: 131391 - DNA, 519 bp, Homo sapiens
gctctgtcacccaggctcaagtacagtggtgtgatctcagctcactgcaacctccaccttccaggttcaagcgattcttctgccacagcttcctaagtaactgggactacaggtgtgcaccaccacacccagctaatttttgtgtttttagtacagacggggtttcaccatgttggccaggctggtcttgaacttccgacctcgagtgatctgcccgccttgacctcccaaagtgctgggattacaggcgtgagccaccatgcccggccaactttatggtaataaattaagacagtgaaagcgtgacttactcaagggctacatatataaaggtgacagatctgtatgtatctacttaaattcatgcccaacacagcacatgttgggcaagaatttgtgagctagctcagcttacaaatggcttagactaggggcatgtggcaaggggtatggggttctacttacagtttagggtcacaaaatagggcgatccaactctcccacttcacacaaagcctg

SEQ ID NO: 131392 - DNA, 342 bp, Homo sapiens
tttcactgcatatatcctaaagagaaacttgattatgtagtaagatttatttatgtacaagaacagtcatttcagccctgtttgtaatagtgcaaaactagagacaaactaagtgctcattgataaggaagtagctaaataagttcagtgcatattatggagtgccattcaggaatctaaaatatttatatggaagattctcatgtatgtaacacttaaaaaattgaaatattgatatttatattttgagagagagagacagagagatgcaaaagcctaaatatttatggcagcgtcagactattaacagtggtattctgcagatgggattcagagttagga

SEQ ID NO: 131393 - DNA, 742 bp, Homo sapiens
gtacatagtggagaatctgtaaatatttgttatataaatgaatattccccttttaatttaggttacttcccaaacttctgtaaggaatataaaattgacttatatttgaacatacttaaatcaaaacctaggtgtcatgtttgatccctcttttttccttaccctcatggcagaaaagattgctgttccatagcaaaaacagcattccatttacatccagtcatctccatcttctccaccaccatactagttgaaaccaccatcatcacatggattcctacaatagcatcctagctgttctctctgcttccacttccctcgttcttaacaataggttcttcacattgtgggataatctatttaaagcataactcacattatgacaatttgctgcttaaattcttccagggactccctttgcacttagaataactcataaccgtgtcttagaggaggtcctaaatattctggcctcaagcttcctctttgaatagttattttctgtcactgagccacgtcttgacttctgcagctctttcctcagattaattagagtgccaagagtaggagtttagcaccttcaagtcaccagatacccccaccaaaggcacctcaaataaatatataaactggggttatttttaaatgtgattgttgtgtaaatacacctttggattaagtcccttacttttcttccacctagattgttaggccacctctaagtccctttatagaaattctg

SEQ ID NO: 131394 - DNA, 815 bp, Homo sapiens
cattaataccatgacatcttgcttatgaatattccattgctctgtagttcaaatctgttagctttgtgaaagttcatcactgtgatgtctgtattcttttttcctttttattctgtttaacagaataaaagaattctttagattccctgtaaaaaaaaaaaaaaaaaaaaaaaaagagacccggagagaaaagcgcgggttctgcgccggggccaagttggtcaccgccatttaaagggcgccgggtttttacctttgacccacattttttaccgggctaattaccagcgttaaccagggagtggctttgtggtgttaccccttattcctctttttggggaggtctttaacgagacgggtccccagtgaggggtggagttctcatttaacaacccaaagagagaagtgccccttggaaccagagaaaccccggggggtcccaaaggggtgcgtaacgggagcgaccagcggatttccaagcgccagagtttttttccttttataataggttttccccggaatttgtgttttctggactgcgcgccaacatctatacaccggggggagattcgctaattcatcactctttcgtcgtcggacacacggccgtggggttcttccctggaggtttcccacgcttccttgttgtgtgacacggacccccttggtgtttctccccttgtggctattcggacactcggtggttatggtcttccccctgttaatttctccggggagacggccacgtgttcagcctgcggcttttggtccgcttggagcgacggctgtcttcccaacagggtttcccgaacccg

SEQ ID NO: 131395 - DNA, 480 bp, Homo sapiens
ccagctctgctgggctagggtgaagagggtgaaggaaggcttcctgggggaatgtttgtggctgagatttcacttgtagctgaccaactatttcaggtcacatagcactgaaaatcaaatgggtataactgctaatattctttcatttggtttagaagaataattctactgtaggtcagcagcatgttttgttctgtcccagaaatttttaaattaaactacatctcgcatacatatagccccttagagttcacaaacttaccgaggagtgaggaaactgaaacttacagagatgaaataactagccctaggtcatgttgccagtaagtggtggggccaaaagtggaatctgggtcttttgagcctagcgcaatcacaaaacaccaaaacgaatgtcatgggctctgccagcaacatggtgagctttggttatatatggtggttgttgtttaaagtaccaagtgacctgggatctacttt

SEQ ID NO: 131396 - DNA, 707 bp, Homo sapiens
gagtgacagtagctgggagggagggctcagtgttcttagatttagcattctttcctcccatcctttcaccccaattatttccattcttgctatagaagacttcactgggggaactggataatagcaggacaggcactaaggctggcagagttagtgggaatggagacgatcagggagcagaggtcttcagcaaaaaaggaaagggaaattgtagagctggaatggggaaggagtcaaaccttagtaattggatgaaggaccaagtttgtttactctttgcatttgcacctgggtgttaatcaccaagtatttgtgaatggtgcagaagatgttctgaagacccatagattaaattggaaatttaattctgatttgttagactgaatagctttaaactggttttatggagaagttgaagaatttgtctatagagaatctctaatatttaagtattgccagttaaaatatacattttaaaaattggttacttgaacttaagtgaataattccgtgactgaatactagctattttgtttgaggctgtgtctgtttgaggggagcagagggggacagaaagtgagttaatgaaatcaagaacattctcaaacagttgaggggttgggatggaaagggagctagtaactacctataaccactagaggcctctcttaggccaagtttcatggttaataccactaggtttccac

SEQ ID NO: 131397 - DNA, 167 bp, Homo sapiens
tagaggatcccgaccgtacgtatgtaacataaacagtatctttcatgaaaaacaactactttctaaaacaaaatgtaaggtgagatgagcagcactgttttacatttttggaaatctctttttttttttttttttgagacggagtctcgccctgtcgcccaggctgg

SEQ ID NO: 131398 - DNA, 199 bp, Homo sapiens
caggagggagtctaagacttcagacacagcacagatacgatcctgggcaagggtcattcagtgttcttaagaaaattctaaatcctagggtgtgatggttaatattaggtgtcaacttgataggattaaaggatgcctagatagctaagtattgtttctgggtgtgtctgtgagggtgttaccagaggagattaacatt

SEQ ID NO: 131399 - DNA, 668 bp, Homo sapiens
taaatacagatttgatcatcctggtccactttcccaataagatagttaacaaaggtttacctaatgtgttatttatggaaaaccaatttacacagagtttggaatagggaaaaaaagtttctaagtaatgatttcttttcctgtaacccattgtcccagattaagtctgatagtcttatgatcaatacctcctaaattccagattattgtgtgtgaatctttgacctaaacatttacatatggctgatagtactatttgagtcttgcacgtgatggaaactcatgcttgttgaatttgaattgtcagttctcctaggacataggtttgtccatatgattttacacagttatttagaaaactagcatacctcagaaatattgcaggtttggttccagaccattgcaataaagcaagcctcacaatttttattttttggtttcccagtgcatataaaatttgtgtttacattataatttagtctgttaagtatgcaataacattatgtctaaaaaacaatgtacataccttaattttaaaaaatactttattgctaaaaagtatctgagccttcagcaagatacagtctttttgctggtggacagtctttcctcagtgttggtggctgctgactgatcaggttggtggttactgtaaattggagtgactg

SEQ ID NO: 131400 - DNA, 800 bp, Homo sapiens
cactatagttcttgtgaaccaattcactaatttagggaatctaatatttcgaagggaaaaaaatagagacagatcctctttgtggtggttgaatttttaagttaacggagaagatttccatatgatcagagttgatgtggaattatggtgacagaaatgttcgacttagagggataataagtcagtttaatggctcccaaattatctctataatttagtcagcttttgagacaagaccgttgtgtcattgatgacttatgcctcaacttgactggtaattttgttcttttagtgagtccactctttagcttatctccttttgactgttgtaatgtttatttttcagtaaacaaaagattgaactggatttacagtagctaagaattacataaatagctatatcttaatttctccactttattggtataaatagctcaaagagaatggacaagtagtgatacagtacagtaattgtagctaacatttatttggttggttgttacgtgctagggactgttctaagcattgtgtatgtatattaactaactgaatcctcacaacagcctaccatacatttcctaccacaggatatgttcattcaagaagagtaagctgcctaacattaccatttggtaaggggcagagtggattcacacccaggcagatttttaatctttatcataatccgtatgctattcatactaggattttaatcactatcgtatatcaagattgaaccatagtggcctcctgcctatataataatttagtttcaagacatatctaagaaattctttttg

SEQ ID NO: 131401 - DNA, 152 bp, Homo sapiens
gccaggtgtggtggcatgcacctgtggtcccagctatgcaagaggctgaggtagaaggactgcttgatcccaggaagtccaggctgcagtgcctgaccaggcttcagtgcctgaccaggcttcagtgcctgaccaggcttcagtgcctgacc

SEQ ID NO: 131402 - DNA, 461 bp, Homo sapiens
tcatactcttacaaaaaggaaaattatcactagaggatgttggcaaaccaattcattattttgaaaattgcttaatataaggagaaatgcaaacatttatcctgatttctcatatgtattctacacctaggtaagcaaatggctgatgagagaaaacttcactttaagtaagtggggccaggtgcggtggctcatgtctgtaatcccagcagtttgggaccccaaggtgggtggatcacctgaggtcaagagttcaataccagcctggccaatatggtgaaaccccatctctactaaaaaacacaaaaattagctgggtgtggtggtgcgtgcagtgtcttaatcttggctcactgcatcctgcatctgcctggttcaggcgattcttttgcatcagcctccccagtagctgggattacaggcacaaactaccacgcccagctaatttttgtatttttagt

SEQ ID NO: 131403 - DNA, 631 bp, Homo sapiens
ctcagatattttgcagagagctatcttaatagcatggcatgtcatagcagttgtttggatttcttcataatattttaacatattaactaccattcctgaactattgattttcaggtaggcttgtcaatacaagcactagcactgtgcttaggtgacattgcttaagcacttactgtgtaccaaacactgttctaagtgctgtacaaatatgaacttatttaatctgcataatatctctatgaaatagaataattatttccagtttacatgtgagaaaactaagatacaaagaggttaagtaacttgaaaggtctcacagctataagctgtcattagaattagatgggctagctgagtccatgttcttcatcactaccttatgctgccttatgtttaagctataacaaattataataaaatgaatgataaaatagcaaaatagtaacaaaattccatttgaagacattttgatcccagtgaaaacaaatgtggttcacacagtattgacaaggatagactggtattttaccagtttgagtggcatcacccagttcatgtggaagcatagtaggctacagtaaagaatttggacttcatctcatcacaatacagaatggtctctgggttataa

SEQ ID NO: 131404 - DNA, 376 bp, Homo sapiens
aatgtaggttcagaattttacccaaactgaagagattgtatttggcttctagatcaatgataggcatgacattaaaagcccacagttaacatcaataagtaagagtaggtcactggtaattaagaatggaaatgccaccatctccagcagttgaaatctcactgcaagtgatctgaattcaattagaaaaaccagagggggtagatataaaaacagttggctaaagacaggtatgcttcaattcagtactcatatagggtctactatgaacagtactatgataaactctgtagatctaaaaatgaatcagaaatggtccctcccatcaagaaagaatgatttaatagaaacatgaagtttagtctagtagtagtaa

SEQ ID NO: 131405 - DNA, 613 bp, Homo sapiens
aagtgaagtttcctcaagctcttattttaacgcagtctttgtcttttttatttaatattccttttagatggcatataggcagaccttgtttttttaattcagtcttataatcaaagtcttttaattggagtgtttcttttctttccatttattctaagtattgatatttgttccaaatactaatatatattttgttctgcagatctttatctgcccttttttgatgagtaatatgtttttctagtattttatttgtatttcctttacaaattcttgagataccctttttataacatttctctctttgacttccctagagattactgtatgcatattttgcttatctacagtgaaacaatgtgtaaaatttgcaacagcgtaatcccatttaacattttcctgtcctttgtgctcttcttacgtcttctaaatatgtttttaatgctacaatacaatattgttccttttttgctttaaatgataaccctttagagaaattttaaattttaaacatttcatagtgtgtttgtgtacatgtgtgtaatcttcccttccgcctagtattctttcagaaaatttaggtccattaaaaattaagggcttttaaaaacac

SEQ ID NO: 131406 - DNA, 773 bp, Homo sapiens
cattctgaggaaagaaactgaattattgcagatttttgtgaaatccaagtcttaccttggatccctgtgagacagttactagatttttttttcaccgtttttcataagtctgtgtacacgtaatggaaaagcccgagttcttgttttgataagaaagtcacttggttgtttgatcccaaaggattagcttaacattatcaaggactagcataactgtgattatgtaaaaaaaacaaaacaaaacaaaaaaactattatttagtctggtagggaaatacttctatgagtatgttacaattggaagttgtatttgtgcctattttatctagttttagttaattccattgcttcggaagataagtggacgtcatagatccatcgcaagttctcgttttttggattttaaaattttgaccattaagttttctacgatagataaacatgttgtggacatttaaaaccgtaatttaaaactatgagcgaaaaatcttttcaagatggatacattttaattcattcaagtagcatctgattagccaagtcggggaaagattgcagtccgcaaagctggcttgtgataaggttgaggttacattttaagggtttgggtaggtgtgtttcttacagtgcttttatatgttaaggtatcttaagcagacacatggtttaaaagttcagtatttttagtactttttcattggcagaatttggacaagctaccagaattgctaactcctaaaggataaaagtaataataatagtgtgtcccaggc

SEQ ID NO: 131407 - DNA, 305 bp, Homo sapiens
ccagctccagacaccttcacaggcagctgtgcatgaagccctcctcacctatttaggcacacccacagtctaggctgccgcgcagaagcccacagaagggtcagtgcgtccagagtctccccaacattggacacccacatcacacacatgcacatgcacccatgggccagtccctggtgagcacacacacggcacctgcagacatgcctgcacatgcaaaagcacacaagcacacacaactgtgcagggccacacaagctcagtcacacacacggtcacacatgcttatgcacacttatacaccc

SEQ ID NO: 131408 - DNA, 726 bp, Homo sapiens
gaagttttctcaaactaccctcaggttaaaagaggggtggaggaggagtggtgaccagttgcttccagtctttcaaaggagaaatggacatctaatttgtgtatttgatttgcagagccttaatgacaacctagtattgtgtttggtggtttaaattttgtgtgttttctgggtatagcactttattaaaggaggatacccaattcagactgaatatgtaaagaaaagaaaggcatgactcaagtcataggaaccaataaataagttaggtatatcccatgcacgtattttcttcttcctttgggtaccttgacgctcagagtggcatgagaagacttaaggtttttgaggaagtctgtgatttggcagcctagtattacatatgtctactgcaagcacacgtgactacacactaaattaactaaattaaaagtagattataggccaggctcagtggctcacagtgtaatcccagcactttgggaagccgaggcaggaggctcacttgagcacaggagtttgaaaccagcctaggcagcatagtgaatccttgtctctacaaaaaaatttaaaaattaactgggtgtggtggtgtgcacatgtagtcccatctactcctgggaggctgaggcaggaggatcacttgagcccagaaggtcaagactgctgtgagccgtgatcatgccactgcattccagcctgggcaacagagtgagaccttaccta

SEQ ID NO: 131409 - DNA, 344 bp, Homo sapiens
tggaatgggtgataagcctggctgcccatcctaaaatgctataactgaagtcctgttgggtcagggtagggataagatgcagagcatctagcaaaagaattttgttccaagtggtcttgacttatgcagtaactgggatcctaaatcagtgcccgtgaatgaaattttagaaagcgatgcagagaagtccttttgcaacgtgaataaaacctgaattttcaagggtccagtgttgaacccacctggattatcacctcaagggatttctgctatttcactgcattcaagctaggcataatagttcataagtgcattctgaaaatgactttttattgccacagctt

SEQ ID NO: 131410 - DNA, 193 bp, Homo sapiens
gatgacttgacctcggtttgtagacagaagtaacttgctgtttttaccactgctatttatacctatcacccaaatcaaagaattataccacattcctggatactgcattccaaattgtaaagggaacttctccttccttgctagtatctctggatggtgcagagatattagaagggaagtatctgtgcatctt

SEQ ID NO: 131411 - DNA, 725 bp, Homo sapiens
aacactacttttctaataccctacatcaggtacgttcctaaataaactggaacttacctcagaagcctcagaaaattaggaaaataaaatgcattactttgtatattaagaagctcaaaatcccatatttgattcactatagaattacttcagaatctcatatgttgtttaagcaaaacctgtctcatattaaaacatacctactgctgtgttgtctatttgcttttctctttttaaatgcccttttgagaaatgctgcaaaaattttgtcctgacatgtgggggcccaactgtttcctgctatactcagcttggaggacatagcctctaggttatactcttttgaaattgtcctgttgaaatgcatgttttgattttgggattttccagatgcttcctaagtaggtcccatgtgttaaaacttgtggaaattcagcatgtttctcaatgtgaggcatctaagtagttcacaaatttaaggcaattagtctattactgggataagacgattaattctattatattccattgtttacatattacttgtttaatccatttcctattctatgctttgttttttcatttgtctgaattattaaaagtcactacattttaacattttaagcaatttaatttttatatataattatatcctttggctatttaaactgaagacacattgtatatgtaaatcaaattaagaaaaataaatggagagtgtgttc

SEQ ID NO: 131412 - DNA, 293 bp, Homo sapiens
gtcctctttcccatcaccaagaaccaaagtcctgggtaatgccggagccacgctgtgagcaccagcctttgggccaggggccgattatcccacatttgcagaacaggctggagaagattcagatcttctcagctcatttctccagatagaaacatgttgctgagagctggctccaaacccttctctcccgcttccattccctcctttgccctgaggcagatggcttggcttggagaggctctctggtgttagacgcagcaagtttttctttcccacaccccatatatgatggc

SEQ ID NO: 131413 - DNA, 771 bp, Homo sapiens
  misc_feature (7)..(7): n is a, c, g, or t
ggccgangccgggctcggctcaccctccccggatgccgctcctcctccatccccagaagtttcagccactgagattccccttgtcccggaggctggaggggaagacccaggcggctgcgctttggaggctggaccatcgtggggcttgtctgtgcccacttttcccccattcaagagttaccactgccaggcgcagttgctcaggcctgcaaacccagcactttgggatggcaagacaggaggatcgcttgagcccaggagcttgagaacagcctggacaacatgagccagccaggcccctgggcctggagcatccacaggaggaaagtacaagaaccctggcaccctgccaagcagcagggattcttcagacacccaagggctggtttgctgggaaggactcatgtgaccagaaggggaaactgaggcactgctgagcaccaacagtcctggagagctttaagaatggttgccatctgaggccaggcatggtggtttatgcctgtaatcccagcactttgggaggccaaggcaggcaaatcacttgaggtcaggagttcgaggctgtcaggcctctgagcccaagctaagccatcatatcccctgtgacctgcatatacatccagatggcctgaagcaactgaagatccacaaaagaagtgaaaatagccagttcctccttaactgatgacatcccaccatcgtgatttgttcctgcccaaccctaactgttcaactgactttgtgacaatataccctccccgcccttgc

SEQ ID NO: 131414 - DNA, 512 bp, Homo sapiens
catgacgtagacaggcaaatcatttgtggaactcaggccagttaattggtcatctccctgaaacaattcaaattggagaaaattctgtacaaatgtagtaatagtgatgttttatatgtgtatagtattttaaattttaaggtgtttttatgttcatgtcagggtgctctcaggaaaatgcttagcatcttgtaaaactgcaaatgttagatatcatcaacccagtgttataattgagaaaacaagcagagtgcaagtctaggacttatttggagtctcaccaaagaagtggctggcaaagcctaaaattggggcactggacactttcctatattcttctatcctgggaatcatgatttcctttgaagaatgctgtaaaatgttgagtgtatttgtttttgtctgttatgaactgtgattggcctcacacataaataatgaattcttttaggttgctttaggaatgtgttactttagtatctcaaatcaataatacaatcacaagtgaaaca

SEQ ID NO: 131415 - DNA, 297 bp, Homo sapiens
agaaaagccttctatggggaagctgttgaagatgacacaaacaatggcaatcccacgaggactatgggaagcagagagtaagtactctggcatattaaaagaatggaggaaaatgactgatactaatccaaccacaataacagcaacagcagcagctaagtgtgggggaaagaaaaatagatcagaccgttactgtgtctatgtagaaaaaggaagacataagaaactccattttgatctgtactaagaaaaattcttctgccttgagatgctgttaatctgtaaccctagccccaa

SEQ ID NO: 131416 - DNA, 372 bp, Homo sapiens
caaatctcttaccccaagtggcccaaacaggagagaaccctgaggctgttttggtgctggaggctgctgtgagacttttcaaatactgtactccttttcgtcataaagccttgtccagaagccccagcctctgcatgtgacatagacacaatgtattttagccttcactgtgtgcctgggctgggtcttgccaatactgtgaccacttagcaggagcaggctaagagtcttactgcagaagtcaaggccaactcagtggaaacagtgatgtcttttcaaggttgctttattcagcgacaaagtaaaggtttcagtgccctggaagctgatcagtgcttcctgtttagcacatggcctttctcaggcactgag

SEQ ID NO: 131417 - DNA, 436 bp, Homo sapiens
aatagctgttataattgatgacattaaaatttcttataataggaaagtagaattgaaacttctttagttttgaaaatataatggaaacaatagcaaatctatgattactaagtgaaaaatactgagaattctcagtttaaattaatattttggagatcacatggaaattctataaattcttacagtgggttctagccatgtctttctgtgattatgtgtacatgtttacatcattttcgagtcttttttcttctcattggtaatttttgggcccgttgtcaagattaaattagatatagtatatgaaagtctttagctcactcattagagttgcttaataaatgttgttttttcaaaaatgattatttaaaaaatgatcaagaatcatgtggttttcaacaaaatgaggcaatgtggcctagtagaaagagcttgg

SEQ ID NO: 131418 - DNA, 520 bp, Homo sapiens
accactaccctctaccctgggtaacagagcaagaccttatctctaaaatacgtaagtaaataagtaaatgaagaggtggaaagccacagcactagagcacaagctctttgagggcagaaagcctgtctcattcatttttgtttccttgggcctggcacaatgcctgggaaaaaaataggcttttaagaatgtttgaagagatgaattaatgagttcagggaagaaataaggcatgactattgaacattatggacacagctactaaataatctctgaacatgtcttaatgtgtttagctcaatgcatacggtttcctgaaatgaggaaatgcatttcagagagtgaacaaataatttattttctgtattggaagatggcacctaggaagctgggtttgagttccatcctgaaggatagtcaggtcatgtgttaagtgtggtatagagaagggggacaagcattggcttaggggtcctgagtgccagtgcttgctctaccctgaacttctgggaacttagat

SEQ ID NO: 131419 - DNA, 177 bp, Homo sapiens
tactcataatgacagaaatctgtcaaatttctattcctcaaaagagactgaaccctacttaagttgataaatacccttatatgcaatataattttacttgtttaaaaattatcataattattttagatgttttaaatcatggtgttttcaaaatgaggataatttctttgtgtttta

SEQ ID NO: 131420 - DNA, 399 bp, Homo sapiens
tcatgatgaaaacacccagcaaactaagaatagaagaaaacttccacaacatcataaaagccatgtaagaaaaccccacagctaacatcatactcagtgttgaaagacggaaagcttttcctttaagattaagaacaacataaggatatctacccacctttgccactcagcatagtactggaagttctagccaaaacaggcaagaaaaagaaataagagcatctggactgtaaaggaaaaagtaaaataatctgtgttttcagatgatatgatcttactggtaaaaaatccaaaagatttcacaaaaaattaaactgccaaaaataaaataatattaaatttttaaaattttgaaatttattgttgttcagtaaaagacagtacagattgcaatctggg

SEQ ID NO: 131421 - DNA, 165 bp, Homo sapiens
taaacaagaatttcagaagcaagatgtggagattttgcctattagagatttttttcttggtcttattttcttttatatcaagtgatttgactaaaggactgaaagtcctgagtgaggatccagggcccaggcagacatactagggccttgtgggtgacagaaaaa

SEQ ID NO: 131422 - DNA, 394 bp, Homo sapiens
tttaaaacccacaggaaggtgctgccgggagcctgcccttgttagggtgggactgtggccaagctacccttcagcaaggctgggtaggctccacctacccagcaaatgcgggcctctccgctcccatgtgtggataaggccaaggggtattggaaagggagtggtccagggtcctcaaccagcttgcagcttgccggccatattaccttgggcacaccatccccacagctcagggcctggcttcttcagtaaaataataggactggacttgatcatctcttaacagccatcagaaaataatctatgatccaatgaagacataagaagattccattgtatattgggagttagctaaccttaccgtcaacacccccatctgaggtgacactgtgat

SEQ ID NO: 131423 - DNA, 244 bp, Homo sapiens
agacagggtttcaccacgttggccaggatggtcttaatctcttgacctcgtgatccacccgccttggcctcccaaagtgctgggattacaggtgtgagtcaccgcacccagcctcagggtactttcaacatagatgttcaaaaagtatgcacaaggaaggaaggtgcaatctgtgctgatttgagagtactcagcaaggcgtctttctgggcagaccagtgagtactcagtggaagtggagact

SEQ ID NO: 131424 - DNA, 308 bp, Homo sapiens
ctgagaaggccagatgagcctggggaactgagcctcatgacacaaacattattggatacctcctgcatactaatgatagcaagcacatattaggcccctaccgtgtgcggccccttgaggtacacaatctccagttttcccagcaaccctattcccattgtccaggtaggaaaaccaagcctcagagaaggggtcaacttgcatgaggtcacatagctgggacatgcagaggtggggtttgaacccaggccagggctcttccagctgctttctgctgcccttgggggtgtgtcagagcataaggccga

SEQ ID NO: 131425 - DNA, 210 bp, Homo sapiens
tctactttaaatatctgtcaccaaaagatgattttctaataatcctctatgaaacaaaggtttattcagagcaggaattgaaattccatgttgttatgcatcaatataaaattgatttagcatttctggaaagaaaattagcaaaatacatggagttttataactgtggtattctttgaaccagaaattccacttttaagaattaaccct

SEQ ID NO: 131426 - DNA, 649 bp, Homo sapiens
tcgtattaacctctgctatatcagcaactcaaagtacaatatctcatttggcttgattatagtgccaaatgatcatagtgcatgattatggagggggctaggaacagaactgcagaattatccagttttgctcctttttcaatttagaatgccctatcctttcgttcagtttggtgattgtaagtgtgtacctataaaataaaaatagacatgtaaaattggggattggagtctttgggccaaaagcttaatggcagtaactgagaaggcagtaaaagaggagacactgttaccccggttcttttcctttttcctacacgtttaaaaattatttgtgggacagttgagagtggaagtgaggctgagatgggaggggggaagagtaggtgtgagaaggttgcagagtttaggtagggatcagaataagaggcaggatttatgtgttagtgtgttttgatgctattttctgtaaatccctggactgggaatttaatttcatacagtgtttagcatatgggattaatatattgatgaagcagacttatatagctgtccagtattaaattttttcaattttcagctaatcctaaaaatcctactaaatataatttgctagaattaccagtgtaataatttatcctagaactcc

SEQ ID NO: 131427 - DNA, 583 bp, Homo sapiens
agcagtagcaggggaagtacttcatttgggaaaaaaagcatgtaacttggcaactatttagcacctcttcttctctggcagtgatcagttaggaaatcctttgctggaagcatctactcagaattttaaaaatcatgcagttcttgctgctgaaatttatgagcacgtagatgagagagagtatgtatcatggatgaggacggggagagcaggagcaggagtgccccatgagagccacaaacaggaaagttacaggagctggcccgtgtgcaccactgccttgtcccaaccacacagcagtcccagccacacgctttccacatagccctgtggggttaatgacatcactcctgatagtgcccacggcaccattctctatggccatggtgtaaaaatgggtttataatcaaacaaaatatccagatatatggttcaatatgcttcaatttgcaaacatcacttatctaaaaagtttttcaaagaagtaagattaaatatttgatatacaaaatttactgaaaagaacaagattatataaaatcagcttgcccataagactgggtgtacccacatgcaacgaaga

SEQ ID NO: 131428 - DNA, 351 bp, Homo sapiens
tcataatgtgctatgtgaaaacaaggatgaaagattggagctatggggatagtggggtgagggcagggcatgaaacaacaaagaacaaagtatgtgtctgtatatgggtatgaaaacaaaaacaactcgcccaggactgttttttcttaagactctttacaggcatagagataatactagtagcaactacaaagaaaaaccgattagcttggcttatagtaatgagcaatgggaattttttttttttcgtttttttgctaagactgtaaaagcagaacatagtctctgagataaactgacagcagtgcagccgggcatggtggctcacgcctgtaatcccagcactttggg

SEQ ID NO: 131429 - DNA, 754 bp, Homo sapiens
aaggggacagtgccttactcatctttccatctctgggacctaactcagggcctggtacacattatatgttcaataagtactgattagattactgggaaagagttagtaggggagatgggacttgaattttttgaaaatgatattaatggcattaccttttatggcatactggccaggtactcagctaagtttattatttagttgtattaactctcacagcagccctatggctattatgatccctggagtaaacttaggctgaagagagattctatatcttgctggaggatttaaagtctcagggtggttggtgttatttgggggcttttttttggcttttttgttgttgttgttttgagacagggtcttgctctgtcgcccatcctggagtgcagtggcgcaattttggctcactgcaatctccgcctcccgggttcaagcgattctcatactttagcctcgtgagtagctgggactacaggcatgcgccaccacatccggctaatttttatatttttagtagagacggagtttcgccatgttggccagcctgtggtggtttgtttgtttgtttgttttttcttgattttgaaattattttttttcctaaagcagagaagaaggcacaagtgaaggagaaaaggcagacgtgagtgatgatggcagaaagtctgctcaatcacactaatcccatatctaacaagtaaaaataaaatgacagttgacattaaaaaaaccaaccaattcctcccaa

SEQ ID NO: 131430 - DNA, 385 bp, Homo sapiens
tgagatggagtctccccgttgcccaggcttgagtgtggtagcgtgatcttggttcactgcaacctccgcctcctggattcaaccaattctcctgcctcagcctcccaagtagctgggattacaggtgcctgccaccacacccagctaattttcgtatttttaatagagacagggtttcgccatgttggtagtctggtctggaactcctgacctcaggtgatccatccacctcggcctcccaaaatgctcccaaaattataggcctgagccaccacgctcggcttataatgtcaaatcttttttaacatagtaacatgctgttggaaaaaataagttgttgaaagtaagttgttttcccatttaaaaatatctgtgaatattaata

SEQ ID NO: 131431 - DNA, 385 bp, Homo sapiens
cagatttctgtttggagtgaagaaaatgttttgggaatggcggtcatggttgtccagcactgtgaatgtgaaaatataattcaacggcactgaattgaacacttaaaaacaattaaaatggcaaattttatgttacatacagccatgtatccccatcgttaagtgatgcattctgagaaatgtgtcgttaggcgattttgtcattgtgtgaccatcacagagtccatacataagcctagatggtgtggctaccacacactcaggctatgtgcagagcctattgctcccagggcataaacccatacagtatgtgactgtatcaaaaactgtaggcagtggcaacacaatgggaagtgtgtatttaaacatctaaccatagaaaagg

SEQ ID NO: 131432 - DNA, 630 bp, Homo sapiens
cactcagtaaaggaggttggttttgttttttgtgtgttatttttaatttttttcctgtggctgagaatccaatgcagacaaaagattagctctcctagttattcacagcctggctgtgcagtcacgcaaccagatcagacacgttatgtagaatttttcgccgtatacctgtatctgtattctgatacgttacggagaagcagtacagtactgtagttaaaaatgtgggcaaaggctctgaattttcagtgttcaaatgccagttatgccacttactggccgtgtcagtctgggcagtgagcacctatctgtactcagttttgtcatttgtaagatgaggctataataatacctacttcataaagtccttaagagttgatgttttataatgaaccacttagaccagtgcctggcatatcacaagccctcaaacgttcattgttattaacatttttaatgcttctttttgtagttgatgctattgtattgttgacgatgggaagaatgcctattacccaacatacaacacagcattttccaatttcagatgatattttgcagaacactggacaagagaaaaagaatttcccaaggctagagttactccatttaaaaaaaaaaaaaaaaaaa

SEQ ID NO: 131433 - DNA, 674 bp, Homo sapiens
gcttgccgatcaagagagcagcatgggtcctacagttgtgattccttggagcacccccaccctgccgccctaacgttcccttggcctgccacccaatgagccctcatagtgcatgctcagtcggagcggcgccgcaggtggacagagtaatgacgggattgtaggggacatgaccagagcgcataggctgtatgtgtatttcgtgatacgtgtacaggtgagacgcaggtacgggtactggtagatttagcaacatgatgtgcgtcgagaggcatcgtgcatcctcttcacgttgttcaaatgccagttatgccacttactggccgtgtcagtctgggcagtgagcacctatctgtactcagttttgtcatttgtaagatgaggctataataatacctacttcataaagtccttaagagttgatgttttataatgaaccacttagaccagtgcctggcatatcacaagccctcaaacgttcattgttattaacatttttaatgcttctttttgtagttgatgctattgtattgttgacgatgggaagaatgcctattacccaacatacaacacagcattttccaatttcagatgatattttgcagaacactggacaagagaaaaagaatttcccaaggctagagttactccatttaaaaaaaaaaaaaaaaaaa

SEQ ID NO: 131434 - DNA, 1321 bp, Homo sapiens
gctgggattacagtcatgagcatccatgcccagccacaagttctcagttcttaagagacatggtgataattcatgctgaagaggaactttacaaacttgaaagatgtgacagtgcttttaccaccacctccaacttttctgtacataaagatgattatactagtgtgaaaccctagaaataatagaaaatttgacaaatcctttatatggttgcaagacttgattgtaggtaagataattcatactggcaaaactcctacaagtgtgaagaatgtgggaaaactttttaatcagtgcatacaccttatttcacaggaaagctagtatccttgagaaaaattgcacaattataaaaaatatggaaaacccattaatgcctactcacatcttacccaacagaaggtggttcacagttaatgaaagcatttaaagtgcaattatgctcaagaaatctttcagaaaatagaagcctttaaagtgaagaagagtattctgaagacaaccattacacatataaagggggttgtattacctttacttgcatcacagatttcattgcacacatttgtactagaggaaaaccctgaagcagttgctccagcttgttcaacaacagggaatttatgttagagaagaatcctgcaaatgtagtgaatttggaaacaaattttttttcaaaaactacagcttagaaaacaccagagagttgatactaaaatatatgtttgcagaaacagtaaatataaaaaatatttaattcaaaatgaattccatgtaaatatcagagaatttacagtagaataaggcactgatacttcagacattacactaaaacagtgttgagtataaaaaagaatccacaacaaaaattgttagataaattatatatagctttaaaaggttttttgaagcattgtaattacattgaaagtatacttgctttcttgagaaaaaatttttgaaaagtgaataaggtaatagagctttcaaatttatgctgttactttatttctattcacatgtgaaagcatgtgatcaattgatgctgcatcagagatattacagattctttattgggcattccttataaccttttctattaaagagaaaggatattaaaatgtaagatgcatgatgaaaatataagtggacaggctgttcgtatttgacctatattaagtaatgtataaggtagtgttcagagtaatacttttctacattatagtgagagaaattatgaattacagttaaaggtatattaaattactgtattattttactaattttatgtaataaaatacactacattaaaaaattgtta

SEQ ID NO: 131435 - DNA, 383 bp, Homo sapiens
tcagggtctgagacatagtcctgcaggttgctcctgacggacatgcccccaggccagccaaacaggcaagaacccatatcctggaccagagaaacagtcccataagccacccaggttgacatgccccaggctgccaagcagccctgtatccacatatcaggcctcagaaacagcccacaggctgtccccagtgagcacgtccctgagtcagccaagcagacttgcacttgtgttccagatttgagaaacggctctgtgggccacccacccagtaaacatgcccccagatcacccacacccaagcagctgtgcacccacatccctggtgcatagctctgagaaacaccaggcctgagaaacagctctgtaggctgctactcata

SEQ ID NO: 131436 - DNA, 636 bp, Homo sapiens
gaaaaaagggtcagggaacaagagagagacggagagagagctgggaaagagggtggggaagaagcaaagagacagataaagtgtacacacagtggggagggatccacttgcaaaccaaatctagccagaattctttgctccatgaaaccttgtctttggatattttccatcatggggagaactccttattctccctctgctttaggggtctcccactggaatctgattcatagataaatttggtaagttgcaggcatcacaactccatcttctgagaagcagggagaagctgagagagggaaagaaggggaaaaaaagcctacaaaaccagcaagtttcccactttacagagtgagcctagacagaacttgaattttcttcccttgagagttaggaggaaagctggtagctgtgtcacactcctgagttgtgtacacgactcacaagccaaattttctagcacagcagaacaattttgtttgctgctggatatataaagcaaggaaaaaaaaaagatggcattccacctttttgaattagcaccaagtctttcaaactccaccctttccaggaaatgttctttaatgcagtgggaggtggtaattttactctctccaaaccctcattttacttccc

SEQ ID NO: 131437 - DNA, 457 bp, Homo sapiens
aatgaaacactgtggtgagatgaactcttcccttaaacggagcagactggatagggagatgctactgctgaagggtgattactcagagtgagctcatgaggtctccatgttattttctgaaaaccaggattttctttccctttcatgctgccttcctccaatgtttttattcctggatgatcctgcatgattgtaactgatattatcagctacgaatggtcccctcagccctgggaataagcaggaggtaaaagacataattccagttatagggtgcttatacttgagttagagaagagcttgaacgacttattttctatcctcttagggagttcatttccaagatacagacagtatattttggtcgtgtgttgtaggatcagatgcttccttggttctctcaatgaatcttctgtttgtttttgtgaaatagttggcaggaaatctcagcttcttt

SEQ ID NO: 131438 - DNA, 496 bp, Homo sapiens
aaaaatagccatcttcagtcctttgcctgtactgttttttccttctgaaacatttacaaagcaactgtcagacaatgttgccaaggctaaccatgcacagaaaaaaataagacacgtcaatttgactttttagaaaaagagaattttccagctgacaaccgaatctcaaagttggccaatccaagtgaaaagtgcttggaagtgttctgtttaaggttgggtgaagcctctgttcatatccttgaatatttaatttggcttttctgttactaaggaaacatggcatgatgagtgaatatgcacattacttccatttgggtggtgactaagaaaaccatcctcccttagatacagggccttactgtagtcattatccatgtactgaccacaaacaaacttggccatcttggcctccttttcaaggattaggttcaactatagaatgaatgaataggaaggctttaaacatagcttgtgaaaggaattggggaaacct

SEQ ID NO: 131439 - DNA, 418 bp, Homo sapiens
tgtataacatcctgctgagatataaagtgaagagagaggacactatggatttggtggcataagcgttcttggtgactagagatatagggggaatagaagtcttgttggaatgagttgtgggaagaataagaaagagtctactaagaaaaatggggactgagaatgggatgttaactggagggaatgtctgaattcaggctgctagaataagctaccatagatggtggcttataaacagtagaaactgatttatcatagttttggagtctgaaagtccaacatcaggatgctggcatggtccagttctggtgagggccctgcagactgtgggtttcttttgtatcttcaactgctgttactagggtgagagagatctctggggtctttttctttataagggcactaatctgatgcataa

SEQ ID NO: 131440 - DNA, 353 bp, Homo sapiens
tgtgatacggcattggagtgcacacgttactcatccttttatttaaaaagtcaccctaccatctgaacaccagtcagctggaggagttggcccctagggttctggactataaggtgctgatcttgggtgatgaccaagtcaaaagacttatgtaataaattccaaaggatagacccatagcaggaacatttgaaggagaacaggcattatttcaggtgaagaccgtagccggtgtgcagaggggtgccctgagaacaatcagtaaaagctgacaagtgcctttgttcttgagggataagcttctagaaaccacaagctaaacaagatgccaagatacgtgtgcactctcaatg

SEQ ID NO: 131441 - DNA, 233 bp, Homo sapiens
ttcattgcttccagaagagtcattgcatatgtcaggtttgggtcagggtgctgcctccaaagtcttccaggggaacacagtttattgcagaattggctggggcccccagctcatcacacagaacttttctcacataaggtcccataactaaaaatagatacacagcaatattaaatatttgcagaaccttctccccagagtattttgttctgaatagtacaggaaacaccatt

SEQ ID NO: 131442 - DNA, 359 bp, Homo sapiens
gtaactgggattacaggcatgcgccaccacacacaactaatatttgtatttcagtagagatgggggtttcaccatgttggccaggttggtcttgaactcctgacctaagatgatccacccacctcggcctcccaacgtgttgggattacaggggtgagccacggcatgtggccaggatatgcatgttttatttagagatatagatatccctatgtacagtatatataccactttggtggtaagattgataaaaaatttgaatgacttataaaatgtgattatggaatttagagaatctcttgaacacaggaggcagaggttgcagtgagcggagatcgcgcctctgcactccagcctgg

SEQ ID NO: 131443 - DNA, 792 bp, Homo sapiens
gaataaattttacaaaagaagtgcaaaacttatattctcatttataatgctgaaagaaatgttaacagacctaaataactgggaagatatatcacgttcatggactgaaggactcaatattttaagaagacaatactttccaaattgatctacagattcattactatccctatcaaaatcttagctcacatttttgcagaaattgatgaaccaactctaaaatttgtatgggaattgaaagaatccataatagtcaaaacagtcttgaaagacaaaaaagttggagtactcacactttgcaatttcaaacgtgctacaaagctacaatcatcaagacattatgaaactggcataaaatttgacatatagatgaatggaataaaagtgagagccaaaaatatagcctcccatttatgacttactgactttcaacatggacgtcaaaagcaatttaatggaggaagaatattcttttcaacaaatgatgctgggacaactgagtatcaacctgcaaaagaatgaagttggacttctagctcacaccatataaaaaaatcaacttaaaattgatcaaagactctaatgtcacagctaaaactagaaaacccttagaagaaaatataggcataaatctttgtgacctgttgttaggcaatgatttcttagatatgacaccaaacacacaaggaataaaacaaacaaatagataaattagatttattcaaataaaaaacctttgtgcttcaaaggacaataccaagaaagtgaagagaaacagaaagaaagaaaata

SEQ ID NO: 131444 - DNA, 1156 bp, Homo sapiens
ggaggctgaggcatgagaatcacttgaaccttggaggcagagcttgcagtgagccgagatcgcgccactgcactcagcctgggtgacagagcgagactctgtctcaaaaaaaaaaaagaaaataattttgtagctctcttggtggctaaaaataagactttgaggtacgggtctgtgatgacactataaataattttaagtgtaaataatagaatcgccaaattttatgtgcaaatcacaattgacattattatgcaaagttttaggaaaatagaaacaggagtaacctcctctctcagactcccttacaccagccaggtgactcccccctcatttttcttttattgtggtaaaaaatatatatattataaaatgtattttcttaagtgtacagtgtaaggatggggctagtggcgtgtggttaggtccttctgagtgttacttgtttactgtgtgatagttattttagtaacattaccattgtttgtactgtgttttctaagagcctaatgacagatttcacaggcagattggaaagatgctgcctgtcttacttcttcgtgtgtagggtattagatgctgctgttgatgaaatgtttcctatttgggctatagcatgctccctcctttatatttaatgcctaagaagttatctgcaataaatgacagattcataattatttgaaaaggaatagcctagtgtatctctttaaggagattacaaaatggtttttgtgctttatcttcttagagtttgttaataacatgtaatgaaaatgtgatgtattttatcactaaagcagtcataataattctggggaaaggagtgttattggaaaagagttttggctgggtgtgctagctcatgcctgtaattccagcactttaggaggctgaggcaggcagattgcttgagcctaggagtttgagaccagcctgggcaatatagcaagacccccatctctacaacacgaagaagtaagacaggcagcatctttccaatctgcctgtgaaatctatcattaggctcttagaaaacacagtacaaacaatggtaatgttactaaaataactatcacacagtaaacaagtaacactcagaaggacctaaacacacgccaatcggctttcctccttacactgtacacttaagggg

SEQ ID NO: 131445 - DNA, 412 bp, Homo sapiens
agacaggttatactgcatctcagcggggaaactggtgcctcccttcatcccaggatacctaatttaggacagcaaaactaattccagaccatgcctgctggggaagaggaggctcctcttaccctccagctcagccagggctgcaccagggcagttggggaggctgaacatacaggagcttaggggaccagcaaactgctaatgagctgctctctgcaggtcaactgtaaaattgtacattttggtcaaagaataatggcaggaattgaatttcaaaacacatattcaacaatatatcccaaaatcaactgagggcaagtgtcccactgggaaactaatgcatatgtcctgaaattatctgtatatttttacctcttgtcattagacaaaaaggaataatatccttattgca

SEQ ID NO: 131446 - DNA, 356 bp, Homo sapiens
caacagggggaaaccccatctctattaaaatacaaaaattagtggggcgtggtggtgcacatctgtaatcccagctactcaggaggctgaggcaggagaatcacttgaatccaggaagcagaggttgcagcgagctgagattgcaccagcctgggcaacaaagcaagactccgtctctaaataaataaataagaaatatttggcacctggaaaagccaagaaaaaaaaaagaagaagaaataatgggagctgccactgacacaaatcagagcctagtattttaggctctgatggaatggacaacaatctaaagataggaagaaggctgaaggggacagatggaacatgtgtgcatc

SEQ ID NO: 131447 - DNA, 569 bp, Homo sapiens
gaggtgttcaatgttgatcgatccaaggtcgtgcacatagggtctaagacggaagagaacttcctgcccctcttggagcttctattttagagggagacacggccagacaggtctcgaactcctggcctcaagtgatccgcacaccttggcctcccaaaatgctgggattccaggcgtgagccaccgcgcctggcctgtcctagggagaatgagcctgatgactttaccattttccacctctaagagccaatcgcaaaggaggctggctggcatcttgtgtctgtctagcatctctaccagtttctgtagaaaaccctcaagctgtgccaagacgatcatgtctggacacagctcttggtgtcacggggtgtctcctcctactgcctatcgccctttgcagccaccagaataatcatgcaggagccagggccccatattatctaccgctgtccatctgctctccagcacatcagagcagcccttcccctgtgtgagattcctctccagggcaagacttgaagggagcatcaaggttgcagtggaagaaataaattggaagtggagctgga

SEQ ID NO: 131448 - DNA, 346 bp, Homo sapiens
gaggtgttcaatgttgatcgatccaaggtcgtgcacatagggtctaagacggaagagaacttcctgcccctcttggagcttctattttagagggagacacggccagacaggtctcgaactcctggcctcaagtgatccgcacaccttggcctcccaaaatgctgggattccaggcgtgagccaccgcgcctggcctggagccagggccccatattatctaccgctgtccatctgctctccagcacatcagagcagcccttcccctgtgtgagattcctctccagggcaagacttgaagggagcatcaaggttgcagtggaagaaataaattggaagtggagctgga

SEQ ID NO: 131449 - DNA, 235 bp, Homo sapiens
ttctcttccacagggtacactcttcctttggtgaactcattcagactatggctctaatacaggatatatgctgacagacttccaaatttatacctcaaatctagacttctttcctaaacttaaaaaatgcctatttggcatggatgtataatcagtgacataaactggagtatctaacaaaaatagcaaatttgacatatctaaaacctaattccaaatctccccttgaaaagtt

SEQ ID NO: 131450 - DNA, 715 bp, Homo sapiens
cagtgttggtccttcggtggctcattttcctgagcatagcgtcctcaagattcatccgtgctgtggcctgtctcagaattgccttcctttttcaggctggataatgccccgttggatggaggggccacactttgcttatccgtccatccctcggggggcacttgagtggcatccacatgttggccatggtgaacagtgctgctgtgaacatgggtgtgaagtaatctcttgaacaccctgcttccggttctttggggtatacacccagaaactgaattgctaaccacataagaattccatatttaggccgggcgtggtggctcacgcctgtaatcccagcactttgagaggccaaggcgggcggatcacgaggtcaggagatcgagaccatcctggctaacacggtgaaataacacagtgaaaccctgtctctactaaaaatacaaaaaattatccaggtgtggtggcgggcgcctgtagtcctagctactcgggaggctgaggcaggagaatggcgtgaacctgtgggcagagcttacagtgagccaagatcgcgccattgcactccagcctgggtgacagagctcaaaaaaaaacaacgaaagacggacggaaggaaagacggacgaaccgaccgaagaaccgagagagacgaacgaccgacaccgacgaacgagacacgactgacgcacacacatgacacaacaaacaaaac

SEQ ID NO: 131451 - DNA, 374 bp, Homo sapiens
cccccacaccatcccatagaaatactgttcactatatctggttcaggaggactgactctcccaactcctttctccaggagtggatacatgatccaggactggccagaattctacatcaagcagcccgtaggcacggaggagaatacaaattagaggatcagccagcaaacttgatgggtgatgagaactgttcaagacaaccctgaagatgttgcttatttgataaggttgctggtgctgctgctactgaagatagaacaacagttaagctttctgtgtatgtgtgtgttttccatctgtttttctttgtaatcagtcggtataaaagtgagcagtgaagaatcggggggaaataaatgtactttttaaacatg

SEQ ID NO: 131452 - DNA, 288 bp, Homo sapiens
cctgcctcagtcttccaaattgctgggattacagcagcccgtaggcacggaggagaatacaaattagaggatcagccagcaaacttgatgggtgatgagaactgttcaagacaaccctgaagatgttgcttatttgataaggttgctggtgctgctgctactgaagatagaacaacagttaagctttctgtgtatgtgtgtgttttccatctgtttttctttgtaatcagtcggtataaaagtgagcagtgaagaatcggggggaaataaatgtactttttaaacatg

SEQ ID NO: 131453 - DNA, 375 bp, Homo sapiens
tctccctactgtatcctaggctggaatgcaggggcgtgatctcggttcactacaacctccacctcccagcttcaagcggttcttctgtcccagctacttggaaggctgagctgggaggagcacttcagccttgaagttcaaggttgcagtgagctgtgattgcacctgggagaaagaccttgtctctctaaaaaaaaaaaaaaaaaagttactagaacagagaattaactgcaggcagagttaagaaatgaaaataaaaggttgtaatgttatattacattaaagtgatgtactctggacaaaagaagagatgtaacgagcaagctttcggattctgcccttttcagaaagtaatccccaagtctaaagcaaggg

SEQ ID NO: 131454 - DNA, 453 bp, Homo sapiens
gcagaagtttgcaagctcactgaccttcaaacaagggttatggttatgagggttatctgaccaagtgttcattggataagaaacacataaggtttcctagtgaagataagtgaagacattttaacacccacagacacaacctaacccaaattaacactgtccattcctttgtcacattcaccactgtccctggctagcacaggctctagttatgattttattaacattaccttaaaactataaggtgtccaacattatttctgaggccacctcttgcctgctcagaaaacaccaagggaaaaaacaaccaataattctccccctttttccaacatacgttgacctgttttagttccttattcaagataccctcaaccacagtattggtttatgtatacatttgtccttcataagccaactgtggagcatataccaggagcaatcatgaacagg

SEQ ID NO: 131455 - DNA, 689 bp, Homo sapiens
gaaaggattttttgttttttacccttgagtcaccagtaagcaccgggcctcctgtcttttcctgattgcctagatagaattcgtaatttctgaccttggccccacagcctggtattgtttcaggtcccttttggtcctcttgcagaagaggatttgatatctgggggcatggccttgactgcttctgggagagtggcccaggtgtccaggagaacctgttttcttgcaaatgcccataattgtgatggcgtggatggaacagacctcttaggcgtgtgagctgtgaggctctggtggttgtgggacaggctggcagccaaaatggtatgagggagcttttctttattagatctcattgtgagaataaaaaaatgagatggaatgaccttcaacctgtcagtgtgctcccattcattcataaagaaaaactgttcagatagcactgggacccatccatgtctttttatatatggatatatagatctagatctagatatatccagatagatagatagatgatagatagatagatacctggccaggtgcagtggctcacacctgtaatcctagctaaactgagaggctgaggcagaagaattgcttgaacctgggaggcagaggttgcagtgagccaagatagcaccactacactccagactgggtgatagagtgagactctgtctccgaga

SEQ ID NO: 131456 - DNA, 342 bp, Homo sapiens
aaaatacatggagatgtgtgaactatgcatgcctctgtgtttatgactcgaagataagctgtggtgagggaaagtctatattagtattcaaggccacagaaaccagtctcttttacaaattaccgtgtaattaaacagaaggcacatgagatgtattttaagcacatcccctttcttattcttagtattccactcaacgtccaaacccttattaatatctctggccaaaaccacaacttaaaaactgcaaactcattgtactatcaaggaatattttctaattgtgccttaaaaccaactgtcagacaagctgagttcccatcatgaataatggtatacaga

SEQ ID NO: 131457 - DNA, 917 bp, Homo sapiens
agtggtgggagctaagtctgaagaggtagagaggaccagttgttgagggccttgtgttccaaataagctagagcttgggctttatgtgaaagatttactggtaagataactgttttgatgtacctacgtgactggtgatggggaaactagcccaaaggctgctgttctgccctgctccccagtgagggaaaacaacaacacacacaacacaaaaaaaaaaaaaatttgtggggggccggggcccgagaaaaatttttaaacccttccggttggggggggggccccctggtttgggaacctgggcccaagggggtcccaaaggagaagcccgtgggccacagacttatgggtggggttttcttcaccaatataaaaaaacggcgccgggcggaaaacccggcgtctgttctggagaccaaatctccaagatgggggtttccggggcgcccaaagccggggctctttaccaaccaggggggggcccacggcgagcgctccgtttatccaatacggcctctcggggagggaaacacgagatgagcataccagacagccaacagaagacaacgtcaagagagacacgcgacaacagactagccgagaatagccaaccaacgaagagatggatgaacgttaagaagtgaaaagacccggcagcaagaaacccgaacaggagacacacaaagcacgaagcgagcatatgccacataaagaagcgataacgaacagacaactgagaacaagaaaagcggaaagaaacatgatcaaacgcgctgaagaaagacaacagaagacagagcaagaaaacgagaacgaacaacaaaataaagaaaagacaacgacaaaaaagtcaaaaacgagaaacagcgacagaagaaagaacaaaaaaaaacaaaaaacgaaggaaaagagacagt

SEQ ID NO: 131458 - DNA, 385 bp, Homo sapiens
tcagatatacttaccttcatgcctccttcagccacaaatcaccagttaccagctgtgtaattttggactgacttagctcctttaaacctcgcatgcaccatctggaaaatcagataataataatgatactcacttgctagggttatagtcaggattagctgtaataatatttgcttggtacacccagttaaaacgtaataaactcaaaacttttttttgtatgactagacatacctgtgttttttgacaattactagtaactgaaggttggagggattgcctcattaattccttcattcaacaggtatttatttatagagtactatgttggcattggcgatgcaaattggatgagatggttgctgtcttcaagaaattcaaaact

SEQ ID NO: 131459 - DNA, 372 bp, Homo sapiens
tagaatactgtagcatctcttctcctgaggaatccctttactttatccattcttttctatttatttatttatttgagacaggttcttactttgtcacgcaggccggagtgcagtggtgcgatcttggctcactgcaacttccgcttcctgggttcatgtgatcctcccatgccactgtgctcgggtaatttttgtattttatttgtttgtttgtttgttttgagacagagtctcattctgtcactaggctgcagtgcagtggcgcaatctcggctcactgcaacctccgactccctggttcaagtgattctcctgcctcagcctcccgatcccgagtagctggggattacaggcacgcaccaccacgcccag

SEQ ID NO: 131460 - DNA, 494 bp, Homo sapiens
aaaacatttggttaggatacttatagtaagccttttgtgatctagaaattagaacatgagctgtaacaagtaattgaagaaatacatatgcagcttcttaaagcataaaaagattcaattaatacatcaaatagcactgtggcttttatgagctatcacagcaattattttcagaaaattatcttaaaacagcatattcaagtggataaaacatttgtgaaagggcctgcaagggaaaccactattaaggttttataagcaaagagctgtgttttttgtctgcattggacaatgagctctttgggatacttaggcatttctaaatctcttttcataacgaatctaaatgtatccattttatactaaattctactcttccacactgcagaaaactttttatactgagtttccaatctaaacttttaagctagggaaggaatctaaacctttttcggtggtgacggggggaggcaggggaataagcatttagaata

SEQ ID NO: 131461 - DNA, 591 bp, Homo sapiens
aattcaaggcctcgtctgtctggttccagagccccgctcccccaacctctaagtgcagacagcacgctgcattggtagttcacttctgacagcaccccacaggctggtattgttagcccattttacagatgaggagtgtgaagtccggagaagtcaagtaacttgccaaggccacacagcaaattagagccaaggtctgtctctctaaagctgagcctgtttcacatctgtccaatggctggtggaaggaaggtcacgtgaaccgtcctgcacactaccgcatgcaaagcattcccacagtgctcttgagggagtggtctggctgctcctcctagaagcaggaaagccaagactcccatgaggctaaagccatgggctccagcagatccagcaactagggagaggctggatttgcaggggggctgtgtatgcatccaaaactgctgctctctgctgtggtgggaatgtttgtctcccctcagaattcatgttgaaatcccaaccccaaaggtgatggtgttgggaggtggggcctttgggaggtgataggtcatgggggcagaggcctcatgaatggggttagaggcctta

SEQ ID NO: 131462 - DNA, 346 bp, Homo sapiens
gtgtttctttttatcggcatgaggagaggggggcgggttgagctggggctggtggtgctggagatactggggctgaagcatatggagtcacccagcccggtgtccatgtccttggataggccattgcttttagagctggagatgggtgcacaggctgatgtggctagggatggccactttcctgggactttgatggtagatgtccgaaggtcaatctcttctttatgaatattcttcatataatcacctaagcttgaataataggtgagcacgccattggaacacagggtgacgtatttctttttccatgtcttcagccatttcccacttcgctttaagagcatgc

SEQ ID NO: 131463 - DNA, 499 bp, Homo sapiens
cactggactctagcctaggtgacaaagagaaaccttgtctcaaaaaaaaaaaaaaaaaaaaaaaattaacacacagtaaaagtttattgcaaaaccaaatagactcattctgcaaaaccacttagaaagttaactgtaattgaatcatgtcctctcagtttatcaatgagcaacagatatagtaagcagctcaattacatcattctatactctggagctaagtgataccgcttttaatctagtgtttactacaagaaaatgactgtcattattctgaactcctaaactaacatctagttaggacactacagaaactcctagaggcaaaggagcagccctgtcttagctgggcagattaaggacactcttttgactaattggatttaacaatccattaccatctttcaaaaggacaaaaggggtgcattttgtgttttaatctctttgataaagatacagcatttggggccgggcgcggaggctcacgcctgtaatccca

SEQ ID NO: 131464 - DNA, 597 bp, Homo sapiens
gagtcatgtcatcccacaagcacctgtcatgcactcctcacagagttcatgggcttctccctctttagtccgttgttaaacaaagtccgcattagtaattcagcccagctctgttgtgggacaaacaacctggagtgtagcaaggtgctgcatatttgcaggacagtatgaaagcgttctggagatggatgggggacatggctgtacaatgtgggggatgcacttaataccactgaatttttcctttgaaaatggctaaaataatagattttgtatgtattttaccacagtaaaaaatcaagctggccgggcatggtggcttacacctgtaatcccagcactttgggaggccaaggcgggtagatcatttgaggtcaggagttcaagaccagcctggccaacatggagaaaccccatctctactaaaaatgcaaaaattagccaggcgtggcggtacatgtctgtaatcccagctactcgggaggctgaggcaggagaattgcttgaacccgggaggcggaggttgcagtgagctgagattgctccactgccttccaacctggacgatggaacgagactgcatctccaaaaaaaaaa

SEQ ID NO: 131465 - DNA, 370 bp, Homo sapiens
tccaccagggcacaatgtctagcacttagaagcttaaaaaaagattgttgagatactaaatgaatagattaaccaaaagtttaatttttctagcagtgttcatgggtgggaacaaagcagtaaaacaaacacatacaaaaataaatggaggtcaaggacctataatactaaatgagctagcaccatttcatctggctgtgctacttcctagctatgcaacctgagacaaatcacatatactctctgatcttctatttcattatctgtgaagtggacacaaaaataatacctacctcttagcactgtttataaaaccaaataaaagtaagtaaagtgcttagcagagtgtgtaaaacacaaatttgtgctc

SEQ ID NO: 131466 - DNA, 137 bp, Homo sapiens
ttttcagccaagtatttgagacagttatatgaacaatgattcacatgttcataaacatattgccgcggaagataagtgggcttttgttttcttccatgacattctggtccaatgcttccttatcggctaccgatcac

SEQ ID NO: 131467 - DNA, 269 bp, Homo sapiens
ctccccatgcgtacagcacaccacagccaccatttagagaaaagccccatttcttgctgctatgggcccttgaccccctgttccccaacaagcagagcctctagctcaggcaagcagtgcagctgcttcaccctctggctgaacactcccagtagcagcagctccacatttctcagagatggagctcccaggggcaaccaaaagtccctctgccactgcctctccagtttaacttccctgtttacccttgaactagggaaggagcaaag

SEQ ID NO: 131468 - DNA, 376 bp, Homo sapiens
aaaaaaaccccaatacatggggatctccattgcccatcccctcctctaaggtaattatctgtaggccatcgccatatctcttctttgttttagaaagacatcttttgttatcattcatgttaatattattgaaagcaaataaaatggaattttacattcttttcttcacatgccatctattttgatgggcagttttatcatacttggaattccatcatttctcggatcctttacttttttgttgttgttgctgtttttgaggcagtgtcttgctctgttgcacaggctggagtgcagtggtgcgatcttggctcactacaacctccacctcttgggcccaaacaatcttgccacctcagcctcccaagtagctggg

SEQ ID NO: 131469 - DNA, 494 bp, Homo sapiens
tccaacaaagggttttaatgtagattttttttttgcaccccatgctgttgattgctaaatgtaacagtctgatcgtgacactgaataaatgtctttttttaaaatgtgctgtgtaaagttagtctactctgaagccatcttggtaaatttccccaaaagtgtgaagttagaattccttcagggtgataccaggttctatttggaatttatatacaacctgctagggtggcgaagccactgtctttggaaaccttggtgtagttgaactgatagttactgttgtgacctgaagttcaccattaaaagggattacccaagcaaaatcatggaattattggttataaaagtgattgttggcacatcctatgcaatatatctaaattgaataatggtaccagataaaattatagatgggaatgaagcttgtgcatcatccattatcatgtgtaatcaataaacgatttaattctcttgaaaaaaataaaaataaaaat

SEQ ID NO: 131470 - DNA, 271 bp, Homo sapiens
attaccacttcactgttatgacagtgaggcctggagacattaaatgttttgcccaaagttaccaacatgttgttggcagaaaaatctggaacatatggcctcatctattgtctaaattttttctactagtgcacagtgccttttcaattgctttttatttgataatagtgacaatcataaataggggatttaatcaatactcttttaaaaaaaaaagtcacagaaagaaagcaattgtattgaaaacccctttctagtttttccagtaggt

SEQ ID NO: 131471 - DNA, 748 bp, Homo sapiens
gggaagcaggcgcaggctccgtgaggaggcaagaggaaaggccaagaactgacaaattaataaagggccatctacaagccaggaataaggccatcaccagaagacaaccccgccagtccttgatctgggacttccacatttcaaaactgaaaaaagataaatttctgttgtttcagctactcagtcaatggcattttgttatggcagcctaagctaagacataacctcagcctgctggcctgccttcactgtcctgggggaggcatggagagaccaggtggactggagtagactgttgagagacactggtctggtgaagatgtccaggaaaccacgagcctccagcccattgtccaacaaccacccaccaacaccaaagaggttgccaagacaacccggaagggaacagggacccgtcaaggaagttccaggaacaaaaggctctccctaaaagaccgccgcttcaaaaaaacctgaggaatggagtgggccaacactatccagccactccgaccagccaaaagaactcaatcaaaatgagacacagtaggaccacaagggcaaggagaccaccaccttctccagtctctctttgggcagccagtaattcccgggcaaggccagaaacctcaaggctacctgaaaagtctccagaggtctaaccccagaaaaatagccaacagggtgtagagtacattttacaccccaaagggtataccccatggtgacgaaaataaaatgaacatgt

SEQ ID NO: 131472 - DNA, 773 bp, Homo sapiens
ataaacatctttttgtaacctatattgaatcccagaggtcctgactcaggtttcagacaagctcaaaatacaggcacttacaacacaggtgctaacaacaatttgtcctaatcagttcagggccaaagttcagttccttcttctctggccaataggatgttttaattatgaaacgcagacatctcagcactttgggaagccgagactggcagatcgcttgagcccaggagtttgagatcagcctgggcaacgtggcgaaaccccgtttctacaaataatgcaaaattagccaggtaatgtggtggcgtgcccctgtagtcccagctatttgggaggctgaggtaggaggattgcttgagcctgggaggttgaggttgcagtgagccatgactgtgtcactgcagtgaagcctgggcgacagataacctgtctcttaacaaaggaaaaaacaacaaaaaaaaaaaagaaaaaaaacacatgtgtgtcggcggcacaccggggcctatggaaaaaggtttcttaaaaccaactcggtgggcgcgcgcgggccccatggtgggtaaggtgaacaggcggccgaaagcggtgtcccaggagaaacaccgggcccacacacaagagcgctgggatctctctccacccaatagaaaaaagcccgcggggacaacacggaaggcgttcgcgacaacaactcccaaagagaatttccgagagagacacacagcggggtcgtaccaacggggagtccaagagaagctccaaaatcacaatgc

SEQ ID NO: 131473 - DNA, 332 bp, Homo sapiens
gtggcattctcatttccagagtctcctagatttctagctagtctgctacttgagatctcaggctagtaagctgtgggtttctttctcaagaaacggctttctcaagccgtttatttctcaagaactttgccacttttagctgataaaaaagtacacttcttgaggccgggtgcggtggctcacgcctgtaatcccagcactttgggaggctgaggagggcggatcacaaggtcaggagtttgagaccagcctgaccaaaatggtgaaaccccgtctctactaaaaattgaaaaattagccaggtatggtggcaggcgcctgtagtcccagct

SEQ ID NO: 131474 - DNA, 775 bp, Homo sapiens
ggataagtttctcaactttacagtatgagaagaaatctcaacagatgtgactacctaaaaataaaggataatgtacttttaaaatgaccttaaatttaaaaaccaaacatcagctttgtgcagtggcagtgtcgtaaccagagagattttcccaagatactgttatggctaataagaaccttgctagttcaactgtgttcaactcgttgaatttcagtgagataaggcaaatatacaaaggtgaattgggcaggattgttcaataaagaattgattattgattataataatgaaaaatcagaaactaaacatccacaattggagggttgattaaatacattttgataaagctctataatggaatatcaggcagtcactaaaaataataaggtaatgaatatttattgagaatgaaagatccaatttattgctgagtgagaaattagattagagaacaacattaaaagtagttaactctgggccgggcgcagaggctcacacctgtaatcccagcactttgggaggctgaggcagttggatcatttgaggtcaggagtttgagaccagtctgaccaatatggtgaaaccccgtctctactaaaaatacgaaagtgagcttggcggtagtggtgcacacctgtaatcccagctactccagagactgaggcaggaaaatctcttgagcctgggaggtggaggttgtggtgagtcgagatcatgccactgcactccagcctgggcgacatggcaagactccatctcaaaaaaaaaaaaa

SEQ ID NO: 131475 - DNA, 248 bp, Homo sapiens
atccaaattggtctcatcttctaatccactactaccaagcttagttggtatgatctgcagccctttctctcccccacaattaactcctcccaagcctcatgctagctgcttccttgctcgactaacagtcaattaccagcagttcccagactttggggaaagggatagatctgaatatcccataccactacctggatcaaagcttctccctcattcccttttatttcatttatttatttatttatttt

SEQ ID NO: 131476 - DNA, 294 bp, Homo sapiens
attccaagagataagcgtaggccaggttattggtgacctccccagtgaggccggttgctctcctgtaggtagggaataccgaacctgagaaagatcctcaagccccagatgtcactgctggaaggccttagagatcatttgaatgtcactagaattttggatccctgagggcagggcctttgttttgttccctattgtaactccagagcccagagtagagtctggcacatagtatatgctaaataagcatttgctgggtaaatgaaaagctctagctcaatccccacttaattt

SEQ ID NO: 131477 - DNA, 378 bp, Homo sapiens
gaagtccacaggtatgtaacatatacaaagccacgaattttcacccaaactgaatgcaggttgttgagatcagtgctgaggtcatagtcctgaagccattagagtccattccacattagtgttgcctggattagcaatatttctcctgggtaatagggttataggtcagacaaaagatgcttcaaaggatatagtaagcctatggttgtattttccttattcattaactgtggatattaataggattactatatgccctgaaataagaaattggcaatacaaactaaagcaattagataatataattgtactatgtttttaagttcctcactactgaaagcagtccctaaataaagcaagtcttgattagttatctgg

SEQ ID NO: 131478 - DNA, 1082 bp, Homo sapiens
tgcaaaaagtgaaaagtctttttttgtgaagacttcatcactctatatcaaagacttaactgcttttaagctagtttgcaatcaggtgacaaatacagtactaatcataaggcaattctggaacaaaaacctattgctttgaaagctcaaaagagaagtttacatcttttaaatgaaataatgaattaaatagtgcaaattatttgcccccttttggctgggtgcagtggctcatgcctgtaatcgcagcacttcgggaggccgaggcatgtggatcacctgaggtcaggagtttgagatcagtctggccaacatggtgaaaccccatctctactaaaaatacaaaaattacctgggtgtggtggcacatggctgtagtcccagctactcgggaggctgaggcaggagaattgcttgaacctgggaggcggtggttacagtgagccaagatagcgccattgcactctagcctggacgacagagcgagactccatctcaagaagaaaaaaaaaattatttgccccctttcaacaaatatttagtgctaaaataaaaaaaaaatcaacaggagtggaaataacttcgtatggttactcaaagatagccactaaatttctcttaatatgtaaatgtatagttctctaagatttatttccttcttaaagtcttacccaatttagcttcatcattttatttctctatctttatagatagttttgcacttttaatcattgtttagatttctttatgtatagatttacatattgttcatatttatgtatccttttgctaaactgtgacattctcagcattataaaactcgtttggtgtgtttttatgggtgcatttcagcagtactgccatgtaagtctttttgaaatattagtcttttgttttatgagagtgatcaaatatattgtgaaaaataccatttttttcttagaatatatcagcatctgtttctgttgtatatagaatacaagttttatccttaatataaaagcaatacaagctttatccttaatataaaagcaatatttatttttcctgtttaattcaactcccttttattaaaaacaaaa

SEQ ID NO: 131479 - DNA, 253 bp, Homo sapiens
aaaaaaaaaccaaacttttgtccccaggagaatagtttgactggtttcctcatttctctttcaaatatatatttaagagatcttttatttcagcataacaataattatttgcaggagtttttgtgttagcgactaatttagaacttgtagatttgagctgcctgaattggccagacagctgtaatcgcactcctctattcttaatctctttatctgggcagcagctgccatatggccacagtcagctggatca

SEQ ID NO: 131480 - DNA, 790 bp, Homo sapiens
tatgaatgtatttctaatatgtgtaggtgttaaaaggtggagataaaaactttaagccagggcagaaagtagatagagaataataaatatgccatgatgtaatgaatcctttctgccaaaagccactcatctgagatggctgaaggatcagaaatccatttgccttgatcaattacaggagcaaaattctgacacagcctatttctctctctctttttttttttaagggacggggtcttgctctgttgccctgggtggagtgcagtggtatgatcatagctcagtgccgccttgtactcctgggcccaggcgatcttcttgcctcaacctccccagtaatatgatgacagatgcttactacagtgcctggctatttttttttttttaattcttaattcagacggggatctcactatattgcccatgcttgaggccagcagttcaagacaccgctggggtgactagtgagaccttgtctctcccaaattaaccagtctgggtgtgtggcgccccttgtgttctagcactgggaggcggggggaaaaggatcccttgagcccaggagttcaagttaggggggctatgattggacctctgcatcccagtctgaggaaaagccagaccctctttattaaaagccaaaaacaacaaaaaaaaacttgtgggcgccccgccccaaaaattttaaacactgtgtggcgcggccagttaagaaatggcactgctcaaaaccggcagacgcggtcacaaaaaccggccggtgaaccaggtggcaggtcaaagacgagca

SEQ ID NO: 131481 - DNA, 115 bp, Homo sapiens
tgtgggtttttttggattaaagtaaaatatgtaataagtaaaaatggagtgcagtgtataatctgaatctaatcatgggaaacaacaggaacttttttgtgacggcgttcaccat

SEQ ID NO: 131482 - DNA, 526 bp, Homo sapiens
ttatctgcagtgtatacattcaagaccccagtggatacctgaaactgtggatagtactaaaccctttgtgtgtgtgtgtgtgtgtgtgcgcgcgtgtgtgtgtgtatatactatgtttttccagctgataatgagctactaagtgactaacaggtgggtagcttatacaaaatggatatgctggataaagggacagttcatgtcctgggagagacagagagtgaaggggcaagatttcatcacgctattcagaatggcacgcaatgtaagacgtgtattatttatttctaaattttccatttaatattttcagaccgtggttgaccataggtaactgaaaccacagaaaacgaaaccatgtatgaggtggactactgtaccacattttctttatccactcatccatcaatagacgtcttggttgctttcacatcttggctattgtgaacaatgctgcagcgaatatgggtgtgcaagtatcttcaagatcctgttttctatccttttgaatagatatgcggaagtc

SEQ ID NO: 131483 - DNA, 481 bp, Homo sapiens
aacaaatttaaaaattgagataagcaaaaaagaaaaatccctatgaccagccctcccccggccgctgtgagtgggcagacgctggcactcgctaatatttggttgatgtttttccggacttttttctatgcatacttgcgtataaggcacttatttttttcaaaagcatgcaatcccacccacagcctggcactgaggagccaggacagccactcattcaggaagggcctctaccagtttggatgacgaatattatctcccaatcatgacctgtagctctgtggcaagaggctgttaggacatgacatttcaaaacagaattgttctgaaataatttttacttggctacaaagaacaaatagcaagagtgatgccagtctggggtaggataggcagctgctgggcagatgaaatattttttgtgtaaggtagtgatggtctttgtggaaggttacagtttttgctttagcacagtgcctgg

SEQ ID NO: 131484 - DNA, 272 bp, Homo sapiens
tgctgggattacaggcatgagccactgtccctggcccaatacatattttaaagtaaacattgtattacagaataccacagacagaaaagcacacaatgaattttcatgatgtgactccgtatacccagcaggacgttcccggcccccacgatcacccagcatggcccacctccgtgaccatcccttctccaacaccagactccccaagccctggcacagagatggctgtctggggtggccccgtagggacagtcgctcagtgctgtgtggtg

SEQ ID NO: 131485 - DNA, 813 bp, Homo sapiens
aaccgttccaaacaatggaaaaagtggaactccttcctaatcattttttgaggccagtaccatcctgataccaaaacctggcagagacacaacaaaaaaagaaaatttcaggctaatatccctgatgaaaatcgatgtgaaaatcttcaataaaatactggcaaaccaaatccagcagcatgtcaaaaagcttatccaccacgatcaagttggccacatccctgggatgcaaggctagttcagcatacgcaaatcagtacacataatccatcacataaacagaaccaatgacaaaatccacatgattacctcaatagatgcagaaaaggccttcagtaaaatattcaacaccccttcatgctaaaaactctcagtaaactatgtattgatggaacgtatttcaaaataataagagctgtttatgacaaatccacagccaatatcatactgaatgagcaaaagctggaagcattccctttgaaaaccggcacaagacaaagatgccctctgtcaccactcctattcaacatagtattagaagttctggccaggacagtcaggcaagagaaagaaataaagggtattaaaataggaagagaagaaatcaaattgtctctgtttgcagatgatgtgattggatatataacatttttgaggcctttaatgcatgaattctttattgttccaaaaatgtgaaaaagtagtacatttctggtagggaagtggagaacttgttatttaacaaataatttcaatgcgacattaaaattctataaattttaaacttttcttcatcattaaatttagtatagg

SEQ ID NO: 131486 - DNA, 273 bp, Homo sapiens
ccagaactcttaaaacaccccccagacagatattccaatttggactacctgacaacaatgagctacaaacttcctgtaccaactcttttctaaacttacctagtgtagtaggacctgccagatgcaccgtattacctaaccttgtaatgaatgccattgaatcctttcaaaggccagttcccatcagttctcctaactgacattctcaccatgccaataagacaggcagattacaggacaattcaagactcattcctgacacatggcaaagtt

SEQ ID NO: 131487 - DNA, 707 bp, Homo sapiens
attttcatgtttttaaataatattattatcttgatttttcttgacttttcagtcttacatattgtctgttgacttccaagaggaaagctgtgttaactccgctaagaattgtacaaaatacgcttaaagtagaaaggaggtcacatcctttatataggtcagctcatttaccattctctgaaggtagtagactggtactcccttgttttatagacaaactaaaattcagacaagttaaattacctccacatgctcacacagctctgtcacggtctagtgcatcaaactctagtctgagtccaaagcccgttgtctttctcaccaaaccaaattacctccaggatagagaaatcaggaaaatttctagaaaagggaaagaagtaatacataacagttgagccagaccttaagaatggactgaattttctgatgtatctgtttgattatacgatacatataaggaaggtgtgggagaaaagtctgggaagatagtttaggcttatggcatggaaagctaaagtaagaagcttaaaattacatagaaaggcagcatgtcatcaaaggttttttggacagaggattagaattatctctgaggaagattaagctagaagtggtgggtagataaaatagattggaggtagaagcctgaagtcaaaatggtccaggaaaagtattagttgaagagatggtgaggaaaaggttga

SEQ ID NO: 131488 - DNA, 266 bp, Homo sapiens
cttctggtcctgccatggctgctgctctctgctgaaggctgtggggctctagggagagtccagatcaccctgggatttctccactgcccaatgtgaagcctaaactgtggggtcccagctcagccttcctcactggctctcaactccaccccacccctctattcaggaaggtgaggggcatctctttagcagaccagactgttttgagaagtgtctctcatactttaactgaagagtcatgcagattctaatggtctggggagggc

SEQ ID NO: 131489 - DNA, 473 bp, Homo sapiens
atcatgtagaaacagtgggagccctgagcttgttttcctgcaactagatggtcccatctgggggcaatgggagacagtgacagatcatcaggcattggattatcataaggagcatacagcccagatccctcacatgcaccgttcacaatagggttcacactcctatgagaatctaatgccaccactgatctgacaggaggtggagctcaggaggtaatgtgagcaatagggagcggttgtaaatacaaatgaagtttcgcttagttgcctgccactcacctcctgctgtgaggcctggttcgggagcaggccaccgaccagtaccagtccgtggcccagtggttggggactcctgaactaaatgatgcaggacctaaaggaggaagcatgttgggaatacactagtggaagtggaagctattccatcagtagagagaaccctcagtgaggcaggtggaaccaggtcacagaga

SEQ ID NO: 131490 - DNA, 551 bp, Homo sapiens
agtggaccttatctcatttaagcctacctacaatcctattttacagatgagaacattgaggccaggaaagataaatatttcccaaagttacatagcctgtaaaaaaaaaaaaaaaaaaagtggagctagaattcgagcccagaggctgctgatttttaaggctatgaataaagttgggatgaatagaaaacatcacagggaacagaatctcctgtaggatccgaaagggtccctaaagcctagtgagatggacccccctccaagcagatgaagttttacagggtcatatgtgaggtcccaaaaggagggactggagggctgagcagcagggaagaaacacagtcataaatatggcattagcatcacttagtgagaacaagtttgcatcctaatcccagcaacacgagctggcaacttccctgccattcacaaggtgtgatctcatacccaggcacgttccacgggagctgcagggcacgaagtcagaggcagctcaggggatctctccttacctaggagcccagaggccgcctgcagcaggagcaggcagc

SEQ ID NO: 131491 - DNA, 253 bp, Homo sapiens
aaccctggtattctgactccatggccttaactgcttaatttatgatatagtattactgtggagatatgcataaattgcagtgagaatgaacaggaagacatctagggatgttattgttctatttttagttattgtggttaactaaaattttaagtctttgtagaggaggtgacatttgtgtagggtgctgaagggatgagtaagtttactattggagaagagtgagaaggcatttctagtagcaagtttgggt

SEQ ID NO: 131492 - DNA, 335 bp, Homo sapiens
cattttagcaatatacccaggtgattataaagtctgagatgcctgacgtggaacaggcctggggctctcctagttgatatttgggaagctggcacagtattccaatgggagctagtgaaggggtggtgttttaaggagaatttcacaaggaaattcattttacatgtaagttgtgctgagtaaatagtcctgcattagtgcttagcccactgtggggtgactgatgtttcttaagaaataagtgtatgaataaacaaatattcctcctgtttatacagccctgctaaaatatttaaagatctgcattctctgaaattgattaaacagcctgtctt

SEQ ID NO: 131493 - DNA, 369 bp, Homo sapiens
ttactggaggagggagctctgtgagcaaaatcctggagatggggagaaaacactgagtgtggttgagccgcgtggtgggctgtgatgtcggggttgggggtgagaaaacctggaagaggctagttggaactagaagggagttgaatttgaaatttacactaagaaatttgtacttaacttggtaggtagtgagttgttatggaaatattggagcaggacatggcaggagaggaagtgcacttggggaaaccttattgggcagtgtgtttgtagggtggataggagtataaagagccttgttaagaaattatttcagctgtgtagaaggatgagagctaggctttctggagtaaagatgttgggggtaat

SEQ ID NO: 131494 - DNA, 406 bp, Homo sapiens
atcaaaataccaccatcattcttcacagaacttaaaaaaaaatcctaaaattcatacagaaccaaaagagagcccacatagccaaagcaagactatgcaaaaagaacaaatctgggaaacttcacattacccgatttcaaactatattataaagtcaccaaaacagcatggtactggtataaaaacaggcacacagatcattggagtagaatagaaaacccagaaataaagccaaatacagccaactaatcttcaagaaagcaaacaaaaatgtaaagtggggaaatgacatcctattcaacaaatagtgttggaataattggcaagccacatgtagaagaatggaactggatcctcatctctcactttatacagaaatcagctcaagataaatcgaagtcttaaa

SEQ ID NO: 131495 - DNA, 340 bp, Homo sapiens
taatgatagctgatgagctaaaaaaaaaaaaaaagcaaaaaaatttcataatgttttcagaaagtttatgagtttgtgttaggctgcattcagagctgtcctgggccacatgtggcttgcaggccatgggttggacaagcttgctataaaccatccctaatattcagtctctagaactgaacaggcagttaaattcagcctctgtgcttttgagcttgtcaccctcacctgtgtggtagaggcccgagtcgataaggcagccatccctgcaggtgggcagctgtgcagctctgttcccaatcagatatcccattctcattctgctagactcttctctttc

SEQ ID NO: 131496 - DNA, 743 bp, Homo sapiens
  misc_feature (714)..(714): n is a, c, g, or t
taattttcttctcttagatctaagaccatctttaaaacttttctgcattaatattatatcaaggatttgctggaaggtactttaattcagtcataaggtggtggaattaattctttttaatgattagataaacaattctatttccaggtttaagcaggttttagtgcagaaagagatcttagagataattacccagttcaataagttttacattttttaagtagcaaagctcctattttaaaaatgacaggaccagtagtgtcttttatccaactacactatatggtagaaaagttacattttcccctcactttctcatatgaaaggcaaagatgttcatacacaatcacttctttttagaaagcttttcagaaacatttttggagtttcatgcacctttacagcatgtaaaaacaatgaatgagcttcttaaacagtttaaaacttcattgtttgtccatgaatactcaatttttaatttctgtaatttattacttctgtgacccaagagagattaatttactctgagttttgtttttccttctgtaataataatacataataatatctcaatccataggataattacgagattaataagataattcatggattcggtttataaaggaagcatttgtagtaagctctgttaccattatggttaccttttttactgttcccagaccagtgctttttctaggggcttttatttcnacctcatgctaaaattcacagttagaaaa

SEQ ID NO: 131497 - DNA, 436 bp, Homo sapiens
actatgcctggctaattttttaattttttgtagagataggggtctccctatattgtacaggctggtcttgaactcctggactcaaatgatcctcctgcctcggcccccacaaaatactgggatttacaggcatgaggcactatgccctgccaagatacagaagattttaacatgaccaacgaatttgatttagtgatgtacatggaacattgcacctcaaagttgcaaatgtacatggaacatttattaaaattgatgatatactatgaatatcattgattgtatacaatttctctgatcacagtggaattcagctacaaatcaatatcaataagatagccaggaaatctaaattaaagaaaaacaaaagaataagacagatggagaactgaaatagggctttgttattaataaagctaatttagatatggcatgt

SEQ ID NO: 131498 - DNA, 116 bp, Homo sapiens
ttattttccttctttattgttagtatcactggtggttggcaccctcaagtgtcttcaaacattttttattatagaaaatttcaaaatatacaatgatagaactataaaataaactc

SEQ ID NO: 131499 - DNA, 287 bp, Homo sapiens
ttgtgcagggcaccctgagcttaaattcctaccatgacccctgattggaaaagatgggctaggaaaggtatctctctggtccccagcagttaagcttgtatttaaactagaagtttttagatcaccagccctcatcctctatcacctccaccactcctgtccctgggtagccttactttttgttttgttttgagatcagtgattaaacctgctggtgcataccagggctgcccgggtgctcagctcttgtttgctggtgccaccgctcaggaagcatgcatctccct

SEQ ID NO: 131500 - DNA, 684 bp, Homo sapiens
atatttattttaaaaagtgatactgtgatttttcagctacaaaaagttgttattggtgttttcttttattactgtcaagaagataaatggtagagtatacataaaatatatgaaatttggcaagttaaagttattgtttgaacactttgtattgaagaaattctgcacttgaagttcttgagtgttctttgttgcccattattgtttgagatacagaacgtctttaccactaatgcagctgagtttttagatttaacaccagattaaggagaatcaaaatgatcagtcttctacatatgatgtataagtttgtggtccctttgtggcacttatttaaaaccaacttctaacagagtcatgtgtttctatttctcaccctgcataagtgcttcaggcctgagtcagacattccttccatcacagttatttatttatttatttatttttgagatggagtgtcgctctgtttcccaggctggagtgcagtgacgtgatctcgactcactgcaagctctgcctcccgggttcacaccattctcctgcctcagcctcccgagtagctgggactacaggcgcccaccaccacgcccggctacttttttgtacttttagtagagatggggtttcaccgtgttagccaggatggtctcgatctcctgacctcgtgatccgcctgcctcggcc

SEQ ID NO: 131501 - DNA, 677 bp, Homo sapiens
cacggtggcttacgcctgtaatccctgaactttgggaggccgaggtgggcggaccatgaggtcaggagatcgagaccatcctggctaacacgtgaaaccccatctctaccaaaaatacaaaaaattagctgggcgtggtggcaggcgcctgtagtcccagctactcggtaggctgagacaggagaatggcgtgaacccaggaggcggagtttgcagtgagccgagatcacaccactgcactccaacctgggcgacagagagagactcctgtctcaaacataaataaataaataaaaaattaaaaacacaatgaatacatcttgctctttaaggtcacaactttatgggagacaggaacctttcacactttatggaaaggtcaaagctatcctaaaaatggcctttgaacccaatacatttttgactcagaggttcagtttatctgcattttatcatttcattataaaataagatgaccaggcccttttttttctggtctattatttattagatatgagtaaagaagcttgcttttactgaaagtctgacacataccactgtatactgtgtcttctccttgtaaaaagcatattcaatttctccctcttttcttaaaaatagaagtagtttttggctctgttctttcttgctccctgtctctctccacatctttaaaa

SEQ ID NO: 131502 - DNA, 424 bp, Homo sapiens
aataatcatccccaacctgggtaatatacgatttacatttttgataaatgatattaaagtataaatctcccagtaggtacggaatttccaagctaaaacattcatcatttataaaagcatcaagtggagatgctgagataaatattctcttctcaccgtgactagcacctactagttttttgttttgtttttgtttttttgccatcaggtgtcatcagaaaaaagttgtaggaaggaatttatttgaagaagcttggccaggcgtggtggcttatgcctataatcccagaacttgggaggctgaggcaggcggatccacctgaggttgggagttcgagaccagcctgaccaacatggagaaaccctatctctactaaaaacacaaaattagctgggcgtggtggcacatgcccataatcccagc

SEQ ID NO: 131503 - DNA, 336 bp, Homo sapiens
tgatgtgtacctaggactgaggacaaacctgttccagagaacaggagtcaaacccaaagtgagacttgaatagctttaaggaaagcatttgtgatcaaccagtgggcctagggccagaccagaagaggactctttttctccattgatatacagggacacatagagcaggaagattcatagctttggtagctttgccacccagcaagccataccagggcatgcagccgccattgttactttgtctttggaaacccctctacccttgacataagcaaaagtgcataaggcgcctcctctttaggacattcatttgcctcaaatactgcattggcttcc

SEQ ID NO: 131504 - DNA, 448 bp, Homo sapiens
agactgagagaaaattaatttatgttgtttaagccacccagcctgtggtattttgtttttgcatcctgactgcctaatacagatggttaccagagggtaaactgaaaaaatgtgaatagtgagagcataaagtaagacaaggaaaaagaagccttcttttgtttgttcataaatattcaaaatttatcttgtgccagacattgtactagatcccaaggttaggataatgaacatgatacaatctctacctgcatagaacttacatttttggcatgtcacaaacaagaaataatagaaaagccaaatacagatcatgagaagtggtatgaatgaagatgaaagaaggaagacgaaataaagaataattatattcagtgcaagtgggtcttgagcagtcaattaagaactctgaggagatagtatttaggctgagacctgaaggatgaaa

SEQ ID NO: 131505 - DNA, 294 bp, Homo sapiens
ccagccagcctatgagccttgcctaattgactctttgcagtggccttagaaggttagcattactgccccatcttaaagatgataaaattgtggctcagccagagtgccactgtgcccaaggctgcccgccagtgagcgcggggctggtgagtggggggagagtcagggcagcctgcgtggggtggctccctctggcttgccagggatcccagcctgccttagtccagaggtgcactgggcgggatgagctgtcagcatcagagcccctgccctcaaggcctggcccaatgcatc

SEQ ID NO: 131506 - DNA, 656 bp, Homo sapiens
taaggtcgtatggacctgtattgtgcaagatggcagccactagccatgtaaggctatggagtacatgaaatgcaactagttcacatggagatgtgctttgactattacttagtacaacaaacaaacaaaacaaaagcaacgtaacatatctcagaagtgaaaatactgttaacatactgggctaaataaaatacattatcaaaattaacttcgagtggttcattttccattcatttttcctttatcaaaaacttttaaattacctacgtgaccctcatgtgtagcttacattatatttctattgggcagtgatgagataagctatgaggtcttatggaccacagtaagggtgattgcttttactgagagagaagaaaagccactgcagggtttgggcacagcagagcatgatgtgacttaacatttcacggattgttttcgctgcggggaggactacagcctctaaggggcaataaagaagcagatgagagaggatggtggcttggaccaaggtggtggcagcggaagtagttctgatagatgaaattttggatatattttacaggtagagtcaacaagacttactgatgaactggatgaaggacagatgagaaagagggaaatcaagcatgaccagaggtgttttcgataagcaa

SEQ ID NO: 131507 - DNA, 459 bp, Homo sapiens
ccatatagagattccactgtaccactagaatggctaaaattaaaatgaaaataccaagtgttgacaaggaggagaagcagctcttcactctcatgtactgctagtgggaatgtaaaatggagccaccatgatgaaaactgcctggcagtgtggacaaaagcaaaccatatgcttccccaatgactcagcaattcaatctcaggtatttacccaaaagaaatgagtacatgtgtccacaaatgacttctatccaagtgttcagagaagctttcatcctaacagtcaaactgcaaacccaaacatcctgcaatgagtaaatggataaacaaattttcatatattcacacaacagaaaattactcagcagtaaaaaggaacagatcactgctaacacacaacatgaatgaatatccaagatggcaaggacagtgaaagacccacccacaaaagacacattca

SEQ ID NO: 131508 - DNA, 384 bp, Homo sapiens
acatgctactcctatggatgaatctcaaaaacattataccaaatgaaaaagctggatgtagaaaaccacctgatatgtggtccagtcatatgaaatatccagaaaaagcaaatctgtagaggcaaaaagtagactagtggttgcctggggttgggatggagactgactgcaagtgggcacaagggaactttctgggcgatgaaaatgttctctgtaaattcactaaaaatcgttgagttgtacacttaaaatggatgaatattatggtacataaattatactccaaataaagccatttaaaaggatagctaggagcagtggttcacatctgtaactccggaactttgggaggcccaggtgggagaatcacatgagccccaggac

SEQ ID NO: 131509 - DNA, 485 bp, Homo sapiens
tacttgtaagacatcctattgttctccgtggtattcattctcccttgctgcagtaagtcagtaaacccaacttcattcaactacaggtgtgttcctggtggtctttggagcacactgatacatcttaccagaacttttaagaaccttgcatttacattcctagtatggcctataatctgttattatctactcagtgggtttaagagcactaagctccaaattatactcaattaaaagtttaaattagctaagtttaaattaattaagttaatattaggtgtcagcttgattagagtgaggaatgcctagatggctggtaaagtactgtttctgggtgtgtctgtgagggtgttgccagaggacactgacatttgagtcagtgaaccagaagaggaagacccatcttcagtgttggtgggcaccacccaatcagctgccagtgcagctatcacaaaacaggcagaagaaggtaggataagtttgct

SEQ ID NO: 131510 - DNA, 2428 bp, Homo sapiens
ggggtagacctgtgggcacggacgcacgccactttttctctgctgatccaggcaaatgtgcaataccaacatgtctgtacctactgatggtgctgtaaccacctcacagattccagcttcggaacaagagaccctggaatcatcggactcaggtacatctgtgagtgagaacaggtgtcaccttgaaggtgggagtgatcaaaaggaccttgtacaagagcttcaggaagagaaaccttcatcttcacatttggtttctagaccatctacctcatctagaaggagagcaattagtgagacagatcttgatgctggtgtaagtgaacattcaggtgattggttggatcaggattcagtttcagatcagtttagtgtagaatttgaagttgaatctctcgactcagaagattatagccttagtgaagaaggacaagaactctcagatgaagatgatgaggtatatcaagttactgtgtatcaggcaggggagagtgatacagattcatttgaagaagatcctgaaatttccttagctgactattggaaatgcacttcatgcaatgaaatgaatcccccccttccatcacattgcaacagatgttgggcccttcgtgagaattggcttcctgaagataaagggaaagataaaggggaaatctctgagaaagccaaactggaaaactcaacacaagctgaagagggctttgatgttcctgattgtaaaaaaactatagtgaatgattccagagagtcatgtgttgaggaaaatgatgataaaattacacaagcttcacaatcacaagaaagtgaagactattctcagccatcaacttctagtagcattatttatagcagccaagaagatgtgaaagagtttgaaagggaagaaacccaagacaaagaagagagtgtggaatctagtttgccccttaatgccattgaaccttgtgtgatttgtcaaggtcgacctaaaaatggttgcattgtccatggcaaaacaggacatcttatggcctgctttacatgtgcaaagaagctaaagaaaaggaataagccctgcccagtatgtagacaaccaattcaaatgattgtgctaacttatttcccctagttgacctgtctataagagaattatatatttctaactatataaccctaggaatttagacaacctgaaatttattcacatatatcaaagtgagaaaatgcctcaattcacatagatttcttctctttagtataattgacctactttggtagtggaatagtgaatacttactataatttgacttgaatatgtagctcatcctttacaccaactcctaattttaaataatttctactctgtcttaaatgagaagtacttggttttttttttttcttaaatatgtatatgacatttaaatgtaacttattattttttttgagaccgagtccagcctggatgacagagtgagacccaatctcaaaaaagaaatcgtttcaccatgttggccaggctggtcttgaactcctgacctcaggtgatccacccacctcggcctcccaaagtactgggattataggcgtgagccacggcatccagcctcatctttcttttaaccaataaacatgatgctgtatcttaaaaagagcactgagcagggacttaagggatcgagtcctcaaccaaactgatttaattactcaggatttttaaaaagcatcagaggctatttacaatcttaatcataggggttcagtaaaataaaaataagaagtaaaaaagcaagagaaattattctgtaaatctaactggtgtaattcccataatcatgcaattaagttttactcttgagtttcctgacagccattggtaaaaagagaaacacatcaggatttataatttttatcatccaattatgggaagcaagcatgttggccccaggagacgaactcttctactaatttatagcatgtatcctttcatcaagggccactgagccagttggtgagtcaacgggtgaacctaagatgcaaggatgttttccaggtgactatttaaaaaaataaataatccaccaacgtgattgaccttggcgagatcatgtttctagtctatacctcagtttccccatctgtaaagtgaggataatgtcccaccccatgtaactgtggtgaggaccaactgcaacactgtgcctgcgagtctccttggaaaagtgtaaggttctacacaaatggaaagtgatctgatcacactcagtgtccccagcccagcctttcagtgccctggccctggggtgggggacaatactctcctcacccccttcactagtcttcatgaatagcaaggaggccataacataatttggtctaaaccccttcctttttaaaagaatgatggcaaaatgtgcataacattaaatttaccattttaaagatttct

SEQ ID NO: 131511 - DNA, 1726 bp, Homo sapiens
ggggtagacctgtgggcacggacgcacgccactttttctctgctgatccaggcaaatgtgcaataccaacatgtctgtacctactgatggtgctgtaaccacctcacagattccagcttcggaacaagagaccctggttagaccaaagccattgcttttgaagttattaaagtctgttggtgcacaaaaagacacttatactatgaaaggaaaatatataccatgatctacaggaacttggtagtagtcaatcagcaggaatcatcggactcaggtacatctgtgagtgagaacaggtgtcaccttgaaggtgggagtgatcaaaagaaagaagctaaagaaaaggaataagccctgcccagtatgtagacaaccaattcaaatgattgtgctaacttatttcccctagttgacctgtctataagagaattatatatttctaactatataaccctaggaatttagacaacctgaaatttattcacatatatcaaagtgagaaaatgcctcaattcacatagatttcttctctttagtataattgacctactttggtagtggaatagtgaatacttactataatttgacttgaatatgtagctcatcctttacaccaactcctaattttaaataatttctactctgtcttaaatgagaagtacttggttttttttttttcttaaatatgtatatgacatttaaatgtaacttattattttttttgagaccgagtccagcctggatgacagagtgagacccaatctcaaaaaagaaatcgtttcaccatgttggccaggctggtcttgaactcctgacctcaggtgatccacccacctcggcctcccaaagtactgggattataggcgtgagccacggcatccagcctcatctttcttttaaccaataaacatgatgctgtatcttaaaaagagcactgagcagggacttaagggatcgagtcctcaaccaaactgatttaattactcaggatttttaaaaagcatcagaggctatttacaatcttaatcataggggttcagtaaaataaaaataagaagtaaaaaagcaagagaaattattctgtaaatctaactggtgtaattcccataatcatgcaattaagttttactcttgagtttcctgacagccattggtaaaaagagaaacacatcaggatttataatttttatcatccaattatgggaagcaagcatgttggccccaggagacgaactcttctactaatttatagcatgtatcctttcatcaagggccactgagccagttggtgagtcaacgggtgaacctaagatgcaaggatgttttccaggtgactatttaaaaaaataaataatccaccaacgtgattgaccttggcgagatcatgtttctagtctatacctcagtttccccatctgtaaagtgaggataatgtcccaccccatgtaactgtggtgaggaccaactgcaacactgtgcctgcgagtctccttggaaaagtgtaaggttctacacaaatggaaagtgatctgatcacactcagtgtccccagcccagcctttcagtgccctggccctggggtgggggacaatactctcctcacccccttcactagtcttcatgaatagcaaggaggccataacataatttggtctaaaccccttcctttttaaaagaatgatggcaaaatgtgcataacattaaatttaccattttaaagatttct

SEQ ID NO: 131512 - DNA, 3110 bp, Homo sapiens
ggcacgagggaggcaccgcggcgagcttggctgcttctggggcctgtgtggccctgtgtgtcggaaagatggagcaagaagccgagcccgaggggcggccgcgacccctctgaccgagatcctgctgctttcgcagccaggagcaccgtccctccccggattagtgcgtacgagcgcccagtgccctggcccggagagtggaatggtccccgaggcccagggcgtcgtgcttccgcgcgccccgtgaaggaaactggggagtcttgagggacccccgactccaagcgcgaaaaccccggatggtgaggagcaggcaaatgtgcaataccaacatgtctgtacctactgatggtgctgtaaccacctcacagattccagcttcggaacaagagaccctggttagaccaaagccattgcttttgaagttattaaagtctgttggtgcacaaaaagacacttatactatgaaagaggttcttttttatcttggccagtatattatgactaaacgattatatgatgagaagcaacaacatattgtatattgttcaaatgatcttctaggagatttgtttggcgtgccaagcttctctgtgaaagagcacaggaaaatatataccatgatctacaggaacttggtagtagtcaatcagcaggaatcatcggactcaggtacatctgtgagtgagaacaggtgtcaccttgaaggtgggagtgatcaaaaggaccttgtacaagagcttcaggaagagaaaccttcatcttcacatttggtttctagaccatctacctcatctagaaggagagcaattagtgagacagaagaaaattcagatgaattatctggtgaacgacaaagaaaacgccacaaatctgatagtatttccctttcctttgatgaaagcctggctctgtgtgtaataagggagatatgttgtgaaagaagcagtagcagtgaatctacagggacgccatcgaatccggatcttgatgctggtgtaagtgaacattcaggtgattggttggatcaggattcagtttcagatcagtttagtgtagaatttgaagttgaatctctcgactcagaagattatagccttagtgaagaaggacaagaactctcagatgaagatgatgaggtatatcaagttactgtgtatcaggcaggggagagtgatacagattcatttgaagaagatcctgaaatttccttagctgactattggaaatgcacttcatgcaatgaaatgaatcccccccttccatcacattgcaacagatgttgggcccttcgtgagaattggcttcctgaagataaagggaaagataaaggggaaatctctgagaaagccaaactggaaaactcaacacaagctgaagagggctttgatgttcctgattgtaaaaaaactatagtgaatgattccagagagtcatgtgttgaggaaaatgatgataaaattacacaagcttcacaatcacaagaaagtgaagactattctcagccatcaacttctagtagcattatttatagcagccaagaagatgtgaaagagtttgaaagggaagaaacccaagacaaagaagagagtgtggaatctagtttgccccttaatgccattgaaccttgtgtgatttgtcaaggtcgacctaaaaatggttgcattgtccatggcaaaacaggacatcttatggcctgctttacatgtgcaaagaagctaaagaaaaggaataagccctgcccagtatgtagacaaccaattcaaatgattgtgctaacttatttcccctagttgacctgtctataagagaattatatatttctaactatataaccctaggaatttagacaacctgaaatttattcacatatatcaaagtgagaaaatgcctcaattcacatagatttcttctctttagtataattgacctactttggtagtggaatagtgaatacttactataatttgacttgaatatgtagctcatcctttacaccaactcctaattttaaataatttctactctgtcttaaatgagaagtacttggttttttttttttcttaaatatgtatatgacatttaaatgtaacttattattttttttgagaccgagtccagcctggatgacagagtgagacccaatctcaaaaaagaaatcgtttcaccatgttggccaggctggtcttgaactcctgacctcaggtgatccacccacctcggcctcccaaagtactgggattataggcgtgagccacggcatccagcctcatctttcttttaaccaataaacatgatgctgtatcttaaaaagagcactgagcagggacttaagggatcgagtcctcaaccaaactgatttaattactcaggatttttaaaaagcatcagaggctatttacaatcttaatcataggggttcagtaaaataaaaataagaagtaaaaaagcaagagaaattattctgtaaatctaactggtgtaattcccataatcatgcaattaagttttactcttgagtttcctgacagccattggtaaaaagagaaacacatcaggatttataatttttatcatccaattatgggaagcaagcatgttggccccaggagacgaactcttctactaatttatagcatgtatcctttcatcaagggccactgagccagttggtgagtcaacgggtgaacctaagatgcaaggatgttttccaggtgactatttaaaaaaataaataatccaccaacgtgattgaccttggcgagatcatgtttctagtctatacctcagtttccccatctgtaaagtgaggataatgtcccaccccatgtaactgtggtgaggaccaactgcaacactgtgcctgcgagtctccttggaaaagtgtaaggttctacacaaatggaaagtgatctgatcacactcagtgtccccagcccagcctttcagtgccctggccctggggtgggggacaatactctcctcacccccttcactagtcttcatgaatagcaaggaggccataacataatttggtctaaaccccttcctttttaaaagaatgatggcaaaatgtgcataacattaaatttaccattttaaagatttct

SEQ ID NO: 131513 - DNA, 2019 bp, Homo sapiens
ggggtagacctgtgggcacggacgcacgccactttttctctgctgatccaggcaaatgtgcaataccaacatgtctgtacctactgatggtgctgtaaccacctcacagattccagcttcggaacaagagaccctggttagaccaaagccattgcttttgaagttattaaagtctgttggtgcacaaaaagacacttatactatgaaagaggttcttttttatcttggccagtatattatgactaaacgattatatgatgagaagcaacaacatattgtatattgttcaaatgatcttctaggagatttgtttggcgtgccaagcttctctgtgaaagagcacaggaaaatatataccatgatctacaggaacttggtagtagtcaatcagcaggaatcatcggactcaggtacatctgtgagtgagaacaggtgtcaccttgaaggtgggagtgatcaaaaggaccttgtacaagagcttcaggaagagaaaccttcatcttcacatttggtttctagaccatctacctcatctagaaggagagcaattagtgagacagaagaaaattcagatgaattatctggtgaacgacaaagaaaacgccacaaatctgatagtaaaagaagctaaagaaaaggaataagccctgcccagtatgtagacaaccaattcaaatgattgtgctaacttatttcccctagttgacctgtctataagagaattatatatttctaactatataaccctaggaatttagacaacctgaaatttattcacatatatcaaagtgagaaaatgcctcaattcacatagatttcttctctttagtataattgacctactttggtagtggaatagtgaatacttactataatttgacttgaatatgtagctcatcctttacaccaactcctaattttaaataatttctactctgtcttaaatgagaagtacttggttttttttttttcttaaatatgtatatgacatttaaatgtaacttattattttttttgagaccgagtccagcctggatgacagagtgagacccaatctcaaaaaagaaatcgtttcaccatgttggccaggctggtcttgaactcctgacctcaggtgatccacccacctcggcctcccaaagtactgggattataggcgtgagccacggcatccagcctcatctttcttttaaccaataaacatgatgctgtatcttaaaaagagcactgagcagggacttaagggatcgagtcctcaaccaaactgatttaattactcaggatttttaaaaagcatcagaggctatttacaatcttaatcataggggttcagtaaaataaaaataagaagtaaaaaagcaagagaaattattctgtaaatctaactggtgtaattcccataatcatgcaattaagttttactcttgagtttcctgacagccattggtaaaaagagaaacacatcaggatttataatttttatcatccaattatgggaagcaagcatgttggccccaggagacgaactcttctactaatttatagcatgtatcctttcatcaagggccactgagccagttggtgagtcaacgggtgaacctaagatgcaaggatgttttccaggtgactatttaaaaaaataaataatccaccaacgtgattgaccttggcgagatcatgtttctagtctatacctcagtttccccatctgtaaagtgaggataatgtcccaccccatgtaactgtggtgaggaccaactgcaacactgtgcctgcgagtctccttggaaaagtgtaaggttctacacaaatggaaagtgatctgatcacactcagtgtccccagcccagcctttcagtgccctggccctggggtgggggacaatactctcctcacccccttcactagtcttcatgaatagcaaggaggccataacataatttggtctaaaccccttcctttttaaaagaatgatggcaaaatgtgcataacattaaatttaccattttaaagatttct

SEQ ID NO: 131514 - DNA, 2112 bp, Homo sapiens
ggggtagacctgtgggcacggacgcacgccactttttctctgctgatccaggcaaatgtgcaataccaacatgtctgtacctactgatggtgctgtaaccacctcacagattccagcttcggaacaagagaccctggttagaccaaagccattgcttttgaagttattaaagtctgttggtgcacaaaaagacacttatactatgaaagagagatggagtttcactatgttgcccaggctggtctggaactcctgggctcaagggatctgcttacctcggcctcctaaagtgctagatttacaggttcttttttatcttggccagtatattatgactaaacgattatatgatgagaagcaacaacatattgtatattgttcaaatgatcttctaggagatttgtttggcgtgccaagcttctctgtgaaagagcacaggaaaatatataccatgatctacaggaacttggtagtagtcaatcagcaggaatcatcggactcaggtacatctgtgagtgagaacaggtgtcaccttgaaggtgggagtgatcaaaaggaccttgtacaagagcttcaggaagagaaaccttcatcttcacatttggtttctagaccatctacctcatctagaaggagagcaattagtgagacagaagaaaattcagatgaattatctggtgaacgacaaagaaaacgccacaaatctgatagtaaaagaagctaaagaaaaggaataagccctgcccagtatgtagacaaccaattcaaatgattgtgctaacttatttcccctagttgacctgtctataagagaattatatatttctaactatataaccctaggaatttagacaacctgaaatttattcacatatatcaaagtgagaaaatgcctcaattcacatagatttcttctctttagtataattgacctactttggtagtggaatagtgaatacttactataatttgacttgaatatgtagctcatcctttacaccaactcctaattttaaataatttctactctgtcttaaatgagaagtacttggttttttttttttcttaaatatgtatatgacatttaaatgtaacttattattttttttgagaccgagtccagcctggatgacagagtgagacccaatctcaaaaaagaaatcgtttcaccatgttggccaggctggtcttgaactcctgacctcaggtgatccacccacctcggcctcccaaagtactgggattataggcgtgagccacggcatccagcctcatctttcttttaaccaataaacatgatgctgtatcttaaaaagagcactgagcagggacttaagggatcgagtcctcaaccaaactgatttaattactcaggatttttaaaaagcatcagaggctatttacaatcttaatcataggggttcagtaaaataaaaataagaagtaaaaaagcaagagaaattattctgtaaatctaactggtgtaattcccataatcatgcaattaagttttactcttgagtttcctgacagccattggtaaaaagagaaacacatcaggatttataatttttatcatccaattatgggaagcaagcatgttggccccaggagacgaactcttctactaatttatagcatgtatcctttcatcaagggccactgagccagttggtgagtcaacgggtgaacctaagatgcaaggatgttttccaggtgactatttaaaaaaataaataatccaccaacgtgattgaccttggcgagatcatgtttctagtctatacctcagtttccccatctgtaaagtgaggataatgtcccaccccatgtaactgtggtgaggaccaactgcaacactgtgcctgcgagtctccttggaaaagtgtaaggttctacacaaatggaaagtgatctgatcacactcagtgtccccagcccagcctttcagtgccctggccctggggtgggggacaatactctcctcacccccttcactagtcttcatgaatagcaaggaggccataacataatttggtctaaaccccttcctttttaaaagaatgatggcaaaatgtgcataacattaaatttaccattttaaagatttct

SEQ ID NO: 131515 - DNA, 439 bp, Homo sapiens
agagtcctctgggctgggccggcccccaccctgctgtctgcttggcttctggcttctctgggtgccatgcctcctcctgctgcacttgggggtatgtcttgggggatcactgaggcatgtgtcttcctcaccctgtctgcctctcatctgtctccttccctctttcttcctttctccttctctctctctctcccctttcattccttctctccctgtctcgcttcccaccactctgtttctggcacactctctcttcctatctgtctctcctttctttgtctctgtctctgtctctctctctcccaccctccttctttctcttcctctctctttctccatgtctctttccctcatccagcaaatatttattctgtcctgctgcggctggggggttactgggatgtccttcgggatgggagggctaacaccaaattcacca

SEQ ID NO: 131516 - DNA, 119 bp, Homo sapiens
cacagactgctatcagactccaagctcttcatgagtagcctcctgcccattctccagcctcctttcctgctcttaccctgagttgtttttggtccttgaacctgccacattctctccca

SEQ ID NO: 131517 - DNA, 149 bp, Homo sapiens
agaaatcaactgacttaaaagcgaacacccagagtaaacaatgcaagctggtctattacctctgggaagtggtctggaacttgggaatgtggccacctcccagatccgcctcctttggaatcactgaatggtggtggcctgaatgtcca

SEQ ID NO: 131518 - DNA, 595 bp, Homo sapiens
tctctccttagcataccctacatttggctcttataatgaggagactttttctctaatgtaccccacagttcagttatcttgtttaagcagatccttgccccagtagaatatatgcttcatgatggcagggattttatttttctgctgtgttccccccaccatcccacctagtatatatcaagtgcctagaacactgactagtgtacattcgttgaaaaaaaaatctctttcatttaacaatatattgagtagcaactagctatcatgctcatgccagggaatggaagatcagataaacaaaatagacttcattcctaatcttttggagtttacctcctagttgaggagccagacattatacaagtaattacaattgtgacaattgctacaaagacaaaatacgagatgagaggtgagagggtgctaagagagggaggttgttgatgtagccggtggagccgggaactcccctgaaaaagttaagttgcccacaagaaaaaaaggcaaaagcagtcaggtgtctggtgctttggaggagctaaaggcaagcagctgtggccagagtcccgccagagaggagaaatgaggctggaga

SEQ ID NO: 131519 - DNA, 516 bp, Homo sapiens
gagagacttctataacactgacccacaatttcccccatacttaatattaagcaatactacaaccctgtcaggccccatagtacccagaagggataaaaaccacccaagaagatatactataagacagctgaatagctccatgggagatataaatgtgtggcatgctgccttctccttttcagacctgtcatcattatctaacattgacaataatatttgtggctattgaaaaaccatgccagcctttcaagttccaattgcttcccacccaaactatattaatatctattccaccactccctgctaggtcctacctatcaatgccatcccatgcctctccaactgcctaggaaacttcatatgggaaatcagaatacatagtgaaataagtatttgactgccattgatactaatcagctccaatacttagcacaattggacagatatcagctagaagagcagttataggagctttcctgctaccacaaaacattttaaaatatgtcggaattttcc

SEQ ID NO: 131520 - DNA, 541 bp, Homo sapiens
tcagctgaaaaagttggatcactggatgtgtagcccaattccttctctcatcagggagaaactgggagccagagttgtcacctacttgttctgcactgatccagggagagaagttgtgacaaaagcctgcacactcattcagagtgcatgtcattttggattattgctttgctctccattacccatagatatctagagaatgctgggcttcatcatctctcaaagagagggggattaatggtcagccccttgaatagcagctagaaaagtcagggtgctagatgtctagtccacctccttctgagggaaatttgaaggattggttttatcactagagaaagctggagcaggagacacaagaagagctaacattcagaaaaccaaatcagttcctagagacagggaagttagaagccagacccttgggctgcagccagaaaagttgggagattagatgtgcaatctaactccttctggggagaatctgagaagtgtgctttatggcctgtattcactgtttactgatctgaggggtagagcc

SEQ ID NO: 131521 - DNA, 475 bp, Homo sapiens
gtaagagctgcagcaggagaacctgaatgactgtggcatgcctgctttcctgtgttttctcctaagaaaaatatttggagcacatggctttttgacaccttgtctggcaccatggcttgtgttccaggaaatgaccctcagtgttaagtagaaaactcatggaaaaatcatatggctgattgcaagcatgtacttgaaaaactgtggaatccgaaagtggcattcacatgtaaaatatctgagtatggaaaactagctcttaatcacagcttgttgtaaagaaataacacaggacaaggatgtgctgcctgttctgtaagaaatccctgtgtacccaacagggtaagtaaagcaagctgcaaacagagtgaaagtgagtattcctcgacatgtaatagatgtgatgattccttgtgtcaggaatcatccctacacgaaatttacaagtagaactatacttaaacagaaagacgac

SEQ ID NO: 131522 - DNA, 552 bp, Homo sapiens
atgaaaataatagataatatgattgaaataccatgccatctatgcatggagtgtattaatataatacacgcacacatttaccacataccaggcattgtgctaagccctctgtatggattaatctttcaaacctcacaatgtattgtcattatatagttaataggtaaggaaacagatttaaggagcatcattaacttgctcaaagtcacccaggcaataagtggtagagcccagatttgaagccacacctgcagacgtcggaagcagtgttctcagcttctcctgttttgccttactggtttctgacagtcatatgcacataccctgtggaggagatgaagataacggctaattcagcgagcatgctgagtgcctgtggccacccggtcatgttctagaagccatggtagctgtcctgtctgggctaatgattctgtaacaatttaggaatgcattcagggacactacctatgtttatcccatttgaaccagggaaacaggaaccttcatcttcccaaaatacttacacatagttttaaaaaaatctattcc

SEQ ID NO: 131523 - DNA, 241 bp, Homo sapiens
cctcaaatgatctgccagcctcaacttcccaaagtgatgggattacaggcatgagccaccatgctcggcccatcagtaatgttttgatttcttcctgatttccctctgtgctgaccctggccttttttttttgctttcaagtctattcttcacttttcccctgctcttttcaaaatggcagtggaagccgggttcagtagctcacactggtaatcccagctactcaggaggctgaggtaga

SEQ ID NO: 131524 - DNA, 276 bp, Homo sapiens
tgcatgttcagattaagggaggctctgttggagcctggcaatctgcatttctggagagataatggagaattcctttccaacattaattcttccgtgtgatcttcatttggcctttgatgtggtggcccatggcctcccacaacaccatctgtgatattgactttgattttatagctttggcatagtgtttttatatttccgttattaaacttctggatgaatcatgccgtagaactttttcgcttgattttggtttgaatctaagctaatgtttgt

SEQ ID NO: 131525 - DNA, 230 bp, Homo sapiens
atcttgagggaggaaaggagcagatgcctacccgcttccctgcaccgtgccccgccccacccccaccccatacacactgccccgtcacctgaagcttgaggctgaggcctctgcccactggaagggcccatctgctgaaggagaggagccacagcaggggccagcccttcgccagctaacctcctgggggaagaggatccttggcccacctcctcagctgctttgcaagg

SEQ ID NO: 131526 - DNA, 526 bp, Homo sapiens
ccctacctggagaaactgcatgaacagaggaagggagtgtgaatatatatgtacatcttttgttatcacttatacttttaaaaaagtaaaagtaatgtattattacattaatgtattattaattcaaaagcactttattaaggaaaaaaaatgaaaccagtcaggaaaaacagaccgagaagaacctaagtaggctaaggatggaaatgcacgcataagcaatgcctggagcaaaaagaaaagatgccttcatgaggactagggagggaatcaaagttaggaaaggacagctcagagggtggcattacagacaccaacagaggagactctccaaacaaagaccatggttaacaatatatgcagcagaccaggcaagtaatgcaaaggcaaaaacatgcactagccttgactatgatttggtggcctttgccagaactgattcaggtgagtttaggtgagggaataaggttgcattcatcagattgaaacataaatgagaaacacagaaacaagtcggaactgtcag

SEQ ID NO: 131527 - DNA, 122 bp, Homo sapiens
agcaatcgagcaggttcggcaaaaaagaataggattcctacattctcagttcatctccacaaactcacgtattaaaacaatcattcagttctgggacaaggtccacctgtattcatttagtg

SEQ ID NO: 131528 - DNA, 453 bp, Homo sapiens
caaaggagttaccgagctgagattatttcatcgctgagtcggtcaggataaagtatgtgtaatgtgctccttatagcttaaagttatggtattcatgttctcttgccaacaaaaaatagcacttagtagaaactgacacactgtccacagttccatagggagtcagggtctgaacctgtttgaggcctcacaggagccgcagagcgctggcatggtcctgtggtctccttgttttagcacagtgatgacagagacccctcactctgttgtggccttctgattgagcttgaagaactgcactcttgggtacagtttcattgagtaacctgtaagagacaccatcactaatccagacaattcagatagtcctcctctcgtgtgctagcatcgtgtagttcataaaacacttcttaaagtgccatcattacgccccgccgtgcttaccgttcactt

SEQ ID NO: 131529 - DNA, 648 bp, Homo sapiens
  misc_feature (1)..(1): n is a, c, g, or t
  misc_feature (18)..(18): n is a, c, g, or t
ntgatctagaggatcctnaagctcgcactcttcccagagattgggtttcaggaagagaatatggcaaggacacgtggtcactgtataagggaggcaatctaagatgtgtcctagaaactggagaatgggctacaaagaaagcagcactaaggaacaatgctgcagagggaaactgttgcagagtattgagggtgtcagtgagtttgtatgtaactgcaagcagagagtcactggaggttgggtagtaacaaaataggaggtggctcagacatttccacatgcaaatagattcagtagttcttttttagttcaaatgaaccttctattgcccttattagtgattctataaagtaaaatctacacagtgcagagggtggccttagaggctaacgagcctggtttcctgcctcagctgccctcactgagtgtaggggtgctttctttaatctctggaaacctccactgtctcatctgtaaaatggagataatactaacaccttgatgtgatgtcatgaagagaaattaagagaggcagtgtaagtaaagtccccacatagagcctgggacatacaagccacttcataagtgtcaattcttattgaacctttttattaagaaactaacaatattctatcattctggacctac

SEQ ID NO: 131530 - DNA, 255 bp, Homo sapiens
ttcccctcctcccctgctgagaacgggatggagcatctgaaggacgcatagtctagaagtgcttacagtggctgatgactgatagggtggtttagcaaggtgctgcctcacccagcagacagcagccgccctctgggccaccccgagggcccagcctggaagaagaatgtattcaggcagggcacccacagttgtgtgtgcggaaacgctgccaagcccagtgggatttaccctctaggggctggaaagccatta

SEQ ID NO: 131531 - DNA, 500 bp, Homo sapiens
aataaccatcttaacctcctctggccacctgcttccctatctgtaaaatggggataatattagtacctcccgtagggttgctgtgaagagtaaatttgatcctgcccgcaatgagcctaacccagcacctgcacactctacgtgcctgctacatgctggttgccctaattagaagtttagagtcctgcattgatgagaggacctaaaaggcttatgaggccaggcatagtggctcaggcttgtaatcccaacactttgggaggctgaggcaggtggatcacctgaggtcagaagttcaagaccggccttaccaatatggtgaaaccccatctctactaaaaatataaaaattagcggggcgtggtggcgtgtgcctgtagtacccagctactagggaggctgagacaagagaattgcttgaacccgggaggtggaggttgcagtgagcggagatcgccgcactgcactccagcctgggtaacagagcaagacaccatctc

SEQ ID NO: 131532 - DNA, 417 bp, Homo sapiens
tcagttctgagcgcctgatactaaggcagggacccagcaccccacatccatctggggccccagccctgcctagtccccacctgatggtatggtgaggaccctgccatgtcagccaccacagggtggcagctaccccccagccgcagcggcccagcctctgaacatctgtctcctcaccttcgagcagaggccgcagcatgtgtcgcagaccagggctgggttggggccatggggaggggtcctacctgcccccgcctcccggtgatctgggcgccgctcacaaggcctcccctggtagacccccggggtcggacgacggcttgcaagaagagagtccctgctgggccaggccaccgtatgttaggagcaagcctgcctgctgcgggccacgtgcgcgtgctggggtggcaggagccc

SEQ ID NO: 131533 - DNA, 475 bp, Homo sapiens
ggacagggactgttttttgttgtgtcttttgggctttcatttttttgagacacagtctctctctgttgcccagattggagtgcagtgacacaatctcgcctcccggtttaagcaattctcgtgcctcagcctcccaaatagctgggattacagatgcgtgccaccacacctggctaatttttgtatttttggtagagacggggtttcaccatgttgcccaggctggtctcgaactcctggactcaagtgatccgcccgccttggcctcccaaagtgctgggattacaggcatgagccaccgcacccagccaggacaggaattgtttttgatctattgcacaatatctccaatgtagatatgcaataaaagtaatgatgccagtgaagatggtcctgcaacaaaaggcaccttaggagaggctctgaggagagaagatagccagacacagagcagcacagagggaaactgagacac

SEQ ID NO: 131534 - DNA, 214 bp, Homo sapiens
ttcttcccaaagtgccacattcagttctgcatcctggttccaggggggtcctacctgcctcagtacactatcatttttcctcatcctcagcattagttgaaggtctcttccatcctaagtcagcagctcttcttcagctgggatttgtctgcctcttcactctcttctgcttgtggcccagaggacctgagttgcagaggtcacaactgctgtg

SEQ ID NO: 131535 - DNA, 738 bp, Homo sapiens
cgtgaaagtctttcataaatattcaaatgcaaagagacataagataagacatactggaaaaaatcctttcaaatgtaaagaatgtggcaaatcattttgcatgctttcacaactaactcaacatgagataattcatactggagaaaaaccctacaaatgtgaagaatgtggcaaagcttttaaaaagtcctcaaaccttacgaatcataagataattcatactggagagaaaccctacaaatgtgaagaatgtggaaaagcttttaaccagtcctcaactcttactagacataagataattcatactggagagaaactctacaaatgtgaagaatgtggcaaagcttttaaccggtcctcaaaccttactaaacataagatagttcatactggagagaaaccctacaaatgtgaagaatgtggcaaagcttttaaacagtcctcaaaccttactaatcacaagaaaattcatactggagagaaaccctacaaatgtggagaatgtggcaaagcctttaccctatcttcacaccttactacacataagaggattcatactggtgagaaaccctacaaatgtgaagaatgtggcaaagcttttagtgtattttcaacccttactaaacataagataattcatactgaagagaaaccctacaaatgtgaagaatgtggcaaagcttttaaccggtcctcacaccttactaatcataaggtaattcatactggagagaaacc

SEQ ID NO: 131536 - DNA, 395 bp, Homo sapiens
tgatttctctaaggtcttatctatcccatcttgatggataatgcatgaggctgcaggacataacaattaaaatcatggactcctcaaccaaactacttaggtttgcctctaatctccaccactaaataaacgtgatcttgggaaaatgaacatctctgtgcctcagcttccttacctgaaaaatggaaggaaagtaatagcgcctaccttctagggttgttttgaggtttaaatgagttaatatttgtaatatgtttacaataattccccacaggacttactactgtcactgagagatacgtcagagaagggaagcaacttccataatagttcttgtaaacaatgatcctgttcaatggttttaattatctccagggacctgagggactgtccag

SEQ ID NO: 131537 - DNA, 592 bp, Homo sapiens
aaaagaatcctgtagcatcaaaaaacaagaaagaacaatcaaatagaaatatgaatctataagatagaatatctttctcatttgttttataaatcatatttaatgattgaaatgaaaattataaaatcattttatactcaagaaagtgatatttaatgatagagaaggtaaaatgacctaaagagaaataagttttccatacttcacttgaagtgatgaaatgttgatttccagtagataaggctgttacatttgtgtattttaataagtatgaaaactgtacaaagtgataaactaaaaaatactgtacatatatcagccaggtggaatccaaacaaaaattcaaataacaagcaagaaagcaaaagaagaaatgcagggacgagaaagagaggacacaaagaaaacaaattataaaatggcagatataagttctaacacatcaataattactgtaaatgtaaatggcctaaatagacgaggtagaagtcagagattggcagggtgaataaaacaaaaacaagcaaacaaacaaaaagcatgagcaagttatatgctattagtaaggaacttaacaagaaactcacttcct

SEQ ID NO: 131538 - DNA, 362 bp, Homo sapiens
tagtgcataggaagcacctaataaatcttagccttttaataatcattaaaaaaaacccctctctttacacacaaacacacatacctcacataccaattcaacttctacaccaacaattttggagttacattatttggatgcatatttttgaaaatgtcactaagaataaatattacctcatgcccaacctcaggagcagcttcttcaagcacagttacctataaactttgtaccaaatagtatgcccctccaaaaccaacagacccttctttgtagaagtcaagtggaagcaacgcttagaggtatgaatcagtgtgtcgctcggttccatggagacaaatccaagtaggcactggcagctg

SEQ ID NO: 131539 - DNA, 383 bp, Homo sapiens
cagatgtttcagttggtatgttgcatgtatatgaaaaaatacacataggcaatcacaaatttatatttttaaatattaagagtaagctgggcgggtgcagtggctcacaccttaattccagcactttgggacaccaaagtgggtgtatcacctgaggtcaggagtttgagaccagcctgggcaacatggtgaaaccccgtctctacgaaaatataaaaattagccagtcgtggtggcactagcctgtaatcccagctactcaggaggctgaggcatgagaatcgcttcatcctgggaggtggaggttgcggtgagtcgagatcgcaccattgcactccagcctgggtgattgagcgagtctccatctcaaaaaaaaaaaaaaa

SEQ ID NO: 131540 - DNA, 346 bp, Homo sapiens
tccataatgtgcccaggctcacacagtcttattatgtgtatttcatggagggacattacatggttttcagtcttttggctcttataaacatggttacaaggaaacgtccttgttggtctgactctgtgttctcatatggcaagatcagtaggacccactcctagaaatggaggtggtaagtcaaagaaaagatgcattttacattatgatgcctatggcctagttgctgtttagaaaagctgttccatcttcacagtatacaagaagctctgtttctccacacctccagtattgaacattcttgacatttttcacttggccagttggatgggcacacattatggag

SEQ ID NO: 131541 - DNA, 555 bp, Homo sapiens
ttgaggaaaagttaataataatattattatatcattactctgtgaagctgggagtgggatgaagacagaactgggaaaattttatccagcctcccagagtaactaggaccacaggcacacaccacacccaactaatttttgtatttttcgcagacagaggattttgccttgttgtccaggctggtctcaaactcctgacctcaggtgatccgcccacctctgcctcccaaagtgctgggattacgggcgtgagccaccatgccctggcaacctgttacattttttgcagagtaattctcaggctctgtcagcattgctttcctaagtcgttctctgcccaaatccctctgcctactttctttttatctaaatgtaacctgtcactggagcctcccagagacttagggaagctgtctgaactccagctccctagccttggatgtctggaagcctcactctcatttctgaatcttgcttcctcttgagtctgcttctcttagtgaatccaggcagccttctcatgcccatcactcaccaaacctagacatgaagctt

SEQ ID NO: 131542 - DNA, 193 bp, Homo sapiens
ctacttgggaggctgaagtggaaggattgcttgagcccaggcggttgaggtttgaatgagctatgattgcgcccactgcattcccggctgggcaacagagcgagaccctgtcaaaaacaaaacaaacaaacaaaaaaaacgttggtctcctgtatgaccaatggataaagtaaccttgaccagtctaataact

SEQ ID NO: 131543 - DNA, 373 bp, Homo sapiens
gcatgtatcacctgtgcagcccgggcctcctgaacctctcggagcctcctcctcgtctgtaagtgatgaaagtcccctgcacaaaggcctatgaggactggttctgacagccaggctctgtgcctggcatcagggagacagatcatgaagttttcccttctcggtgcctacatggaggggtgccctcggatgccctcagcagagatcctcaaaggccaaagaggaaccggggacagggtaatgctggtaaggtactgggcatttgacagcctgctctcctggaaacctgtctcttggtttccggagacctccagacctccatcttctctcccaggcatggccatggctgccactcagcagaacccttgtcagg

SEQ ID NO: 131544 - DNA, 398 bp, Homo sapiens
tcctttgaaccctcctctaagtgcctggcttccttttatttttatggtttatttttattttattttatttttattttacctcccccaaattcaccgtagggggaaaaattctttcttggttctgtccctccccccacacgcctcgttccccagggaagggagaccccgagaggctcggtacttgcccgcggcgttgcttccaccggggctccgggatggccacggcgggtgcagggggcagtgatcgaagcggcagctcggtctaggctgtcgctccatgtgcccggcgagcacagcgtttgggtcccccagcgagctgccactgccgcagcccggaaggaatgtcccctgttgttaaggaccctgactgttttacaccaatgatttgccactgcaaa

SEQ ID NO: 131545 - DNA, 377 bp, Homo sapiens
cattccgtacatcatgcatgcttctctgagacatcaggaaaagactaattgatgggcagattcaaatgaacactgggcacatttcatcattgaggcctgggaaaataaggatacctcttttttggtttttgagtttctctgggtttgtttttgtttgtttgttttttgaggcagagtctcgctctgtcatccaggatggagtgcaatggtgcaattacggcttactgcaaccttgaactcccaggctcaagcaaccctcccacctcagcctcccaagtagctaagactacaggtgcactccaccactcccggctaatttttaaaattttatgtagaaatggggcctcaccatgttgcccaggctggtctcaaactcc

SEQ ID NO: 131546 - DNA, 195 bp, Homo sapiens
caggaggggaattgctttttgatttgttgttcactttgctatgttttaaatgtatttttataaaagtgcaaagatacacttattttaatgctttaaaataacttgaaatgattgagcaatcgtaggctagttctgagcatgcctttaaattcaggaaaaaagggttactttgtatgttggactttaggtagaaat

SEQ ID NO: 131547 - DNA, 686 bp, Homo sapiens
gctaagtacccaccgtaatatgtaacacacactccatttctggagaactttaaaatgtgaaaaatgtgctgtttagaattgatgaaatacgatatgtaaggtaggcaaagcaaaagaagtcaaatgatctgaaaacaaattgtcagttacaaaatcaccattaaaaggtaaaactaatctacaaaatcagttattttttaatatgctagttagtggtgtttgggtatataactcagtcttgaaatttaaccaacagaaatgtcaccatcagaggtaaatacttttctagaagtccacaagaaccttcataaatgataaccagcagggcttacactgctctttcatggaaaacttaacaatgcaaagcttctcaagtaaatccacagtttaccaactgcattcatgtaagacagcatacattttcagtcccgtaatgagagaacatttatatactaaaaggaagacttactggaaaaaaaattttgaggagtaatctctttcctggtttcagaacaatatggctccctgggactgcctgaatttcttctctgcacaaacctttcagcatattttaggagattcttgtgttctacagcttagtggccttcacttatccctactctcttttttagtcccaaagtagaaaacaggtgattggtacatattacgtcgggatccttagagtc

SEQ ID NO: 131548 - DNA, 662 bp, Homo sapiens
gggaaagcttgagaacgggagctcagtttcacctgtttgctgagagcaaaaggaagctggcccggaagtggcttgcaggaaggagttgagcagggttagggtggggagactgggcagtttctctggtttttgtaagctagttctctaattacttaccctgaaatgtgttccggaaacactgacctccattctcttattcacatggcagacagtgtacaagctgtttcaagcgaaatactgataatcaggatattaactactatatgtctgcaccagccatgaatacaaatcactggtcaccagtgtttgctctgttcctttttaaaaaaatgtttaattaaattaggtaactaattaatttgtaaagatggggggtctccatcttgtccagactagtctcaaactcctgggctcaagcaatcttcctgcctcggccttccaaagtgctgagattcagtggctcacgcctgtaatccccacactttgggaggccgaggcaggtggatcacgaggtcaggagttcgagaccagcctggccaacatggtgaaaccccatctctactaaaaatacaaaaattagccaggcgtggtagcacatgcctgtaatcccagctagttgggaggccgaagcaggagaatagcttgaacccgggaggcagagg

SEQ ID NO: 131549 - DNA, 661 bp, Homo sapiens
aaataaagggatagataaagcaaccatgctagcattcattgaaaggaaactggagtagccatattaatttcagacaaaccagactttggaaggagacaaattactagtaataaaggagtatatcattaataataatggcaaacgggtcaattctccaagaagaaatatcaagcctaaatatgtatgcaggcagaaacaacacataaaaatacacaagaccaaaactgatagaactgaaaggaaaaacacacaaatccacgaatagagttgaagatttcaacattccctgacagtaattaatagatcaagcaggaagaaagtgagaaagaatatagttgacctaaacaacactaaaaatcaacttgatctcattaatatttgttgactagttcattcaacaatagaataatcacactcctctagttcacatggaacattcaccaacataaatcacattttgggtgataaaatacaccttaacaaatgcaaaataatagaaatcaaataaagtatgttcttggatcataatggaattgaactaaaattaattgaaaatccccatacatttggaaattaaacaacaaactttgaaataacacataatctaaagaggtgatctcaagagaaattttaaaaacaattgaattcaatttatatgaaa

SEQ ID NO: 131550 - DNA, 351 bp, Homo sapiens
gtgtgtgggtggaaggatggatggatggatggatggatggatggatagatggatatgtgaatggagtatggatgggttgatagacaaatggacagacaaatggatgaatgtatgtaatgaataatatggcccaagaactatatccagcttggtcagatcttttgctccatagcctacacaaaagaaaccaactctggacactagagctataactaaagccaaggtggttaatcagttgaagctgtgagaagagaaacataatttggttccagctctaaatgaacacctgttcttcctcaaaatagtgttttcatttttaaagtactttgaagcttaataaatagcccataa

SEQ ID NO: 131551 - DNA, 439 bp, Homo sapiens
caactctgctcctttgggttccagttgatgggcaagtggcctccatgggtcagcgtgttccaagaggaaaccgtaaccttgcactgtgaggtgctccatctgcctgggagcagctccacacagtggtttctcaatggcacagcactcagacctcgacccccagctacagaatcacctctgccagtgtcaatgacagtggtgaatacaggtgccagagaggtctctcagggcgaagtgaccccatacagctggaaatccacagaggctggccactactgcaggtctccagcagagtcttcacggaaggagaacctctggccttgaggtgtcatgcgtggaaggataagctggtgtacaatgtgctttactatcgaaatggcaaagcctttaagtttttccactggaattctaacctcaccattctgaaaaccaacataag

SEQ ID NO: 131552 - DNA, 652 bp, Homo sapiens
ccaaggatctcctagtgtcatgtagaagatctgtgaacaaaaatggaacaaagcattgtcttcagtgccatgagggctgagagaggaaagccttgtatggccacaggtattatgtgggtgcaggggagagagctggcaaccctcagagctcagagaggtcagaacaagcttcatagatgcagtttttttaagagaactggcctggcagattctcctggaagccaaggggcaggggtctccacacccagaacatggcagatgcttagcaaatcaaggaacttcaagtactgagttcagtaaagctggcacccaaggcatgaggaaggcaaaagattgtactagaaagataagcagagccctgtggtgaatggctttccatatcatcaagtctaagtcttctctaatctgccacatcctcataaatctgagacagacagccagctcatagccgtaaggaaagtgagggttgagcatatcaaaacaacagtatggtttatgtgaacacacctaagttttacaatgtccacaactaattcaacgtttcaaaaaatgctggctacccctgtgtgagccaaactaacgccatgtgcatgtttcagatggagtctgggggctaccagtttgcaacctctgcaaatagtcaacaggcgcc

SEQ ID NO: 131553 - DNA, 811 bp, Homo sapiens
attaatttgttgtcctgatactggagcaaataatgtcagacttttggcataatcagttagtatatgcatataagaaataaaaattcatagagtatgatggtaccaattatgagatatgctaagtgctgaaaatgtttgaaaaagttctgaaactccttggagacagtgtgttccaaagtggcctttgtggacagaaaaggcttggacttaaaattttggtatctttctgaagatctaataaaattcactaaattgaaaggagctgtaaacattttagaatgtaattgttaacaacgtgcttccctaaaacaagttttttcccctcctctatatcatgttgaactatgaaagaaagtgccttgttctgttgaccagggataactttagtgttaaatagtggttggttttcaaattttctgagactatagttcacatttgagcccttatgtgtttaatataaactaaaattattatcttggtgaagaataatagatttgtttcaaccagctgccttagacactttctcttgattaacttaatttagtaatagcagaggtcttattagctgcttcccaaattgaaaataaagatgacattattttgtctcaatacatatcgtttataatacacgatagtaaactggttaaaattgtttagtggaatttaaatttttttaaaaaagacagcataatagtgtgtaaagagattaatttagacaactttagaatataacaacttagaagataagattttgatagtacaaaggtttctaattgaatgttaacaaaattatgagtttaagtttatataa

SEQ ID NO: 131554 - DNA, 469 bp, Homo sapiens
tcctgaacacaggtgatctgcccgtctcagcctcccaaaatgttgggattacaggcatgagccgctgcacccagccgattctgatttctttttaatcgtttgtatgtggtagttctttctggatttagtattttctctttaacctggttattctgatactcacgatggtgtgcttgcttatactcattgtactaggtacacagtggtccttttgatttgttagctcctgttttggaatgtgagtttaggtcagggagaaagtttttgaattatttctttgataatttcctcagttctgctttgtttgccttttctgtatttaaaaaaaattttggatgttagactttctaatctgatcctataatttttgtattttctgtttcagttctttaactctttttactctattttctgaggtgattcctcactttctcttccaactcttcacttaaaaatttttttgtttgtt

SEQ ID NO: 131555 - DNA, 561 bp, Homo sapiens
tcatggaattggaaatgttcagagttgaaacaactaagattttgaatcatctaatttatttaagattacaaccatgaaaactttgctatctcaacatttgtggcaaagaggttacttggaatgggtcagagactaacctgctcatttccaaattccattgtgtcacagtctcatagaaaagggactaataatcacccactgtgcccactcaaattacccctaaattattcttgatggagctcacgaatgaaaatgagacagtcggccgggcgcggtggctcacgcctgtaatcccagcactttgggaggccgaggcgggcggatcacgaggtcaggagatcgagaccatcctggctaacatggtgaaactctgtctctactaaaaatacaaaaaattagccaggcgtggtggcaggcacctgtagtctcagctactcgggaggctgaggcaggagaatggtgtgaacccaggaggcggaggttgcagtgagccgagactgcgccactgcactccagcctgggcaacagagcgagactccatctcaaaaaaaaaaaaaaaaa

SEQ ID NO: 131556 - DNA, 405 bp, Homo sapiens
gactagaggctccccggttacctggacttctaggaatatcacatgcaacctgaactgaccactacagagagaaactaataatagagcatcaggcactagaagcttataacagccgtgctgccttaaggggtaaaggagggtgcagtgacacagggatgaaaactaacatttctgaaaccattacacactggaaagctcccagggctgcagagtggaggctgggagagaataggagaagtgaccaaacagatctgtccttaggaatgattttcactgccttgcgggtagacacatacatggaaaatgtactttctcaatgtgcaaacaattaagcattctggcaagtcccctgtatctagaaccctctttactacctgtccctgggtttgaacttctaccatggtt

SEQ ID NO: 131557 - DNA, 395 bp, Homo sapiens
tgtgccaccatgcttggctaatttttatatttttagtagagatggggttttaccatgtttttcaggcttgtctcgaagttctgacctcagggtgatccacccctcttggcctcccaaagtgttgggattacaggtgtgagccactgcacccagtctatattttttaaaacccgtaataacagaccatctagaccctaaataccaaagactttaaagtccagggttggtgacagtaccataacataaggatagtgagaaaaagtgataaatcgtagcgttaccagttttcagagctttaaaatatgttaacatcttaaaaatctaaatttcttcatagcagtaaaacggtagctatttataaattgttaagttagaagctgaaagtggataattta

SEQ ID NO: 131558 - DNA, 812 bp, Homo sapiens
aacgcagtggcatgatctcggttcactggaacctctgcctcccaggttcaagggattctcatgtctcagcctcccaggtagctgggattacaggcacccgccaccatgcccagctaatttttgtatttttagtagagacggggtttcaccatgttggccaggctggtcacaaactcctgacctcaggtgattcaccagcctcggcctcccaaaatgctgggattacaggcgtgagccaccatgcccagccactaacatattattttgatcaaaattctatttatctatttgtttaatgactgcctcccccactaggatgtacacttcatgaagacagggatcattcctgccctgctcaccaccacattccttgcaccaggatagagcctggcatgtggcagatgctcaaagagtataaaacgtgatgctgtgcaaaggctcaggagtaaaagagatacaatcttcaggcatctatctaatctatctatctatctaaagataggttgtcacccaggctgcagtgcagtggcactatcactactctctgctggacctcccaggctcaagtgatccttttgagtcagcctcctaagtagctgggaccacaggtacacaccaccatgcccatctaactttttattttttgtagagatgggatcttgctatattgcccaggttgttctcaaactcctggcttcaagtgatcctcttgccctggcctcccaaagtattgagattacaggcatgagccaccgcacttggacctacttcaaatttttcagaagtcatttttaaaactttgagtgactctg

SEQ ID NO: 131559 - DNA, 1701 bp, Homo sapiens
aaataattgtattacagatgtgaataaatctgtttaaaaaataagtgaaccctgagacatatgaactatgagacattgttctatatgatgctttgtaagttttatgtgctgtgtcatagagttatatagagttatgtatatatatagttctgtatagtttcagttggcatctaaaaattatataactttattttttaaaatctataattataaatatttttaaactgctagaaaggaagagccgaatatttggctggagtgatttttagacatttctctaccttagggcaccagagaggttcacttgcccagggttccatagctggttggtgccagagtccgaacgagaaaccaggtcttctcagctcctgtcacccacagttttgcagacactgaatttatgaggtggattccattcaagcatgcacataactagcagacacttctcctaatcctcctcaattcccctttgcattgctcagataccacaatcctttgcaggttaaatcccttcaccttgtgaactcattaggcagggcaatgtatatgaatccctgagtccttaagaacgtccttaggctgtgttagaaatgcagttgccataggagtaaccggcccctgctgtcatttggatgttctctcttccccaaaatccagcaccaccttggttaagcacccaccatgtgcctgcccacctggctccttaggcaatgttacaattaaccaggttggttttgatgagggtctagggcaaaatttgaaccaccacaacagccaatgtgcacatccatgcagagggttcagagatggcctcggccaaggatgccaggcttcagctctggaaggagccctgggaggtgggagatctttgtataaaaattggaacccaaactataattcccattagggatatatatgctcacatcactcctgattcaaagctcagaagtggcctctcaggagaaataaaggtctctctctctctctctctctatctcacacacacacacacacacacacacacacagagagagagagagagagagagagagagagagagagagaggccagcattcaaaattcccatgcttagggaatccattgggacttctccccaggatgtactgaattcaaggaagctttctctaggtgtagcagaaactgctgctgtcatgtctctgctcaccaggacgtagcttctctctacagacctttatttctttccctggaggcttcagtccatgttgaagtgtaaactccactcagctccaggaggaatcgtgttttctttatcaccaggggcttcttctacgagttgcctttgatagggaggccaggaggaagataggcccaagctcaggggtgggatcggggagcaggaagcctgtgggctttagaatcgaggtattggtttctccctgtcaccgtcatccaccacctgtgtgaacttgagccatttatcgaacctcacggagccccaagtttctcatctgtaaacaaggggaatgagccctactttgtatggttgtcaagaggatttgagacaatatgtataaagcaatggacacgcagaggaagtcaataagtacaaggtaactctgaaaatgccaccaaagggaggctagggacaggaaagccatctccgccaacctcaagaacgtggccccgaagctgttccaggaactgggcatgtatgaagat

SEQ ID NO: 131560 - DNA, 189 bp, Homo sapiens
aatacaggcatccaataatgaacactgaaggagctcaataccctattattatattttagccacaccaaagtgaaaacccctggcttataaatccattcattcaactaacaagtactgattgtctactatgttaacatactagtcaatataacagtaatcttgggaagacttctactatcaattctaaag

SEQ ID NO: 131561 - DNA, 1492 bp, Homo sapiens
aattagagtggcattaaggttgactgacaagaagatcatctatccctagaaccagttcaaaattttccctgtttgattcacaaaagaaatagcaaggaccaataaatgtaagggagcaaaaatgtttatcttcattaaacattgggaaatgtaaattaaaataacagataccatttcccagataccacttgtcaaagtgacaaagatgaaacaaaattattgtatccgatgttgacaaggataaggaaaactgacactcatataaaaaggtgagcatgtacaaatacaacttttctggaaggcaacttggccatatagataaaaagccttaaaattttgcatattcttagaaaatatactaattccacatttagagatttatgcaacaaagtaagtatgcatatgagtaaagatttactaataatgatgtttactacatcatttataaaaatgaaaacctggaaacaatccaaatgtccaacaataaagaactggttaaactatccacacaatggaaactctatgctatcattaaaaataatgctatagaacaatatttaatgacaaggaaaaatattcataatttctgttaagtagaaagaaatggactgcaaaacaaattacagaatagagtcccatttttgttctaagtacatagccactgagaagaaaaacctagaaaagatatttaccatgtaccaaaatattaaaaatacttaactcttagctgctaggattagggaagaaatatttccttaattttgcttggctattttctgtcttttccttttttttttttggaagatggactctcgctctgtcgcccaggctggagtgcagtgggcacgattttgggctcactgcaacctccacctcccaggttcaagcgattcttctgcctcagcctcccgaggcagggattacaggcgtatgccaccacgcccagctaatttctgtatttttagtagagacagggtttcaccacgttggccaggccgtggctcgtatgcaacgtcgtataaccgtctagttgtatccgacgcgtgcctcggtcctcccgaaaagggtcttggggactttactagggcgtgtataagcacagccgtgtcccctacgccttggcgttggcgactatcttgcctaacagtgtgtatattattacaggggaagtacatatgggtagtctttagtacagttgtgatcatcgaggaaaagagagaccttgtatttagtcacctctaaaaaatgggtcttacctgcctaaagggagaaggaactagatcagctgaccccctgaaagtctaactcttagtgaatgaaacagtatccaggaaatagcatctttagaaaaactgaaggacatgtctacttctggtgctctaagccttctgttctataacaaattcatctccatatttctcctgccttcatgtgctttaagctgtgacatttattccatatctatgtttcttcatactctctttgaaaaggg

SEQ ID NO: 131562 - DNA, 1421 bp, Homo sapiens
aattagagtggcattaaggttgactgacaagaagatcatctatccctagaaccagttcaaaattttccctgtttgattcacaaaagaaatagcaaggaccaataaatgtaagggagcaaaaatgtttatcttcattaaacattgggaaatgtaaattaaaataacagataccatttcccagataccacttgtcaaagtgacaaagatgaaacaaaattattgtatccgatgttgacaaggataaggaaaactgacactcatataaaaaggtgagcatgtacaaatacaacttttctggaaggcaacttggccatatagataaaaagccttaaaattttgcatattcttagaaaatatactaattccacatttagagatttatgcaacaaagtaagtatgcatatgagtaaagatttactaataatgatgtttactacatcatttataaaaatgaaaacctggaaacaatccaaatgtccaacaataaagaactggttaaactatccacacaatggaaactctatgctatcattaaaaataatgctatagaacaatatttaatgacaaggaaaaatattcataatttctgttaagtagaaagaaatggactgcaaaacaaattacagaatagagtcccatttttgttctaagtacatagccactgagaagaaaaacctagaaaagatatttaccatgtaccaaaatattaaaaatacttaactcttagctgctaggattagggaagaaatatttccttaattttgcttggctattttctgtcttttccttttttttttttggaagatggactctcgctctgtcgcccaggctggagtgcagtgggcacgattttgggctcactgcaacctccacctcccaggttcaagcgattcttctgcctcagcctcccgaggcagggattacaggcgtatgccaccacgcccagctaatttctgtatttttagtagagacagggtttcaccacgttggccaggctggtcttgaactcttaacctctagtgatccacctgcctcggcctcccaaaggtctgggattataggcgtaagccaccgtccccagcctgcttggctattttctaaattttatataaggaatacatattgtatttttataatttatcatgagaaaaaaacattatttatcacctaaaaaatgggtcttacctgcctaaagggagaaggaactagatcagctgaccccctgaaagtctaactcttagtgaatgaaacagtatccaggaaatagcatctttagaaaaactgaaggacatgtctacttctggtgctctaagccttctgttctataacaaattcatctccatatttctcctgccttcatgtgctttaagctgtgacatttattccatatctatgtttcttcatactctctttgaaaaggg

SEQ ID NO: 131563 - DNA, 758 bp, Homo sapiens
gacaattaaatgtgaatatcaccctcgttattattgcatatcatcatcaccaccagcagcaccttcatgaccaccatcagcactaccagcatcaccgccattatcagcaccgccaccctcaccattgttgctatcatccttgtaaaccaagaagtatctgagacaagtctcaatcagtttagaagtttattttgccagggttaaggacctgctcagaagaaaagaacacagattgacaaaaacagtgggtggtctgtgccattctccaaaaatgattttgagggcctcaatatttaaaagggagaagcaggctggaggggaaaaagggagggtgtggttgcattagtgaatccttatgttgcaagagaaagggagcaggtatggaaatagtcaattaggtatttgtcttgtgctcatagagttgctatctgtgcaaatacaactttttatctgtagctctctatctgcttaggaacaagaggaaaggcagcttcttgcacagtggggctttcagactaatgttcttccagttgacatagtgaattgtgctcaagattttattttcctttcacttttctcctcccaccccattaaaaaaatctttcaaagaaagcatcttagaagaaaactgagtctctggtcttgggtttggtctgatgtctctcgtgggtaggatggtttattctgagatggcttaggtcccaggtgggttaggaaagctgactttttagtaacgtatgtagtctcgagtctcacag

SEQ ID NO: 131564 - DNA, 737 bp, Homo sapiens
ggatttgctaagtgtgagccactgtgcccggcctcttattcatttcttaacctatgaaaacatctaggtctaatgctttcttgtacatgtgtgttttttgtctctctctatagaaatcagtctgtttaagcttttaatctgtactgggattgattttagtaaattacatttttctaagaagttattcattttgtgtagacttttaaatttatttgcaatagagttgtacaaaatttctttttatttttaacagctctatttaggtataatttaaataccataaatttcacccattctaacagttcctaatttttagaaaatttagattatgcaaccattaccacagttggatattagaatgtttccattaccccccaaattctctcatgcttgttttaaattaatctctgattcactccaagccgtaggtaattagtaatctgtttttgtctctataaatttgccttttctggacattccatataaatgaagccatacaaaaggtagtcctttatttctggcatcttccacttaatggtttttggagtcatccatgttgttgtatatatcatagctgggactacaggcgtgtgtcaccatgcccggctaatttgttctatatttttagtagagatggggtttcactgtgttagccaggatggtctcgatctcctgaccttgtgatctgcccgcctcagcctcacaaagtgctggaattacaggtgtgagccactgca

SEQ ID NO: 131565 - DNA, 717 bp, Homo sapiens
ggctttgtgtctgagtgctaatgtagatctgttgtaaactaggcaatacgtcatcaagccccctttacctcagctaaattatacccatgttcacctgaatgtacaagggccagaggatcttgtcaatccaaacttgagcttcagtcatcccattgctgtagtggtagaatctgaaactcaagccttctccctctggcccacagaagtatcagcagtgagatatttgcatgaacacagcaggctgtgggaatgtcaggaaaatactttctcacctcaggggatctgggcagaagaagaagaaaatggcaaatatcagaggataacatagtactggacaaacataacccaccctaggatcatctcagccatattggatgacaatttaaaggaaacttaaggtcctatagtagcagacagggattaaaacctgggttgcaaaagttacaaatacattgaaaaatccttggtaggcataaatgtatttatctgctcgtaaatttgaattttatgcatctctcacttgaaaacagactcagtaaatacactttcgagtacttattctttcccccagacttacttggaatttagtccttctctctctctctctgctcttcctgaggatgcaagaagacggctgtctgcaagccaggatgggccgtcactagtcactggctcaaccagtaccttgatcttggacttctcaacttctagaactga

SEQ ID NO: 131566 - DNA, 156 bp, Homo sapiens
gattggtggtgcctgcttcctgagattggcgtgggcgtgcagagggcagcaccgtaagggctgtgggttggtgtctggaggaagcacctgaaagatgacaggggtaagaaggagagcagggagggggtggctgcgggacgcccctcagtgagcgca

SEQ ID NO: 131567 - DNA, 485 bp, Homo sapiens
cagcaggaaggacccatggttgaaactcagactcaccagtttccaaacctggcctctgatgttggattgggggttatggtttcatcccagccatgatccctgcttatcctggcctttcccttaggagcttgtatagattgcttaacctcagtttcctcatctgtcaaatgagctcctaacgcaagatgggaagataggagtttgcattaagaagaggagggcctcttggcggaggtgacatttgaactaaggccggatggatgaggaggctgctcagggcagaatgggggagaacatcttgcaagcaggaacagcatatgcaaaggtcctgaggcaggagtgtatttggcaggtggatagaatctagaatgagagtgtggctgaagattatttatattgaggtgtgtgggaggatgaagtactggaagatgagatcagagagattaacaaggacaagatcatggggaccatggaaagatttggat

SEQ ID NO: 131568 - DNA, 564 bp, Homo sapiens
gattttacaatgtaagaaaagggtttaaaaatatttgacacccaagaaggaatggtaggatgttttgagtccaagttagtaaattggccactgactgctctgtcttttggtgaatcaccattgtttagtgaatgaggtaagaatcactaattctaagaagctgtttcagcagcaagataaaaataaattctctctattccctttgtcagacattctgtccaatatgagaataaatacagaagtatggctgggcacggtgactgacgcctgtaatcccagcactttgggaggctgagatgggcagatcacttgagatgaggagttccagaccagcctggccaacatggcaaaacctcgtgtctaccaaaaatacaaaaattagccgagcctggtggtgggaacctgtaatcccagccattcagggggctgaggcaagagaatttcttgaacccgggaggcggagattgcagtgagccgagatcatgccactgcactccagcttgggcaacagagtgagaatccatctcaaaataaataaataaataaataaaaataaataaaaca

SEQ ID NO: 131569 - DNA, 429 bp, Homo sapiens
ccaagttatactgcaacttcttatttgaactctttccctatgttgataaacacacactgggaaaagccaggcatattagtcaggtctctccagaaaaacagaaccaatagaagatatatggagagagagaaagaaagagaaagtgcttgattataaggaattggcaattatggaagctaacaagtcctgagatttgcagttggtaagctagagacccaggagagctgatggtatagtctgagtttaaaggccttagaatcaggagaactgatagcatagtgctagtccaaatgccagcagactcgagatccatgaagaagcagtgtttcagtttgagtctgaagtcaggaaatactgatgtcccaactcaaaggcagtcaggcaagaggaatttccctttatgtgggagagggtcaatcttttgttcta

SEQ ID NO: 131570 - DNA, 159 bp, Homo sapiens
gcagccagcgcatacaacatgcatatactagataaaggctaacagtttacatcctgggtgggacagggtgggatggtgcaagatttcatcatgctactcagaatgaggcacaatttaaaatttaggccgggtgtggtggctcctgtctgcagtcccagc

SEQ ID NO: 131571 - DNA, 332 bp, Homo sapiens
tgggcaaggcaaggtcagcactggagaaagtttcctggcaatcagaatcccccagcagacatcaagctgctgcctcctgcccccaacttctacagaccagctctaccccttctctgttatattcaacattttcctgttcctggaaatcccagccacttttggggaaagatggctaccaggtgcaaccaagagaggaatgctgcttcacacatccctactgtcggcaaatacacaaacctaaaatacttaaaactaagtttcatgctgtcacctttaccatgtttttttctaggttacccattttttcagcttaaaatgaacaaaatgtgacc

SEQ ID NO: 131572 - DNA, 228 bp, Homo sapiens
tcatgagggctctgccctcaggaatagattaatccactcatgggttaatggattaatgggttatcatgagagtgggttagttatcatgagagtaagtctgttatatatgccagtctggctttctctcctgagccccctcaccatacaataccttgcaccaccttgggactctacagagtgtccccatcagcaagaagatcctcacccagatgtagcccctagaacttg

SEQ ID NO: 131573 - DNA, 432 bp, Homo sapiens
gactgttgtggggtggggggaggggggagggatagcattgggagatatacttaatgctagatgaagagttagtgggtgcagtgcaccagcatggcacatgtatacatatgtaactaacctgcacaatgtgcacatgtaccctaaaacttaaagtataataaaaaataaaaataaaaaaataaattgttttactttacatatgaaaaggttatagaaggaataaaatattttagcttaaaaaaattgattttccataaaacgtattatgcattctgggacaattttcaatgtaaaataattactccaggacaactggtgtgaactgagactgtcacatgcaacctgggacatatagagttaccctaggtaagacccaaggtaaaaagcaaagcagatctctccttaagtgaaaagatttcacaagtttccccc

SEQ ID NO: 131574 - DNA, 760 bp, Homo sapiens
tgcttaatttttataacttttaaggcagtgtttatttctgctatatttgattgtgaagtttatttgcctacacatataaattgcataagcaatttcttctaaatgtgttgtagatgtttataatacaaatagaaatacttaagtacttattattacttatatcacagctatatttaaaattctttagatccaatattagttttttactaatttattgcctaaaatgactaattgaatttgacatttccattaatgccaaggagtaaaactgttttgccataacaacttaaatgaaattcaaatgattagttttgaagtttggaaaatttctaaatctttattaccatggaatccagtggtcatctaacagctgcagttgtattaaccatggtaattcaaaattgccacaaatttggttcaggtaccaacatttatttactcagtgcttacacatagtaccataagagattgaacgatgaataaaataggaacactgcctttgagatcttactagttcagcactgtaatagctatgttcctaaagtatctcatttaatacaacttaaaacaatccaatgacatgcgtatattactcctattttacagacatatttgaggctcaaaaaagttagttttctgaaaattacacatccagaaagtgtaagaggcagaatttgaactgaagcctgtctgactcctgcgtctgtggtctttagttttcaccattcttcaatgcagtattatcactgagtgacatgac

SEQ ID NO: 131575 - DNA, 152 bp, Homo sapiens
ctgcctcagattcccaaaatgctggaattacaggcgtgagcaaccccacccagcccaataaatcttaaagccccaaaataatctcctaagacccatgtctcacatccaggctacactgatgcatggaggtggctcccaaggccatgggtatc

SEQ ID NO: 131576 - DNA, 304 bp, Homo sapiens
ctcactgtgccaacagttgtaatttaatgttatattataagcaaagtttccattaatgagcccagaaattcttctatctggaatgtgagatgaagtgtataacaaaatatacctttgtattcttaattaaggagtctcctctatttctcctctcatatttgtcttccagtaactgagatttgtgctgcattccactggaagtctatgtcaagggttaaaaaaatgtcttttggttcttccagtctgcagtaatttgagatattataaaataattggctttttttctttttttttttttgagaca

SEQ ID NO: 131577 - DNA, 274 bp, Homo sapiens
ttatataacttttatttatttgaaaaacatgtaatacaatgccagggtacaaagtttgataaacacaaaaggatatttagtaaaaatctccctcccatgcctacccacattggaatccagctctcctttccataagcaaccagtgtgtataatttcagagattatttatgctcgtggaagcaaatgcatctacatacagttgaaccttgaacaacacaggtttgaactgcatgggttcccttatacacagattgtcttccacctctgccactcc

SEQ ID NO: 131578 - DNA, 138 bp, Homo sapiens
tcctttgaccaaataattctacttttagagtatgttcaacagaaacaccagtaagaaatttaagaacgtatgtacaagtatgtttactaaggcaatttgtaggaacaaagaattttttttttttttgagacggagtct

SEQ ID NO: 131579 - DNA, 115 bp, Homo sapiens
ttactttgttaggatactaatagtaagaataataataagcagttgcttggaacaaatcaatattttattgctaatggaaagtccccaggaatgaagagaattataggcttttgtt

SEQ ID NO: 131580 - DNA, 228 bp, Homo sapiens
tgaaactaagaattcagaccctggtgacagtatcctccacatctggaagggaaacgaatcacttgagaagcttcaaaaagaatgatgatgcccattgttgacatggaagtgaggaaatggtcaccctcacacagctgccagagagcataaggtggtaaaatctttcttgaggacaagttagccatataaatatatgtgtgtctgtacacacacatatatacatatatg

SEQ ID NO: 131581 - DNA, 331 bp, Homo sapiens
tgctgggattacaggtgtgagccactgcacccagtccttaatgctactttataggtgaaaattgtgaaataacttaaatttcattttaattaaagttaatttttgggaaattaacgaaaggttgacattttattcttttgaatattgcagttgttatttgggtttaaattggggggcttaggaaggaaagaagcctgatggttgtttctgaattttctgaaaattatgtttgatatggatctagataaggcattccaatcatttggaagtggtttgagtatctttttttctttttttaatttgagacagagtcttgctctgtggagtgtag

SEQ ID NO: 131582 - DNA, 289 bp, Homo sapiens
agctttctcagtagatatgagtctctttataaaaatggtatgcattatttattcttcatattccatgtctcacattataataaattttaaaaactgttaaattgaatagatttgccacaaagtacagaaaattagtattctataaactcaaagagaagaggccaaatagaaatctggaaagcattcatcaataaagagaggaaaaaaacattgcaaagttcttactatataccagatcttgtgataatttatattccttccctcattaatcccccaaataattgagcaa

SEQ ID NO: 131583 - DNA, 494 bp, Homo sapiens
aaggaggccagagtatttattattgtttggttttcttgcttaacacacaagacttaaggatctcccaactgtgatgcacggtctcgatgtggtttcaaatactgtccaattgatcttgtggtttccatcgagggtgtgaaatccctggttacccaccaggcaggcagtggtttgaatacctgtgatctcccacccctctgggtgtggttctggagtgccgtgggaggttaggacaggctggggcggaccgccagcacaaatagaacatacagtcattcctgcgtctctgtgtaaggttccagattcatgggccaggctcggcttgtgctgggttactgtaaaccaggatgagagagccacagccagagagccacggttcattctcgcactggtcatgtgaaaatcacacccccacagccttgccttaggctttgaaggaccccttcatgctgctgcttgtaccatgtagctaagaggcacgagggatgaccagc

SEQ ID NO: 131584 - DNA, 749 bp, Homo sapiens
ttgcagtgagccaagatcaggccattgcactccagcctgggcgacagagcaagactgtctcagaaaaaagaaaaaagtttctaaagtaaaaattgaaagtacttcccctacaaccacaggttgctttgacagattaatgtaaattcttccagatactcttctgtggatgtagaaacatgcagaatgaggcaagctttaatttgcttatgtcacttactgtggatagcctttcatatcttataagttaatgtcagagcagcaatctcatttttttccaatttgtaaacattttatttaaccttatgatggatattttggtggatttcagtattacaaaaatgcctattaatagtatattttcattatatttctgttacgaaattataatgctacaaacattactatgcctgtggcagtatacatctgcacaagttttgaaaatgttatgcattcataggcaaaaatgggataacttttgggcagtggtcatgattaatctgttgatcagaatccagagattgcccttctccttgccaattgctttaagagtacactagtttttggccgggtgcagtggctcatgcctgtaatcccagcactttgggaggccaagacgggcggatcacaaggtcaggagatcgagaccatcctggctaacatggtgaaaccccatctctactaaaaatacaaaaaaaacccacaaaaaacaaaaaaaccaggcctggtggtgggtgcctgtagtcccagct

SEQ ID NO: 131585 - DNA, 350 bp, Homo sapiens
acaaaatacaaataaatttctctaaaagtgcagttgttgggaaaaagaaaaggcggtttgtcaggctgacatcagagtagccgcagtcaccctgacaagccgcaaagtctaatgttttattcaccaggcctgaaaaataacttcccaacaagggccccataaataaaccagtgtgatgaatattacacgaaataaaaactgataaagcaaaggccctaaacacgagctgcaccacgaggtgagggaagcacatggcttttatcgcctctaatgccaggtgacaggttgggccaggctgcccccagctcacagggaggctgggagggggccggggagggggccagccatgg

SEQ ID NO: 131586 - DNA, 572 bp, Homo sapiens
tgaggactcatcactggggctatgggagacataaggatcagcagagacagaggcaaagctggatttaagaagtcacagcaggcctctcccctagtatgagccttgctttgaacatatctgggaagggcttccttttagtcttgaaaatgtttacaagcctctgctcagcatctacctagccttcagacctcgcgttctcaggcctgtggtgctgtctcctctctgcttcagtatggtcttctctgtccagcttctgcatgaggccatctggggccaagggtcacaggttttagaagttcccctctccccgctccatgccataggcacctgcaatcgcacatcctggataaaacttcagccggctttctctttatgtgcctggcgcctctcttttctctgggtttttggaagtctgcctacccagcccctcagctggggccttccccacttctgccccgccccactgggtcctcccagggtaggaggcaatctctgactgtcttccgaggctctgttgcttctccttcatcaccaaatgccaggaatttgtcagatgctgtttgtaactcaaa

SEQ ID NO: 131587 - DNA, 329 bp, Homo sapiens
ccagctagatttttgtacggtaacattattgataatataggagaagttcattgaggagaaaaacaaagggagcattaaagtctcatactgtatgaaactacagaaatggatcaaagagtttgacaggaagtttaatgtgtacataagtagaggctgacaggaacatgctgtgtgtgccaaaggttccagtgatggaaaactgaaacatagtgctcactgaccacagcatgagccttgacacacattgtaaataatccagagatatatgactgcattaagtgctaggctggtatatgaacggcagtaaatctatagcagcagaaagggtt

SEQ ID NO: 131588 - DNA, 420 bp, Homo sapiens
ggtacagtggctggtttgaggctgttcttgatgatgattcctatgaggactcagcaccagcagcaggcaatgtttgctgaactcccctttgtggctaggactgtactatccataggcatcagggagaaacctgctcctagggggaaaaaactcccagcattgtcctagttatgacaaattcaccaattcacagtgcttatttcctctggggcagggattgtgagggggaagagaaggtggggcaggagagataaaacagaggctgaaaggtactatcaccagagtccaaattccaaggctcataaaaacatggacctttatcaagcctcagaaacccggcatgtgaatgttctcaaagggtgttctgtgggacctggaagatgcccacagtcaaagacgtgtcagacctaccagtcaccc

SEQ ID NO: 131589 - DNA, 250 bp, Homo sapiens
attgtttggaaacttccttaataggaagttaaagaaaacatactgagtagcattggccttttgccaggcttctggatggcgccatttttgccttcggagtgttgcttccaaagctggtcctctggcaacgatggtgcttattcaagggagtccctgggataggaggaggtcccaattttttactctaggagcaacctccaaagttcccccttccttcgcctttctgttccctcataaaggaatgtgtctg

SEQ ID NO: 131590 - DNA, 653 bp, Homo sapiens
ggacagactgaagaggaaaagctcaggtgaacacatgatttgcatccagtacatgttgtaaattattggcatattttggctgttcctcaaagcaggactggctgcatctgtgcttagaggtaaaactaatagaggaccacattttggttcttcctgtgagctcagtactgtgtgagtgagttacttacatcaacacagccatacgagttgagtattattattacttctgttttaagatgagtagatagaggttgagagggcttgggtaatttgaaagggcacaaagtcaggatctaaatccagccctcctggtccagaggtttatccttgtgatcctgaccattctaccccacaggagctgctgttagctttatttctctgttgttgaaaactaacttaatatcctatgtactaaactttttcttttaataacacataaaactggaaaacaaaagttcagaaataatcacctcacctgaagagatgatttttgctagattttgtgtattgtggaggaatatttttcctctaacctcttaagatcctgagggcctaagaattaaaacaacaaaagacagaataacagtaaaaagtctgtgtgtaagaagcttgccaactggttaaagccagagacatgtatacctaacatagtg

SEQ ID NO: 131591 - DNA, 718 bp, Homo sapiens
ggattgggggagggacgaatgaggagttactgttcaatgggtgcagagtttcagctttgcaagatgaagacagttctggagatggttggtggtgatagttgtgtacattatgaatgtatttaatatcactgaactgtgcacttaaaaatggttaagatggtaagttttatgttgtatgtattttaccaaaataaaaataaattagggaaaaaagcatacggaggaaattaactttagtgcctgaaatgaggtatatttatttttactattcactgaaactagaaataactgtttttatgtttggtagaaaaaatcctgatttgctctaaaggcacactttctctctctctgatatttttctaaaaattgcatacagaaatatatatcatgacataatttaaaaatacttctaaaaaactttattgaaagttgtagacgattcactccaatgaaaaccgatttcatagtagcaaaattttggtaactaagagaaaatatcttcctctttataaatctttataaatatgtattacctataaaataaagattttgaaagaaataaggttgtattttggaggtgtactggagagatgagtggagcacagatgtgtagcttatatgagattatataaattcgaaatatattatctatatgagattatataaattcaaagaaatactgttaatggccgggtgcagtggctcacacctataatcc

SEQ ID NO: 131592 - DNA, 400 bp, Homo sapiens
gcaatatctgcccattctacatttccagggagtttgattagattatattctgtgaatgtaagtgacttcataaactctctgaagctcatgaaactaactagagaacactaactgtaaaatgttgatgctaagtttttaaaaaaattaagtatgaaaaatacatataaaataatatgttaaaaaattataatagaatattaaatctttccaacaaattacaactggtggcacagtcactagcaggtccaaaaagctctctctcttttactccatatttgtatccaaacattcattccttgaagtcagttgatctcagaaaaacatttctgtttaaaatagtattggtaataataatccttaaattaccaaggacttgataatatattggttgaaaaattag

SEQ ID NO: 131593 - DNA, 284 bp, Homo sapiens
cctgtccccagtctcactttttcctttttagtagattgttttcaatataacgtctatacagaaaaacacagacgtgtacacagtttgattcttcttagactgaacacctggtttcaccagcccccagatacagagtgtgatgagaacaccgaggccccttcaccccaccccagggctcaacctccccctgggcagctgctgctctgtctcctcaaacttcccgggcgggttctgcctgttctcacagctcctgcatgtggagtcggtgggttctgcctgttctt

SEQ ID NO: 131594 - DNA, 229 bp, Homo sapiens
tgctgggatttacaggcgtgagccaccgcacctggccgggaaatcatctttgctatagactgaatgtctatgttctccccaaatttgtatgttgaaacctaatctccaatgtattggcttggcctttagcaggtaattaagtcatgagagtcatgattagggtagggagattaggtcataggagccctcatgaatggtattagtgccattataaaaatacaccccaaga

SEQ ID NO: 131595 - DNA, 487 bp, Homo sapiens
caaagtccaaacagtgctcagagtccaaacagtgcccatagtccaaacagtgcccccagtgcactgagaaaagtcaatgagaaaacaacatttttgtcctacagatctggctgaaattcatgacttggtttctccaaacagcagagcagttccagaaaacactcaggaagaacccagatatggctactatgaatgaaccaagaactacaaaacagagaaaccaagaccttatttctggaggactgagacagaagagctgccagaaacagaaatcacattgcatataccggaagtgcaggaatttcttttgcttttccatttatctagcccagggaggagaataaagttacaaagtttgtgtaataaacggcaaaaggaggccgggcacggtggctcacgcctgtaaccccagcactttgggaggccgaggtgggcagatcacctgaggtcaagagtttgaaaccagcttgaccaacatggtgaaacc

SEQ ID NO: 131596 - DNA, 450 bp, Homo sapiens
agcggtggctcacgcctgtaatctcagcactttgggaggctgagggaggcggatcacaaggtcaggagatcgagaccatcctggctaacacagtgacaccccgtctctactaaatatacaaaaaattagccaggtgtgtggtggcgggcgcctgtagtcctagctactcgggaagctgaggcaggagaagggcgtgaacccggaaggtggagcttgcagtgagccaagatcgcgccactgcactccagcctgggtgacagagggagacttcatctcaaaaaataaataaataaataaatttcttaggatcggaaggtgattagtgagtaaagacgggcaacacagtatctataactaagctctttttagcatttaaattaccagctgatttgtagaaagagattctgcaaatgagagctatttcccccaatagctattacatattataag

SEQ ID NO: 131597 - DNA, 346 bp, Homo sapiens
aaacaccgccatcacgttgcaaaatccaggggcttgtgtcaatgtgcctggactaattgatcagtaggaaagctgccgttgtgtatgagagacagttgaggttagcctgacagaaatatctgtaaatgactcatgaggcaggaagaagaagcaaaaccagccttcattagccttatcacgatgatatggataaaattatgtctagtttgcagctgatgcaagccctgctgttttcgaaagccaagggatttgtgggcagtaatcaccataggggtgtctgccactcaaaatggcttcagatagacgatcaagagaagttttattgatgatgatgaggccacacaaa

SEQ ID NO: 131598 - DNA, 534 bp, Homo sapiens
cttaggggaaggagagcatgtgactgaccgagggtgaagcttaaacagccttgatcttccagatctctgcagactttggagcaagagagcgtcatcagaccgtcagcaaatgaattcctccctccgtaggtgcttggtgctaaatagacatgtgtactggtttctgagccacacgtaactgaatagctgtgtacccctattcttaaccacttttgtgggaatgcacattccctggtgttgaaatttctcttaatgacaaacatttgtcggcttgggtaatcatattgttttcagtgcaaaatagatgtggtgaaccagcctcctttgctgtttggttcttctaagctgttctgccctagggcatctgctcagtcttgaagcattatttaactctttaagttatgggaatttaacttttcatggctttccaattagtaagttccttcaaggcaagtccagtattgtgcttgtgatatcacagtggcattccgtctccctctcccactgcctcacacagtcctcattgcaggggag

SEQ ID NO: 131599 - DNA, 421 bp, Homo sapiens
aattaagccataggaatgacaacaaacaatttaatgaaatttccagaatgcttaaaaagaaacttgcttggcacagccatactttccaacaaacccactttaaagttttcacagtttacaatatcagaaatgacctcagggtcaggcatttgtcagttaatgacctgttgggctaatggccttcagctttgccttaggcacataagtcctccagtaggtcattagctgccagaaaagggctcttcccaatcactatggctaaataaataaaatttgctcctgggctaagaccctataaaccaactttggcttagactaagtaaattttttgttgcgtatttacaactttaagaatttaagaaaatgatggaaatgctaaaaccaaaattacattaacatgactgagctatatgtggctatc

SEQ ID NO: 131600 - DNA, 414 bp, Homo sapiens
tattaagcacctgccaagcactaggcatagagctaagtaacatgtattttctcatttaaagaagttaggaatcctacaaaatgactattatcatccccattctacagatgagaaaactgaggctcagaaagttaagaagtcttcactcaaggtttcaaataagtaaatggcagagccaaatctaaaatttggtctggctgaccccaggctctcaaccacctgctcactgcctggttttctggttctacatttttacaaaggtctctgctcaaaaagattgtatcaaaccaagcacagtagtgtgtacctgtggccccagctactcaggaggctgagtcaggagagtcgcctgaacccaggagtttgaggctgaagtgagctatgatctgtgcacacatgcccactgcctctcaa

SEQ ID NO: 131601 - DNA, 268 bp, Homo sapiens
gcccaaaaaaaaaaaaccacaaacccatattaggtattcatgcaaaaactcagtgataccgtagccagcaaatcctctgagaagggaatgcagctcttccttaagtctgctttgtagtgtttggttgtgtgggtttttttaacttcataaatcatgggaagctgtgctggcagtaggagataactcagcagtagacagattgctcttcgctgctttcttttaagaagcaggttataaaactgttgggagcctggtggagtagttaata

SEQ ID NO: 131602 - DNA, 399 bp, Homo sapiens
cgtgctaaacatttacatgaattatcttattctcgtaatatatttttgagctatgcattattattatctcttttcaacaggtagaaaaaccaaggcttatcaaacttaaaggaatttgtcaaaagccacgcaagttactaagtggtgaagccaaactcaaaagcagagctgtatggctcttgagctgggcttgtaaccactatctgtaggaccagagtcggcagcagagagaggccagagcgtggcaaatgtatttcttgaatactgagtaagtggcaggttatgctgagtagatatttggttggaaaggtgaattggggcccagttcaatttgtcaggggtcttgactaccatttcatggaatttaactttattttctggacgctggagagtccagaa

SEQ ID NO: 131603 - DNA, 591 bp, Homo sapiens
caggtggatcacttaaggtcaggagttcgagaccagcctggccaacatggggaaaccccatctctaccaaaaaacacaaaaattagctgggcatggtggcgggtgcctgtagtcccagctaatcaggaggctgaggtgggagaattgcttgaatctgggaggcagaggctatagtgaacgaagtttgcgccactgcactccagtctagcctgggcaacagagtgagaccttgtctcagaggaaaaaaacaaaaacaaaaaacagtgaaccaaagtcatccctgaaggctaacagggcacagccttggaagaaatgtgatttgggggtcaggctgaacaaattattcctcaaataagtggttctgaaattcttgtgtgcagcagtatcgccacatctggagtgggtcctgagaatctacatttatttatttttattttttttttagagaccacgcctcactctgtcacccaggctggagttcagtggtgctatcatagctcactgcagcattgaattcctcgactcaagcaatcctcctgcctcagcctcacaagacctaagactacaggtacacaccatcacacccaccta

SEQ ID NO: 131604 - DNA, 1935 bp, Homo sapiens
ctgtgaatgtggttcgctattggattcatcatgggataaacaaaagaactcttgtaatgcagaatcattggggacttccatgccatcagaaactggtgttagtgcttgtgtctctttttctccaactagtctttgttgtgatccatctgtgtactcactggtgacctttcctctccaagaagggggacctggagtcagcccgtcacacctggtttcctctctgctagggtccctcctcccacagagcactggagggcagctgaggaggagctaccttaaaaaaggaggtgtgtgccagggagctgggtaggagcctggctatatatctgcccagcagcggtactctcgggacagagatggcactgatgcaggaactgtatagcacaccagcctccaggctggactccttcgtggctcagtggctgcagccccaccgggagtggaaggaagaggtgctagacgctgtgcggaccgtggaggagtttctgaggcaggagcatttccaggggaagcgtgggctggaccaggatgtgcgggtgctgaaggtagtcaaggtgggctccttcgggaatggcacggttctcaggagcaccagagaggtggagctggtggcgtttctgagctgtttccacagcttccaggaggcagccaagcatcacaaagatgttctgaggctgatatggaaaaccatgtggcaaagccaggacctgctggacctcgggctcgaggacctgaggatggagcagagagtccccgatgctctcgtcttcaccatccagaccagggggactgcggagcccatcacggtcaccattgtgcctgcctacagagccctggggccttctcttcccaactcccagccaccccctgaggtctatgtgagcctgatcaaggcctgcggtggtcctggaaatttctgcccatccttcagcgagctgcagagaaatttcgtgaaacatcggccaactaagctgaagagcctcctgcgcctggtgaaacactggtaccagcaggcccatcatcctggatccggccgaccccaccctcaacgtggcagaagggtacagatgggacatcgttgctcagagggcctcccagtgcctgaaacaggactgttgctatgacaacagggagaaccccatctccagctggaacgtgaagagggcacgagacatccacttgacagtggagcagaggggttacccagatttcaacctcatcgtgaacccttatgagcccataaggaaggttaaagagaaaatccggaggaccaggggctactctggcctgcagcgtctgtccttccaggttcctggcagtgagaggcagcttctcagcagcaggtgctccttagccaaatatgggatcttctcccacactcacatctatctgctggagaccatcccctccgagatccaggtcttcgtgaagaatcctgatggtgggagctacgcctatgccatcaaccccaacagcttcatcctgggtctgaagcagcagattgaagaccagcaggggcttcctaaaaagcagcagcagctggaattccaaggccaagtcctgcaggactggttgggtctggggatctatggcatccaagacagtgacactctcatcctctcgaagaagaaaggagaggctctgtttccagccagttagttttctctgggagacttctctgtacatttctgccatgtactccagaactcatcctgtcaatcactctgtcccattgtctactgggaaggtcccaggtcttcaccagttttacaatgagttatcccaggccagacgtggtagctcacacctgtaatcccagaactttgggaggccgaggtgggaggagcgcttgagccgaggagttcaagaccagcctgggtatcacagggagaccccgtctctacaaaataaaaaaataattcactgggaaaaaag

SEQ ID NO: 131605 - DNA, 1652 bp, Homo sapiens
ctgtgaatgtggttcgctattggattcatcatgggataaacaaaagaactcttgtaatgcagaatcattggggacttccatgccatcagaaactggtgttagtgcttgtgtctctttttctccaactagtctttgttgtgatccatctgtgtactcactggtgacctttcctctccaagaagggggacctggagtcagcccgtcacacctggtttcctctctgctagggtccctcctcccacagagcactggagggcagctgaggaggagctaccttaaaaaaggaggtgtgtgccagggagctgggtaggagcctggctatatatctgcccagcagcggtactctcgggacagagatggcactgatgcaggaactgtatagcacaccagcctccaggctggactccttcgtggctcagtggctgcagccccaccgggagtggaaggaagaggtgctagacgctgtgcggaccgtggaggagtttctgaggcaggagcatttccaggggaagcgtgggctggaccaggatgtgcgggtgctgaaggtagtcaagggccttctcttcccaactcccagccaccccctgaggtctatgtgagcctgatcaaggcctgcggtggtcctggaaatttctgcccatccttcagcgagctgcagagaaatttcgtgaaacatcggccaactaagctgaagagcctcctgcgcctggtgaaacactggtaccagcaggcccatcatcctggatccggccgaccccaccctcaacgtggcagaagggtacagatgggacatcgttgctcagagggcctcccagtgcctgaaacaggactgttgctatgacaacagggagaaccccatctccagctggaacgtgaagagggcacgagacatccacttgacagtggagcagaggggttacccagatttcaacctcatcgtgaacccttatgagcccataaggaaggttaaagagaaaatccggaggaccaggggctactctggcctgcagcgtctgtccttccaggttcctggcagtgagaggcagcttctcagcagcaggtgctccttagccaaatatgggatcttctcccacactcacatctatctgctggagaccatcccctccgagatccaggtcttcgtgaagaatcctgatggtgggagctacgcctatgccatcaaccccaacagcttcatcctgggtctgaagcagcagattgaagaccagcaggggcttcctaaaaagcagcagcagctggaattccaaggccaagtcctgcaggactggttgggtctggggatctatggcatccaagacagtgacactctcatcctctcgaagaagaaaggagaggctctgtttccagccagttagttttctctgggagacttctctgtacatttctgccatgtactccagaactcatcctgtcaatcactctgtcccattgtctactgggaaggtcccaggtcttcaccagttttacaatgagttatcccaggccagacgtggtagctcacacctgtaatcccagaactttgggaggccgaggtgggaggagcgcttgagccgaggagttcaagaccagcctgggtatcacagggagaccccgtctctacaaaataaaaaaataattcactgggaaaaaag

SEQ ID NO: 131606 - DNA, 597 bp, Homo sapiens
catctatgcctgggaaatgggtactgaagaagacgagaatttcatgttggacgaaggcttcaccactgtgatggacctgctcctggagtatgaagtcatctgtatctactggaccaagtactacacactccacaatgcaatcattgaggattgtgtcagaaaacagctcaaaaaagagaggtactggaccactgtttgcccaccaaatcttacagaaaaaaagagagacgggctagtgtaacgtggcatagagttttatggattggctgtattaagcagtaaggctgccaccatagttgagcatcgacctcccacaccaacacagctggcatctcaagttggtggcttatcaaagtcactggggggccatggggcgggtagaagcctgttccttgtttcctaagccaccctccaccttagcttggccttcttgctctctgaagaccatttcagtgctttgtaggagctagcatgggaaaatggaaagaatcttggagactcaagtttaaatcccagctcagccattttcctactgctatgagcctcaatcccttatccataagacaggagtaaactggaacctacgacataggattg

SEQ ID NO: 131607 - DNA, 2177 bp, Homo sapiens
ctgtgaatgtggttcgctattggattcatcatgggataaacaaaagaactcttgtaatgcagaatcattggggacttccatgccatcagaaactggtgttagtgcttgtgtctctttttctccaactagtctttgttgtgatccatctgtgtactcactggtgacctttcctctccaagaagggggacctggagtcagcccgtcacacctggtttcctctctgctagggtccctcctcccacagagcactggagggcagctgaggaggagctaccttaaaaaaggaggtgtgtgccagggagctgggtaggagcctggctatatatctgcccagcagcggtactctcgggacagagatggcactgatgcaggaactgtatagcacaccagcctccaggctggactccttcgtggctcagtggctgcagccccaccgggagtggaaggaagaggtgctagacgctgtgcggaccgtggaggagtttctgaggcaggagcatttccaggggaagcgtgggctggaccaggatgtgcgggtgctgaaggtagtcaaggtgggctccttcgggaatggcacggttctcaggagcaccagagaggtggagctggtggcgtttctgagctgtttccacagcttccaggaggcagccaagcatcacaaagatgttctgaggctgatatggaaaaccatgtggcaaagccaggacctgctggacctcgggctcgaggacctgaggatggagcagagagtccccgatgctctcgtcttcaccatccagaccagggggactgcggagcccatcacggtcaccattgtgcctgcctacagagccctggggccttctcttcccaactcccagccaccccctgaggtctatgtgagcctgatcaaggcctgcggtggtcctggaaatttctgcccatccttcagcgagctgcagagaaatttcgtgaaacatcggccaactaagctgaagagcctcctgcgcctggtgaaacactggtaccagcagtatgtgaaagccaggtcccccagagccaatctgccccctctctatgctcttgaacttctaaccatctatgcctgggaaatgggtactgaagaagacgagaatttcatgttggacgaaggcttcaccactgtgatggacctgctcctggagtatgaagtcatctgtatctactggaccaagtactacacactccacaatgcaatcattgaggattgtgtcagaaaacagctcaaaaaagagaggcccatcatcctggatccggccgaccccaccctcaacgtggcagaagggtacagatgggacatcgttgctcagagggcctcccagtgcctgaaacaggactgttgctatgacaacagggagaaccccatctccagctggaacgtgaagagggcacgagacatccacttgacagtggagcagaggggttacccagatttcaacctcatcgtgaacccttatgagcccataaggaaggttaaagagaaaatccggaggaccaggggctactctggcctgcagcgtctgtccttccaggttcctggcagtgagaggcagcttctcagcagcaggtgctccttagccaaatatgggatcttctcccacactcacatctatctgctggagaccatcccctccgagatccaggtcttcgtgaagaatcctgatggtgggagctacgcctatgccatcaaccccaacagcttcatcctgggtctgaagcagcagattgaagaccagcaggggcttcctaaaaagcagcagcagctggaattccaaggccaagtcctgcaggactggttgggtctggggatctatggcatccaagacagtgacactctcatcctctcgaagaagaaaggagaggctctgtttccagccagttagttttctctgggagacttctctgtacatttctgccatgtactccagaactcatcctgtcaatcactctgtcccattgtctactgggaaggtcccaggtcttcaccagttttacaatgagttatcccaggccagacgtggtagctcacacctgtaatcccagaactttgggaggccgaggtgggaggagcgcttgagccgaggagttcaagaccagcctgggtatcacagggagaccccgtctctacaaaataaaaaaataattcactgggaaaaaag

SEQ ID NO: 131608 - DNA, 2123 bp, Homo sapiens
ctgtgaatgtggttcgctattggattcatcatgggataaacaaaagaactcttgtaatgcagaatcattggggacttccatgccatcagaaactggtgttagtgcttgtgtctctttttctccaactagtctttgttgtgatccatctgtgtactcactggtgacctttcctctccaagaagggggacctggagtcagcccgtcacacctggtttcctctctgctagggtccctcctcccacagagcactggagggcagctgaggaggagctaccttaaaaaaggaggtgtgtgccagggagctgggtaggagcctggctatatatctgcccagcagcggtactctcgggacagagatggcactgatgcaggaactgtatagcacaccagcctccaggctggactccttcgtggctcagtggctgcagccccaccgggagtggaaggaagaggtgctagacgctgtgcggaccgtggaggagtttctgaggcaggagcatttccaggggaagcgtgggctggaccaggatgtgcgggtgctgaaggtagtcaaggtgggctccttcgggaatggcacggttctcaggagcaccagagaggtggagctggtggcgtttctgagctgtttccacagcttccaggaggcagccaagcatcacaaagatgttctgaggctgatatggaaaaccatgtggcaaagccaggacctgctggacctcgggctcgaggacctgaggatggagcagagagtccccgatgctctcgtcttcaccatccagaccagggggactgcggagcccatcacggtcaccattgtgcctgcctacagagccctggggccttctcttcccaactcccagccaccccctgaggtctatgtgagcctgatcaaggcctgcggtggtcctggaaatttctgcccatccttcagcgagctgcagagaaatttcgtgaaacatcggccaactaagctgaagagcctcctgcgcctggtgaaacactggtaccagcagtatgtgaaagccaggtcccccagagccaatctgccccctctctatgctcttgaacttctaaccatctatgcctgggaaatgggtactgaagaagacgagaatttcatgttggacgaaggcttcaccactgtgatggacctgctcctggagtatgaagtcatctgtatctactggaccaagtactacacactccacaatgcaatcattgaggattgtgtcagaaaacagctcaaaaaagagaggcccatcatcctggatccggccgaccccaccctcaacgtggcagaagggtacagatgggacatcgttgctcagagggcctcccagtgcctgaaacaggactgttgctatgacaacagggagaaccccatctccagctggaacgtgaagagggcacgagacatccacttgacagtggagcagaggggttacccagatttcaacctcatcgtgaacccttatgagcccataaggaaggttaaagagaaaatccggaggaccaggggctactctggcctgcagcgtctgtccttccaggttcctggcagtgagaggcagcttctcagcagcaggtgctccttagccaaatatgggatcttctcccacactcacatctatctgctggagaccatcccctccgagatccaggtcttcgtgaagaatcctgatggtgggagctacgcctatgccatcaaccccaacagcttcatcctgggtctgaagcagcagattgaagaccagcaggggcttcctctggggatctatggcatccaagacagtgacactctcatcctctcgaagaagaaaggagaggctctgtttccagccagttagttttctctgggagacttctctgtacatttctgccatgtactccagaactcatcctgtcaatcactctgtcccattgtctactgggaaggtcccaggtcttcaccagttttacaatgagttatcccaggccagacgtggtagctcacacctgtaatcccagaactttgggaggccgaggtgggaggagcgcttgagccgaggagttcaagaccagcctgggtatcacagggagaccccgtctctacaaaataaaaaaataattcactgggaaaaaag

SEQ ID NO: 131609 - DNA, 1129 bp, Homo sapiens
ctgtgaatgtggttcgctattggattcatcatgggataaacaaaagaactcttgtaatgcagaatcattggggacttccatgccatcagaaactggtgttagtgcttgtgtctctttttctccaactagtctttgttgtgatccatctgtgtactcactggtgacctttcctctccaagaagggggacctggagtcagcccgtcacacctggtttcctctctgctagggtccctcctcccacagagcactggagggcagctgaggaggagctaccttaaaaaaggaggtgtgtgccagggagctgggtaggagcctggctatatatctgcccagcagcggtactctcgggacagagatggcactgatgcaggaactgtatagcacaccagcctccaggctggactccttcgtggctcagtggctgcagccccaccgggagtggaaggaagaggtgctagacgctgtgcggaccgtggaggagtttctgaggcaggagcatttccaggggaagcgtgggctggaccaggatgtgcgggtgctgaaggtagtcaagggccttctcttcccaactcccagccaccccctgaggtctatgtgagcctgatcaaggcctgcggtggtcctggaaatttctgcccatccttcagcgagctgcagagaaatttcgtgaaacatcggccaactaagctgaagagcctcctgcgcctggtgaaacactggtaccagcaggcccatcatcctggatccggccgaccccaccctcaacgtggcagaagggtacagatgggacatcgttgctcagagggcctcccagtgcctgaaacaggactgttgctatgacaacagggagaaccccatctccagctggaacgtgaaggtaatggctcctctctgggctgtcaagggcttgaaggtcagaacgacagataaactactcagtatttactcattcagttctgtgttgatggagaacagaactttagagtcaccgtttaagggccagctgcaccacccatgggctccgtgaacttggacaaattctttggctctcagagccttgggtttcttaccttcaaattcttgttctcctttcctttctttttcccataatttactggagaatcagtt

SEQ ID NO: 131610 - DNA, 457 bp, Homo sapiens
cgcaggacactgtttagtccccaccaccaagaagcctctcaccagatgcagcaccttggatttctcggcctccagagctgtaagaaataaattccttataaacaacccactttcaggcattctgctataagcagcagaaaacggactaatacacacgccttgtctccaactagaagctcctccacccactaattatggactgttttactacttggcttccaggagggagggaactgtatgaaaagaacagagatgcataactacatacagaaatggttcccaagggggctgagagctgtgttaaatgtgagctttaaatgttttttaatgatttttatcctcagaaaacttggttcaaatgcagtcttgctggatgcatttgctggatgtccaacaagtgaaacaaatgaaaataattattaccctggggcttcactgactgagagtgaaggaggct

SEQ ID NO: 131611 - DNA, 778 bp, Homo sapiens
agagtaagaccctgtctcttaaaaaattaaaataaaataaaaagtagataaaatctatgtacatgggtggctgaatagaaggaagggagtctgtgacaatgatgtcattggggagatgccctgggctggtttcttttatttatacttctcttaacttgaagaaaataacaactattcttttttgggttttttgctatgggcagctgaatgtaaccctaattttgctgcctaaaaatattttgttacattatctcatatcacaaccttgttattaaaaggtatcagtgctgcccctctgctgcctatatagattttgtcagtagacttgaccagtgaagaacttgaccagctggaataaagaagttatgagaaaaaagcataatttcaatgtaatttgagtgtaagatatcatcaagaatcaaatgattcaagacctctgtcctcctgagcagtaagttgaagaaaacctggcatccagatatgttcttcaatttacaattaggtttctgtgtatagttagcagctttcacacctcttgcagcctggccattccttaagaggtgaaaggcattgagaaaaatggcatattatatacatccgaaaagtcgctgtgtttctccttgacagtgtcagcctgcctgtactccctgtaaaatattcattaggaatggagacttcatggtgcttactggtgacatgttacaagtgttcaggaattgctttcttgactttgtgtagcacagaatcattcctacggtggtggtgagagtattcaggc

SEQ ID NO: 131612 - DNA, 506 bp, Homo sapiens
gccacgttcaccatccctctcctccagagccagcttcagaagagtttccaaaactattgtcaggtctccagctccagcctagtgaggggccctccttccaggcctggaccccaccagggagagacctatcatagaaggcagcacaggtggccgagagttgaggacatgatgggggcaaaggtggctggggccttggcttcgtccatccccatctggcattttcagaagttcttctttatatctcactgctatctttccttgctgcagctgcagcccaggattagtttgaggacttctggtcatttgcaggagagtttaagccaaaccaaactctggcctgatctccccacattgccccccactcacagggaccccatactcaagagacaatttgggttcttgaccctggcaccaaattgcattcgttcccactctcagccctcaaataagcttcctgtgtgtcaggcactgtccctgttccttccagtcagaccgtccagccgagc

SEQ ID NO: 131613 - DNA, 293 bp, Homo sapiens
atgcaaaggctgaaatacacctgaactcatccttctggggcaaccagaagtcatagaagggtttcgggtagggaagtggtgactgggtttccagcagcacccagttgagaggcaggtgcagagtaggcaccttggagatacttgttaaatctcagtccagccaggtgttggtcatcacccagggcagacagcagcaagagatgggcaggagggagggcatggcgcagactgttcatggaggacttctgagagcacaaggaggaggtctcaagctgggtcacaagcctgaagca

SEQ ID NO: 131614 - DNA, 383 bp, Homo sapiens
gttgtatacagtgcatcctaggagctgtaggcctacccagtaaaatgctgtcaaaataggccaagcagcagggcacgcagaggaagcgggctttgttgtgtactctggcattggcagttgtcagagaacaggcagagagaaggaaagaagacccctcctaagtccagcagaacctgactgagcggaaccggggctgggccgggaattgtagatgagagaattcttatcttgtgcgtggatagggagcagacaagtgcaggttggtaccttggccaacaggccctgggtgaagagacagccttctcttcatcctaaactggaaaaatgagccagagagacacaagacaccacaaagtaagagaactggaaattcctcctaaagt

SEQ ID NO: 131615 - DNA, 728 bp, Homo sapiens
ggtaacagggcatatccttgcctggtttctgattttagcagagatgcatttattttttcaccattaattatgatactaactgtagggtttttggagatgtcctttatcaagtgaggaaattcccctctaagttcgctgcacatttttattaccaatgtttcggttgttataaaatacttattcatgatggattgatttatatgaattgattttcagatattgaatagacttgaatacctgaaataaatcccacttgggttgtgatgtgtacctctatttttatacattgatacgatcaacttgctaaaattttttgaggattttaggtaggtctgtgtaataagagatgttggtctgtaaatttctttggttacctctttgtcttgtttcgctattaaggtaatgctagcctcatagaatgagttaggaaatattccttcacttttattttctaaaagaggttgaagggaactagcataatttcttcctttaagatatttaatgtttggtagaattcaccagtgaacctatttgggccttgtgcttttttggaaggtttttaattattgattcaaaatcatcagtagttataggcctactcagattatctatatcttttggtgtgacttttgtcaaattattttaagaaatggtcaatttcatctaagttatcaaattggtgggcatagagtcatttataacatttctttacttttattttaatgtcc

SEQ ID NO: 131616 - DNA, 348 bp, Homo sapiens
cctgctgcagccccagcagaggggctggcctgtcgccttgagcccacctgtgccggcctgtgagtggccccaggaggaagccagcgcaaggacaagacccagcctagacaggaaacctcctgaggccaacctaaaatttactaaggaataaaaaatgacaagaagcagaaggcaagggaatagaataataaacccagagagtaaaaacgaacaacatccgggaaaaaaacccatgttagaaaacagtttaaaaatattagccaggcgtggtggctcatgcctgtcatcccagcactttgggaggccaaggcgggtggattagttgaggtcaggagttcaagaccagcc

SEQ ID NO: 131617 - DNA, 112 bp, Homo sapiens
gctctttttcattatttatgggtttactaatcttatttttaaataaatatttaaatgtgttatttttaatttctaaatatagaaatgcataaaccttcactatcttattata

SEQ ID NO: 131618 - DNA, 324 bp, Homo sapiens
tttagagtctacaacagtttcttcctttttaaaattcagtaatagactgtgttttccctgtgtatcttacaggattgttgtaaagatcaaacaaattaataaatgagcaaatgttttgacaattaacttacaattaattagcagtggcttggtattgagggtgccatctctcctttaatctccacaatagttctatgcagcaggcatagcttgatccctttgacaacttgagcccagcgagacatcgggtgacttgctagagcttaatagccatagagcaggacagccaggattcaaaaccaagcctcctgattctaagtgctt

SEQ ID NO: 131619 - DNA, 942 bp, Homo sapiens
  misc_feature (678)..(678): n is a, c, g, or t
catgtgaagaaggatgtgtttgcttccccttccaccatgattgtgaattttctgaggcctccccaaccctgtggaactatgcttttacaaaatctgagtcataaattacagatattcttgatgaaaattcagaacataggatttattttcaaaaagaaatgtaccccaaaagaactctgagagaatatactcaactgtcctgctgtgattaaacaagactgctgtattttacctgagcttggcaaagcaaggatatgaacaattgtgcaggtgggctactcagggcgagtgaagagataaggcatccaatcagggattggccacctgcagccctgccaatatgcccctccaccagatttccgtaatcccagcacgggagactgccagcaatgggagaaattcaatgggcagaaacaaagagaagaacaaggaagtcgagaatttcagaaattgaaaagggataagaggaaggagaaaatgctgggctggtgtgaagcgatagcccgtaaccctcacagaattccaaacaacacgcgaacacccgagatctcaggggatttggctgacgcctcacaaacctccacattgaatgaaaaatccccagggcgatctgcaaagtcgatcaaagttacattttcacaaaggccaagcaggccaacaacaagggaacaggctccncaggagccagtcaacggttgtctgtcttgtgccatcccactccgggaacatcttgccgaaatccgtcacttgcgcaagggggattgaaggagaggccccccttaataaacctggtgtggcactggggaacatgcggctttgggcccaacaagtcctggctccaccggggttaaaggtcaaataacagctgtgggatcggagagttgatctcatggaacccgcaacgctcggcatgtgggaaacgtaggacaggggggaaaagcg

SEQ ID NO: 131620 - DNA, 788 bp, Homo sapiens
gtaaaacaatgataattcagaaatttcataactatccttgccagctttgatgtatacttttatgctgtatgggaaaaaaatcaaaagaagatcctggggattacatttgccccccttcccaaaaacaaattatctattagaggaaaaagtttttatgttaagtggctggtctggaaaagttagtatgccagatttcttgtttataataagaatgtaataagtaagatctcttccaatggctaatggttcatattaaattagaaaacctgaattcagttaaaaagaacatggaatgggaggacaaggctttcagaatggtgatataagcaccttggtagactctctcccaagtaaaataagaatttaactcatgaaatacattttttaaaaaataccaacaatataaagtctctgaaaattgaagaaaaaaatccagccccatatagaaaagactatacatcattgtcaattatcaaattaaccccatataaaaagaagtatacatcagccgggtgcggtggctcacgcctgtaatcccagcactttgggaggccaaggtgggcagatcacctgaggttgggagtttgagaccagcctgaccaacatggagaaacctcatctctactaaaaatacaaaattagccaggcatggtggcgcatgcctgtaatccaagctagtacttgggaggctgaagcaggagaatcacttgaacctgggaagcggaggttttggtgagccgagatcatgccattgcactccagcccgggcaacaagagcaaaactcttg

SEQ ID NO: 131621 - DNA, 727 bp, Homo sapiens
tgcggtggctcacgcctgtaatcccagcactttgggaggccgaggcaggcggatcatgacgtcaggagatcaaggccatcctggctaacgtggtgaaaccccatctctactaaaaatacaaaaaattagccaggcatggtggcaggtgtctgtagtcccagctacttgggaggctgaggcaggagaatagcgtgaacctgggaagcggagcttgcagtgagccgagatcacgccactgcactccagcctgggtaacagagaaagactccatctcaaaaaacaaaacaaaacaaaacacaaaacaaaaaattattaaagttttgtttggtttttatccctatttttgtgccataattttcatcgtttatgtataaacatataaacatttaaaatacatttttgatttttttaaaaagaacaatttgattccttgtgtagaaacattggtatttctatctgtgataaattaattttctaatctaataaatagtgtgggtaattggttaagaatattaacataatggcctattccctcagtcattttatttatctagaaactttacacactatatcagatatcatgagaaaaaagttgccgactatatcatgacctttgcactcaacactgcctatatgttttctactaaaaatgcctctttgagaggcaactgaaaaccacagaagttctttatgagtttattctctcattttataattctaggtccaa

SEQ ID NO: 131622 - DNA, 125 bp, Homo sapiens
gggcatgcagatatctctgacatagtaattttatggaaactatgttaggtaatgcatgttgtaattagctagatttaaccatcccataatgtttgcatacttttaaatgtgattttgtacctgat

SEQ ID NO: 131623 - DNA, 421 bp, Homo sapiens
ccatatctttcctgatgttataaactcttaaagactctgacaagtaacaatagggtgcataaacattgaagttctaagcactaaaaaagaaagctattttaaacaaggcgttaaagatgtttatatgtgttaaattttatgggagctgtataaggttaatatgaaaacgattttttttaatggctaaaaatactgatgaacgaatcatcccctttaatgcataagccatttgtcttgatgcataaaatatgttaataatacaaaaagatgtagagttggcatttggcatgattcctttggttgtttgttttccttatgtttttttaacaagaaagttttctctctctttcccaggtgaagttataaaaggtgactccatatttcatatcaatgtgacctcaaagcaaatctacaaaaaaga

SEQ ID NO: 131624 - DNA, 381 bp, Homo sapiens
caggaatacaatcaggaatacatacacacacatacacacacacacacacacagctgaaataaaaacatttcccattaagattcaacgaggtctcacagggcctacttcttggtcatataagggctggcaggtcctctctgtgggctggagaaaagttttgtttccccagctgcactcacgggggaatactctgcaggcactgcattgtgaacctgtttggcttggctcagaggcctgtcagcacattcaggaagtgaagtcagaaagaggcaggatttcaaacagagccagctgcacacaaatgcccaggcagtgaaatgccttattcgagcagggtgcctatcagcctggcttgccctaggtgctgtcaaagaagcctct

SEQ ID NO: 131625 - DNA, 738 bp, Homo sapiens
tcttgcatggtcttggaagagactgagctataacagcagagaagctaggaaggaaatgggaatctgaggtctggggcagaaaatccttacctaaaagaacagaagaaaaatggctaaagctggaggtgaagccaaaaaccatgcaggtcccaagtgccaataagaatagcaggtctgagcctcagacaagacacagcattgcttaaatatcctgtggcaagggagtcactccacaggcccagcctgaagacattaccgctgacatttcccattaacgtcacaattttcctctatgaggtggtgaggtggagtgggaagggctgttagctggcacttgcaactttattgcgccagcaagaacatgcatacagcccagtctaacgtacaggatcaaaaaggtaatgacagtgtgactttgagtcagtttgagtcagccccagtttattcatctataaaacaagattaaaactaatgcttggccaggtgcagtggctcacacctacaatcccagcactttgggaggctgaggtgggaggatggcttgagctcaggagtttgagaccaccctgggcatcacagggaaccccgtctctacaaaaaataaaaaaactagccaggcatggtagtacaagcctgtagtcatcacagctactcaggaggctgaggcaggaggatctcttgagcaggaggttcttcaaaaggtgactgtgagggcagggtacagtggctcatacctgt

SEQ ID NO: 131626 - DNA, 537 bp, Homo sapiens
tttactcctccttcacactgcagagtttatatcctccggggactctcttctttctaccacctcccacagatgaaatccttcccctacctctgctgaactgatatcccccagctggagaaagcaggcaataccactgacagcaggggagaagcacggctgtaaaaactttgcatgtcagcatgattataaaggaaaacccttgcttggccaggacgatcatattttgacttcatgtggtatttttctctgaattggttggaatacttcaaccatggaaatagtcttccctttccttgcccagagttaaagagccattcaagaatgccgatttcatatatttccttgccagtttaataacctcaggggtgagagtagacagatcaaacttggatggggaagaagaatgtagccttccatcatggcacccagacaacgagacaggccctgcgctacaaaccaccagcaacacaaggagggggatggctagaaagcagcaagagaatagaacagttacaccggacccagactggagaggag

SEQ ID NO: 131627 - DNA, 532 bp, Homo sapiens
tgtccagaatgagtgctatgacagccccaaagcattctggtgggtaagtgtaggttttgaacttgtccttgaaagatggggctttggataagcaaaggagagcagcaagggcattctaggtaggaggaatgatatggggaaaggtttggggataagaaaatacaaaatatttaggaaagatagcagatcacttttgacatagaagaacggaaaataggtcagaactttaatgcttctgatcaaagataattgacaatcttctagaattaaaatagaccatggtgtgattagcgggaaagaagtgactatggaactaatgaatgttaggaccagattgtggagagttttgagtgtcaggtttttgggattcatccacgttgttgtgtatgacctcctcccttgctgaggagtattctattgtaatacacacaatttatccatctgctctcctgttaattaattaacaagggtcatttccaggttagaggtattacacataataaagttactctaaatattcttgtataggtca

SEQ ID NO: 131628 - DNA, 222 bp, Homo sapiens
  misc_feature (20)..(20): n is a, c, g, or t
  misc_feature (22)..(22): n is a, c, g, or t
gacggattttcactcttttntncaggctggagtgaaggggcaagatctcaatcacttgaacccaggaggcagaggttgcggtgagcggagatcttgcattgcactccagcctgggcaacaagagtgaaactctgtgtcaaataaaaaaagaaaaggaatatggcaggaaattatgaaatggaacactgtataataggaagctagcaaacttaaagtactttg

SEQ ID NO: 131629 - DNA, 719 bp, Homo sapiens
actttttacaaatttttgtatatttctttgttatgtacttcatagaacacatacacaaaatagaaaaatttgaaaaatgagataaaggtacatagatcactactttaaaggacaggtgaaactgaagggaaagtgatataacatttatgaagtccctcctgtgtgccagacttttgatatatattatgcctttgaatcttcaaatagctctgtaaagaagctgtcatgagttttccattttgcagatgagaaactaaatggcaagacaaataaaatcatttccccacagtcttgccacctgtagctgccacggctggaatctggacccaagtaagctggctccggagcccactgcccaccctgaccactcctatgtcatacaggaagcatggagctggggaaagacccatttggtttttgggggcaacaggctgagtggaggggctgcacgatttgtcaagagccctgaatgacggccttgaagccaagcagcaggtatgattctcaaaccacaggcacagttgggccagatgtggccatttctttcctttaaatcttcactgctcagagtgcagtccagggaccagcagcttcaacctcacctggaagtttatcagaaatgcagaatcttggccccgctacaaacctactaagtcagaatctgcatttagcaagaataaagtttgagaagcctcaaattacttaaactcatctggtct

SEQ ID NO: 131630 - DNA, 471 bp, Homo sapiens
gcatcaagctgttcgttgagtgtgtcgtggtcttctgtctactaatagatgacaactctggaagcctagtaccactcttaacagatgaataagtacagcatggactagactgccacaggccatgctttcttttaataattctagcaccagtgattgatttaggaaaaacaaaatactgatgattacttttaggctaaagcctgctgacacttctgtcttaaagatactgaaagagtagttgtatttgttaagtctggacgtgaggtaaacatggactttagaattgaattgagactagtatcatttaacgccagctggcaggctgcttatcaagcttataatttggtagccagaggtaaacggaacttgagccactgaccaaagagagccctggaatggttttcctctgtgttttcctaatagatgatatctctggttaactaatagatactaatttctatagccattgtc

SEQ ID NO: 131631 - DNA, 508 bp, Homo sapiens
aaagttggcgtgtttgtttcctgcaggggagaaaaagaaaacttaaaaagttggtgtgaagaacattttagggactactaaggaacttttgagtatggactaattgttggattttgttattattgttaattttctggttaatcatatgggaaagtgtttttgtttgggggaggtggttttgaagtatttaaaagtaaaagggccaaattgattttagcctctctaaacaaaagaaaaatgtgtatattaaggtataaagatggagaaacagagtgggtttggttagatgttaacagttgatgagtctaggtgaggaatatattgatattctgtgtactccttcaattttaacataggtttgacatttttcataattaaaaattaattccttttagacttactttaggtgaaatagtgtaactttggtccataaatttccaaatccagtagtaagatcaatgttatttattcatgttaaatcaagatatactgtatgttaactgtaact

SEQ ID NO: 131632 - DNA, 132 bp, Homo sapiens
tcaacttattccttctttattgctgatggtatgatcttatagctagaaaattccaaagattccttcaaaaatctcttaaatttgataaatgaattcagtaaagagaagattccaaattggaaggaaaataag

SEQ ID NO: 131633 - DNA, 753 bp, Homo sapiens
ggggagctgaagagggagaactgcttgagtccagaagtcaagtatacagtgagccaaatggtgccactgcactccagcctgggcgacagagcgagactctgtctcaaaaaacaaaaaccaaaaataaagaaaatccattgtctacctatattttatttttcacacctaactttggtggttaaacttattgaaggccatggcaaggactttactgcattcctcacaacaccaccattgagctcttaatcctcagaatgtgcattaatttggcaaaatatttatgatgttgcatttttctcagtttttcagagtatctcatctactcagtaaagacattggttcattcataagaacgaacaagtccaaacataagtggaaaaaatgtatgaactgaaaaaaaaatctatatcaggtatatcctcacttagaaatgattgtcagtgaagctgggtgctgtggctgagggctgttaatcccagcactttgggaggccgaggcaggtggatcacttgaggccaggagttcaagaccagcctggccaacatggtgaaaccctgtctctactaaaaatacaaatgttagctgggcatggtgacgcacacctgtaatcccagctactcgggaggctgaggtgggagaagctcttgaacccaggaagtagaggttgcagtgaggcgagattgtgccattgcactccagcctgggcaacagagcgagacccctgcctcaaaacaaaaaagaaaaaaaaagaaa

SEQ ID NO: 131634 - DNA, 359 bp, Homo sapiens
gaaacttcaaaaggtatagatcacctgattgaagcatttctgatttatttaatattttttcattatatttctgtcctcctacaagggaaagtcatgattacactaaccgagctaaaatgtttactagcagacacccagtcatcttatcacatcttaaaatcatggtaggatgtcttctggtattacatcatgctgatcatgtggacatgctggctggagctctccagctgacacagagcagggttctgtgctgtcttcttacaaagtggaatttgacaatcattgcaccatgccttggaacatcctgaaagccagcataaacacatcctctaatcccgggacatcagtttccgatccca

SEQ ID NO: 131635 - DNA, 496 bp, Homo sapiens
gactgcaacagatctgagaagactaagcagaaatgacaagtaaatgcaatgcaggcgcctggacaggatcccggaacaggaaaaggacattagtggaaaaactgcagcaattatttgaataaggtctgtaagtcagttaacagtgctgtgccagtgcaaacctcctggttttgatcatcgcattacgagttatgcaagatgtcaacattaagggaaacagggttacagtataggggaactcttgtagtatttttgcaactttttttaaagtctaaaatttgttcaaaatacagtgtttttgaattctgcttattatatgcctagatttcaatctggaatgcatcgtttcaatattaagagtctcatctgtcaaaaagagaacacacaatttgaggtagcacaactagtaagtaaaatcggaacaggctcaatacctgaaaagtgtattattctaaacacacgggctgggcgcgatggctcacgcctataatctcag

SEQ ID NO: 131636 - DNA, 134 bp, Homo sapiens
gtagtaaaaaagactgtctcgctcttctgctgatttactaaatcactggatctccttcagtccaaatcaccaccaagggtcctggtgttttcataaagatcagccatctcattgatctgagacgccatcctacc

SEQ ID NO: 131637 - DNA, 474 bp, Homo sapiens
gaaattatgccaaagacaataaagaataaagaagataattgagcttgccctttaagaatgtgcattaaaaaatactcttactggtagagaaatatacaggattatatgcattctggaaattataaaaacatagagataaataaggcacaaaagagactcaagaaattatgttgcatttgtttgaaatttattgtggtgctgggccgggtgcggtggctcacgcctgtaatcccagcactttgggaggccaaggcgggcagatcacgaggtcaggagatcgagaccatcctggctaacacagtgaaaccctgtctctactaaaaatacgaaaaattagccgggcgtggtggcgggcacctgtaatcccagctactcgggaggctgaggcaggagaatggcgtgaacctgggaggcggaatttgcagtgagccgagatcgcaccactgcactccagcctgggcgagactctgtctc

SEQ ID NO: 131638 - DNA, 181 bp, Homo sapiens
tagaacagggtctgaaatgctcaataaatatttattgagtgcgtgtatgtggacccaggggtgtgtgtccatatgaccagtgtacactaagccataggacgtacccgtgccgcctccttggctatcactaactataaatacttggagacagactacagttttatggcctttctgcatgggg

SEQ ID NO: 131639 - DNA, 596 bp, Homo sapiens
ggggaggtgaacccagaaccaattccttcaccaaagctgtggaaaaacaagaagccttggcgatccatgcactgttcagccagtttacaaatttggtccaaaacgaggtcagtgatctcctggccaatggtgtagtgccttcaggcatagttactggaagcatcttccttgcctgtgatgagctgctcagggtggaagagctggttgtaggtgccagtgcaaacttcatcatcaattaccatgggtttcaggtctagaaacactgccctgggcacatgcttgccggagcccgtctcactgaagaagctgttgaaggagtcatctcctccccgagtgttcttgtcacttggcatctggccattgggctggatgccatgttccaggcagtagggctcccagcaggcattgccaacctggacaccagcctggccaatgagatggagatgcggtcacgcatgattactgcttcacggctgccgaggcgatggtggagacaaggagagattgttgcttcttacagtgcgactcttaggtgattgatataagagaacctgcctattattttctttccttcttctaaggcaagagtgacactt

SEQ ID NO: 131640 - DNA, 621 bp, Homo sapiens
cagcattcctacttggtactgtaatgtgaaacattttaggtataacaagacttccagaccattataatgtacattattggataatgtaaatatgttgatatgattatatttaaaataaaagaaaacatttatttgttattaggaaccaagactttcacagtgagagaaaagaggtacaaacaaaaaacaaaagaacaaactgtgtacaatacatctgaattagaaataatatgaactacatcatttctgaagatatgacagtaatagaaaatcaccactttgtaatcccaatgtctcactgatttacacaagcatcttcaatgaacactaaaaccactagatgaaatgctgttaggaaacagaatattcatagtctcaaaatatcaccccacagttttgttactaattgcaaacaggaaatgtatctttacattggagagatcttatagcccctacctttaccaagtaacttggtatctattgaatctagaagctaggtactaatggataccacttctctctaaacaaaccaagtatagtatgattccactgacatgaaatatgcagaatgggcaaatctataaagctagaaggtagattactagttgcctaggtacaggg

SEQ ID NO: 131641 - DNA, 442 bp, Homo sapiens
gacagggttgaagttgagagagaaaaacgagatcatttaggaacagctgaagaatcaaaaacagcaaagcacaatgggtagaaattccactagaatttgaagtggtgaagtatatgaaaagaaaatattttaagcaagaatcctaatataagctgcagataaattaaatgtgataaagaatatgctctagaattttatcttccatcattacacagaagaaccttaagagcatctgatatttattgaacaaagaaagcatggacttcaataatctataaggctttaaaaattcaaccaaaatttgataattttaagttacattttttccctagagcactatataatagcatgtcctaggaaagacagatgtgggcaagtttcttttctaccaagagtgtagaatagtttacatttctgatttaaaaagcagttccgttaacac

SEQ ID NO: 131642 - DNA, 980 bp, Homo sapiens
caacagttgcacgggcctcaagggtgtcacgcgacatgaaagacactcatctcaggccacacaggattccatctattgaacattcctgagacaacggaattctggcgatggagcacagcccagtaaaggcgccattccccattttacagctggggaaactgagttacagagcttgtctgcactgagtcatcaggagcaaatgctagatcagtagggtctctctctctgccacccaggccagagtgcagttgacgcagggcaggggagccccgaagtggagcatagtgtgtccggaactggtgggttcttggtctcactgacttcaagaaagaagccgcggaccctcgcgaaactcctgggagggcagaggcatgcctgccatcttcatcattgcattaccaccacccaacactatcaggggacctgccctgataatcagtctacaggtgtatccagcagctccagagagacagcgaccagcgagaaggggccatgatgatggaggtggttttgtcaaaacgaaaatggggatatgtagggaaaagaaagagagatcagactgttactgtgtctacatagaaagggaagacataagagactccattttgaaaaagacctgtactttaaacaattgctttgctgagatgttgttaatctgtagctttgccccagccactttgccccaaccactttgacccaatctggagctcataaaaacatgtgttgtatgaaatcaaggtttaaggcatgtagggctgtgcaggacgtgccttgttaaccaaatgtttgcaagcagtatacttggtaaaagtcatcaccattctctcatctcaataaaccaggggcacaatgcactgtggaaagccgcagggacctctgcccttgaaagctgggtattgtccaaagtttctccccatgtgatagtctgaaatatggcctcgtgggatgagaaagacctgacggtcccccagcgcgacacc

SEQ ID NO: 131643 - DNA, 275 bp, Homo sapiens
ggtcggttcagcagaagattaaactgagcacagcatcctgttccctcaaactgtctgtagggtctctctctctgccacccaggccagagtgcagttgacgcagggcaggggagccccgaagtggagcatagtgtgtccggaactggtgggttcttggtctcactgacttcaagaaagaagccgcggaccctcgcgagacggggtcttgctctgttgctcaagctggagtgcagtagtgcaatcacagcttagtgcaggattgacctcctgggttc

SEQ ID NO: 131644 - DNA, 731 bp, Homo sapiens
  misc_feature (474)..(474): n is a, c, g, or t
caacagttgcacgggcctcaagggtgtcacgcgacatgaaagacactcatctcaggccacacaggattccatctattgaacattcctgagacaacggaattctggcgatggagcacagcccagtaaaggcgccattccccattttacagctggggaaactgagttacagagcttgtctgcactgagtcatcaggagcaaatgctagatcagtagggtctctctctctgccacccaggccagagtgcagttgacgcagggcaggggagccccgaagtggagcatagtgtgtccggaactggtgggttcttggtctcactgacttcaagaaagaagccgcggaccctcgcgaaactcctgggagggcagaggcatgcctgccatcttcatcattgcattaccaccacccaacactatcaggggacctgccctgataatcaggtaggttcttttctattttcctaagcgtcgactgncttgagaaataaaaggacagagtacaaaagagagaaattttaaagttgggtatccgggggagacaatacacattggtaggatccgtgatgccccacaagccacaaaaaccagcaagttttcattagggagtttcaaaaggggagagagtgtatgaataggagtgggtgacagacatcaagtacttaacagggtaatagaatatcacaaggcatgttgggactgggtgagatcacagtaccacaggatggatgtgaat

SEQ ID NO: 131645 - DNA, 710 bp, Homo sapiens
  misc_feature (453)..(453): n is a, c, g, or t
cctaaccagggatgggtctgggtgattaaggaaggttggcttcagaactgggccaggggcactgctttgcttttgctgttttgatcagctctctgcctgaaggagacaagaaaaaccaacgggaacagctggggaaactgagttacagagcttgtctgcactgagtcatcaggagcaaatgctagatcagtagggtctctctctctgccacccaggccagagtgcagttgacgcagggcaggggagccccgaagtggagcatagtgtgtccggaactggtgggttcttggtctcactgacttcaagaaagaagccgcggaccctcgcgaaactcctgggagggcagaggcatgcctgccatcttcatcattgcattaccaccacccaacactatcaggggacctgccctgataatcaggtaggttcttttctattttcctaagcgtcgactgncttgagaaataaaaggacagagtacaaaagagagaaattttaaagttgggtatccgggggagacaatacacattggtaggatccgtgatgccccacaagccacaaaaaccagcaagttttcattagggagtttcaaaaggggagagagtgtatgaataggagtgggtgacagacatcaagtacttaacagggtaatagaatatcacaaggcatgttgggactgggtgagatcacagtaccacaggatggatgtgaat

SEQ ID NO: 131646 - DNA, 662 bp, Homo sapiens
tggatacagcatagacaccttcccggcatgtaaactcctgggagggcagaggcatgcctgccatcttcatcattgcattaccaccacccaacactatcaggggacctgccctgataatcagtctacaggtgtatccagcagctccagagagacagcgaccagcgagaaggggccatgatgatggaggtggttttgtcaaaacgaaaatggggatatgtagggaaaagaaagagagatcagactgttactgtgtctacatagaaagggaagacataagagactccattttgaaaaagacctgtactttaaacaattgctttgctgagatgttgttaatctgtagctttgccccagccactttgccccaaccactttgacccaatctggagctcataaaaacatgtgttgtatgaaatcaaggtttaaggcatgtagggctgtgcaggacgtgccttgttaaccaaatgtttgcaagcagtatacttggtaaaagtcatcaccattctctcatctcaataaaccaggggcacaatgcactgtggaaagccgcagggacctctgcccttgaaagctgggtattgtccaaagtttctccccatgtgatagtctgaaatatggcctcgtgggatgagaaagacctgacggtcccccagcgcgacacc

SEQ ID NO: 131647 - DNA, 172 bp, Homo sapiens
actgtgtgacttgatggaattacttaaattctctattcatatataaaatatacagcatcaaaactactatgctatatatctatatagtactaagcaaattgaccaaaacgatactgcttttaaattacgtgtgttgggccgggtgcggtggctcacgcctataatcccagca

SEQ ID NO: 131648 - DNA, 705 bp, Homo sapiens
attgggagcgaagaaaatgacaagattaaaagagtaaccagagactttgtggagttgtaaatgctgatttttaaaaattgacttaaaggccttaagtgtaataaatggtaaaagaagatttaaacaggagtagaaggaaaagtaaagaatatatctccattctcaatggggggaaaaagccttgctataaactgtattacaggaatactttcattatgtaaaaacctattttgttttcatgtcattcttagattacatcatagagtggctgcagccatctcacactatattataaataaatcactggcttaatcatagaatgagccagggcctcagatttaaaaggaaaacattagatcatttttaataactgatataactcaaaccagttggcattgaaccacggtgaggtgatctcatcctgaagaagtccaaaaaggacccaaagcaggtcagagctgagcaggtcccagagacacttccatttacagatgaagaggttgctaatggcacctgagtagaattcacccctggactagtcttgccattaaaatcaacacttactttccagtagtgatgcccaataagccttccccatgaaacacagtggataaaggttttgttcctagagccactatatttccaggtatcagaaaacatgagcacattatgatgtttgtagttaggccttgggagtcattatgc

SEQ ID NO: 131649 - DNA, 307 bp, Homo sapiens
ccatttctccaaaaaaacccacaaactgtgtagtaactgagtctctcagcaatatactcaaagctaagaggatttttttttaaagtcctcagatgcagttaaggaaagccctgctacatacaggttaatcaatatcagtaataccccttgactctaggaggctggaagatatcctagtaaccccactcacatcaattgtttcaagtagcctttttccagtttccaactcatgagtaaagataatattttgtggctaggtgtggtggctcacacctgtcatcttagcactttgggaggtgaaagtggg

SEQ ID NO: 131650 - DNA, 297 bp, Homo sapiens
ctcccaggttcaagcgattcttctgcctcagcctcccgagtagctgggactataggtgcacaccaccacacctgactaatttttgtatttttagtagagacggggttttaccatattgaccaggctggtctcgaactcctggcatcgtgatccactcaccttggcctcccaaagtgctgggattacaggcgtgagccacagagcccactcttaatgatggcatcagttgttgtggtcagctcgccccaacttttatggttttagttcttcaatttgattttgttatcaacactctag

SEQ ID NO: 131651 - DNA, 839 bp, Homo sapiens
tcagtggaaacaacatatttacatccagagaaagttgttattgcagacgtgaatttggtttagtgaaagcctttgctttgctaaaaaataaaaattttaaaaattagaaaaaaattctaagtaaggaaaataagttcttaaaaaatgatgctctatgtaatgaagatacctgttttaggctttgcttgtgtatttagcaactaggaagttagagaagcaattaaagccactttcttaaaataggaaagtgttaaacatacagaaaagatcaaagaatagtacagtgaacacggagatatactcctgctgcctatagttaacgataaatattttgccaaatttgcttcacttgtttgtgggttttgtttgtttttgttttttactgaatcatttcagtgtgaatgggcatcatttcacttcacatctgaggctttgcaggttgtgtctcctaaaaataagaatattagagtctggggttaactgttgtaggttaagaagtcaacttcttcttaagtgatgccacagctgatcctttttcacagctgtttcacctgtggtttcttttaatttcagcaaaaaaaaaaaaaaaaaaaaaaaaaaaacacttgtgttggggcgcgtcgtgggcctgagaaaagttttctgaaccaccatcccttggggcgcgcggggcccgaggggatatggtaactgcggcaacaaacggtccccaggaaaaccgggccgaacaacgggggtggtgttcccacaaaaaaaaaggcgcgggaacgagcggttgcgcacaatccacaagggttccgaggcacagacgaccaccagggacccagggatgaatatat

SEQ ID NO: 131652 - DNA, 755 bp, Homo sapiens
  misc_feature (3)..(4): n is a, c, g, or t
  misc_feature (6)..(8): n is a, c, g, or t
ggnncnnnggctcaggcctgtaatgccagcacttcggtaggcggaagcgggcagactgctcgaactcctgacctcaagtgatccacccgccttggcctcccaaagtgctgggataataggtgtcagccaccgcacccagcctggagtggccttttatgagaggggacccgtcaaatctgtgccttatggaggggtccggcagcggccacaattgtcttgtcccctcaccccccaactccccctggaacacctctcccaggcaagacattttcacagcaccattcacaacggttgggccaaaaagaaacttttccttcatcatttcctgcactcgctgaccacaactttggacaccccaggctgccacccctccccacccgttcacccccaggatgctgttgctgtaggacgcctgctgccctggagccctccccaggatgtgagccagtcccctcgctggtacggaatgccgctgggtgcccggaggcggccatggtgtctcgatggacggcagccaggatggagcacccatgggtctcacggccatgcttcagggtcttcaggtcctgcccccggccagtctgccaagaggcacccccttccccagcctctcgcctgcactgatgcagacaaaatctcacctggcaggcccaacccccaccccacccctcccccgccgtgtgtggcccctcgccgcatcgttggggttttgttacgtgaaaatatcctggaaataaatacatgtttctgcactt

SEQ ID NO: 131653 - DNA, 664 bp, Homo sapiens
cagttaaaaatatataatttgctaataagaagtgtcatataaaaataacctatttgcttgattgcaaggcttagtataattgttatttcagaaataagtaaatggaatataaatacatttattatagtttcttattgtaataagtgataattaatatttattatttgagacttgctacatgctttaaaaattatattctctaattctcacaacattgtgaggtaagttttttgttactgatttcttatagatcaggaaatcaaagatgggattgttcatatgacttgctcaggttgactcaacttgtttaaattgtggatttgggaagtgactgtgatctttatgttcttaactggcaaactaacatgcccgtcccttttatcctttaacagaggtattaagtagtcaaggtgctaaattcttattaatggaaaaaaaatagatgaaagtgattgtcatcattagggccttggagaaattgctaagtatacagaggttctttggtattctttcactttctttttacgcctttcccttttgttttccttcaggcatatagcgatcttgtacagtctttggttgttcaaagcctcccactttttcactctgctgagattatatcttactgctctaataaaaattctgatcttcttcatggatgatc

SEQ ID NO: 131654 - DNA, 314 bp, Homo sapiens
gctaggaagaacaaaaacaaatgattagagtcttcatgattacggatttgtttggactttgattactaactaaattaataatttatttttataagctaacttcagcttaaaatcatttgagcttatgtgcaaggtaaatatgtttgaatttttaacactttctatgtaatactagggaaccccatttgacaaatttagtagaaccatcattaatctacatagattattttattgaactaaaagcaattattaatattcgttaagtgccaggcagtttacacacacacacacacaatttatccctctaaccttat

SEQ ID NO: 131655 - DNA, 296 bp, Homo sapiens
caaaaaacttgttatatcctgagttgggtcgaaaagtcaagaggtggctaaattcctaaaaataaaactggtgtggtaactgctaatagctcaattccaaaaggtaaaatggatgattatgtaagtgcctggcaaataaaaattacgtatctggttcaagaagaattgtcttctaaagttagtaccacattttaaaaatgtggtgaccagaaagaaattttaatccacacctcttgctcttccttatcccaatgtgctttggctaaaatcacttcactttcaacttgctgtttaag

SEQ ID NO: 131656 - DNA, 424 bp, Homo sapiens
tcagtgtcatcccccttcgtggccttggtttattcaccaacccaacattcttgaaacattctcctctcccttgcctctttaccaaaaactgaaactgtcgagggtggactcaggtctctgatcctttcctcaccattgctgataaaagtagtagtagtagaaggtacccttacccttgatccagcacagataatatgccaggaaccatgttaagcattttacaaacctggttgcaaactatctggggctatttagttaggattttcctcctctcttccatcactcaaacaggtaggtatataggaccctctttgtctctgaactctaggaggaaaaggaatagagttagtggagggatgaagccaagcatggcagaaagacaattctgtctgtaagaagcttttgcttttccaaaagctggttg

SEQ ID NO: 131657 - DNA, 434 bp, Homo sapiens
ccatcatgactgtccccagtgagtgtcctttactattcttgggagtgactcctgtctaacttttcatactggcgagaagaaaagaagcctattttaacactttagtggtgttgaaacacattacttactttctgaagatgtcccagtgaatcctctgtcaattcactgccatatgtaatctatatgataaggaatgcatcttccttctaagtactgcccaaacccttgccagctcctctcccattgtcccttcatgtgaatatttcttggctaccttagtggaaatatagatcagtcttctccccatccatcctctcaaacataatgagattgtttactttttagatttatgcagtgaaaatgcccagtcaggtctgaatcgtcagtgcattatattgactctgagcactttagaatttagagttgcaattgaa

SEQ ID NO: 131658 - DNA, 620 bp, Homo sapiens
aggggaaatttaatttacaaattaattaaacaaattattattttttaaaagcatcagcaatatcagacttgacaaaaaaattaccaaagataatgaaagatatgaaactgaccagaaataagattgccatcattttcccaaaagtccacataaccaacagatcatattcacattacagggtagttctcagagatcatattctttatgtataaaatgtggaaaataacataataacataatctactacctaaggtaataacgtgcaaacccactttataaactgttaaacaccacaaaatgtgagttactatgaggaaactatgagggaggcggtagagctactaaagaaaaattctgattaagtctagatgcttttcaaattagaacacaattgaataaaatggaataggaagctattttgtgatgctatgtaagaggaaaggagataaagaaaatagaaatttattgaatacctaccatatacaagacagcgtgttgatggcttacatagattttatttaaacttaaaaataaactgatacttatatgacacctacattaaacatactttttaatgaaagcttagcattgtgagcagtaaaacacatatatattatgtg

SEQ ID NO: 131659 - DNA, 860 bp, Homo sapiens
caagcgattctcctgcctcagcctcctgggtagaggggattacaggcacccgtcaccacacccagctaagttttgtattttttcagtagagacagagtttcacctggtctcgaattcctgacttcaagtgatccaccccgctcggcctcccaaagtgctgggattacaggcatgagccaccgtgcccagccagaaaaaaatcattctttatagtcaaagcttaaatgcttcatgacccatcttcataggagagtattctttttatgctctgttccctgatttggtgactgtgagaactcttatataacatttatgaagtgcttacacagcattaagagataggcatgaaaagatgactacatcttgcctcagccctgcaagtacctatgggagagtgacatttaaatgtatacatgtagctaggtgtggtggctcatgcctataatcctagcactttgtgaggctgagacaggaggatcgcttgaggccaggagttcagaccactgtgggcaacatagggatctcatctctacaaaaaataaaaaaaaaaaaaaaaaatttttgcgggcgccgggcctgaaaagtctttagaccaatcgtgtggggggggcccagtagtttaatggacctgggcaaagctgcccaaggaaacccggctcagacggggtttgtttcccccataaaaagcgcggggacccggttgttgacacccaagggcgtccgcgctcactggtttcacgggcccgcgtcgatacccgctcccgcccctcgtgggcaacacacccacgaacaaaagaatataatcaacacacaaacagaccatctaatacataacacaacaagagccaaacatcgtatga

SEQ ID NO: 131660 - DNA, 670 bp, Homo sapiens
ggcgatctagaggatcctctctggatgaaagtgtcatgatatggcacatcaaaagatgaccccaaaagccctgcccatttttaagagagggattttaaacccattagtgataaattatctagtctctttattttatgtaaaggaaccatctgtgaaatatttccaaaagctgaaaaataaatataaagccccctctacttaagaaaccacatgaattgccatttagcaattatgttttagagatttatttaaaacaaagagagaaaaagatgtttcttaatttattttaaaatatttttagaaaatttggcataagaaatgaataatatagtgacatctaaactagttttaatttctcttgtctctttccactgcagtctacacttcacactgccaacaaagtgatcttcctaataaagtgtagacctctcagaagagtcttcaaaggctttccaagtccagtgtcaagctataggcatacttttgtccagcaccttgtatcccaaccttctgttatcatgatttctgtttctggcctctgcaatttccaagcttttccatcaatttcaaatgcttgttttctctacatccatcccacttcttggcctaaatctttctccacaatgagagtccaattcagatacttccttctttattaaatcttcctttt

SEQ ID NO: 131661 - DNA, 267 bp, Homo sapiens
atgttttacatcctcctcccatgaccctacaagaaaggtattacagccgccaccgtacggacaggacaccgaggcccagcgaggctaagacgcttcctcctgaagggacatagcaatcctgttattcaccaaaggtagagaaggcaaaacctaaatgcttcctctaaatcccacttccgaggtatactttccagatctccaccccccaaaaactgacattgccacacacattcataggggcctctgactctcctttgaaaatgcaag

SEQ ID NO: 131662 - DNA, 348 bp, Homo sapiens
tccaagaggctttagcttttcccattaggatacttattccaggagcctttatgctgggctaggaacttaatgagtaaaagacaaatagtggttccttcccactaagattccatctctcagtgtggtaaaggaacaaatgtcccaggtgtagaaaacaccaaactaactccacttcaaaccatgctccatcctatgcctagtgccattccctggctctctgtctgtctccacccctgacatcctcggccttcattctgggggccatccatgctgcctctctcctagtctgtggtgactttggaggctcagttgtcttgaatctctgtcttcccaaattcactgccttat

SEQ ID NO: 131663 - DNA, 259 bp, Homo sapiens
aaatgacttgtctggagtaacaggagtttagtctggagtggccttgctcctgaaagacccagtttcctgaggtcatccctgaggcctgccaggtgatataatagctttctttatggtttgagctgagttcctgtgaggccttggatgggcagagactctcactccaggaccctcatgctgatctttccctgacatggtctccatttcctgcacccaagggagcctctcgcctttggaaacacggtacccagccacagat

SEQ ID NO: 131664 - DNA, 423 bp, Homo sapiens
atttccttatctaaaatagtggtttgtttaaatgatgaagcaaagatggcattggagctgttggctgactgtccctttttttctgctaactgcagaagcacggaatctgatgccctactttgtggggtaatggtgtgcttatctccccctcctcaaacagagtttggcacgttgctaataacagccagcctactgctaaaatatcaatgacagaacagaagaaatagatatttaggaaaacataaatcaaagctgaggaagtaggcaaaaaaaaagcactgatagaaagcaaataaagaaagatctataatattgggacaggcagcatctccctgctcacatggtaattttctttagccagtaaccaacgaggatgcctgccatgggaagaaggtgtgattttgtgatttaatgatccaaagc

SEQ ID NO: 131665 - DNA, 653 bp, Homo sapiens
cattttgtagatgtaggttgggaaaacctgggttccaaatttcctgttgaaaggcaaaataaggctgtgagatggtgtgtaatgagtcaagactcagagggccaaacctggaagtcttttttatattacgtaggcttatattctgccaatcagaattcattcctttggtctacaatctgtgagaaagatttagaagttcaacttttgttcccaagaaaatagccagtgttttgaacatctcatattatctttaatagagccttttggtcaccagaccattttattctatgttcacacattgaaaactctcacccttccctgacagagataatataaagtcacacctggtcactgattgtcgctcagagtccaagttctgtacgtaccatcagatccagatgtgaccctctgtagttaggagacctataaatttaaaaggtagattatctgcctctctctagcacgaggactgaatatgcaatgatggagaaggcatagaatacacataatgaatgcccccattcattatattgtataattctggacagcaatttaaatctcaataggaaggaattttaataaagttcccaagcacatgctgggagtgcagtaagcaccttcgctggatgaattctgcccactagacagaaccc

SEQ ID NO: 131666 - DNA, 383 bp, Homo sapiens
gtgaagagaaagcctgattcagaagatggaaaaatcgttctgaaaaaaaagagatatacccatgtgcaatatttaaaacagggagttaggtagggtggaacacacctgtagtcccagctactaaggagggtgagatgggaggattcattgagctcaggagtttgagaccagcctgggcaatatagtgagaccccatctctaaaaacaaatagtaatacaataaaattgtgatatacttattttttaattaaaaaaaattcaaggcaggcatggtggcatgcatccgtagtcccagctatgtgggaggctgaggcaagaggattacttgaggccaagagtttaaggctgcagtgagctgtgatcataccactgcatcccagcct

SEQ ID NO: 131667 - DNA, 669 bp, Homo sapiens
atatggtttctttttaaaaaatttaaggctgggtgcagtggctcacgtctataatcccagcactttgggagaccaatgtgggaagattgcttgagcccaggagtttgggaccagctgggaaacatggtgaaaccctgtctctaaaaaaagttaaaaaattagctgggcgtggtggcacacctacagtcccagctacttgggaggctgaggtgggaggactgcttgagcccaggaggtttcggctacagtgagccaagatcacaccactgcactccagcctgggagacagggcaagactctgaataaaaaaaaataataataaaaagtttttaagtgaaattcacataagatgaaactaatcattttaaagtgtatcattaacagacaacctataggatgggagaaaatacttgcaaactatgcatctgacaaaggtctaatatccagcatctataaggaacttaaacaaatgtgtaagaaaaaaacaatcccatcaagtgggcaaaggacatgaacagacacttttcaaaagaagacatacatgtggccaacaagcatatgaaaaaaagctcagtatcactgatcaatagagaaatccaagtcaaaaccacaatgagataccatctcacactagtcaggatagctattattaaaaagtcaaaaaataac

SEQ ID NO: 131668 - DNA, 462 bp, Homo sapiens
tgcccactgcaactgcagaccatggatgccacaaatcatttatatggacctcccaacactggtaggactgtatttgtgttgggggaggaggtggcactcaaatcctgaacaaccattcaccagaatccatctgattgtccaggtccctgaatcctagagtggtgccgatgtcttacaatttatgaatgaatgtattagacaagaggtaatctttaagttccttttaaggcctaatccattaagctatatttagaccatcagactaatcatctggtttttatgacattattttgttaccaactttagatccaggtttgttctgcttgcatgcagtaaaccaatcactgtgatacgggttttgcaaaagagaaaagatttattcacaaggctgccaagcaagaaagcaggagaacagtgctcaaatccaccttcccaaagataagccttagctatatttacggg

SEQ ID NO: 131669 - DNA, 296 bp, Homo sapiens
ccgtgagggttaaacgacagagctctaggaatatacctcactctagctgttgttgctggtcctgggagcgtaagtcgggcggggaagggaaatggggcatcaccaaggggtcctctagcagtgccttaggatcgggagaggctgctgtggctgggacccagtctcagacatccagagccttcagaacttaggggccccaaggaagtcactgaagcttcgtttgtgggggatgttgctgtttccagaacactctcccacctcctggattccgtcgggtgaggttttaaagtcatact

SEQ ID NO: 131670 - DNA, 493 bp, Homo sapiens
cagagtcaaacagtgcctgcacagtacccaataaaggcttgttgaaagaatgaaacaatctgtaaactaaaatcaaatttaaattttttttttttggagaaggagtcttactctgtcgcccaggctggagtgcagtggcacgatctcggctcactgcaacgtctgcctccctggttcaagcgattctgtaacctcagcctcccgagtagctgggattacaggcgcccaccaccccacccagctaaatttttttttttttaagtagagagggggtttcatcatgttggccatggttggtctcaaactcctgacctcaggtgatccgcccatcttggcctctcgaagtgctgggattacaggcatgagctaccgcgcctggcctcctgtaaaatagtatgatgaaatttgcttttaattttaaatgaacacacagctccaagtcaatgttaggttctgggccaatatttggtttatgttacacctttcctattaa

SEQ ID NO: 131671 - DNA, 441 bp, Homo sapiens
ctggagaagcatctctaggctgtgtctcataatatttgatgtccattcctcatctgtcgctggctttgcgaatccaactatagtgaatacttcattgtgccgcttttcaaggaatgggacttctgtcttgcatccctgagcgtaagctcttgccttggtaacctgccagggaccctagcccctctgggctggaagcttgccttgcagttactagtccctccccttcaggataaagggccatacctatgcaagcatggtaaacaatatgcaaacactcaagtctctatcccctgttaacttggtccctggagagcacataactaggggaagtccttgttctgggagagactccatttggaagcagctcacatgataaagctccagaaattttaatggaccacaatcttaaaagtgagctaacgcagggcgtggtggctcacg

SEQ ID NO: 131672 - DNA, 598 bp, Homo sapiens
cagagtgagaccctgtctcaaaaaaacgttaagctcttactgggggagaagacaaaaaacagagggtactatttaattagctaccagattaatgccaaagaggcaagaataatttcacagaggagtaggctttttcgtgacgggattggtgaaaccctctgatactgctactgctggttggtggtacacaccttgagcaagggttttgattttggggctttgagtggtaatcagtatccgtaatactctgcttcctcagcaggttcctttgatcccctcctgtgggcttcgtcttacccttacacagtttcctaaactttggcgcacattggaattgcctggggagatttaaaaattcttcatgtccaggtcacatcccacaccaattatataacaatgtccaggattaagaaccaggcatcagtattcttaaaagatctccagccgggcgcggtggctcacgcctgtaatcccagcactttgggaggccgaggcgggtggatcatgaggtcaggagatcgagaccatcctggctaacaaggtgaaaccccgtctctactaaaaatacaaaaaattagccgggcgcggtggcaggcgc

SEQ ID NO: 131673 - DNA, 515 bp, Homo sapiens
tcagaggatctccgtccagtaaggtgtgcccagttgcaatggatttggctaggggaggcataggttaaactggaatttctcttggccagcgacaacggagctctccctcaggtactgggcagcatgtgagtcttggcaaagagaggtgatttcttttttcttaagtgcattttactcagccgttgccagtccgttaataagtcaccagaggaaggcaggacctgggaactacatcagcaaaccgcagcaagcaccataaagacaaaagttcttatagaacaaaaagaaaaacttgaacttgacgtgaaagatggaggaagcagttctacctctcttctatcacttttttcagcgccctgtaaaactgtttttttctatccttccttccctctcaaggccctaccttctcagcataattgatcgcagcaagctctttccaacttgacactgaagagcagcgacccctttggcttaccctccccatttcttttcctggttcgcttcagtgccctgga

SEQ ID NO: 131674 - DNA, 819 bp, Homo sapiens
cattcttttacaagtcacaagttacactttatatattggacccaaagactttgtttgaattaagtcaaccttctaataaggcagaccattatcaccttaatccaatttacaaaatattatgaggctgggtgggcgaggtggctcacacctgtaatcccagcacttttgggaggccagggtgggcagatcacttgaggacaggagttggataccagcctggccaacatagcaaaaccctgtctctactaaaaaatacaaaaacttatcagggcatggtggtacacgcctgtagtcccagctacttggaggcacgagagtcacttgaacctgagaggcagaggttgcaatgagctgagattgagccactgcaatccatcctgggcgacagagtgagactctgtctcaaaaataaaatcaaataaaataatttttaaaaataaaacaataacaaaacataatgctaaggcatcagaatagttgttttgccaaagtcacacaatcatgataaagactaaaactaaaaatcctaaataacaactgccactttctccctagggattgagtttctctacaatttttatatagggtacaaatctaccttcaacctcatttacttttaataggaggcacccttacaaattactccaaattgctatcacctggtttcttggaagctataaaaatgtaatttcttttgaaaatggctttaggtgtatatcctgaactacctttttccctacaattatgcagtttcttttcttatttctgtatgttctaattttcttgttcaaacaacattaatagagcacaaaatatgtg

SEQ ID NO: 131675 - DNA, 300 bp, Homo sapiens
gtagagagcctcttgctgcttgctggtagagagaaacagtttttaaatcattttgtggccagtttgctttttgtcctatctaagctttactgatacctttagtcagaactgttactcatcttgaagcccagggctaatggaaagaatttttttttttttttttttttttttttaacaattgtactgtacgtggtaaggacaaagaaaagcttatgtcagctagtaaacactgttggctttttaattttttatttctttaaatacttatcctacaatagtactccaaacctcaccatcaca

SEQ ID NO: 131676 - DNA, 268 bp, Homo sapiens
taataatattcctgatctttaaaaaatatatcaaggtatagagctcttagaatcagtgtagaaaagcctgttagactggattttcaaataatagagttctcttcccttttagacaaagctatattaatccatcctttcattcattatcatgcattcacacaatgattcaacaagtacttactcagtacaatgtgccaggccctgttctagatattaagcatataacagagaacaaaacaaaggtctttcccttgtagagcttactttc

SEQ ID NO: 131677 - DNA, 442 bp, Homo sapiens
cttgcctctgttgcggcatagatgtcttgcttgccagggcaccgtgcccagtgctaggtcagatatgaatgcttacaggacgaggccctcttcttgaggacttccctctccttccctcccctctactctgctgcctctccgagtagctgtcaggtcactggtaggtaccagttgtgttgggttacatggtggatacacgatggagtgctgtggctaacagggtggccaaaggcaagacgtttcccctttctgacctttcctttggcagcctctgggtggtggtgggcaggaggtgtgagggagacattgagtttgaggtatggaatgaccgtgcgtggctctcggagccagcccgatctgcgcctgcctacgctgccacacccacaggctgtctacatgttactggaaacccaagcatgagtttcttctgcaaaatggaaga

SEQ ID NO: 131678 - DNA, 791 bp, Homo sapiens
gtatttaaaacggacttttatttttaaagtatttgttgtttatctgaaattcacgttcacctgggcatccagtattttatctggctctccctgcagcctctctgtggagcagctcggctgccccctggcggccatatggcctcatgacgcccaccggacagccctgggtggagggggcagcgcaccaggcaggcttctcagggggcttctcctctcagtagacacctggggaagcagaggccaaggaggagcagtagcctggcaggagcctggggatccaggcctgggggagatcggtgggggccaggcccctcgccctaaactcgtggatcccaaagtgaggtccacagaccagcggcatcagcatccgcggagcctgttagaaatacagattctcaggctcctccccgacctcctgaggctgaggcttcggggtggggcccggccccaagcgctgctgatgcccatccagacgtcagaactgctcacaactctgccagcacaggtgcctttattatcccatttcacagatgagaagccaagggtcagaggagtgaaggagctgcgcccgtggccaccctgcgaccctcaggtcagagctcctggcggctgggaagaaaaacaaatctggggcctcagcctcctgcacctgcccggagggacaccagcattcatgtcagaatgccacagacccccccgccctgagaactgggaaccaccttgtgcggcttccctcactcctcaggaaactgaggccagagaaggaaatggcttgcttgacgctgcagagt

SEQ ID NO: 131679 - DNA, 431 bp, Homo sapiens
cacattatcctctcaagtagctgctactatggggactacaggcatggcaggtgccaccacgcccagctaaatttttttgtattttttttgtagagctggggtttcaccatgtcacccaggctgatctcaaactcctgggttcaagcaatatgctcacctcggccttccaaagtgctaggattgcagacccgttgtcagtttttttagtcttagcctatctgataggtgaaaatttctatcttatttgaagatttgtttctttaattattaagatttagtatattttaatgtttgtatttttaaaatgtttatatgccatttgcttttattgttttgtttagtaattttcatttattgcttattctatcctccactggtttttctgttggtacctatattgaatatgtgaactctttatatattaatggtat

SEQ ID NO: 131680 - DNA, 343 bp, Homo sapiens
ccacagccaccttttctaaaacccttccaaatgcctggcttttgctaggaactctacaagcgttccttcaggtaatcctcctaacaacttttgctattacccgtagtccttctctccattatatggtgaggaaactgagactttgcttcatatgactccattttccccaacacttcctgctagcctgttttgctcctttgggagtatgagagtcagtgtttgctggactgtgaggctgaagatgataacatttcttcaaattggcctgtttttttttttttttttttttttttgaggaaaaaaaagatattcaggggccaaattttccccaaaaggggggaca

SEQ ID NO: 131681 - DNA, 426 bp, Homo sapiens
ttgaaaatctctacccaaagtagcaggtgcttaagatacttttttcaaaaccttaatctgaagattcacaatagagccctcttaccttttagagaatgatgcattttgaaaactagatctccacttctaatgcattttgttaccttggtgggctcctggggattcaaattttgttaccatattaacttctcttttacagtaaaatcactgtttaaagtatgggagtggaattctatgttgaggaacactcccaaaatgtagaactagtcatggagaaggctctgaagagttttcagatagatcttgcaatttgaatctcaacttgaataagaaagatactggtatccaatttcggaatgtttcccaagacttttttttcttttaaaggatactctcttgaaagataaaaagaaaatttcatttcat

SEQ ID NO: 131682 - DNA, 454 bp, Homo sapiens
cagtgtctttgggtggggattcagtacagcccgggctgggacctctgtgtggggactcacgggccgccagcagaatgctgttcgtgtggccgcaggacagaggctccgtgtccttgctggctgatgctgtggccgctgccacacctcaaggcaccaagtcccagccccgtggcccctccaacctggcagccgacctcagggtggcagaagaatcttctggtatggagaacctctttttaaagatgtcatttgactccatcaggcctgcccaggtaatctgcctgttgttaaaagtcaaatattacaataacaactgccaagcctcatcacaggtgatggccccaggtgtgtgtgaacatgagcacatgctggaggggaggccatgacactggcgaggctaggacactggcgaggctaggacactggcgaggctaggacactggcgaggctagga

SEQ ID NO: 131683 - DNA, 239 bp, Homo sapiens
tccagactttcttttctgtacacacacacacatacacactcactctctctctttctcactctctctcttaaacacacgctctctctcactactccctctctctctctacccccctccatccccctctattttctaaacaaaacaatctccactgcgttggctccataagtaccactatctctgtttgttagtttgtttgtttgtctgtaagtacgatagtatatgagacagcataatca

SEQ ID NO: 131684 - DNA, 443 bp, Homo sapiens
cacggttgcctttcacatggacttcctactcttctttcctcttcctcttgcccctaccctgctgtcctcccaatttagtccctctttatccctaaggaagtcaagagttggtcttcaccaacacttagcctcctgcaactgcctcctaaggctcatgggacactaaagcaagcatagttaagtactctaattataaacagcttgagcttgacttacccagataatgaagccattttgtatgattttccctgattgatttctctaaaagatttcctgttctccatcacactttgttatataaatgaagaaccatcatagaatgtaaatacaaaatctggagagccacagcaggaggtagagctaggagaaggaggaggcaatggtgggtcttgagacaagatagttacgaacatgagaatcaaacctggtaatcatgatgcctg

SEQ ID NO: 131685 - DNA, 301 bp, Homo sapiens
atagctcactgcaacctggaaccctggcctcaagcaatcctcctgccttgacctctcaaaatgctaggcttacagccatgagccactatgcctggactgtctttttactcagagtaagcagggacagggaagaccagagggagagccctaggacaggcaatgttggcgtcttcccctaccctagctgccctgagcctcttgctgtgcaggtccctccttagggagaggcctgatcccattttgtcattagtcacaaacaccacttactggccatttgcgctgggccctgcactgttccctc

SEQ ID NO: 131686 - DNA, 494 bp, Homo sapiens
attatgtcttttttgtttaacaagttacttatttacttctcaaggctagctaggggcctggaatttcccttgaaggaactcagaaatttcctttgtttccatgcttggggtctcgtaaaaaaggggatccctgctctgtctcagggtcttactgaccctcactccagcccattctcaaacaccctaccctctttaaaaatttctctggggttaggccgggcgcagtggctcacgcctgtaatcccagcactttgggaggccgagacgggcggatcacgaggtcaggagatggagaccatcttggctaacatggtgaaaccccgtttctactaaaaatacaaaaaattagccgggtgttgtggcgggcgcctgtagtcccagttactcgggaggctgaggcaggagaatggcgtgaacccgggaggcggagcctgcagtgagccgagatcatgccactgcactccagcccaggcaacagagcgagactccgtctc

SEQ ID NO: 131687 - DNA, 370 bp, Homo sapiens
gatctggtctcttgtctcctgatctaatgctctttgccctgtacaaggatgaccctgaaatcatctcatctaaaagcaatgcaagcagacttaccctggcaattgagggttagtcttttctttgtacacagatagtttttggttaagggaagagatatttgtctgtgtttcttaccccatttgagtttattctcagctgagctgccaaaatgatccttgtaaaagctcagccagagagtgatacccctatactcagatccctgcattgttccccatttcactcagagaaaaagccagagtaggtacaggtccagaggcccagcatggtttggatgttcatttcccagctgccctcctctccttctttctg

SEQ ID NO: 131688 - DNA, 548 bp, Homo sapiens
ccccctctccctgccgctgtccgcacacgggaagaggaccccactgatgtgtgtagtgtggcaggctcaggggctgcctggcgggcccctttactctagcctgctttccctctttgtaaagtgggaccagtcgtgctagccccacacagggctgagggaggagacggccgggtagggagatgctttgcgcacagcccttttcctggtcactgggccttctctgcttcccccagacatccttggggatcgctccaccctgtcctctgttccgaggtcaccatccaccaggccttctctgactcccctgtttgaaattgcacccataaccctcgagcaccctgcccttctgactttttctccccagcactccttacctccccacccactacgttgtgtcccatttgggtttcctctctgcttccctgctatttccccagaacccaaaacagctcctggtgcctggtaggtgctaagtgagtgagtggcgagtgacggggaggcatccgcgcaggggtcggcctctgcgttcacaagggccttcctgcgtg

SEQ ID NO: 131689 - DNA, 437 bp, Homo sapiens
catgtcatggccacgttactatggctggtcttctctgcttggctaccttaaagcaaaggtgtatttttggttctgcggtactgccggagagaccaactgtcatgggaattctggaggaaacttagaaatgaatctataaggccccatcttataacatgacatgattaattggaagttttctggatcgtctgcatgttaagagggagcataggatagcagatttgctgggttcatatctacttcttagttgtttgaccttggctggtctcatccctttgtcccagagctgtcatctgtaaactggggatgataatagaagcagaagggcttgtttccaaggcaggttgttaagaactttttataacttacaaggtcggccatgaaccctttttgctcttaagagtccaataaaaatgagaattttctaccccagagat

SEQ ID NO: 131690 - DNA, 375 bp, Homo sapiens
gcctgctgtgtattttcagcctcttcattactttcctcgggaggcccggctacagccagcttatgctatctttactgtaaaataggtgcctgtttattttcccatcatacacacgcaaagataacaatgatatattgccggttccttaatctcttctcttttcctttatagaaccttaggggatacaaaattatgcatacaaaggatcataaaataccaagtgcaatgtaaacacagttgccacttacttcatctgttatcatagatcaaagactgcttctacagtaagagaagcgcatttccaattcaggtgggactcaccttaaaatatgcgagtggagggagtccccttattagaaacatttggttcacaag

SEQ ID NO: 131691 - DNA, 251 bp, Homo sapiens
caagtgcaaaactccttctcagataaataaataaataaaacatctcttttgatgtcattctctgtagttgagctggtaaggcagaggatttggatcagatctctttaattggcctttatttatttatttattttttgagacagagttttgctcttgttgcccaggctggagtgtagtggtgcgatctcggctcactgcaacttacgcctcctgagttcaagtgattctcctgcctcagactccctagtagc

SEQ ID NO: 131692 - DNA, 389 bp, Homo sapiens
ccgggttcaagtgattctcctgcctcagcctcctgagtagctgggattacaggcatgcaccaccacagccggctaattttgtatttttagtagagatggagtttatccatgttggtcaggctggtctcgaacctccgaccacaggtgatccgcctgcctcagcctcccgcagtgctgggattacaggcacaagccgccgcgcccggccatgtatgctgttcttaagtgtgaagctggaagagttagttgttctccaaatcaatgcttccttactttttttcaaggcattagtagaaactgatgttttcctggtacataaggaagaggaggctcacaactggagggtatcagagatctttcattgctctaggcctaccaggctggtccaa

SEQ ID NO: 131693 - DNA, 250 bp, Homo sapiens
gaggagagatcatgagctgcaagtcaggagggaagaggaggtcctggaggtttgagcagagagaagaaaatgtgaaccagttctgacagtgggggattactgcctagagaaatgttacagatcaccaggaatcccagggacctactagaacacaacgtggacagctgattccagccacgttctccggctcaaccagaatcagaggtgcttgttcccaacaaaacaacactgggttctgcccagagtgtga

SEQ ID NO: 131694 - DNA, 706 bp, Homo sapiens
gaatcctgaggctcctgattccaggcctttgctcctaagctacatttccagacctaccctgcgccagaagggaatccactgctctgatgggtcagatttatcctggcaggattccccacctgctgactaaagtgcccttgggctttgagtaaatatcagtggtagctaagcagttctggccacaggccttgggcaggatccaatactgtactggtctgcaaagcttcaggtgtgacccagtgcactgccatctgtggtggccatgggagtgctcatgtcacccttccccccaactccagacagcccagtggggagagagattcctgactgggggaaagagaagagacaaagtgagagatgttgcctgggtaaccggggaattttcccttatcttacccaaggccaccaaagatacaggagtatccaggagttggcaacagttgcaggggtcataggcttagggcaccccctggtatacatcagctgcagagaccgtaggcttaagtcacagcacttaatcccctttgaatatatagaaagccttctcaaggaggatgggtacaaataagtccagactgtaaagacttggaataaatacctaactcttcaatgtccagacattgatgaccatccacaagcatcaagaacatccaggaaaacattatttcaccaaatggactaaataaggcaccagtgaccaatccag

SEQ ID NO: 131695 - DNA, 270 bp, Homo sapiens
ctcagggaaatctattttgctaatattacgggggcagatgtcaaacaatagtgacctaaaatgtcaatacgagagtaaagaatgaaacaagtgaggtaccacaaataagacttagcagatgtttggctgaagtgagcagttaagagtatacggtcaagaaagggttttctggtggtaggatttattatgtttaaagatcagtggaaataatccagatgaaagagagtttgaatatacaaaggaagggataattgataatataaggtgaac

SEQ ID NO: 131696 - DNA, 511 bp, Homo sapiens
cagctttgctccactcctgagttctcttccccctctgcagcctttcctccctgctggctggctggctggctggctcttgatgctgtctctctcttcctcccacgcattctcctctccctctccctgatccccagcccaggccgctggggcctgatcagtcctttccctcatcagtcctctccctccatcagccagctcccctttcccatgttccctcttgcctattcatcttcaccttccctcttttcctcctcccctctctcatcctcttgggttcgcacctctgccatatcttctttctatccccctctgccccctccatcatcccccaccacctgtttccctttctcctctctgctcacagcgtcctcctctctccagtcccgggaggcctggtttctgggaccttccattctccagtccactttccatcttccccttcctccatctcctcttctggggacacaggatggggaggactggagagcaccaggcaagctgtgagattgag

SEQ ID NO: 131697 - DNA, 502 bp, Homo sapiens
ccatcagccctcatacagatttaaaacacacacacacacacacacaaaagataaggttatgggctgcactgcgtcccccaaattcacagagtgaagtcccgacttcaggatccgcctgtattcagacacagggtctttacagaggcgacaaaggtgaaacaaggttaccagggtgggctctgacctgacctaccggcgtccttaaaagaggaggacacagacacgcaggaggggcggccacgcaaggacacagggaggtggtgccgcctgcctgcaaggagaggcctcgtaacagccacgccgcacctcaacccgggacgcccccaggactggagagaacccacatctgctgtgggagcacctggccacggtgtgtgcgaggcggccccggcaaactcacgtagacaggacccagctcccccaggccatctttcaatgggagagggtgacccagtgttttcccaaaacccagcacggtccccaggacgcgttccccaccagg

SEQ ID NO: 131698 - DNA, 273 bp, Homo sapiens
tagcaaaatcacttttgaacctgatttctagagacaaaaagtgtgattaagattcagagggaagaccaaccatagacacaagataagttcatcataagataataaaactgcaattctctggtaacttgcaaaacctagatgaaatgaatgatatcctaataaaatataaattattaaaacttgattaatagttacaaaatttgaatgtcattaccgtaatagaaattagaaggtaactgaccctgaccaaatggatttgcagttatctaattc

SEQ ID NO: 131699 - DNA, 455 bp, Homo sapiens
aagtggatctcaaggaagtaaaaagtagaatgagagttatcagaggctaagaaaggggtgggagtcaggtgccgtggttcatgcctataatcccagcactttgggaggccgaggtgggcggatcacgaggtcaagagatcgagacaatcctggccaacatggtgaaaccccatctctactaaaaatacaaaaattagctgggcatggtagcacatatggtagctactcgggaggttgaggcaggagaatcacttgaacccaggaggcggaggttgcagtgagccaagatcacaccactgcactccagcctggtgacagagcgagactctgtctcaaaaaaggaatagataagagtttaaattgggagatgagacagagatttcctggtaacctatttaaaataacatagtcaatgaaagcctctcctaaagaggtaacatttaaactgagcccag

SEQ ID NO: 131700 - DNA, 131 bp, Homo sapiens
aacattctgacccattcagagataatttattatttaaaatgaaatggaaactttttactggttttgatttctgtttaaaatatagggtactgaagagccgggcttagtggcttaggcctgtaatcccagca

SEQ ID NO: 131701 - DNA, 659 bp, Homo sapiens
aaggatcccgcgaccaggcgcacttctgactcccaggtcacgcttcatctcgatgatgtagcccctagttacaatacattgtgattgtcgttgattaccagtctcagacctggtcagttgggctggtgttcactcaacacccaagtcattggccatcggtgctcggtaaccccatgcccttcgtaatcgtggatcatacccttgtgccctgtttgacacaggcgcacttctcaccgcagtttctaatttttctaacgatggaacaggctgttctttttatgtaaaggggaatcctacttatctgaccacagctttctcctggtgaagatggatgtgctagaaagctatcgacattctctgattggtgcctccctgaactcacggacaaaaatcagggtaatgatgaggtagaaagtgtcctggggtcatggagcaggttaaaactaaatggcctgcagaaatactaagcccctaatgctgacctaattgccccaggattccagccaaatgaacaaactgcccacctgccttaacagacacaaaatacacccaaatctaactaaaatacacttggagtaagtagggtccatgtaactatagttatgtttaatggttcctcttacatttccttattactcattaaattcttgttacttttc

SEQ ID NO: 131702 - DNA, 490 bp, Homo sapiens
atttcgacggggaagtgacttagaattgctgactcttctcctccagcaagaagctcctattcctttatttatttatttatttatttttttgagactgagtctcactctgtcgcccagcctggagtgcaatggcgcgatcttgactgacagcacctctgccttccgggttcaagtgattctcccatctcagcctcccaagtagctgggatcacaggcacccaccatcatgcccggctaatttttgtatttttgtagagatggggttttaccacattggccagggtggtcttgaactcctgacctcaggcgatccgcccgcctcggcctcacaaagtgctgggattacaggtgtgagccactgcgcctggcctcctgttcctttaaagaagagctgaggggaaagaggtaacatttaggaagcctgtattagtccgttttcatgctactaataaagacatacccgagactgggtaatttataaaaaaagaaa

SEQ ID NO: 131703 - DNA, 417 bp, Homo sapiens
atttcgacggggaagtgacttagaattgctgactcttctcctccagcaagaagctcctattcctttatttatttatttatttatttttttgagactgagtctcactctgtcgcccagcctggagtgcaatggcgcgatcttgactgacagcacctctgccttccgggttcaagtgattctcccatctcagcctcccaagtagctgggatcacaggcacccaccatcatgcccggctaatttttgtatttttgtagagatggggttttaccacattggccaggagttcgagaccagcccgaccaacatggagaaaccccgtctctactgaaaatacaaaattagccgggtgtggtagcgcatgcctgtaatcccagctacttgggaggctgaggcaggagaattgcttgaacctggga

SEQ ID NO: 131704 - DNA, 213 bp, Homo sapiens
aaggagttccccacagagcggacacagggacatctgacctgataaaacaacatccttgccacaagctgagaaacatacaagaatgttagagaacttaaaaaaaaattgtccgtataggctgctaattatcagtataggccatgtataaatacagccacagttgcagcaccgttttgctaatttgtccatttttaaattacatttaaacgaaag

SEQ ID NO: 131705 - DNA, 397 bp, Homo sapiens
ctcctgcctcagcctgctgagtagctgggattacaggcctgtgccaccatgcctaactgatttttgtatttttagtagagatggggcttcaccatgttggccaggctggtcttgaactcctgacctcaagtgatccgcccattttggcctcccaaagtgctgggattacaggcatgagccacagtgccctgcccagtactacactgttttaatcgctgtaatctttttttttttttttttctggagacagggtctcactctgtctcagagtctagcgagtatagagtgtatggcctgcctgctgggccaccgcagccttctggtcttctggcctttgcctggactgactgccctgactgccagctgtgtctctgggaggaagggagcaacatagatg

SEQ ID NO: 131706 - DNA, 2843 bp, Homo sapiens
acgcatttcaacacccaagcaaaaccgagcagtgacgccagccctgccagggaattgcaagaaataaagaccagatcaccaacatcttttccgggtttgcgggactcctcgccatcctcctggtcgttgcggttttctgcatcttgtggaattggaataaacggaagaagcgacaagttccttacctccgagttaccgtcatgcccttgctgactttgccacaaaccagacaaagagccaaaaatatttatgacatcttgccttggcgacaggaagacctggggagacatgagtcgaggagtatgcgcattttcagtactgagagcctcctctccagaaattctgagagcccggagcatgtgccctcccaagcaggcaatgccttccaggagcatacagcccacatccatgccacagagtacgcggcgggtatctatgacaacgccatggtcccccagatgtgtgggaacctcactccctcggcacactgcatcaatgtcagagcttccagagactgcgcaagcgtttcttcagaggattcgcatgattatgtcaatgtccccacagcagaagagattgctgagactctagcttctaccaaaagcccttccagaaatctctttgttcttcccagtacccagaagctggagtttactgaggaaagagatgagggctgtggagatgctggtgactgcaccagtttgtattctccaggagctgaggacagtgattcactcagcaatggagaaggttcttctcagatctcaaatgactatgtcaacatgacagggttggatctcagtgccatccaggaaaggcagctctgggtggcttttcagtgctgcagagactatgaaaatgttccagcagcagatcccagtggaagccagcagcaggctgagaaagatgtgccatcctcaaacataggtcatgtcgaggacaagacagatgatcccgggacccatgtccaatgtgtcaaaaggacattccttgcttcaggggattatgcagactttcagccattcacacagagtgaggacagtcagatgaaacatagagaagagatgtcaaatgaggactccagtgactatgaaaatgtgctaactgccaagttaggaggcagggactctgagcaggggcctggcactcagctccttcctgatgaatgaagacccaggtacccagccataaagccacattgagtagtctatcccataggattgactactgcagagtctagtgcagacccgtgatcaccttagtgcttcagtggattcactggttagattaaaaagaggctgagatgagcagtgaactaagaggccacacaaaagcagaggtttgggaattccagaagggaattcttctcaagcagagtgtggttatctcctgtaccagcctaagaatgtttgctgaaactgcttcctagaactgtgaagagagcaggaaagtagtgcacagtagtctaagattattaccttcattaataccaacaggctgcaaagcaagagtatagattattgtataatccagtcagaggtcaaaaggaaggaagaagttggagtggagtggggtgggcaatttccattttaaagagtgtaggcaggccaggtgcagtggctcatgcctgtaatcccagcattttggtaggccgaggagggcagatcacttggtgccaggagttctagaccagcctggccaacatgacccatctttactaaaaatacaaaaattagccaggcgtggtggtgtgcccctgtaatcccagctactcaggaggctgaagcaggagaatcgcttgaacccgggaggtggaggttgcagcaagccgagattgtgccactgtactccagcctggtgacagagcgagactccctctcaaaaaaacaaaacaaacaaaaaagaagtgtgggcaaccaaatgtaggtaaggatgaagaagaacaggaactctcactggtggctgatgggattgcaaagcgtcagggcagctttgaaaaacttttcagcagtttcttataagcataacttatcatatggcccagccatttcactactagaaattgacccaagtgaactgaaaacttatgttcacacaaaaactcgcacatgactgtttatagcagcttcattcataattaccaaaaactagaaataacccagatatccttcaacaggtgattggataagctgttgatatccattccttgagtttatccatactcaacagtaaaaaatgaactcttggttcacacaataatatagacatatcttaaatccattttgctaagtgaaagaagctaggcctaaaagtctacatgttggggcgattctatttatatgacattctggaaaaggcaaaactatagggatgaagaacagatcagttgttgtcaggtttgagaaaaggagggaagtttgctacaaaggggctgcaaagggaataggctgatggagctgttctgtatggtactgtgtggtggatacatgacaatatccatttgcaaacacaagaactatacacatggccaggcgcggtggctcacacccgtaatcccagcactttgcggggccgaggcaggggaacacaaggtcaggagatcaagactgtcctggacaacatggtgaaaccctgtctctactgtctctaacatttgtaaacctgtctctaatttgtaattttgtaaaccctgtctctcatattttgtaaaaataccaaaattagcttggcatggtggtgtgcgcctgtagtcccagctactaggaggctgaggcaggagaatcacttgaaccaggaaggcggactgcattccagcctgggcaacagagaaagactctgtctca

SEQ ID NO: 131707 - DNA, 3263 bp, Homo sapiens
gctcttttcactctgctttgggtgttgaaggaagacgagcttctcacggagcctctcttgagcctcttggcagtttccccctctgtgcccctcacgtttccaccagaaacgtgaaggcagaggccacagattctccctgagccacctcacttggaagcaccatgtccggatgagatcgcacttcctgcagtgggcattagccacgtccaggtagaaccaaacctgttgcttttgtatgttgggtcaacttggcctgacgtttcagaggtagacacgagatagggagtttgttgcgggggtggggagaagtggtagacatgctggctaactgattatgattaagagaaacttagaagctgaagccagagagcatctcaaaggttcctgatacaatggatggtgtcactccaaccctttcgacaatcagagggaggaccttggagtccagcactctgcatgtgactccccgcagcctggacagaaataaagaccagatcaccaacatcttttccgggtttgcgggactcctcgccatcctcctggtcgttgcggttttctgcatcttgtggaattggaataaacggaagaagcgacaagttccttacctccgagttaccgtcatgcccttgctgactttgccacaaaccagacaaagagccaaaaatatttatgacatcttgccttggcgacaggaagacctggggagacatgagtcgaggagtatgcgcattttcagtactgagagcctcctctccagaaattctgagagcccggagcatgtgccctcccaagcaggcaatgccttccaggagcatacagcccacatccatgccacagagtacgcggcgggtatctatgacaacgccatggtcccccagatgtgtgggaacctcactccctcggcacactgcatcaatgtcagagcttccagagactgcgcaagcgtttcttcagaggattcgcatgattatgtcaatgtccccacagcagaagagattgctgagactctagcttctaccaaaagcccttccagaaatctctttgttcttcccagtacccagaagctggagtttactgaggaaagagatgagggctgtggagatgctggtgactgcaccagtttgtattctccaggagctgaggacagtgattcactcagcaatggagaaggttcttctcagatctcaaatgactatgtcaacatgacagggttggatctcagtgccatccaggaaaggcagctctgggtggcttttcagtgctgcagagactatgaaaatgttccagcagcagatcccagtggaagccagcagcaggctgagaaagatgtgccatcctcaaacataggtcatgtcgaggacaagacagatgatcccgggacccatgtccaatgtgtcaaaaggacattccttgcttcaggggattatgcagactttcagccattcacacagagtgaggacagtcagatgaaacatagagaagagatgtcaaatgaggactccagtgactatgaaaatgtgctaactgccaagttaggaggcagggactctgagcaggggcctggcactcagctccttcctgatgaatgaagacccaggtacccagccataaagccacattgagtagtctatcccataggattgactactgcagagtctagtgcagacccgtgatcaccttagtgcttcagtggattcactggttagattaaaaagaggctgagatgagcagtgaactaagaggccacacaaaagcagaggtttgggaattccagaagggaattcttctcaagcagagtgtggttatctcctgtaccagcctaagaatgtttgctgaaactgcttcctagaactgtgaagagagcaggaaagtagtgcacagtagtctaagattattaccttcattaataccaacaggctgcaaagcaagagtatagattattgtataatccagtcagaggtcaaaaggaaggaagaagttggagtggagtggggtgggcaatttccattttaaagagtgtaggcaggccaggtgcagtggctcatgcctgtaatcccagcattttggtaggccgaggagggcagatcacttggtgccaggagttctagaccagcctggccaacatgacccatctttactaaaaatacaaaaattagccaggcgtggtggtgtgcccctgtaatcccagctactcaggaggctgaagcaggagaatcgcttgaacccgggaggtggaggttgcagcaagccgagattgtgccactgtactccagcctggtgacagagcgagactccctctcaaaaaaacaaaacaaacaaaaaagaagtgtgggcaaccaaatgtaggtaaggatgaagaagaacaggaactctcactggtggctgatgggattgcaaagcgtcagggcagctttgaaaaacttttcagcagtttcttataagcataacttatcatatggcccagccatttcactactagaaattgacccaagtgaactgaaaacttatgttcacacaaaaactcgcacatgactgtttatagcagcttcattcataattaccaaaaactagaaataacccagatatccttcaacaggtgattggataagctgttgatatccattccttgagtttatccatactcaacagtaaaaaatgaactcttggttcacacaataatatagacatatcttaaatccattttgctaagtgaaagaagctaggcctaaaagtctacatgttggggcgattctatttatatgacattctggaaaaggcaaaactatagggatgaagaacagatcagttgttgtcaggtttgagaaaaggagggaagtttgctacaaaggggctgcaaagggaataggctgatggagctgttctgtatggtactgtgtggtggatacatgacaatatccatttgcaaacacaagaactatacacatggccaggcgcggtggctcacacccgtaatcccagcactttgcggggccgaggcaggggaacacaaggtcaggagatcaagactgtcctggacaacatggtgaaaccctgtctctactgtctctaacatttgtaaacctgtctctaatttgtaattttgtaaaccctgtctctcatattttgtaaaaataccaaaattagcttggcatggtggtgtgcgcctgtagtcccagctactaggaggctgaggcaggagaatcacttgaaccaggaaggcggactgcattccagcctgggcaacagagaaagactctgtctca

SEQ ID NO: 131708 - DNA, 785 bp, Homo sapiens
ggtctttaaaaacttgtcaaaatgccatttttaaaactgctttttggggtgaccatgtcttgctcctgtgccagaagtagaacagataagtggcctttccattcttggagcgccttccttccttttagaattcaggttgcattgtgacctcagttctgatgctccccccacccaccgcacaacagtttaggattttgtagatttttcagcctttcctcttgtatgacaataacgatctcctatggttttctatgtcctaatgagcaactgaaacgatacatatctaaatgcctttattttgtcctcatatttcattgatggtttgactgagggtagaattcgagcctggaagatatttccattcaaaattttaaaggtatctatctattgtcccagaagctagagcttccagtattgctgttgagaaatctgaaaccattctgaatcctgtttatttatacaggaactgtttctctctatggaagtgtgtaggatcagtggctctagcattctgaaatttcacagttttgataggagtctattttcatccttgtgctgggcacttgctggacctcctgtgcaatctggaaatcatgttcttcagttctgggaaattttctagaatattctgtggattatttcgtccctttctgttttctgttctttttttagatattgaacttcctggactttcttgaaagcatcttttctctcctaaggattttctatgattttggattgagtttttttttttaaatgtcccctttgtgtgtgtgtgtgtgtgt

SEQ ID NO: 131709 - DNA, 1186 bp, Homo sapiens
ctgggcatcagctcctaagagtgctgcagtccacaaagcccattgctgaggatgccagatggcagaagctggagcctcagcctgccacttgttgcctctaattaagccagaattcccaccttaccagatagttcctgcttctctagcagagacttaaggtgcagagctggtgacagagatgccactggccagccattttggctgcagcccccagctactgtgcactgctggtgagtgaaacagaagctggattttggctcacacttacccctcacgcagagcaggacccacacagctgtacctgatagccctgattcatgggggaggagggagcacaaaactatgtccttttatgtgcttttggaaatcctggaattggtctgagcctagagctggcactagcgtttccaaggcaaccccccagctaagtgaagggccctattcatttcagatacaccatcctcaggacagacatggaccagatactgtgccacccagggtaacaggtcaaaggactttgacttattggtgttcttcagatattagaaactgccatcatcaggccctctttgccatgaaactgaactcaaagatctgtcacctcaccctgaaagtgtgggggacatgcaattccttgttgaaaggaccatcagcctataagcaacatgctatctatctcccctggccatgacaccttccaagccccttgggatgagctctgtaagagccctgagacttgaagaaaaatgcaatccaggcctaactccgcagcatttcaagcagttctgctattcattttaaaacaatggttcaatttggatagatgaaatttaaaatatatcctctacttcaaatcagttttaaagatgcttgaaaaataacaagaggaataattatattttcctatcagctattttcaaacttttagcaaaaaaaagtaactcttttagcgtgaagagttctaaaggctgatacattcaaattctagagaatcaaaactgatgatttgtcacacaagaaataatacaactttcacattgaaacatgaggcacatcaagcttatgtttctacaagaatgcagctgagcagatgttactttaaacttacttacttacctttaaaaagtacatgtactgatttagctttggagaatgctttcccattgtgtgcttgcctcgcgcctca

SEQ ID NO: 131710 - DNA, 283 bp, Homo sapiens
ggaattcgagattacagtgagctatggattgcaccactgcactccaacctgggcaacagaacactttaaaaaaaagcgagggagggttcctttcacatagcccatgacctaggattctgtgaacatcctcatgaatgtggaaactccctgagttcctcagaggctttggatttcgctttgtaaaggaagccaacctgagcaaaatgtccctgtgattcaaaagccaacaggaggctgatcatcccatcccttcagggtcacatgacatgtcatccaaaagaca

SEQ ID NO: 131711 - DNA, 636 bp, Homo sapiens
actcaccagtagccccaagacccttggccaggtcatactcaacccctaatctaacttcacaaggctgtctaaatgtcagctactcagacacagcctctggcattagcaaaatcccccagaggaaaagcagccccatagaactggacaagtaatacttaactatcttgttgactctggggtccttcaagcaaattttaaaaatatttttaccagatttccaagttgtccttagcttgagggttggtcctccattactgtcattggactatccctcatgggtagtgcagttcaacttctaaaccacctcagtacctgaatgtggtccgaggtgaaaccagattactgatgccttcaggtgcccaattgaagcaaatggcaaattctgtggaggaagtaaacataacccaaggcctcaaattatttctgcagtgttgcaatcagaaatacccaggtatgggagaagaccagacaacattaattacttgaattaaaaccattagaggaaaacacagacaatagaaatatccaaacagactccagataaagttgtcgcagaatttaaaacagctatggttactgtgttcaaaaaaatgagacgcatggtcaagaatttcaacagagagttagaaactgtaa

SEQ ID NO: 131712 - DNA, 169 bp, Homo sapiens
tgcctttttaaagtgaggaaatggagattcattaagtatgtttaaaataagcactgcatgtgtaactattcagtgaagactcctagcaacactgcatgggcttgctgctaattcctagaatggcgtttagcaactcactttagcactttttttttttttttttttgaga

SEQ ID NO: 131713 - DNA, 290 bp, Homo sapiens
gcactagagatgttcattattacagagtgaagttgcttttaggctacttcaatggacacagctagaaaaaaaatgtatacatatttatgacacacagactctagagtggcactcatgatccctgcctcctgctgttcatgctcccgtgtgatcccctcctcttgaaagtgggaggaaccatgacttgcttctgatcagtaatatatgtctaaggtgacaggatgtacatggttacatatacatgagtacattacgttcagaatgattacatgatgattgtaatgcccctc

SEQ ID NO: 131714 - DNA, 376 bp, Homo sapiens
gttcactctgactccagagcacctttgaccctccagcacacgttatgctgttacaactatattactctccattgcacagtgtgttttacagtaagtacatgcccaaaccgtggccagatgttaccaacatcagaaataagagaaccataataaagtaattagaatggcatcagtccagtcaacatttacaaatgaatattagcctcccagggagacagtagactccatggtttatattcctaattaagcctctaaggccatctttcttttttgttttttgaaatggagtttcgctcttgttgccccaggctgatgtccaatggtgcaatctcggctcaccacaacctctgcctcctgggttcaagtgattctcctg

SEQ ID NO: 131715 - DNA, 316 bp, Homo sapiens
  misc_feature (290)..(290): n is a, c, g, or t
  misc_feature (302)..(302): n is a, c, g, or t
ctatgaatcaattaaatctcttttcttcataaattactcagtctcaagtcattctttatatcattgtgaaaactgactactacggttagcaatcttaaagaatacttgtgattttgagaatcaggcacatattttttaataatcggactgcttacaattgtttaactccttgcaacttatagttagtgcctaaaactttgatgactttcattacatttcaatggctctgttcccttatagcaaactaccttttttactgtacttactgtaactacagtaagtacagtaanaaaggtagtttntagggggaacagga

SEQ ID NO: 131716 - DNA, 429 bp, Homo sapiens
ctcatcctatactaggtgctgctaatgatgaaattacttacgactatggagtcctgttgcttacgttttaattacatttacagcacaattagaaaacatttataaaatctcttttcatgaccattaggaaatgaaaatgataactggtttagccatgatgtatttcactgaagaatatattattaagaaagtggtgcaaggggagatgaagtctttccaaaatgatgctaagagattctgtcatgtttacaaatagtcttggtttaatgtttcaaagtaggttttcaattcttgccagtgaaatcagcttatcccaggtgaaatcttcaatcagaaaataattaccaagtaatagggccaatctcagtaaaataaacaaagcaaattataagtcaaccaaatctgttagggcacagtggcattctgcct

SEQ ID NO: 131717 - DNA, 578 bp, Homo sapiens
atactggactggggttgatggcgggtgactgaaattgcagaaatcgaaactatggaaaaaggggggatgattatacttgttccaaaacgaggcccatcacctaaggcttggaaatcactctttccccatttgtttccctttagattctgacatgtaatgaaattcaagtgggaattttatcagttaacccaatgcctcaaactgacactggagtaagtagtcaagcctcttgaagcactcggagcacagaccccaagggtgcagggctgaggatcccacactcacagtatttacatgtctatgttctgacaatcagtcacgtgatgggagggcccttcgttggaaccatggcaaccagttcttgtctgttacgtcgagaaatgcttcctcggctgggcgctgtggctcacacctgtaatcccagcactttgggaggtcaaggtgggcagatcacaaggtcaggagatcaagaccatcctggctaacacggtgaaaccccgtctctactaaaaataccaaaaaaaattagccaggcgtggtggcgggcgcctgtagtcccagctactcgggaggctgag

SEQ ID NO: 131718 - DNA, 587 bp, Homo sapiens
gggttttgatgttagtttaaattaaataataacttagtttttggctttgaatactttacctctgtcagtttccttactctaaaatgaggaaaataatccctccaagacagattattgtaaggatgtatggaatgaagtatatataaatatgagactgaagaatgaatgaacggttgagctgatggatgcagcagtgtagaggagggcctggcccctcgctcgttctcccagccccaactagaagaacatctcagggcccagaccctgccacatgtgccatggtaaatcagggtggccatgcttctgtgttcttcctgcaaccaacatcggtatagccgtggcaagcactgtagagggcaggcagaggtgagtggcctcagggggcttcacagccaggatgggttataactgtgacatagggtaggatgcagcctatgctctgggagaggcatgtggtcagtgcccagtgagtatttgttgagtcactgcaacacaagatacaagagagagaatcagtgggtcatgggagctcgaagggaaaagattatttctagctgctgcttcaaataattcacgtttttgtgtac

SEQ ID NO: 131719 - DNA, 427 bp, Homo sapiens
actgttctctgctctgttaaagtatctctgggaccctaggatcagggcttggggccacactatacaaagaacactaacaaataagcatggccataagacagcaggccataagagagcagctaggattataataaaaggcctggaaaccaaatcacataaggaacaactgaagacaccaggatattaagcctggagaagactacaagaaggcttcagataaatgatatctgaagagtcatccagaggcccaataaacagacatattcagtgtagtttctatgacctagtgagacactacacattactggacactctacaaggcagaaacacggttggagttgtttccctcctatcacacctacacatagtaatccttaccacataagtcaggccactccaatacgaatatatttgctagacagctctt

SEQ ID NO: 131720 - DNA, 439 bp, Homo sapiens
ggcgagattacggactcaaggtcactcagggatctgagtacacgagtgattacagtctgaccaaactgctttctgaagtctactcggttcatcatgctggtgatgatttcgtgcagctcggggacaaactccaccgggctgaggataaagcaaatctgcggtgacttagtcctcctgtcatttcccatcagttccccgactctcctcctctgcccctccacacccaggtaacttttggtattttcagtagaggtggggtttcaccatgttggccgggatggtctcgaactattaaccttgtgatctgcccacctcggcctcccaaagtgctgggattacaggcgtgagccactgtgcccggccgatattcctgtttttatggttgcaattgtatgctatggcaccggtactatgtgggaagaatgatgctaggtactct

SEQ ID NO: 131721 - DNA, 518 bp, Homo sapiens
ttcaagccattctcctgcctcagcctcccgagtagctgggattacaggcatgcaccaccaagcctggctaatttttgtatttttagtagagatggggttttgccatgttggcccagctggtctcaaactcctgacttcaggtgatccgcccgcctcggcctcccaaagtcctgggattacaggcgcgggccaccgcgccaggccctaaatgtgctttggatacaacggaatacacagcctgttgtggatttggtgccttttaaccatgcgcagattcagaagttagatctcatcatggaagaggacagcagcaacagccccatagaggtgcagtcccctgtggatggtgcccctcacaggcattctgtcctgtgctaatgagcacagtgggggactcaaaggcctaactgtcccaatgctatggtagtgattaggacctcagaacagttttcgttaaattaaaaaaagtcaatttttcctgacagagccttactacatgtctctttggggggactgag

SEQ ID NO: 131722 - DNA, 515 bp, Homo sapiens
aattctcacacaccacatccgactcgcactcacatccagctcaacatcgctacctttagatctttccgattgatttgagatttagcggagtgcagcggctgtgtgtcagtcagagagagccccaggttggctgctggggggccgggcctctgtgccagccctgccactaactcgctgtgtgatccttggcgagtccctatcccaatcctgggcccactttctcgcccctctcgagggaggggtttgaacaccgaccaccatggtcctctctggctctaaaactctgaattaggaacgagggggtatgaaccaaaacacttcctgaccccaacaattgggatctgatgaagacgaattctcatcctgggatccgaaaggttttggcctatcctggatgaacgcttgatgttgaaatttatcctaactgtgtttctcaaagtggggagcctcctggcccacttcccttttgggaaaaaatagcccctttgagtcataatgtgccatctggagttgcc

SEQ ID NO: 131723 - DNA, 909 bp, Homo sapiens
  misc_feature (909)..(909): n is a, c, g, or t
gagaagagcgggctaagacgccggaggaggtggcggcggctgggagaggcgagggttctggccgattttagcatcgaaactaggagaaataagaatggctgtagaggaacttcagtctataataaagagatgtcaaatcctagaagagcaagactttaaagaagaggatttggcctatttcagttagctgggcaaagatgcatagaagaagggcacacagaccagctattagaaattattcaaaatgaaaagaataaggtcatcatcaagaatatgggctggaatctcgttggtcctgttgttcgatgccttctgtgtaaagataaagaggataatgacactttgccccattgagacactgaggaaaaagagtttagctatgcttcagctgtatattaacaagttggattcacaaggcaaatatacattatttaggtgcttattgaatacaagtaatcactcaggtgtggaggcttttattattcaaaatatcaaaaatcaaattgacatgtcattaaagagaacacgtaacaacaaatggtttacaggaccacagttgatttcccttcttgatttggtactttttctcccagagggtgcagaaacagatttactgcaaaactcagatggattatggttcattaattatgaggtaatggtatcaagatatgaaatgaaatcaaatggatatggacgaatgggaatttgagatattctaaggcactcattgacctaattgtcaaagcttgagcaataaatagcaaggcgaatttaatttggcatcggggggaaaacaaatgcgaagggaggcgattctatgatggaagggcggagatgaaagcgcgaaagggggagtgaaaaaaaaaaagggatggaagagtagcagaaggagacggatctagcgctgcn

SEQ ID NO: 131724 - DNA, 123 bp, Homo sapiens
agcacttagaatattctctggcattggcaggtgcttgttacatgttgattaaatgaatgaatctaccatgctataagactaccaaacaaaagaatctttatacacatgaaatgacaaaaaggt

SEQ ID NO: 131725 - DNA, 182 bp, Homo sapiens
tcatcattcattcagggaaacgtaggagagaaaatggcttccaccaagtaacagatttatacatgtcaccatcacttaattttttttccttttgctccttatttctaaaaccatttccccagatgctttactggggcaattatgctttctttacctcaaatttattttctgtgttttcatcc

SEQ ID NO: 131726 - DNA, 246 bp, Homo sapiens
tttaggagggaaggaaacacactgggggttcagcttgtccctctggctgagggcctcaagtcctaaaaaatccacaccccttaccttaccctatcccctcaaacttctgcttcattagaaacatcatgctgtcaaccacaccagtggctggcagcacggactaaaaccacttcgactccttctctctggttttcaaatatggaaactcacagcactttccccagacaagaagaagttagcctccct

SEQ ID NO: 131727 - DNA, 305 bp, Homo sapiens
taaagaatattatttagaattccctttaatgttgttccattgctaagaagttctcagcttgtctaaatatgcatttaatatactttcattcttcaatgatatattttaataggttcagaattattgactggcattttctattagcaatttaaaaatattacttctttgtctatcaacttccgttacttctattaagaagctagcaatcaggccgggcacggtggctcacgcctgtaatcccagcactttgcgaggccgaggcgggcggatcatgaggtcaggagatcgagaccatcttggctaac

SEQ ID NO: 131728 - DNA, 291 bp, Homo sapiens
tctgattgtcctttccttgctcttctctgtggttttatatcctaagtatgcattcttcaacaaggtaggttagtgttgcctgtcatttgaagttataggaatggaatcattaagcatgtccgtgttgtcccttgcttctttccctcgatgttatctttgtaagattcgcgcctattattccatggaggagtactttgtacttttccgttgctgaaatagtattccattgtattaacataccacaatgtattcattccgtcccatggaagttgtgattttcattgtttccca

SEQ ID NO: 131729 - DNA, 595 bp, Homo sapiens
actctctgcttctataagttcaactttctaagattccacatatgagtgaaatcacatagtatttgtctttctgtttctggcttatttctcaagattcatatgttgaaacttaatcaccaatgtgatagtatgaggaggtgggttatttgggaagtaagtagatcatgagatcagagccttcaaaaatggaagtagtggttcccttataaaagaggcctgaagaaaaccccttttcccttccacatgtgagaatacagcaaaaaaaaaaaaaaaaaaaaaaaaaaatttgtgggcggccttgggccccggaaaaagtttttaaaaccttcggtgggggcgcggcggggcgcgcagtaggctgtaggtgagacacgtgggcacatagggttgtcccaaaggggaaacccgggcgccacgagactaggtcgctgggagttcccctccccaatttaaaaaaaacgcgccgcgggggggacaccgcggacgcggtcctgggaaccaattctccaaagggggaggtccaggaggagccatacagggggcgcctacctacccgggagcgcccaagaggagggcccggatctacaattaacgg

SEQ ID NO: 131730 - DNA, 435 bp, Homo sapiens
gccttgtacaacaatccaaatcaggccaaaagtaggaggagagctattttcttcctgcctgctttccctctgagcatacaaatttggaggccccataacaactgctcccctcttcatgctggcagagcctaattatttctcaacttatccctaaacaaagaatagatcaccaaaatacttcagatgaaacgtagagcagacaggtcctgggctgggaatccaggagactgatgcaacaaatgcaacaaagagcattaagagactagcaatgtccatgaagaagggaacctaataagtaagctgccacagctcaagtcctcctggccaaagccaggtcatgtccctctataaccagccagtgagaagggaatgaggtccctaaacgggttcgggggattcatgattctctctggggactggagagagagcctggag

SEQ ID NO: 131731 - DNA, 243 bp, Homo sapiens
tgataattttaattttttttccttttgctttcataatttttcttttggctttcttttattttgtattatttttacttttatttattttcttccctccctccttctctcctgtattcattccttccttccttccttcttccttccttccctccttcctctcctttccttttctttctttctttttctttctttctttctctttctttctttttctttctttctttctctctctctctctttctt

SEQ ID NO: 131732 - DNA, 396 bp, Homo sapiens
ggcggttgcagtcagccgagatcgcaccactgcactccagcctgggcaacaagagcgaaactccacctcaaaaaataaaaaataaagcaagcccaatgcggtggctaatgtatgtaatcctagtgagacagccaaataaaaagggctcccaagaaaatctacgagtggcctgcgcactgggatgaggatggggtggagccgcgaagtttgcgccatttgccggggggaagaacctgacccctcctgttcccatttgcagcggggaagagcctgacccctcctgttccgggatagtaacctggaattcaattggtgagatgggcagcctgttagcaggactccatctcactttgctgtgttgttcttttcgccggctaagttcataaccccttacct

SEQ ID NO: 131733 - DNA, 461 bp, Homo sapiens
gatggctgcctctagaggatccactctccctactggatcctacatactcatcctctggcataccccgatccctaacagccagacagactacatttaaactgtcttccttaccatctccccctgctctcacagatgagagattagagggtttacccctgggaaaatttcccagtctaggagaaaatacctacatcaactggcatttggaagcctccaaccaaaaggttgagtttctacatggtcaacaaatcacacccacttacttgcccaggactttcttttagtgtatcactgcatcattttggaatatgaacggagatccagaataatgcaacatgttttaaagtctccaacatgaaagacaaagatcaaaggagatagaaaaggaactcagagaaaatgagaccattaagagaggaagtgaaagctaaaaaaacaaatgagcaaatgcaaaagaacaa

SEQ ID NO: 131734 - DNA, 319 bp, Homo sapiens
ggccaaacctccctggggatttaagagctgcattccactccacttacaggttttacacaaagacaagagaaccatgggccaccccagttcaagcgcatctgactgggctgggcaacacacccacatcccccagtcctgggctacctcacaaagagggggaacaagacctctcctgagggctaccccagaaccctgaagtccaccagggtggatctgctgacgtccccacccagggcacaccatgggggtgggtgtggggagaggggcaggtctggacgaggccggtgattcagaccgagcagggctccaggagagctgc

SEQ ID NO: 131735 - DNA, 467 bp, Homo sapiens
tgtggaaggatagagtccaaagaaacaacagctcctgggggccagttttcttaaaaagctgcttttctctgagccctggggtgaaagctgagcctgagaaaggaagtagggccccaggatgatgtcattgcccacatcattcagtgcaaggtgggaaagggaagcttcagcatagctctacaatcacctgacagctcagggtatctggagggggatgccgaatctccaaataagtcttctcactgtgcatcagtgggagacagaagtgtggagagaaagggtggtttgtctggtccttacatgtgctgctaatgaaggttcagcaactttgccaaaggccgttaggaaatcagggtatgtgattattttaggaacctgtcttgactctaaatgggtgagattagaaatgtgtaaccatcattatatttgtctcctgaagtcacacaggtctgtgtaccagctgggcc

SEQ ID NO: 131736 - DNA, 653 bp, Homo sapiens
ctaatgaaaggaaccagctctgctaaaagtggttgattacaggactgggtcagggcaaattcaggataagcctggaagtctagtggtgccagacaagacatgttgaaataatgcaagagccaacctgaaggaacacctactggctaaagctgaagcaatttgagtaagaaaataatgatagtattggattagaacccatagattaaaatctttacaaatccttattgatataaagatatatttatttcattaactaaccagaggggaagagaaagctcttccttccaatggaattccaattaataaatctgagagaaaagaaaaaaaaatagagaattactggccatgctcagtggttcatgcctataatcccagcactttgggaggctgaggcaggtggatggcttgagcccaggagttcgagaccagcctgggcaacatggcaaaaccccatctctacaaaaaatagaaaaattaaccaggtttggaggtgtgcccctatggtcccagctattcgggaggctgaggtgggaggattgattgatcccaggaggttgaggctgcagtgagccgtgatcatgccactgcacttcagcctgggcaacagagtgagactctgtctcaagaaaaaaaaaaaatacaaaacacaaaaa

SEQ ID NO: 131737 - DNA, 421 bp, Homo sapiens
ccaagctccccgagtgagcaattcctgtcccttttaagggctcacaactctaagggggtgcacgtgagagggtcgtgatcaattgagcaagcagggggtacgtgactgggggctgcatgcaccagtaactagatcggaacaaaacaggaaaggcattgtcacagtgcttttctatacaatgtctgtaatctatagataacataccaatcaggtcaggggttgatttttaactaccaggcccagggtgtggcacctggggtgtctgcttgtggatgtcatttctgccctttagtttttactttttctttctttggaggcagaaattgggcataagacaatatgaggggtggtctcctcccttacaccatgttagccaggatggtctcgatctcctgacctcgtgatctgcctgcctcggccc

SEQ ID NO: 131738 - DNA, 414 bp, Homo sapiens
gtagctgggactacaggcatgtgccaccatgcccagctaatttttgtatttttagtagaaacggggtttcaccatgttggccaggatggtctcaatctcttgacctcgtggtcggcccacctcggcctcccaaagtgctgggattacaggcgtgagccaccgtgcctggccaactagtgggtcttaaaaaaaaagaaaaaagaaaaaaagtttgtatttatttacttgtggccctcagattgtattttttccattggcagcttagatttcctcatgctgctaagtatagctgtattttccctgaactctttctctgatggtcagaaaactgaggctgtttggcttgtgctttcagctggtggaggatgggcttggaattaggggttacacatgtttttcttaaataaagaagag

SEQ ID NO: 131739 - DNA, 402 bp, Homo sapiens
caaatctcatgtccttctcattttgcaaaatacagtgatgccttacttacaattccccaagccactatgctttttttttacagcctgcagaaccatcagccgattaaacccctttttgttatgatcatacagaaaattagtactgtgaagtgaagctatgaaatgccttcaatgacttttccccatcgtcttggctaagacctccaaggtcttaactcattccagcatttacttcaatatctgaagcccaaagtctcatctgagacaaagatgcagtcccttctgttcctgagcctctgaaatacaaagcaagttaactatttccaaggtatgattgtccaggcattgagtaagaattcccaccctaaaggaagatttttgccagagagaacaacgaaacac

SEQ ID NO: 131740 - DNA, 380 bp, Homo sapiens
tgctgggattacaggcgtgagccaccgcgcccagtcaaaattactatttctaagaaagcgtatgaactgatctttgggaatttcagacttaaaactttatgtgtgtgtgtgtgtgtgtgtgtgtgtgagagagagagagagagagagagactgtaaacatatatctctgtgaaacttcattttccatatgtgaatttttggaaccgagacatatggcacttagctaaaagatgggaaaggtagactgactctgacttaatctacttaacctaccaggcaatttataacttgatggcctaatttttgcagcacccagaagcaagcctgtttcagcacggcaaaggctcagctgctaagtgcgcagcattgttggaggtgag

SEQ ID NO: 131741 - DNA, 314 bp, Homo sapiens
atctcctcacctcgtgatccacccatctcagcctcccaaagtgctgggattacaggcgtgagccaccgtgcccagccgcaagggacattttaaaaagaaacagtaaatgggtttgtaaggcacttaggaggcagcatcagtaggatctggtgacagattgtctatggcaaagaaggaggagtcaaggatgcctttcaggtttatcaatagtgccatttaacaaaatcaggtgcaccgaaagaaaagcgggcttgggagtggtagggaggaggaatcatgagtctgatttgggcatgttcagtgcctggttctca

SEQ ID NO: 131742 - DNA, 357 bp, Homo sapiens
  misc_feature (54)..(54): n is a, c, g, or t
ctaataaatgaagaggtggacagaattacaacagcacaatttttgtacaccccnaaatgaaataatggctctgagcaatggtccttcaagggcacattaacaccaatacagaaaggggcccccagctttacatccctaacggatacacagcaacacctaggaggacggctagccctgcctgccaaaaaagaaacagtgtgtgtgtgtgtgtgtgtgtgtgtgtgaattggtttcatttaattgcagaattttgtagctaaattcagtgagggtaaagtttctttttttttttttttccgagtcatttcaacagtgtctcattcttgcatagttagcctgcagctgggtttttggcaa

SEQ ID NO: 131743 - DNA, 478 bp, Homo sapiens
tttcaaacaaggaagctctggcttagtgcttggtgggtgttaagactgactcatggtcacatctcttgagtagcaaagccaaaactgaacctatttctgtttaactccaaatgcattcccttaaccaactatgtgtatttccaagcttttggatagagttctttggcaaagattttgccttaaataccacttagtacaaaaaccctttctgtatttgcaaacaatatcctggcaacttggcttttggtgagcattcaaaaactagtctccttttcacatgtctacaaagttaagaggatcacctgccctttcaggtacttgggagaagaaaagttgacagcagaagagccgtggaggtgccagcatgctgtcctcagcgtaactctgcagtagaaagggaatgcaggctggacctgggaagctatactgactctgctcatctgcttcaattaacgttcttgacaaagcagcatttcgg

SEQ ID NO: 131744 - DNA, 828 bp, Homo sapiens
gagttcgaaagttatagttctataaacaaaactatactcacggatagggattaaatggtggaattctttagaaacaccagattcagttttgtttccatgagacttaaagttcttcaatctttcataaacttgtatgtactgttttactctttgatcttttaaagattgttataaatgaagaagtcttgatttctgctaataaaaacagagtaaaatttaaatcatggaatagaaaggtggagctgtggttgagatattatattttattaattgtaatgacattttgagatccagtgctgctcactgaatttccctgtgaggagagtttgtggtgatgacccagcaacagacaagctactatccaaaaaaagctactcacatcaaatcaatttccagtttcttccaagttgcaggagaatgcgtagaccataattttaatctcttctgtgacctaagtattacaaaaagaagaaaatcactacaattttcatgtcaggtgtgctaaaaatttacaaaaactattttttaagaagttggtgttataaatactttgtttagtttctccattaaaaaatgatttatagcaagagaataaaagttcatttctacccctaaaacaataagataaaaaagagtaatgaatattgagaatccaatagacagagttgagaaccagttaaacataagaaagaattagtgaattggaagataactgcccagaatgaagcataaagagaccaagaggtagaaaatataaggctagagggtcagagacattgaagctacaatcagaacaactaacatacttctgcagttccagaagattag

SEQ ID NO: 131745 - DNA, 527 bp, Homo sapiens
ttccatctcaaaaaaaaaaaaaaaaaaaaaaaaaagagtcccattcttttcatttataaagaataatctgaccacatgcagactgacatggaaaattaatttcagttagggccgatttatatagatttcccttaaatataggaattctaaaagttagcagaaggaggcagaagggacaaggatcagaaaaacctcaacacagaaggttctctttaaaaattatgatcttctctccactttaaaggcaattatctcaggcaagcaaatataaagatcctagggttttagaggacaaattagctattatttcacagatgaagaaacaaaggcccagagaaatcaagtcatttattcacaatcaagtaattgctttgcaatgtgagataacatctcctatctcattatgaaagtattctaaaaagaaaggagaattttggtgaagttgttactctttgcttggcgtttggactctgggcactgtttggactctgggcactgtttggactctgggcactgtttggactctg

SEQ ID NO: 131746 - DNA, 235 bp, Homo sapiens
ctctaatatctttcccaccagaatgattgaaccccaacacacctccctctctcagcagggtctgcctgttcagagaacacaacttctccttctcgccttacacacaggggcaagaatagattcactcttgcagagagcacatccctttctgttactgaaaatcactttccaaaaaaaaaaaggggttaccgggccccgaattacgactcctggctctcgctttttccttgttttg

SEQ ID NO: 131747 - DNA, 840 bp, Homo sapiens
tcctatctctttcatgtactctgatatggtttggctgtgtccctgtccaaatctcatcttgaattcccatgtgttgtgggagggacctggtgggaggtaaccgaatcatgagggcaggtctttctcgtgctgttctcgtgatagtgaataagtcttatgagatctgatggttttaaaaagaggggttccactgaacaagctctctctctttgcctgctccatccatgtaagccatgacttgctcctccttgccttccaccatgattgtgaggcttctccacccacatggaactgtgagttgaattaaacctctttcttttggaaattacccagtctctgttatgtctttatcagcagtgtgaaaacgaactaatacatactctttacacaatagtcagcctgatcttagtaaaatataaatctcagagctcttcattgctcccccttgcccacataattaagcccaaagttgttcacatggcctataagctctgaatgagctgctgcatgccttcctttccagctttatctcattccatttttcccctaatcccctttatcccagccatgctagaaactactcctaaacctcagcaccttggcaaatgctggtttcactgcctgaaacagtcttctccttcctctcttcttaaccagttctaatctcaatgccatttctctggaaaaggctgctgtaatataccagacaaggcccctttatttcctgagccacctctcacacctggacaccttatactctatcctttgccttttcagcatttgtctttgtcatcacctaattaagcatttaatgttaatgattaactgaaggtcagattc

SEQ ID NO: 131748 - DNA, 337 bp, Homo sapiens
  misc_feature (21)..(21): n is a, c, g, or t
  misc_feature (25)..(25): n is a, c, g, or t
  misc_feature (30)..(30): n is a, c, g, or t
  misc_feature (40)..(40): n is a, c, g, or t
  misc_feature (43)..(43): n is a, c, g, or t
  misc_feature (57)..(57): n is a, c, g, or t
  misc_feature (60)..(60): n is a, c, g, or t
taagggaagaacgacattgancacngtggntcatgcctgnaancccagcactttggnagncgaggagggaggagcacctgaggtcaggggtttgagaccagcctgaccaacatggagaaaccccgtctctacgaaaaatacaaaattagccaggcatagtggtgcatgcctgaagaggcctcattcctgccatctggagaatgagaagggcccgttcaagagatgggagaggaaacaggcctgaagagcccgagggataggaagtggggaagccggaaggttagaaaggtaggtggggatagatcatactcagcctttcaggccatagtcaggagtt

SEQ ID NO: 131749 - DNA, 394 bp, Homo sapiens
agttttctcatgttacattcagataaaaaaagtgagacgtctcagaggaatgctggactacaaagaatttgtctttcaaaggtaattaaagtataatttaaacttattgctgctgtgtgtaccactttcccttttgaattatgagtctataaagacatggaagtttgcaactttaaatcactctgcagttgtcaattaaatgtcatactttggggcagaatataaatggagtatagcctgttaacaattattaatatagtatcagtgcaaattcatacatcaaaagagtcagtgataatcctaaccacctgtgctgatacatagtgtgaaatgtacaactactctttctcgtagtctcctagtctcccagaaaaatgaatgcgttgttgaacag

SEQ ID NO: 131750 - DNA, 617 bp, Homo sapiens
cagcctacctccacactggctctacagggcttgaggccagccaggctgagccaggcaaccaagcggctgaaatttaatcccagtggtggctcagatgtaaccacagttcttgcctcagggaaacctggctgtgaccagagaaggcagagaaagtgaccttccttaccacctctcctcatgaccagaaggattggcactcacttcggtgccctgggggaatccacccttgactgaggccagcagcacctgggtctggacaagggctggtaccagacagtctgttccaaaaagcagatccctggtgggagaccagacgtggtgagagaacagacagctgctgttgcgcagacgaggactctggcatcacaggcactgaggtcaaattcctgttttgtcatttgcagtggcaaacctcagaaagggccccgttcctcctctgaaactctctcttctgaacagtgggctgaataatatctactgcactgggcaatatctactgtacctgttctaggcaagggaaacccctggcccatgactcgggcttagcaaaatctagttcttttcctttcccagtcacacacacttgcgcacacacacagcaacctaatctgcccaga

SEQ ID NO: 131751 - DNA, 398 bp, Homo sapiens
cagtctgaattgctgaaatcatctccttggagtagtttaataggcttctctgtcctctgtattgtctataaattggtagctagatttagaaatttaatcagattcaggtgtcttaaggtagcattttattttttcatcaggaagcacataatgagtggtttatttgggattttgtttggttcggtttgtgatgttagcagccaatccattaattcactgggagccataaaaatggtggtattttaattccataatatttttctttagtagctggaataattttctaaggagaaacgtacctgtttggttttccagtgtagcaacagttttaacattgtaatcccttcggctgtggacatgaagagaacagccacatctttctagaccatattaaccca

SEQ ID NO: 131752 - DNA, 644 bp, Homo sapiens
ggaagcggaggctgcagtgagatgagattgcgccactgcactctggcctggcgacagagtaagatgccgtctcaaaaaaaaaaaaaattggtgttttcttggtttgttttgtgttttagtttaaggagacacatttcctcatcttaaggacttttttgctgctctgatgctggtcatctagtccattcttttgctctaaactgagccttgcctcccagttcttcattgcacttcagattgtgtcttactacaaagagaaaattagtctgtgatcagtttggatcagaagaactgaaattgtacatttagaatagaagccagggatgtgatgcacacccgtgatcccagctactcaggaggctgagatgggaggatcacttgagcctgggagttagaggctgcagtgagccgagatcgtgccactgcattccggcctgggtgacagaacaagaccctgtctctaaaaaataaaaagaagaaaagaaagaaatttaaagtaggaagggctaccgtttgcttctggccaagcttcacctctaaccataggatcttttaaaagactagttctgaggtcctttactctgagtaggtatttatggaataagccattatgtattgacattagaatcagttaaacataaatt

SEQ ID NO: 131753 - DNA, 202 bp, Homo sapiens
taggtttctgctcgtaagatgacaaagttgtgactgtatgctgacatgattattttattaatgattgttgctcagctgaactgtcagctctgaaagaacagtgacatgtggtctttccattgtatcatcttcactgaaaggaaataaataaacaaatgaagagttctaatatatttggcttaaaatcatattacttcaggcc

SEQ ID NO: 131754 - DNA, 755 bp, Homo sapiens
tgagaccagcctggccaacatggtgaaaccttgtccctaccaaaaatacaaaaatcagctgggcatggtggtgcttgactgtaatcccagctacttgggaggctgaggcaggagaatcacttgaatctaggaggcagaggttacagtgagccaagactgcgctattgcactccagcctgggcgacagagtgagactccgtctcggggtgggtagggggtggaatgtcttcctcattattatagtaataagtgtccctgcctgtcatgggtgagattgggatttgtggggtatgattccccaacagggaggttgaaaaggtaccttttggctaggtgtggtggctaatgtctgtaataccagtattttgggaggctgaggcaaaaggagttcgaggccagcctggacatcatagtgacatagtgacaactgatttctacaaagaaaataataataggccgggcgcggtggctcacgcctgtaatcccagcactttgggagactgaggcgtgtggatcacctgaggttaagagttcgagaccagcttcaccagcatggtgaaactccgtctctaccaaaaatacaaaagattagccaggggtggtggtgcatgtctataatcccagctacttgggaggctgagacaggagaattgcttgaacccaggagttggaggttgtagtgagccaagctcgtgccactgcactccagcctgggcaacagagcgagactgtctcaaaaaaaaaaaaaaaaaaat

SEQ ID NO: 131755 - DNA, 384 bp, Homo sapiens
ggttacacagctggtagatagcagagcacatgcccttacccttttaatagaccgcccaactggaagaacaaaacgaagttcagtgtgaccatagagaagaggatgaatttaagagctatttttgaaagagcatggtgaccggttgggcatggagtggagaacagagtcggggtgagagacagggtgtgtgtggaaccgttcacagagcgatcagcaaaaccaggatgtagatgatgcacagggttagtgtcaaaaaggggttattatgttaatgtatcacagagcaattttaactctgaatctctaaaaataaccatgtttctatactcttgaagcacccagggtaaattccttaaagatttcacaggacactaaatttgtaca

SEQ ID NO: 131756 - DNA, 268 bp, Homo sapiens
tcataaaggtgtcaggttaggataaactccaacttgctctccagggaagaagccgccagcctggaagcaaatggttactcttctgtaattctttcactagctttgcatacttgatgtaggtagagtctatctagcttgtttatacagcatgtagacaaccttcagcaaatgattttgattaactaatatgcgttctcccaaatacgcagcaaagtaagttgtggcactatttctgttctatttgtttgcttgtttgtttgtttataga

SEQ ID NO: 131757 - DNA, 106 bp, Homo sapiens
acagaggggtacgtttcaggacatcattccaagggtttctgttcacgtttgtttaacgaggaaggggaagttgttctcccataataccagtggtatttctagtgca

SEQ ID NO: 131758 - DNA, 328 bp, Homo sapiens
actggctcacttacccccaaacgctaccacaaaactggtgagtgctggaagccactgctcagcttcacaggtagacaatccatttttctatctgtgaaatgatcatcccaacacagcttctatctcagggtttcagactcactgggctccaagtatttttgtccaaataccaaagcaataattttcttttactatgtcaaacttagtgctctaccattaccctcaaaacaaagctctcacagcaaagggcaacacggctgtatgttcgccataagcctgaacgttcaccacgcacacctcccatcccccagacacaccctgttgttcc

SEQ ID NO: 131759 - DNA, 409 bp, Homo sapiens
cttcacttttcctagccctcactcaagatggagtcactctggttcaaatgcctctgacaatactgtgactacagttttacaagatgttacccttaggggaaactgggtaaagggtacacagaatctccctgtattactacttctcatattccatatgaatctacaattgtctcaaaatagtttaattttaaaaatctaatcaggtggcacaggcttctctttacctcttgtttaaaaccaatagtttcccgctggtcacagtggctcacgcctgtaatcccagcactttgggaggccgaggcaggcagatcacctgagatcaggagttcgagaccaaccccaacagggagaaaccacgtctctactaaaaatacaaaattagtcgggcatggtggtgtgtgcctgtaat

SEQ ID NO: 131760 - DNA, 907 bp, Homo sapiens
gtggctgccccaggatggggcagggtgaggggatgaaaagaccaaggaagcatgtgccaggctgctgttccagtggagcacctggagcatccgtgagcccctctcactggcagagcgaaagtggggctgggggctgtcagggatgcttgcagtgggatcagggcttggtctgcgaggattccccggcctttcactttgaaggaggatctgcttgggacagcaaacaggctagcaggggaatgttcacatctcacccacccacccacagacagcccagttttcagtgcacgtgcccacaggagggtgcgagtcctctagttatctgttagagaggcaccgccagcctcaccctcagcaagacacccaccattggtgaaccgtcactcagtctccttgtccttggagtcccagaggtgcctgcctccctcacaaccctgtgtttttgagggctggtgccgaccaagtgggatgtctaggaaaagggtctggcagggtgtgaagatgcccctggctggccaggtgcccacccagccctgctcctctgacagccaaattccacccgcgctgcagggcttgtgccaaggccccagctgctccacacttcggactggcagaaggcgccttcgtacccagcatcacccctgcccagggcccacttgggaggtgcagacccagtcctgagccgcacgcccgcccaatgctgtctgtctgtgtctgctctctgccgcccagcttgggatctgcaccacgctgaggcagccgccctcctgcctcccgctccccggaacatgcccattctgcttctccatcctgccctcgctgttgttcgttgtctgggcggggaggtggaggggcctgggggagcccaggcccagctccccgtgtctgtgcttgtgtcgaagccctc

SEQ ID NO: 131761 - DNA, 153 bp, Homo sapiens
tctcatctccacctcccaaagcactgggactgcaggtgtgcgccaccatgcttggtcttgttctgccttttggatattgtttaaacctttttttgtgagagtaggcatctactcagcgatttgaagaagtgatttactgatgactaaagatat

SEQ ID NO: 131762 - DNA, 440 bp, Homo sapiens
cgccagatcctgtaccagacgccggtgaaggagctggcgagcctcaagtggaagcggcacgggcggccgtacttctgcatgctgggtgccatatatctgctgtacatcatctggttcaccatgtgctgcatctactgcccgtgcctgccaggtcctgaccacagactatcagatgtgaactctgggagcccccaaccagactccgccccggcatttatctcccaaacctgggcaatgccgagaacaaatcggaacaatgctaataaccaggttggagaaacaggtgtccatctgggctgcacaacagaccctgagcaagagtgaccacctcacccacatgaacagcagtcacttatagcacgcccacgagtaccatatgccacacagggcacttccctacccactgtctcgaagcatcgccatgaccccagaacaagggt

SEQ ID NO: 131763 - DNA, 494 bp, Homo sapiens
ctgcctcaccattttccactgccccaaggcaaccactttcagcagtcttaaatgtttcatttttattctatttaaagcctttgctcatttttaaattgggttttgtccgcattattgagtggtaagggtgctttacatattccacagccagttgtggtagtataggcctatggtcccagctactcagaaggctgaggcaggaggatcacctgagcccagaagttcaacactagtctaggcaacatagcaagaccctatctctaaatgaatttttgaaatatatattctagataattgacctttatcatgcatatactttgcaaatatttcctctcaatctgttatctttgtgctttcttgatagtctcctttttaatcttgagaaaacataattaatttttcctctggttggtgtgctttagggtgtatgtaagaaaccattgcctaatctatagtcatgcagatagatatatccctatggtttttttttgttg

SEQ ID NO: 131764 - DNA, 119 bp, Homo sapiens
ggtctgctgcagaggaaggtgggctgttcagtaaagtagaaaatgattgtcaaggaacactttggagctactggttggctgtcatcctgagcatagatgaactttatgtctaaagtgct

SEQ ID NO: 131765 - DNA, 410 bp, Homo sapiens
gttgctgggattacaggcgcccaccaccatgcccagccaatttttgtatctttagtagagatggggttttgccatgttggccaggctggtctccaactcctgacttcaggtgatccacccaccttggcctcccaaagtgctgagattacaggcgtgagccaccacacctggacaaacctcagtttttattgtgtcagttccttaaatttcttaaaagctcttctcagtttctcagcctctcagttgccttttccagtaatagcattcacctctagggaaaacgcagcttcaaatactgggctcacctctttagctttcttttttttcacctagatcttggctctttaattctttgccaacctatttgtcctctgatatcttcagaaatgtgttttgcacatcgagtccag

SEQ ID NO: 131766 - DNA, 375 bp, Homo sapiens
tcccataccattccctttaccattcttaccatgaattttcacaaaattgccttacactttgctaattagggacattgcctataaatgggcctatacaatatgtggcctttggttcgttttgcattcttttgcctgaaaatttatcgtgttttcatgatgcgttcatgttatagcctgtcagtggtacttcattcctttttatggctgagtaacattccactgaataaatataccacgttttgtttatcaattaatcaatgatgaacattaaggttattccaaccttttgtctattaggaattatgctaaccatgagcattcatgtacaagtttttgtgtggccataggttttcaagtttcttgggaatatacctt

SEQ ID NO: 131767 - DNA, 764 bp, Homo sapiens
tattcaaccagggaaaatttggcagggatgtcatactgattgttctcacctgtggtaaaggatttgtggattgagtcctctacttaggtaccatttaatgattaaccccaaagtgggcaaagaaccagaaacctggaagaatccttaagcgatcatctgctaaaatcttcgcttccaggtaggcgaatccctaagtcatctagaaaagagtatttcagttctcttcctgagtatcaacaaatatttattgcaatgagactctacagcctttcctatctgcttacaatgtttatctctgaaatatttaaaatcctcagtgaaaatgccccttgcttggatataatctttttttggtcattcctaccccaacatgtagcaaaaggtaaccagcatttctctcatttgttgtgcctgaataacaatcctatttgtatcagtcaggatctcagcacattacctttcaaagcgataatgaagactccaaagaagacatacacatgaccaacaagtatgtgccagcatcattcatctttagggaaatgcaaatcaaagctgcagtgagataccacctcacacccattaggttagctactatcaaaatagaaaataacaagtgttagtgaggatgtagagaaactggaaactttgtgcaccattgataggaatataaaatgctaccactggcgtagctgctaggaaaaacaatatggcaatcgttcaaaaattaaaaatagaattccctatgacccagcaaattctacttc

SEQ ID NO: 131768 - DNA, 527 bp, Homo sapiens
ttttagtgattgtaagtgtagagttttatcagaggaaaatgggccagcattgtccagtagaaataaaatgtgaaccatatatataattttcttattttcttcttttttttgagatgaggtctggctttgttgcccaatttggatttcagcagcgtgatttttgctcattacaacctctgctttctgggctcaatgaattcttcagcctcagccttccgagtagttgagactacaggcatgcaccaccatgcctagctaatttttgtattttttttgtaaaaaagaggttttgccatattgcccaggctggtctggaactcctgagttcaaaagtgatctagctacctcagcctcccaaaatgctggattacggggatgagccaccatgcctggctgtttctttttcttttcttttcttttttttttttaagacaaggtctccctctgtcacccaggcttgagtgcagtggcgtgatcatgttttattgcagcctcaacctctcaggctcaagtgattctcctgcctc

SEQ ID NO: 131769 - DNA, 156 bp, Homo sapiens
gagctgcactccctctagagattctagggggagacttcattctttccccatgtgcgacaaggaagggagggatgccaggcacagacctatgcacctaatgagagaaacagatacaggatgcagtgggatgaatggtggcccccaaaagacatgccc

SEQ ID NO: 131770 - DNA, 644 bp, Homo sapiens
cagagtccaaacagtgccacagacatgctaaagttgatggcacaatgtggataggttgggaaaaacatgaattaggtgctggatttagtgaagaaatcgaactgtgccatatttggcaaatgatggtgatgagaaagtagagagaaccttggatttgttttctgttttagccaaatagaattaaattctgaatttttggaaattaatttacttgactcttataaactcttacaaatactcaaatatatattctccattttatttccttgatccactaatgctgtaatcctatttccaattaataaacaacatatttagtactgatgcccatttaagtgtgttgttactctgtaatcactatccctctcataaaactatctggggatagattggttcatataatctttagagagaagatttttctcatttctgtaaaagtgtagagaaaatctcaagtactttagaaatgcctattgttaaacagtatccataattattttgtgttctgtttccttgacctcactcaagaaaaaaacaaaatatctcccagaattatggcatactgaaaactgcagtatgacataaaagaaaagactacaggctccttgaggttgggtcttttccatactcataaacctgcttat

SEQ ID NO: 131771 - DNA, 349 bp, Homo sapiens
gtagacatttgccatgtaacggggagggtggggaaaaatggcaccatgcagtattccacagcactaactggaccatcgtgctctaggagatgggtccagatagactttagcgatgggacaggataatctcaagagctggtctttataaaactggaatcacaaagtcttgcgtacttaccttgcacttaaaaagaagatcaggcagtgaatattacaggtgaataaatatgttcctcactggttctcttctttatagggatgagcttgaaaacagtctatattattataacatggctcatctgtaactagatgctctgtcataagaaataccagtgttttgctttacaag

SEQ ID NO: 131772 - DNA, 804 bp, Homo sapiens
gccaaaagataatggccatttgtgcagaagatatacttctgtatccctttgtacacaagtatttaaaataactttttttatttttaaatagagatggggtcttgctttgttgaccaggctggtttcaaactcctggcctcaagtgatcctctcctctcagcctcccaaagtgctgggattacaggcgtgagccaccgtgtccatacagtctaaatatactgaggtgtagtgaaggcaatagaactgagagtttatttaagttttccttctgtgaaagagaattattaagaatttagatttatacttatatataaccaagtatatgaaatctggaattgcattggccaagagggtaaccattgccttttttggctatttaaatttaagttaactaaaattggaagttcatttcattagtagtcacatgtggctgttggctaccatattggacaaaacagaacatttgcatcatcacaaagttgtatagcactgcagtgtattaggagatacaaaaagtgtgtggttattgtttttcataacatgctgttgtagcttgtctaccaagaaagctctttgaaaacatattataaagaactctttattcaaagaatgacttgtggctaatctgttgttattcttgcttggtcttcgtcaacattcattttttcactgttaatttatttccttttgtcttacaataatgaaaaaagattgccttctgagtcgctaatatttgtgttctttgagtgaagcttttaaattttaaattatggcaattagacttaccaaaagtcagttaagaca

SEQ ID NO: 131773 - DNA, 219 bp, Homo sapiens
agatcaaaactgcctgcaaagttacttgtgtgcatctctgctaaaatacagaagttggaaacgcatctgaaacacggggtctagaagggaaagggaatactactaatgataacgacacaaatatttactgtatgttcacccggtaccagcccttgtgctatgtgctctctctcatccaagtactgaccaggcctgaccctacttagcttctgggatcag

SEQ ID NO: 131774 - DNA, 193 bp, Homo sapiens
atttacaagcaacagataccaaccaacacagggctatgatctttgggagaaaagggcagatgaatcaagtctcacgctggctttctccttgggggcacctgccaaaccatactgtggagaaacaaagcccaagcagacagtggtagtcctgctaggataagaaaactaaaattaatgtttggggttgctatgg

SEQ ID NO: 131775 - DNA, 142 bp, Homo sapiens
tgatcagagcagacaaactaattatgccttttaatctgcttattactaaaatagaagagaatataactttcagtaaaacattcaaataaagcaaagggctgcagtcagcttaagtcagggcaagatggtcctgaaggaaggc

SEQ ID NO: 131776 - DNA, 573 bp, Homo sapiens
taagatgtcccctgggaaagaatgaaactctcacatttacatgaatatggaatcactgaatcctcagggttagcctactattttatcactgaatggtccaaatctagagagaaactcagtcacatgagaggttctatcttgccagaccaccatttaaatttgaatttaaatttatttaaaactcaccaaaaggatttaaggcagctgataaatgtatacatttagtactttaacaacaggtgaagaaattaaggcaaaagacaaagaaaaataaaataataaaatgggccaggcatggtggctcacacctataattccagcactttcacaggtcaaggcaggcagatggctgaagcccaaaaattcaagaacagcctgggcaacatggcaaaatcctgtctctactaaaaaaaaacaaaaagttagtgggcatggtggctcttgcctgtagtcgcagctacccaggaggcggaggtgggaggattgcctgagcccaggaagttgaagctgcaatgagccgtgattgcaccactgcactccagcctgggcaacagaggaggcactgtctcaaaa

SEQ ID NO: 131777 - DNA, 182 bp, Homo sapiens
ttgagggcctctgggccccaggtgaggtgggactgggctgcaagatctggtgccgcttttctccactgtgcagcctgtcccttctcctgctggcgggtggggccagaatcaactgtgttcagcgtgagggacacacggtcccagtgtgagggacggtggcttttcaggagcacggtgctcat

SEQ ID NO: 131778 - DNA, 370 bp, Homo sapiens
cctcctttaatcttcatcaaatccctgcaaggtccatttcattattacttttactttacattcaaggaagctgaggcccaggagaggcaagtacctcacttcaggtcacacaaccaggagggggtacaggtgggattcgagctttgaatgctgggccacagtgtccccctttagacaaatgatggaataaagtgtgtgtgcactgggcgagattatagggagtgggacacacagtcaactgctgaaggatttcactttagtccaaagggtagccagtaacaaaaccaatgcgtttatgtccctgtggacattcagagagactgaagtgtgggctggccaggtattgtggctcatgcctataatcccagca

SEQ ID NO: 131779 - DNA, 411 bp, Homo sapiens
atcacctgaggtcgggaattcaagaccagcctggccaacatgacgaaatgccatctctactaaaaaatgcaaaaattagccgggcttggaggtgcatgccctgtaatcccagcactttgggaggccgaggcaggtggatcacctgaggtcaggagttcgcgaccagtctaacatggtgaaaccccgtctgtactaaataaaaaaaaaaatagctgggcatggtggtgtatacctgtaatccgagctacttgggaggctgagacaggagaattgcttgtacctggcaggcggaggttgcagtgagctgaaatcgttctattgcactccagcttgggcaacaaagcggaactccaccaaaaaaatacatattttttaaaatttatatacaataaaattattatggggtacagt

SEQ ID NO: 131780 - DNA, 555 bp, Homo sapiens
tgactgtgggacttgagtatgcatggatttaggtatactgaggaggcctggaaccaatccctcccgcatgtactgagggtcactgtattagtattgtttattaacagttaagatttcttcagtgtctgctgtgtactagaattctttacatgtggtatctcaaaatctcctaacccttaggagctcagtattactctgttttgcagattagcaaactgagatgcagagaaattaggaaacttgtcaagagactcagaattgacagaaccaaggcataagtccaagtgtgaagaatagaaacaccatgtttcccctctgtgctatgctgctccttattcctaaagtaaaattgtagttgatttcacaacgttttaggaagagaagttaaaaaaaaagtttatatgacagaaagagatatatttaagaatattagctaggtgtggcggcccacacctgtaatctcaccatctcaccgctttgggaggccgaggcgggcagattgcctgaggtcaggggtttgagaccagcctggccaaggtggtaaaaccctgtctg

SEQ ID NO: 131781 - DNA, 976 bp, Homo sapiens
gccggcgcgcgtgcccgcgcctgggaggcgcgcggccccgcccctcccggagccctccagcgcgcccgggccagatggacgcccgagattagaggcgcagaagtgcgctccacgacgggcccacccgtcccgcggacatcagacctacttcggggaggcgccttttgttgtggtggccgtggcggtgtttgtgtctttccgggagcacagggtgagcttggccttcaggaatgactcagaatgaatccgcctataagagccaaactaaagacgaccccccgccccagccccccaaccataacccaacgcctgccatgagaaaccttcggactttccaaggggtcagtgcctcagccacgaggggcagccctgacccgcgcggttcacgcacacgcagggcccatctgcttcccctactccggcttttcttctctgatgacttaaaagagagtgagtgagggagagagggagagagagagagaggtctaagtgtttcttgggcactgctggattcagggcaactagagatggggagaacaagccccgccagctaaaagcagccctgctgaaaccacacagcccgcgagggtcgcagcagaggcgcccacccagcaggagtggctgcacgaagggtgacccgggcgaggcccttctcgcttcgaggccatttcggctcttgtcaattattgggtgtttgtcccaatataagtagaatggcgatctcaaaccctttcagcactagcctttgcttccaacaatgcaccactagaagcttagaaaagagtagagcagggcccagagagacggaaaaagagcttctagagatcatgtgggtggtttgtagcaatttcagtggtgaagttaagagcaaaacctgagtctcttcatttcttgccagtatgtattttttcctcatgtatttgaacatgaaaagcttcctaaagattttggcaaataaaacaaatagtggacccta

SEQ ID NO: 131782 - DNA, 885 bp, Homo sapiens
gccggcgcgcgtgcccgcgcctgggaggcgcgcggccccgcccctcccggagccctccagcgcgcccgggccagatggacgcccgagattagaggcgcagaagtgcgctccacgacgggcccacccgtcccgcggacatcagacctacttcggggaggcgccttttgttgtggtggccgtggcggtgtttgtgtctttccgggagcacagggtgagcttggccttcaggaatgactcagaatgaatccgcctataagagccaaactaaagacgaccccccgccccagccccccaaccataacccaacgcctgccatgagaaaccttcggactttccaaggggtcagtgcctcagccacgaggggcagccctgacccgcgcggttcacgcacacgcagggcccatctgcttcccctactccggcttttcttctctgatgacttaaaagagagtgagtgagggagagagggagagagagagagaggtctaagtgtttcttgggcactgctggattcagggcaactagagatggggagaacaagccccgccagctaaaagcagccctgctgaaaccacacagcccgcgagggtcgcagcagaggcgcccacccagcaggagtggctgcacgaagggtgacccgggcgaggcccttctcgcttcgaggccatttcggctcttgtcaattattgggtgtttgtcccaatataagtagaatggcgatctcaaaccctttcagcactagcctttgcttccaacaatgcaccactagaagcttagaaaagaagcagtttttgtgaatttcaagaagcagaaagctttggtttaatcagagagagaaggaaaaaagaggaagaggaggaggagggggaagaggaggagaagaag

SEQ ID NO: 131783 - DNA, 573 bp, Homo sapiens
agtagagacggggtttcaccatgttggtgaggctggtctcgaactcctgacctcagatgatccacctgcctcggactaccaaagtgctggaattacaggcataagccactgcgcccggcccatggctcctttcttaacattgtggctttgtagattctggctttccagtttaatgatttaggtggatcttttggggaaaccgatttttgactaggtgacacacctggtacagaatttaaaagatacaaaagggaatagaatacaaaggtcttcttcccagtggtgacttcccaggcccttgtcctgcttcccacaggcaaccactgttagcagcttggtgagttacttatacaaaaagaatgtagctatgcaagcagttagcacatccatatgacgatacagacatacacgtgctacatatttgctatggaaatggttgtatactaatcaaccattctgcaacctgcttttctgatttaatctagaacaacctcattcttgtgtatagtacacctcacaccactatattggcttggtataataactttccaactggcttttgtctcagccatg

SEQ ID NO: 131784 - DNA, 739 bp, Homo sapiens
tgtggtagccagtgaatatctttcatactgtggcttccctggagagatcagagaagtgcgcctgggtgcgcacccaggcgcacttctggcattgcagaggccgtacaattacacagctaggctggggcgggccagagtctggagggggaagagtggggtcgccagcggcgcagagcggggtcctatgtttagaggaaggaagagcgtgttggaaacagagcaaatctgtttccccaatatggatactacgggcgaaatttatcatctgtgagaggagccgtggggactgaggacagcaaggccagatcaagggacaaatggactgactgaaggaggaggctccctgaggaggggaagggaaaaggagaaggaaaaaaaaagtgggggttcataaatgtgtgtgttggcgggcgggggccgagtgaataaatgatcacaggaaagaggtggggagggacaaaaagacattttaaaaagagaagcgaacgagcatccaaggccgccgaccttgaccgagagcggaggagagtagagtaagcgaggaagcccaagccagcccagagagggcgggctaggaggcgccggctgccagcaaggcgctgcgccaagcaggcttgcgggcgggggccgcggtgctgcactgcccaggaggactcgagcgcttacagtgttcacagcttggagttggctttggacacgagcgagccctggggcggggacgccatggtccagtctctgc

SEQ ID NO: 131785 - DNA, 831 bp, Homo sapiens
cttatttgctgcttttggtcgggcggcagccctgaggttgctgggactgcccgcaggtaggtgaactcctagagcgttgtgatccccacgggcagagcaggcgctggtggctttgggaacaccgcgggacccttttcactcctaagaatccgagggtcagatgcgtttggcaacattctcacaggaggagtcagaggaggctctcctgcatgatgggtgagccggcataggaattgtgccaagggccattagattttgtagagactctgaaccccctgtccagaggacaggagctgaggacaacagcaggcgaaaaacacaaacctcaaagtgcgtgcactggaaagagaccagaaagccagattgaaaatgtggaggtgttgcaggagtaaatcaccggtttcccttacatcatcctctttactttatttacttatttacagacagggtctcgaactcctgggttcagcgatcttcctgcctcggtttcctgagtagctgagattgcaggtgcctttttacttacaaaaatttttttaattgagagatagaaattgtatatatttatggtgtacagcatggtgttttgaaatatgtatacattatggaatggctaaaatgagctaattaacatatgcattatctctcatgactttttttgtagcgagaacacctaaaatctactcttaacaattttcaaggacacaatccattgttgttgacactatttattcatttattatagaaatggggtcttactatgttgcccagtctgatcttgaactcctggcctcaaacgattctcctgccttggctttccaaagcctctgt

SEQ ID NO: 131786 - DNA, 392 bp, Homo sapiens
gagtcctcctgactttccccagcacccatcgtggctgcagccaggacacaggtaaatgtaatttccctccccttccatcctcgctttcacatcggtgtgattgactgacgggcctgcagactctctccacgtgcgggtgccctgcagcctgacacacaaatgcgttcatccttcccctttatcctgaccccgaactaatgacgcagcttcctgagacacagaggatgcttctcctcgtcccccctcgcgctctgaagtgggaaaagatgtgttccatctgttctggaattttcactgtaaagaagagaatgaattttaactgtgtttttgacatatccctaaacaagaagtggtttatagagtgaaaccattttcccttcatctaaaattta

SEQ ID NO: 131787 - DNA, 738 bp, Homo sapiens
tattccaaaaaacacaaccacttttatatcaaaatattattctatcacagatgcatacataaaaatgcatagtcatagattaaacaaaactcacaaactttgggctcttggcatagcatgttttcataaaaggccagacatttttatatataaattaatatttgttttcattggcctttccatctattcctgtctgtataccagggtggcattttagtacatattagaaatctatgccaaccagcatgtcatggaacacattaactggattcatgcctattctattcaataaagttatctctttagactgacatcttcttcatctattataattattactctcagtaaagagtgctagaatgtgcttcaattttacacattttaatgcactatcagatcttactaccagacccagtcttttctcttttaataagggaagttttatggtgattctagacagtaactaacatgaaagagccaaaatgaacaaaatcaaatgaaggatacaagaaaatagaaataaatttgaaataatgtgttccttgtttatgaaaactagtctgtatatttttaataaacaatgaattattcctttccttttaggggtaattttgagaaaaatgttggagtagatcactggacaagccattaataatgtaaattgaatcaataatgatagacactcattacagggaaactgaaaaataacttttaaacgccatttttcttttttcccaa

SEQ ID NO: 131788 - DNA, 639 bp, Homo sapiens
cacgatctcggctcactacaacctccacctcctgggttcaagtgattcttctgcctcagcctcctgagtagctgggattacaggcacctgccaacacgcccgactaatttttgtatttttagtagagacggggtttcaccatgttggccaggctagtctccaactcctgacctcaggtgatccacctgcctcagcttcccaaagtgttgggattacaggtgtgagccaccgtgcccggcctttaaatttttttattggaaaaaattttttgcccatgacacagccctcaggaaaccctgagaacatgtgccctaattcatttttttatatgaagtagaggtgaaaattcttttatattttttctatatggatatcgaatggttccagcatcattttgttaaaaaattctctttctccattgcattgacctggtacctttgtgaaaaataagtggattcaatatgtatgggtctattcctgtattctattctgttccattgatcggtttgtctatccttacgttgagtccttgtcttttaattggagattattgatgcagtttgttgactccttctgtatatcctaatttctctaatcaggccaaatctttctcagtaacagcaagggataaagaaagca

SEQ ID NO: 131789 - DNA, 177 bp, Homo sapiens
ttcttccttcttccactttagtcccctgtggtagcttgtttccaaagatgactgccatcaattcctccttccctataggtttctgtcacttccctactgagaaggagagtccagccttccaccgccttcaatctggggctgacctatgactatctgattgatgaaatatggtagaag

SEQ ID NO: 131790 - DNA, 552 bp, Homo sapiens
gtggtgatgatttctacatgtattgctctgttccagggtctaatttaagcattttccatagataagccattttaccttcacaggtactttgggggtcatgtggctacactgtccattgcctccccaaatagtactctcctcttactaacatgactctgccactgttcagtttgcaatacacccaatgtaccactcagtgttggactgagaataccctgataaccttactcctctctgctggacacttgtttcctagccttcccagtggccagcaatgaccatgtgacttgaattctggccagtgagatgcaaggggaagtatgctgggaagcagggactctgggaaaacatttgcatcttcaggatcagacatgagaggagagcttgttggttctccctttttcttcctgactgtgggccatctggtgaagagccagaaggcacatctgaaagacagacctgggatctttgatgacagcattaagctgtagaagaaccttgagattgttgcctctgacttctttttgagaataataaatgtacttataatat

SEQ ID NO: 131791 - DNA, 456 bp, Homo sapiens
tcatttgatctggtttctggtattttggaccatatagaagttttatattacagtcatctcttttatagtcaccaataaaatctagattaattctctgaacataaatagaggctaacttcttattaggagaagtaaaattgaacagaaaattcatgagtcaccaaaaatccttcccgattttgtaaaatctggaaaagccaacagttgatcaccaaaccactgccagctcccaaatgacagaactcatccacagagcacccccacagcccaggatggcccattttctcctggagtctgaaaagtccattcgcttgtcagttttccagagtctgggaaccctttttgcctctagcgctggcttagctgtttcaacacagaagtgatcacagatgaagatgtcggcccctgcccacagcagagactcctcaacacgacagacagagagcaacaggctga

SEQ ID NO: 131792 - DNA, 380 bp, Homo sapiens
cagaagaacaacaaaaccagtccctgtgccaaaaatgttgaggacagctgtactgtactatttggtgtggcattgtttacctgcttttttctgaagggggagggttaagactgcaattcataaattgtgccctttatcattacatcatattcccctttgatatgatttcaacagagcttgaaatttgtttctatttcccctggtgtctcttttccactcctttgttttcaagttttctttgtaattttgtgttaagtgtgtttcttaaaaacaacatataggtgtatttttaaaaatcacaatctatatgttttttttcctttgaactttcattttagtctcaaggagtacatgtacaggtttgttgcataagtacgttg

SEQ ID NO: 131793 - DNA, 306 bp, Homo sapiens
tggctaatttttgtatgtttagtaaagatggggtttcaccatgttggccaggctggtgttgaacttctcacctcaggtgatctgcccaccttgacctcccaaagtgctgggattacagacactaagtcaccacgtctggcctaaagcactttttctgaattccaccccagtctgcccttcctgagtgcctgggcagggcccttggggagctgctggtggggctctgaatgtgccaggggtatccgggacatcttgcaggctagtgggactgccaaaaacgattctcaaagatgagtggggagttgg

SEQ ID NO: 131794 - DNA, 835 bp, Homo sapiens
accacgcgtcggaccacgcgtcggtaaatacctatgcaaacatgcagacatgggcattggaattgccttttgtgggaggagaatactcagcatctagatataccaattattaatattttgctccattttcctctctctctctcacatatcaaaaataatttgcaagtaaattgtagacattatgacactttatccttcagttcttcagcagatattatccaagaataaagacattctcctacataaccccagtgtcataatcacccacaggaaattaatactaacttgttaacatccccagagcatacagtccatagttaagatgtaccctctgttttaggccaaaggtggcaattttctcaactttagactcaacagaagtttggagaagggaaaaatctgtatgagttgaatagaaaggaaaatacttcatggaggaaagaggataagaattgggctgtgaaggattgacattagaaagaaggggtggagcaaatgctcagatagaagcaggtaaatacctatgcaaacatgcagacatgggcattggaattgccttttgtgggaggagaagactgagcagaatttgtggactaggataggtaggctgtgcagctggacaggcctcatgcaatctgagtacagagaaattgccaatccaagcaatcaaaaaaacagtggccacacaccaagaaacgttaaaggtgactgcacttaggagagtggcatcagatttgtgggacacattcaggtgaattctagtcaggaccatggcaaagcatttggggtcagaattaaactggggagttaattactgattgaaattcatttattc

SEQ ID NO: 131795 - DNA, 459 bp, Homo sapiens
ggagaagtgaaaaattgatcagatttatgtcttcataaacatctgataatgagaattttgaagaaaagtttgtgtgttttgagaaaaatgggcaacagtgtgggagattgaaatagttaaaaatctaggacttgacaaagccaggacgttttactaagttatgtgatcagcctattgtatttcctgtaggcccaacctggtcttaagaaaaaaaaaaaagaaaagaaaaaaaaaaaaaaaaaaaaaaaaaacccgagggcatcctattctggggggcgcggcaacaacaagagggacagcaaaggggcccaggggctcataagcggttctccggacccaagattttggtgaccaaggggggaaaattcggcgcggtaccccccaataaagggagggccggtaataaatttcgcaaaaaaccccaggggattacccgcgggattaagaaaaacccgaaaa

SEQ ID NO: 131796 - DNA, 616 bp, Homo sapiens
tggtccccgctccgggaggtcacatattgatgccgaacttagtgcggacaccctgatcggcatagcgcactacagcccagaactcctggcttcaagcaattcttttgccttagcctcccgagtagctgggactacaggcatgcaccactacgcacagctaatttttgagtttttagtggagatggggtttcaccatgttgtccagcctggtgtcgaatttctgacctcaggtgatccacccgcctcggcctcccaaagtgctgggattacaggcatgagccaccgtgcccagcccacaagaattctaaatctaagaaattatctttcccaaactcacaggagagctttatgcagatgcattttgacaatcttcaacaactactagaacatgaggagccactctcccattcctgttcttcgtctacagaatgtagataatgtcattaataatgtctggcacatttcctcccagggcaggaaagaccgtagggtcttatatctaaaaacaccagaaagactgtgtttcgggtaagatgccacaaaggatgttttgaccttgtgagagaaggctggtgctaactagcacccccacccacagtgggatgcaccttccatg

SEQ ID NO: 131797 - DNA, 531 bp, Homo sapiens
gtgacacgaagtatggccgtactaactacctgcagcactgttctcccctctcagagaagtctaccccccagaggcagaatgcacctcctcacagtgagaatgggctaccagagaaaagcctgaaatttacatgactaatctttgaagtgctttaagtactttttttccattgctgaaggaaaggaatatagaggtacacgtgcacttaaccaaagtcaataccatacaaaaaccattagacaatttctaaaaatcatttagcagtgaaaatgggataggggctgggtgcagtggctcactcctgtaatcctggcactttgggaggccaagatgggtggatcacttgacagcaggagttggagaccaggctggccaacatggtgaaaaccccatctctactaaaaacacaaaaattagccgggcgtagtcccagctactcaggaggctgaggcgggagaatggcgtgaacctgggaggcggaacttgcagtaagctgagatcgcgccactgcactccagcctgggtgacata

SEQ ID NO: 131798 - DNA, 724 bp, Homo sapiens
tagaacgtcctgcagaaggttgggcttgggtgacttcctggccagccttctcaggcagtcatctttgaaaaccttgaagagactcacagaggccattcactggtatttcatgactgcaagtggggtttctggatccttgagtttacttggaatatttgaatggctctgaatggccaagaaaccctccctggtcttagaagctgccaaaagctattactgggcctctgaagagactttaaaatttttccaagtacatttgggcataggaaacttttccaggtctagctgagccagctcaggtcgagtcctgaaaaactggtgggtactgggggatctcatcttatgaaagagcaattggtggcaaagctgggtctccaggacagctgtgtgtgtatatgtctgtagaacatgccttgtagtcatctttggtaactgaacaccatttgtgaatggataaactatattcattgctgtacaataatgaaaaatccatattaacaatggcagtaataaaaatattgatggatattaacaggaataatgatcatcatgatactagtactaatggttttaatagtgataataatactaaccctatggacttgggacatataagttttccataagtggataataggcataaatatttggctgtgtacggttatttcaagtcccaaaaagcaaggatgaacatctagaacgagaagaaaaacaatctggaggt

SEQ ID NO: 131799 - DNA, 320 bp, Homo sapiens
aagattcagtgatataatggctgtaaagcacttagcacagtgcctggcacaacttataactcaataacaagaagacaaggaatctaattttaaaatgacaaaacagtctgggcaacatggtgaaaccccaactgtacaaaaaaaatgcaaaaattggctgggcgtggtggcaagtggctgtagtcccagctactcaggatgctgaggtggaaggatgctttgagcctgggaggttgaggctgcagtgagccaagattgcaccactgcactccagtctgggagacagagtaagactcagtgtcaaaaaaaaaaaaaaaaaa

SEQ ID NO: 131800 - DNA, 452 bp, Homo sapiens
tgtaccgtgtgcctggggcacagggagtggcgtggcacagatgtgctgcgtacctgagcacagggagtggtggagcaggacagggccgggtaggcagtggcctggttgacagaggctaggtgacattcagaggctgtcgggggccacagagcgcttttaaactggggagggggcccagcgcagtggctcatgcctggaatcccggcacttcgggaggccgaggcgggtggatcatgaggtcaggagttcaagaccagcctggccaatatggtgaaaccccgtctctactgaaaatataaaaaattagccaggcacggtgacatatgcctgttgtcccagttactcgggaggctggggcaggagaatcgcttgaacccgggaggcagaggttgcagtgagctgagatcacaccactgcactccagcctgggcaacagagtgagactccgtctc

SEQ ID NO: 131801 - DNA, 613 bp, Homo sapiens
gtagtttttcttttttggctctttatatgatgtattatattaattgatttttgaatgttgaaccagccttgcatgactgagataaatcccacttggtcttcatgtaaaattctttttacacattgtgtgttttgatttgctgatgtttctgttgaggattttcacatatatgtttattagagatattgatgtgtaattttcttgtagtgtttttgtgtagtttggtgttacagaaatgcctcacagaatgaattcgaaagtagttccttcttgtctcttttttggaagattgatgttaattctttttaaaccatgtttggtataattaagcagtaaggccatctggtcctgggcttttcttcctggggagatttttgataactgattcagtgtctcgttatagttcttttcacattttttgtgttttttgagccagttttgacgatttgtgcatttctaggaatttgtccatttaatatgttactaaatttgtggacatatgttgtttaccgtattcttttgccccttctctctttttttcaaaagtcattttatttaaagatatgtcaattttgtttaccttttccaacaacaaacttgtggttttattgat

SEQ ID NO: 131802 - DNA, 364 bp, Homo sapiens
ctgctgtcgtagcttgcctagacaagacaagcttgcctagaatgtctggtcttacccctctctaattcattctctatactgccactagtactttgttaaaatacaggtgtaactttcactcccttacttaaatccttctctagttttctgttgccctcaggatgaagtccaaattccctaacctgatttataaggccatctgtcatctagcctcttgcttaattatatatctagtcttatctcttgctattcttcctcttgtattctatgttccaaacattgtgatttttcctctcagttcctcaaacatctgtgttctttctctgcatctttgtgcatgtttattttattctcctgtggagca

SEQ ID NO: 131803 - DNA, 515 bp, Homo sapiens
tccacagtctcaagttaaaaaaaaaaaaagacctcaaagcatcaatacaaatagatatttggacaatggacctcacctgaatattctaatcaagccacatctattattgctcatgtgtcttcctgataagccccctacccctacccccataaagtggtgattcaggtccttcctgttttgttttcaaggtcattactgctctgcatcaatccagtagaaagccaaagaatatagaggattttgcaagagagatttttttatgaatcaagtctggtattactgcacctcatttccccccacatcatattggcttagaacttgtcacataacagcacccaacaccccaagggaggcagggggaatatagaagagctacttgtctaggaagatagcactttgtgaacagctctctagtctgtttctctcccttccttcaccttacaaaatttccttatcctttgagacccagcataaacaccattatttatccctaaccctggaacagtatttgtcac

SEQ ID NO: 131804 - DNA, 364 bp, Homo sapiens
acaaatatttattaagtatcaactatgttgtcagctctcgggatgtagtggtgaaccaaaaaacaagacttgctcttgtgcaatttacattctagtgcagagaaacagaaaacagacaaaagacagaacattttagtcaataaataatgcgtaaaattaaactgggccacatgatagagtgattgtagagttggaaaaagattacttgaggagatgactttaagcttgaatttaaataaggaaccaggctgggtgcagtggctcaggcctgtaatctcaacactttgggagacaaggcaggagaactgcttgaggccaggagttcgagaccagcctgggcaacacagtgagacccagtctccac

SEQ ID NO: 131805 - DNA, 387 bp, Homo sapiens
aaagggtggccagggaggccacaggtaaggtagaggaagccagttggaagttgtaaatagccatttataccatgcaaaagggttagaacttcatcccgagggcagagaggagccatggatgggcattaagcaggagagtaacgcgattagaactacattttagaaagatctttctggggatcgcttctcagccttttggctaagatcaagtgtagaaagatctctctggggcagcagaaggcatgcattctcaaacttcagctgcattagactcacctgggaggttcatggagcctcagaatactgagtcccgccccatgagtttcttattcagcaggtctgaggcaaggtctctttttttttttgagacggagtctcgctctgttg

SEQ ID NO: 131806 - DNA, 531 bp, Homo sapiens
cccaagtagctgggactgcagatgcctgccactacacgtggataatatttgtatttttaatagagacagggtttcaccattttggccgtgctggtcttgaactcctgacctcaggtgatccgcctaccttggtctcccaaagtgctgggattactaactttttaaaaagtagagaaatacactgagcttcctggaggccaaatgagattggagatgaaaagatgcaaatgacttggaacattgttgcttaactaagagtatcggatctcccacaccaccatcttagtgtgtttactgtgaggggttacttagtaaatttggaagcttaatttgctctattttattataatttccattgtgtctattctgtaatgagctacataaaactaatttgttggaccagttctggaaactggcaggtctcagcaagaaaagcattgactcgaaaagtgattagctgcttggttttggctgttgaattgcacatacagatgagagtgatagtaatgatcatctattgagtgggcacta

SEQ ID NO: 131807 - DNA, 324 bp, Homo sapiens
ctcaaatctagtaaacgcagtggaaagataacttttataggatgatcattgaaaggcatataggggtccatgaatagtgtgaattgaacaaacaggcatcctctatcaaccagagagactaataaggcctcctttaaaaggtagaaacggaagactgaaatccaagttgaccagaggaaatctaccagcgcattatattatcagaaagagttcatgaaagctttctgcagtaactcccaaaatacatgttcactctgttcttggggacataccttttctctggtgagattcatgtttctaactcgtataatatggaaattaccc

SEQ ID NO: 131808 - DNA, 315 bp, Homo sapiens
atagccgtgagccactgcacctggccggtattttctttttaaaaaagtatacaagcagcccatgattatatgcttgagataaaatagtacagaagtagtagttctaaataatgtcaaaagtgaatatatttcctttagtctcttctgatactctcctccccagacgtaatcaaagttaatgttttaatgtatatccagacctcttcctttacagttacaaatgcatatttatatttatgtctatgtctatctgtgttttttttttttttttttttgagacagggtctcacgcccatggcccaggctaaagtgcag

SEQ ID NO: 131809 - DNA, 672 bp, Homo sapiens
caccgtggctcacacttgtaatcccagcactttgggaggccaaggtgggcagatcacctgaggtcaggagttcgagaccagcctggtcaaacatggtgaaaccccatctctatgaaaaatacaaaaattagccgggcatggtggtgggtgcctgtaatcccagctactttggaaactgaggcaggagaactgtttgaacctgggaggcggaggttgcagtgagccaagttcgtgccactgtactccagcctgactgacagagcgagattccatttcaaaaatatatatatatgtatatatatgaaaaaatcaatagacttggtcttagaataaatattaaaatctaaaataataagtttatataaaaaattagcaaagtggaattacttcttatgtttacatttaagaccaagaaaaacttcaagatttcaaaataataaattattagacaataatgaaattacaaacattataacaagtatactgatagttaggaaaaataatagagttctgagaacaaactgcgttaatctccaaaaatgtacacttatactttaaacctactaatttagaaaattctacacaaatataaattccattagaatgattacatcatcacatgtcatgtagtctctggagaactctgctgcaatctgtgagagaatgagaatg

SEQ ID NO: 131810 - DNA, 227 bp, Homo sapiens
aaaatacaaaaattagctgggtgtggtggcatacacctgtagtcctagctattcatacttggaaggctgaggtgggaggattgcttgagcccaggaggtcaaggctgcggttgattgccccactgtcttcattctgggtgacagagcaagactctgtatcaaaaaagaaagaaagaaagagagacataatatatgtggagtaactggaacctttatacacttctggt

SEQ ID NO: 131811 - DNA, 624 bp, Homo sapiens
ttagtggctgtctcaggaccacaccagtcggaccccaaaaccccatttgccagggtatcactaccgatcacctccttcccgtacacctcaaccaacactgtcatggaatgaggatggctgtgaacacgccccaaagcctcctgccctaaaatgtacccattggtggctcttccattggtcttagatctccatcactagagatttctctgcggggtgaggcattgaagaccactgtcgactacgcaaaatgagtgattcctcaaatcccaacgagccacacaagtgccaagggagcccaggagggtaaagagcaagggggtccaggccaagccctctcagcagtggttttggatggcaagagttggatcagggacggatttgtttcttaggacaaagaagacatttttctcagctttcttgttttagaggaaagagtggctgtccccagtttgctcaggaggtcgagagtaacctgaaatgacaatgttagagctgccgagagcagtctctaggcagtggctgagcaggaagatgggtgagtgatcttctgaaacgtgctaggccagcgagagatggctggaatgcctgcctggaacagctcaccctcctgcctgtgataggcct

SEQ ID NO: 131812 - DNA, 426 bp, Homo sapiens
tgctacttagaggaccttgatagagcatacccctagtgtgaatggtaggacatttaggggagattaaggtaaaaggagttcatataggtggatcctgatctgatttagttactggccttaaagaaaagaaggagaaagagatctctcaccacgcacgtgcaccaaggagaggacatatgaggacacagcgaaaagacagctgtctgcaagccgggggcaaagccttcaccaggaagcaggcgttgtcaccctaaccttgagactgctcagcctccataatcgaatggaccagttatttagcgcgtgcgcctgtgtgtgtgcacgcacgcttgtgcgtacacacgttgctcttgcatacacacacgcataatactggtttggtttttctggagaaccctgactaatacaggattttggaccccggaa

SEQ ID NO: 131813 - DNA, 280 bp, Homo sapiens
attccccctaaatgaatccacagaaagatctctggaagggtctttgctaatttgcggttagaacacaacacactcaagaaaatgatgctcacagcaggacactaatactaagtaatttctgagattatgtctgcatttgtgctaaataatttatgctaggagcagaaataaaagcagagatgaagttaagctattgattgaagactgtgctaaccccattaaaaataaagagaggtatgaatgtgtgccttcacaactcagctcaggatatacttgccaa

SEQ ID NO: 131814 - DNA, 264 bp, Homo sapiens
tcaaccttcaaagcaaaaacaagagggactgcgtttggttggtgacatatctgaacctttgctgactggggtactttcccattcttattcactgacccagctccttctgatctgaggacacaagtgggaggagggggctagcaataagggtcttgaatctaatttggtccaaaaggcaagtaagagaaagtttgagagtcaacctataaaacattttgttcagaagaagacagctcagagaagaccaaaaacagcagcaactga

SEQ ID NO: 131815 - DNA, 207 bp, Homo sapiens
gaagagaattaccagggcaacagtgttgccaaggagacccagggttcggacaatccaagggagaggaggaaggagatatctgcaaaaataatgaggctgtagaaaagtgtgttcactgtggaacggaaacattcatgcacaattaactgagcagctattatagaggaagggctacaatggtaagcaaaaacagatcagatctctgcc

SEQ ID NO: 131816 - DNA, 120 bp, Homo sapiens
catgagatttggaggggacatccaaactatatcattccacccctggcctccaaatttcatgtccttctcacatgttaaaatataatcatcccttctcaatagtcccccaaagtcttaact

SEQ ID NO: 131817 - DNA, 389 bp, Homo sapiens
caggtaagcagtgtgatctgtgaacagaaacttgtcctttggaagtggggctgtggcaaaacaaaagccttaggagacgtaatcagcaaccgttcactgcagcagggcgggtggcgcggtgtctgtgtttgtgcctgtgtgcaagggcatgtgcgatattttctgctgttgctaagatgggttcccccttcactggcctctcgcccaatcgaaaggtagctgctcctcattggctgcctggctttatcgaatgaccatgacgagctggagcgaagcccacctcattggcttattcctatggccattgtcaggggagagcaaatcagacacctaatcaatattttgtgaagtggcactagactcttggctaaatttgcattaaatttctc

SEQ ID NO: 131818 - DNA, 427 bp, Homo sapiens
ttcttttaattcttttaacatggtctcctttagtaacttgaatatgtttctgtggctgttttgacactggctgtctttgtctgttaatccgatgtctggaatttgtcatagtttctgttgccttctgttttcctgagcatgggtctcactttcctgttttcttgcatttttgtggaaactggcattttaggtaatatatcatagcaaatctggattctgaccccgacccgcaggggctgctatttctgtttgattgcttgtttatttgattagggacgtagctctgatattgctcctcagagggcacagccttggactagcacacagtctctccgaccacctgtggtatctgtggttttctctgggctctctgttaagcttctgctggtctgtctctctttggtgtcacacacagctgttaacatcc

SEQ ID NO: 131819 - DNA, 698 bp, Homo sapiens
ggagaatagtccaataaacaaatggaaaggtttttaacttcatcagggaaaaataaaaccacaaaattgacacagcaagtgttggcaagcatctcataaattgctggtagaagtgcacaactgcttttatcattaaccaagtagaaggacttgctttaacagacatgaaatcattgtattcgtcaatatagtgcgtaatcagacaggcagagacaaataaatgaagagagacagagatacaaaaataaacttgatatgacggagggcagaaactggtgaacttttcaataaatggtacaggaacaattggtattcacatggaaaaacatgaaattggggttatataagaattaatttcagatggattacaaatctaaacataaaagacaaaattataaagctttgaaaagataatatacaaaaatacatcttcgtgaccttggggtaggagagaatttaagaactgaaaaagcattaagcataaaggaaaaaacatacattgaaaacatctgttcatcaaaacacactgtcaaaaaagtgagaagataggccatacagagaaggctctgtaacatatgtaatgataaagaactagtgtcctgaatatataaaaactctacttgccattttttctcattgaaacttctctttcaatgagaaaaaggtaaacaatcccattttaaaatggacaaaagatt

SEQ ID NO: 131820 - DNA, 124 bp, Homo sapiens
accatggagagggaacccagcatttcaaatagctgctgctgctccggtgaacttggggaaagggagctgaggggtgtctaccctctgcaccagactcaagtctccctcctagaataggagcgag

SEQ ID NO: 131821 - DNA, 472 bp, Homo sapiens
tggcccaagacaatttttcttcttccaatatggcccagggaagctaaaagattggacacccttggtaaggtctaatccctgttataaatccatgtgtgagtgtatgtctgtgtgtaagagagaaaaagagagggagagacagacacacacctcctagtggtcttgcttctctgactgaagtcagtcaggtgcaatgcctagggcacggttctttctctctgcacctttctctactttggacgatacgtcttctccctggctttaacttgtacccatttagctgacttcaaaatgtccattcaaagtctggttcaagtcttcatatcaggtctgctttccaagaacctgtaggacattcctgctcaggcaaaacaccattccatcaaaagcactgtgtctaaaacttaactccctcactcccggccagattctgtcagaatttctcccatctcctaagctgaagacaggtagg

SEQ ID NO: 131822 - DNA, 214 bp, Homo sapiens
tatgtgttggagcaggcaggaagatctcaggtttctgggaccagggaatgaagtgaggtgggcaaagacagtgggatatgatcattccggagagcagggtctttttgtgatagccctggatccttgccaccttgggtgagaggaaggagaaagtagaggagtgacatgatgatactctcagagtgccttttttgagagggcatccaggataggc

SEQ ID NO: 131823 - DNA, 255 bp, Homo sapiens
tcccaaagtgctgggattatggatgcgggccaccatgcctggtctctaaattcttactgtgtgattcaaaatcctttttgacctatcttgccccactttttcactatagcactcatcacacctgtgccattctccttcgctctagccccgttggcctcttccccaaacgtgtccccattctcctttctccttagtcttgttcaaacaaaccctttgtctggagtgcacttttctttagtcattcttacccatctt

SEQ ID NO: 131824 - DNA, 483 bp, Homo sapiens
cagacccccgcttctcaccaaatatttggtcttcagtccatccatccaaacaatgggagggaaagagaaactgaagtctggaggtgggagcatgggatcccaccagtgtcctgatacccagaggacagagaggttgggggagccagaagctctgagccttggagcagtactcaccctgtgaaatattaacctaggagctggggggaaaacccaaacaaatgccctatttacagaggctagacgctttccaggaggcagcagatcaagggccagagactgggggtgtgaggggagtcacagcaagtgtggggatctccaggtggtcgggaaacaggtgaaaaccagacgccacctggctctgaaaagtctgcagagattaaatctatgagttgggttatgtcagaaagatgcagacacacaataattggggagtgtgcctcacagctaggtggctgctcatgatgctggagacagagaggcctt

SEQ ID NO: 131825 - DNA, 899 bp, Homo sapiens
gagctgtgttgctttgggcaaccatttccctattctgagcctcagtctatcctgaagagggagcaatgctgatagacttgttgtgaagattaagcaagataattaacgtagagtaaatgatagtatgttctcaataaagagtaagatactcttatagagaaggcagaaatagggaagtatccccctgctccctttctttctttctttttaactttcaataacaaactctacagagcacttacaacataccagattttgggttggatgttaggtatttataaatgaagcaaacagccacatatgtgggaagcacagatcttgaatgagtaattactcagtgatgaggcagttttaggatggggaggagtatgatgaatatacaggaggaagatttgttggtgcctgggtggcatggggtcgtcagacagacttgtcttggggtaatatttaccatgatgatctttagagaatacccctaatgcccagagtattctcccacactctgtacagccttagccaaggttctgagagactctttccatgcctttgagcttttctcctttgtggatgttcttcctttctgggatgagattgaatgagtagatgagaagaaaaagaggcaaaaaaaacaaacaaccaaaaaaatttggccctgcccctaagaaagaactctcctccagaacccctctcggtgtggcggccccgagccccatattgtgatcggcacaactgggcccaacagcgtggtcccaaagagaaaccctgggacagagaaactctcggtgtggtccacacaataaaaaaaagcgccgcggggcaccagccgtctctgaaaaaccacaagagggctcccggcgggcaacggagcgttccacacgaggtgccacgggagccaataa

SEQ ID NO: 131826 - DNA, 248 bp, Homo sapiens
cattattcacatgtagtgacataacttctctctgttagtctagaacaggacaagttatgaaccaccactgaagaactgagaacatagtcactctattttctgtcttctgtggttcagagaagggatcctgattgaaaaagtcatcagctctgggatggtgcctaaactgatgataatgtttgttttcaaccttatttctaaagtagcgaaatagccactgctccccaaacaggaacaaagataggctg

SEQ ID NO: 131827 - DNA, 780 bp, Homo sapiens
ggctctggaggcggatttgcaaaagcaccaggcgtgggtggagcagtgtcagctctttggttggtaatagcatctctctgcctggaattatctttccaagtctatttctctcaaaattcttttcatctttcaaggtccatataaatgccacgtttcccatgatccccttcttgatctttcaagttagaggatctcacttctctgaaagtactacagggtaggttcagcatttcgtttgtaactcttatgatgctgctctttgcctacttcaaactgttgctaatcccttaaaaactcagcttcttttcagtgcatgccatcaggatattgtaataatctactgaactcctgggtcacttcccccacattctctgaaaatttagaagcctgattcattctcttggttttcaccattcctactgtcatcagtcctggctattccatgatgtatggagacaactggccctcagtttcttgtccactcatttccaatcatcttgttttccagtccacctcagtcatttattcccatggttaataccctagccctggtcatgtataataaatgggctccttgcaaaacctgtatattttgcacctcacattgactatcacttcctttccaaaatttatttcctttttttttttattttttgagacagcggagtcttgctctgtcacccaggttggagtgcagtggcaccatcttggctcatcgcaaccactgcctcctgggttcaagtgattctcctgcctcagcctcctgagtagctgggatta

SEQ ID NO: 131828 - DNA, 465 bp, Homo sapiens
taaatagagaaaggtggattacttgaatacactataggtataggtttttacttcaataaatactgttttatcttcagattttctttattccttttactttccataataataaatgatttactaacttcaataacgcatataaataggaaccttaaaaagtgatagtgtcttggtaatttctcacacattgaggcaggtttgacagataatagattagtttaaactaaagtttttattaccatcttagagactgtaaaagaagagtaaaacacactgcacatcaaggggctatgagaaagttgcaggtaatctcttttcaacttatgaaagcaatgggagttcaaatgcatgtaagacactgagccttgcacaataaatatggaacaaagtaataattagtttctctgatcacttgaaaataggttatcaaccacaataaataacttattttgaaaaaaatagttt

SEQ ID NO: 131829 - DNA, 756 bp, Homo sapiens
gaatgactataatacgttgtctttcttccatgaaagcatataatgttctcctacaagcttataaaaatgtctctatttcacatgtttttaatgactggtatatagtacaatggacacaataaatatttttagctgatttctatttcatatccatgctattgccccctctgagggagttttgtcagctttccaccagccacaccccttaattctttcagaactccagtgctgcttgagatttcctggtttaatcaggccagtagcctattcatttgcccacatgcttcctactttccaatcacttagtgcagttttgtcacagttgtgttaatcccatttctcctttattgagcgtgcttctccaggaaatattgccatcatcactccccacaaaatctagaaggtcactccacacaccgtcaggacatgttgactgagtaatgctgctgaatacctacaaaaagaataatttttcaattcattaactttttgactcagtataatgaaagacattaatttgaaacatctacaattgcaattgcctctagtaaactttaataacaatgtatttatcaaagtgcgattcaatcaccttggggagaaagaaagcaggaaatgaagttgaaacaagtaagtacccttcagagaaaacaagcacttgttgacagctgactaattgaagagaaagaaggcattcttttttcaggaacacaggagacaaagatgaacaaaagactgtctcagagacaggaaaaa

SEQ ID NO: 131830 - DNA, 140 bp, Homo sapiens
ttctgggattacaggcgtgagccactgtgcccggccagtattatactcttaagggaccataatcatatatgtggtccactgtgtatgaaaggttgttatggggatgcatggctgtattgtcatacatggtgctggtaaga

SEQ ID NO: 131831 - DNA, 452 bp, Homo sapiens
tatgaccatgtgcctcttctcagtctctcagcacgttaggcctaacacagtgttaatgagcgaatgcacagtgagtgaaccaaccatgtgggtgaaacgtcctctccttttcatggtcgttagttggacacaataggattgtcccaatctgcccactcacttaggtacttacctttgctgttctttttgctggggtcatttgcataaaaagggcagagtgacatggctgagctgttggaagctccattgttctgtagtgacttaattgttggcttgccctggacaaggctttatgctgatttggttctaagcgtgctcctgcttacccaggatgtggcacaaatagaacatccactggcttccaccagtctgctgaaactgctctctaagtgtcactggtgtccttctaatcaccagagcttgacttctgctccagcactgccgaccatact

SEQ ID NO: 131832 - DNA, 141 bp, Homo sapiens
tcatcaatgcatgcccaaactaggaggtgaaaatttgatgagtcaaaagatatgaatatagtccgaaaaaatcgccccacaattacttgttcatttcaaaggaaatagagcaacctacggtgggaaaaccttacagatgcc

SEQ ID NO: 131833 - DNA, 530 bp, Homo sapiens
ccccgccgtggacgaccgcgatgaggcccagcccgaggtgatcgtcctgagtcgcttggaccccggcgatctctccgtgcaccgggagaccacgtggaagacacggctgcggcggaactcctacgggaactgcttcctggtgtgcggcatcctgtatgccgtggacacgtacaaccagcaggaaggccaggtcgcctacgctttcgacacgcacacgggcaccgacgcacgcccccagctgccgttcctcaacgagcacgcctacaccacccagatcgactacaaccccaaggagcgggtgctgtacgcctgggacaatggccaccagctcacctacaccctccacttcgtggtctgagtggagacctgtgctccccggagaggggcagcagtgcgggaggggctttgcacagcagctcctgcaactgacccagtccgcaaatatttattgggggccagcccagggctgggactgggcatgaggtggtcaccaggattgagcttcctcagcacccagtgggtaatacttg

SEQ ID NO: 131834 - DNA, 458 bp, Homo sapiens
tgtgtgtgtccaggagtgtgtgtctaggtgtgtgtgtctaggtgtgctcgttgggaactgcttcctggtgtgcggcatcctgtatgccgtggacacgtacaaccagcaggaaggccaggtcgcctacgctttcgacacgcacacgggcaccgacgcacgcccccagctgccgttcctcaacgagcacgcctacaccacccagatcgactacaaccccaaggagcgggtgctgtacgcctgggacaatggccaccagctcacctacaccctccacttcgtggtctgagtggagacctgtgctccccggagaggggcagcagtgcgggaggggctttgcacagcagctcctgcaactgacccagtccgcaaatatttattgggggccagcccagggctgggactgggcatgaggtggtcaccaggattgagcttcctcagcacccagtgggtaatacttg

SEQ ID NO: 131835 - DNA, 628 bp, Homo sapiens
gggataattcttgatctcttaaaattggcattgtcttgtgtgtcccttaatttttaaccttattctatgctatgtgaaggcgtgaattaaatcatatttctctcctacatccaatatctcttaaatcccaattttgtttctcttcatctgaactcttagagtacttatttgacaacaatcatagtcagtctgtgtttctaattactttttatatgtttatatagtatataagaagattagatcatatgctgtataatttgtgtaaatttgtacacaataggcacttaataaattgtgctttattgaaattaaaaataaaattgacacttattaatgataagaaccttagagatcaaatggcccattttccagatgaccaaactgaggcccagtttctttaatgattctgccaaggtcaatctactagttacggacataactcagatttcaaaccatttcagtgacctatccaagaagaaatattttagaattgctgtcattagatttttagttagtactccattttaatgtgtcattaaacaaattttaataaagttgattgaaattagagaatagacttttgtttccgaaaggctataaatcacatagtaatttagcttcaagctca

SEQ ID NO: 131836 - DNA, 566 bp, Homo sapiens
ctaagatctctgatcccccctgcctccaagctgcccttttaaggacgatgtgattatggttgggccaaggggacatgagcaaagggacttgtatggctggcaggtggagcacgaaaggacggggtgcatctccccctcctcaggccaggctggaacagatggagactgcacaccagccacagctgagcaccaaataaaaatcagcaggtctctgggaacgctgcaccccaacaccagcccaggactcccgaggtgggcttttagataggagagagaattatctcctctttaagccactgtcactttatgttcctcaaaataagacctcttaacacctcccaaatctgcaccgaactaggctgcatggctggcaagctgagtccaagcacatcagttccaaatatgttagtgccagttgatcggtctgttctcatacaggctggcaaaaacaagatttaagcagcaatttaagaaacagtttttttgaaagaggactctagaatattctgggaacactgaatcatatgattttagagctcacatgagtcttaagatcatgttatcta

SEQ ID NO: 131837 - DNA, 355 bp, Homo sapiens
ccagaaacagtttagattgtttaaaacagcagcattagtcatccagcaaaatttcagagcatggactgcaggaaggaagcaatgtatggagtatattgaactccgtcatgcggtactggtgcttcaatctatgtggaagggaaaaacactgagaagacagcttcaaaggcaacataaatgtgctatcatcatacagtcatactatagaatgcatgtgcaacaaaagaagtggaaaatcatgaaaaaagctgctcttctgattcaaaagtattatagggcttacagtattggaagagaacagaatcatttatatttgaaaacaaaagcagctgtagtaactttacagtcagcttat

SEQ ID NO: 131838 - DNA, 422 bp, Homo sapiens
tgtgggagttaaaaaagcgatctcatgaagatagagagtagattggtggttaacaaaggctagaaagggttagtaggaaggggaggatgaagagagattgattaatgagtataaacatacacttagaaggaaaaagacctcgtgttcaatagatcactgaggtgactatagttaactaatcaattgtacatttcaaaatagctagaataattttaatgttgctagtataatgaaaagatcaatatgtaaagtgatagatatcccaattgccttaatttgattatatgaatgtatcaaattaacacatatacccccaaaatatgcactaatagatctaatacatatcataaaattaaataaaaaataagacgtgaaaaaataaaaaaataaaattgccaccttaccaccactaaaatctactc

SEQ ID NO: 131839 - DNA, 195 bp, Homo sapiens
tgttccataaatgttactatatgttggtgaggaggagctttgacttttatttttatttatttattttttgagatggtgtctcactctgtctcaaagagcttcagtgcagtggcatgatcacatctcactgcagcctcaaacccctgtactcaagcgatccttccatctcagccacctgagtggctaggactacag

SEQ ID NO: 131840 - DNA, 465 bp, Homo sapiens
gactctgtctcaaaaaaaaaaaagagtctctttttttaaaatatttaatatttcatttcaaaataatactatgagttttaattatgcgttctacaaggaaaaaataaaagtccaaattttcactggagaaacattaaacaccaactactgtaactaatttatgcctggctttccccccaaatgctcattgtcagaaaccaaagagaaaacttcccaaattgctgtgactaaatgggcgggcatgcagaaatcccacacaggaagcccctcaacaacagaacagaagaatctcagctttagttctttagtttaaaaaaagtttattcttaaaaaaggcagaggctggcgagcatctgcagtactttcaatatgaacaatggtggaaagccagaagtatttaaacaaaaccaccattccaatgacatcttttgctcttttcttgatggatatccaactgtttaagcc

SEQ ID NO: 131841 - DNA, 771 bp, Homo sapiens
tatttgttagtatcattatagtcatacaaaagggttattttgggggtttttttggtcctctttaatatacgtattagtaggatagactttatgagtcacagctcaactgagaagatataatgtgattttaaaatatagatttttcttctgagactgtgaaaggtcagggtttgtgaagctagagtcctggaaagagaatgagtgatttataatactcttcagagtgcctaaagagatttttaaatttcttcatggtcttagtccctaagagctttccttgaaatagctttttagtttctgtgaagcctgtagtctttcaactgaaagcctgattgaagccatcacactcttactaggatacagaagagaaagggtgggattttgaggatgataaaaatggataaacttagaataaagggattggtgtgacgcctaagggtttgattatagtcactctttttaaaaaacactactctttcaggaggaaaaggaaagtaagattactatctaaaatacaaaagaaaaaaaaaactaacctgcaaagatgaaacacagggaaccttcaaataaaatgctctttatggtgcctcctgaattatgattttttttcatatttgagatctatttctatactatattcaaatggcttaaatatcctagacaaaaacttgtagttgttcttgaatggattattttatgttacagaattatgaggatttatctcctggttactaattgttatgcagttgacaatatttttataagtgaagc

SEQ ID NO: 131842 - DNA, 733 bp, Homo sapiens
attttgattgggattggcccgaatctatagatttgcagagcaataccttaccctctgttattttaaatctaatttctctcaatgctccagcttgcaaagaggctttttttttttctcatcatgaatgggtgctgagtgtgtatcaaatactttttctcctttacttcatatatggagttaaattgcatttgttgactttcgtagtgttagccaaagtttacattcctgaaataaatccaacttggtcatgatttattatcctttttatagattgctagatttgacttaccatatttaagacttatgtgtctgtctttatgagcatttggcctataattttcttgtaatatccttatcaatttttagtaacaagattgtgctggcctcataaatgcaaccggaaagtggttcctctttaattttcttaaatgtttggaagtttcactagtaaagccatctgggcctgaaaattttgctatggaaaggtttttaactacaaattcaatgtttttggtagatataggactactcattttttctagtttttgtgtctttggtaatatattttattggaaaaacctgtcaatttcatctgaattttcaaatgtattaccatgaaatcgttcataacatcttaagagcttctgtctgtgggatatgtgatagtagttcatttttcttccctgacactaataacatcatctaccactaaggttcatttctattcgcaaaa

SEQ ID NO: 131843 - DNA, 382 bp, Homo sapiens
gcaaatagttgaataactttgttcctagttactgacatacaattcttaaaggaccatttagcattttggccaacaatgagtaattaggattagtacctttttgttttacagagtaactgagagttttgtaacatccagagatggtactagagccaatgagagatctgttcctagatgcactatttctttgaggaagagagagaagagaagtgtctggttgggggtgagggggtgcagacttttttgtttctatgtacagagcaaagagatagagtcacaaggaaagacaattaatgactttgagctcaaccaactgaactgcctttcttggagctgcacctggaccaagtttattttttaacaattataataacgatgattt

SEQ ID NO: 131844 - DNA, 333 bp, Homo sapiens
cgtcgcctctctctgatggcaatgtagagtggattagaaacaacaagaatagcagcgggattgtgccattgcactctagcctgggagacagagaccctgtctcaaaaaaagacagataagcagtgataagatcctgtaccttctaaaatctttatcttaagcgggggtagagtgttacatgataagataggcattttgaaagcatctctctggtggcaatgtagagtcgattagaaacaacaagaatagcggcaggaagacaaatttggaagctgttgtagtagtttagctgagaggagatgatggcaaggactatggtagtccctccgatga

SEQ ID NO: 131845 - DNA, 471 bp, Homo sapiens
agggcactggggagaagcatttatgaaggtcaaagcccaggagcacagactaactaaaacattgagaacaaagcataaggctatcccacaccttacactcaaattagtaggggtcttgtataataacaggttaatggaatttaaaggactgcacatctaagactttatttaggaagaagtccttaaggaaacccaaaaacaacagtgaatacaaaaacaaggaccacagaagaaatgttagcctctgatatctacagttacatcaaactgtaaacatgtcacataagcaaacttggttgtttcagctacaattgtaaacaaatgaatttgctctgttgctcattgaaaatcaacataggacttgcaaggacaaacatttgaaagattacctctttttctggcttagcatcaccccaaaagcttctgaatttcaagaatgataaagcttacatttagctgctcattccagat

SEQ ID NO: 131846 - DNA, 270 bp, Homo sapiens
taaaaggtcaggggtctatggctagttttttatcaaaaaagttggtaccaacgtggcacaatatacatatccagataggtggagatattattgaaattctagttatgtaatttttttccctataactatttgcagaacgtggttcaagtggaggcggcttagcccagtggttagttaagaatgctgaggttttttttttttttttttgagacaatttcactcctgtcgcccaccagccttgtccctaataaatttaggtggtttctttcc

SEQ ID NO: 131847 - DNA, 515 bp, Homo sapiens
tagagcacatatgcaccgagaactctactagatgctaatgaaacaatggtgacaaaacaggctgtccccgatccagctcacagcgtactctggtactctctgcctggtgagttgatttcatgaaaatttcttttgagtggtttctttgagcagagcttaaagaggatgaaaggaggacagttgtcatgagtaataggtgaggaacatttacaggaacagaaaattgtctgaagactttagggacatgtcaacacttagctgagaaaatcatgatgcttgcatgcctaactccttctacctggaaatcggatgtgagcatgttagagatttcaggaagagtatggtgtttaggaacagaggcacttgccacacagcaaacgtcagccagcaggaataagcacatagtagcttcaggtgtgatcaccagccatagattctctgttccccaccccactaatactgggactttttacacacctatatttgcccatattttcagcagaatatcctgtagt

SEQ ID NO: 131848 - DNA, 272 bp, Homo sapiens
tcccagctcttagggaggctgaggcaggagaatggcttgaacccgggaggcggagcttacagtgagccgagatcgcaccactgcactccagcctgggtgacagagcgagactccgtctcaaaaaaaaaaaaagtgttataacaaatcctaaaagtacaaaaatgtaaaattttaaatgacctgaaatttacacattttaatagtggaagctcctaaattctttcttttaaaagccccaaagtgtattggccgagtattaaaagtcaaggttt

SEQ ID NO: 131849 - DNA, 211 bp, Homo sapiens
ctgtggagacactgccctctgtgtgcctccgtgcctgagcatgagctttatcactagccgaagccttcccgacaggctggcatcactcacctggatgcagggcagatgctgaggggtctgttttcccttcatcagtttttccctcccagcatcaatttctccttttctagtatcaatttccccttcccattatcaatttccctttcccatt

SEQ ID NO: 131850 - DNA, 815 bp, Homo sapiens
aggatccgaaaaaatctcccaaaactcccactctgaaaacttaatgcatatgaattgtaatgcagagtatgtgttgtagtagaaactgtgctatgatgtgcagtcttactagatggtctccaagaatagatatgcatagtagcgagtcatcaagattttcaacaagaatacataggcattgatttgtcacttgcaattctagattgtggtctatgtccaaatgtcttcctgtgattgtctctaatcatatagtctgtcactccaggactcagcgcttcgcgtctccttcgtacgtaatgcttcttcttatgcaccctacttgctgtttgatcgcgtcgaggctccagatacctatacctgatacaatcggtctaggataggtctgttacctacggaagatccttcggatctatctgaagcctacgtgcattgtacttctttctacgaaatacacatagatgccctcgcgagaggaagctctagcagttctttgaagctagaatcactacattaggagttcgttgagggtctattacgtggtagtctatcgaacaatggagatccacatgcagacgctctaagtagtcttagattaagctccgtccttatgttcagaaggtcttgtgggcagacattatgtctagcacagagcttggcatggaggagacatacggtgcatgtgtgtttggggtagccaagtcattagagagtaacttagttcactagctcacagcccttgagctgaagctatatgctgacatggctactgatgattatgacagagaatggtggagctttgtgtggaggagtccctg

SEQ ID NO: 131851 - DNA, 624 bp, Homo sapiens
tggtatgcaaaagtaaggtgtgccatatgctgtgtggtgaaggtatgtgtgtgtatgtatgcgagcgtgtcacgtgtatgtaagtgtgcgtgtgactgtgtgtatgagtgtgtgtgtgtgagtctgtttgaacactattccttttagagctgatcaaatagtcaattacagcattatagggaggtagcagaatcacagagttcctacaaatacactgtgatgtagcgttggatctttagatgcctcttgtctccgaggacttgcgcaaggaggcttggctttataaggatattattaggttgatgcctcattctctcaatttacctgccaggcaagagacagcactcactgggagcagtctggccagaactagccactgggaggtgcactgaagaccatgctgcaggcttgactttgggcatacgctactctgagcctcagtctctttatctatgcagtggcaacagttaattcagctctactttctaaagaccagagaggggaagtttactgagctcaggctctcaaccttctgcaccaaaacttccaatcatatgaaagcctggcatgccagcaggcctgatttattacatggtgagatgtggccctttaacttttagaggg

SEQ ID NO: 131852 - DNA, 504 bp, Homo sapiens
tccataatgtgtgcccacccccacggtgtatctggctgacagcagttccagcattatagggaggtagcagaatcacagagttcctacaaatacactgtgatgtagcgttggatctttagatgcctcttgtctccgaggacttgcgcaaggaggcttggctttataaggatattattaggttgatgcctcattctctcaatttacctgccaggcaagagacagcactcactgggagcagtctggccagaactagccactgggaggtgcactgaagaccatgctgcaggcttgactttgggcatacgctactctgagcctcagtctctttatctatgcagtggcaacagttaattcagctctactttctaaagaccagagaggggaagtttactgagctcaggctctcaaccttctgcaccaaaacttccaatcatatgaaagcctggcatgccagcaggcctgatttattacatggtgagatgtggccctttaacttttagaggg

SEQ ID NO: 131853 - DNA, 791 bp, Homo sapiens
agggcaactgccctaattcagatagatttacagtaacctacgtacagtagatgcacatacacacagacacccctttgctggagaaacttaggaccctgtcagccttttaaaggaaacagcaggagtggtgtcctaaatgatgttcatgcagctgctttaccatgttcacagtcaagcccatgcatgccaggttaaaactgtggaaatcaaaagtaaattcactcatattttaatcattttaactgagatttaaaattagaagtttaaaccactatatataaagaactaatcttttcttaataccagttctttccatagcatatgctttgcaaaggcagcatgcataaaatatttaaaatgagaggacagaatgttttcacatttgattcaattttaatataattcctaattgtggtaacacagttgagatatgtattatgagttatgggaactaattgagaaaaggaagttactctaatccacgtatgttaagagaatattgagttttcttagttgtaaagttggggagatggcaccttctcagaggattgtgaaaatatgaggaagaaacaaaacagtgcatgtaggagcacagggccacacaaaggcattctattgttatgctcattctgcttctgtaatgacttttcataggtcattcttgtgaaccattttgttttgcaagcaaccaaggaaagaacatcttaagtgggaaaatcagtggtggttgtgaacacttaggagaatagccaatccacaggcaagaataatggtattgttttgtagagctt

SEQ ID NO: 131854 - DNA, 762 bp, Homo sapiens
tctcacttggctgcttctagcaaagggtagagttctcgaccttccattcgcattgtaacttttaattttatcatgtgctttgccatctagagatatgagtgattaatctagttagattttaaataatgttaactctagattttcattggacttttgcattttagcagtgctacttttttttgagatgttccttctgaatatctacttgaattttcattgtttgacttgaacttctgaagagtgtgcatttaaaattctgttcttttagttgtaaaggaaagcattattatcctttcttctgctattgattactaaaaatgatttggctgcaggaaatttagcactgtagaagatttcatttcatagtctttaaccaaaaatatactagagagatttcttttcaagatatgatgtctgcaagagctaaatcagaagccctccctgcataggtcagatttttccatttctaagttacttaggtcttttcctttttggaggtcttctcttctgcaaagaaaccaatagttgtttgtgcttttacattacagaagacatgtaactaatgtggctaatctgaacattttgggggcatggtaattacaaagatttatcttgctactgaaatctcagaagttgaacataatgaaagcccagaactaactggcacagctatcctggcacatagaataagtttggttgaaaagaaaatcaacagggagaaaacctgagccgagagacagaaaatgaggtagatctctaatg

SEQ ID NO: 131855 - DNA, 763 bp, Homo sapiens
attttagttttgttatgcacactgtctttagaggaggccaggagaatagatctaacttacttttcttctcagttaaactcattgtcattgtgttagtaaccagagtttggcatgtgactcagtggaaatatcaagatatcatttttcttcataagggcacaattacatttacacttgtgatgaaaacttctaacttagaacagttcaaacaccaaagccttgcttttgaggaactatttaattgatattatgatgtagagttttgacataattttcctttgcgtgatacttagataaacattttccctaaaaataagattaaagatagaagagatttgatttttaattttattcgatcatttaattaatactaaaatgcaaataaagtacatttagaaaaaagtaactggtatttcacttccttgtgccaacatttttctcattcctttatctgtagcaggagtcattactttgtgagatactatgttgaatagagctgtggcctaagtcaggtattatactgcaagtcagagggtctgaattctattcttggctctgacatatctctaagttactctaatttctctatgtgtatgccagtcctaaaattagaattaaccccctacaattagaattaatcccctaaaattagaattaactttccttctagctcaactactggggatgttgggaggactcgtgaaagaaaccaaataccgttacttgatgagagaaaaggaaaagggtagttaagggagatctc

SEQ ID NO: 131856 - DNA, 339 bp, Homo sapiens
tacacctgagctgcctgcctgtttctggtattctgtgggagggagtcgtgagtaacagccctctctccccatcactagcccaaccaggaggatgctcaggtcccaaccacacgccctcatcagatatagatcagaacattctctctcccctcccttccaagatggggtgaagttttgggccaaggagattgctaagatttttattttagaagttccctgattggagatgggcaagactggctcatgaactctctgtggttttgaagatagggtggcatgagaacgtctaaagcctatgtctggagttacgtcgtactgttaggatggaaaacaggctct

SEQ ID NO: 131857 - DNA, 150 bp, Homo sapiens
ggcagttatggtccttcatttgttgatcatctgctgtggcagcaagtgcctcatgcccttccattgcaatgcaagccttccaccctcccctcagaacagaatgctgatgtcagcagcagcctggtgctaaatccaatttggaaaaaaaaa

SEQ ID NO: 131858 - DNA, 984 bp, Homo sapiens
gcttccagaaaagaaaagagcctcagatgggcatgtgtataactccataaacacactgcctgtgctcagttctccaggtaaggagggcaccgtgcttgcagaaatcccaccctaagggaagagtcatgggaaagaagtgagcctataaagtccaaggtggcccaatgtaatcacaagggtttcttaaactcagaagagggaggaagaaaagtcagggtcagagtgatgtgatgaccaagacttcacaactactgctggttttgatgacagaagagcaccatgagccaaggaatgcaggcaacttcaagaagctggcagaaggaaacacctgtctaaagaacaacgtagagctcatcacacagaagtgagccagctatctctgccaggcagagtagagttctagcatctgtgtcatcaggccaaatgatgtatgatccagtttgatttaatttacttatcattcacattggagagaattcaaaatatgaagacagaacagatcctgattaaagaaaggaagatgcagagtgccctgcactgaatttgtcaccagccagcagagggagtgtctgaagcttcagtgcacgcaaagaataactgtggcaggagaacctcttgacttgcacggaatatttacctacaatggcactggcaaattcacactcagaagacactaacattactccggattgcgaaaatggcccagtagagtgtcacgggagtggcccatccctggatgtatgtgaactgagttgagaagcatggacatacaattggctcaccaacctaaatagccgaaacaatcagtccaggacgcgcacgaccaccacacaccgagagcgagggccctgcaacgacggcggaacaaggaaagggacaaccaggcaacgcgaaccacccaaacggaccgcccaaaagccaacacagcctgcaactcacacaacaacacaggacacaagcgacagaaacgaacccggaaaacac

SEQ ID NO: 131859 - DNA, 349 bp, Homo sapiens
  misc_feature (77)..(77): n is a, c, g, or t
cccactagatgggattgtctagttgcaggaaaacaagctcagggctcccactgattccacatgatgatgtgcctgcntccccattcgccttctgctctgccatgattgtaagtttcctgaggcctccccagccatgcttcctaaacagcctgcagaacttgagacgtcttcagtgtcaaagcagtaccagcatattctcctcacggaatatttggagagaagccaattcctgttcgaggagcagctgcaactaaggacgtgacatggcttaccgtcaatgcttaccagatgctatgatacagcatctatgtttctgtcatgtgatacaggaaacatccacagactcctt

SEQ ID NO: 131860 - DNA, 174 bp, Homo sapiens
ctctgcgaggacgctgcaaccacaatcttactccttttctctcctgttttatactcttcgtcccgaaatctgtgtaaacagggtcacattttcagcgcagtaactccatgttttgagctatctacgttgtatttggtaaattgcctggttatgttaataaaattattttctacc

SEQ ID NO: 131861 - DNA, 232 bp, Homo sapiens
ctctctcacccttggtcccacgcgtgttgagagtggtcctgactctgggattcacctccaggctgaggatgagaataaagtttggcagctgtttagagcaagttcctgacacattgttcccttctcaaacttgttctgcccctctggccccatctgcactttctgcctccttgactatagaaggaagaagactggaattttccaaccctgatgggggttgggggagggggtg

SEQ ID NO: 131862 - DNA, 318 bp, Homo sapiens
catctcctctgccacttcagctcttcacatccttggatgccagtgggaatattgctattctctatgcagcatccctgtgcaacgccgtcctcccctcctcagtacccttgccagtgggcacccttctgatgcatctctgtatggtatctccctcctcccctcagtgccccgtgctggcgagcatgccaaccatgcacctctgtgaaattcaccctcactccacagacattttctgtagtggcctgtgattgactgctctgcgccaggaacagaaaaggagaaggaactataatttcttttataggtaattaggaattc

SEQ ID NO: 131863 - DNA, 950 bp, Homo sapiens
actatgtcaatttgataatttatctcacttaaaccctgaagcaaacaagtgtttgcctccataaatgcttataaggcctgttggatggcaggggttggccattcaattcaacaaaaattgatgaagaacttttcatacctaaggcactgtgctggaggcagccatggttctattcctagctttgtaatgggagcattagtcttatacttaaccttccctttttacaactgagccttaaaaatctagagcctttcaaaaacacctgtgattacattaattaaagccatttcagagtttttagcaagcagaatgtcagaaccccaaaattcattattagctttgtctgacataaaccaaggccaagtgtaactgaaactgttaattagtaactttacttcttgctttgtttttactctgctttttaaagagactcgggttttaataagcaggttttaagcaaacaggttacttgactctcctgtctttattaataataattactgttatctattgaccatgccacacactgagataagtactttaccaacattaaggtaaatcttacagctgccttgtgagttaaggactgttatatccatttgctaaaaaataagacaactgagacatgggaagattaaataacttgcccagaattgcctttctttttttctttttcccccttattgtggagaacggggtctcgctgtattgcccaggcaggtcccagaattgcctttcaagtaggagacctgccatagactcagagtcccaaaccctctgaccccaaaactcagatttgcaatcattatattgtgctattatttagactgggaatcagcaaacttctgtaaagggccagatagtgaacattttaggctttgtgggccacactgtctctgtcgcaactatttaactctcttgttgtagcttagaagcagtcgtaggctggg

SEQ ID NO: 131864 - DNA, 473 bp, Homo sapiens
tgagagtctccttccggcctggatactgaggaaggtgacttagactttctctccgtcctctgagtcgtaacggacggacacgcaagggccgaggacgggtacaagcagcagcgactagaactgatctgggtgagatctaggcctcagcaacaactgacgcaaaaagattttgttctaggattggctacagctgaaactaccgcgcttgattcaaagctcggggcttgcagcgggaggcagctggctcctccctctgaacccgccccctttggctggcccaatccgctgatcccatcctcttaggccctgcccagactccaaatctaccagaattaatgctcccagcgctgtttgtccactcctgcctatgatttgctgtgtgactactactcgtgggggtaccgtgattagacgctttaaagctattagctatcttgtttaatattaacaatgctactagtgaaaaaaaaaaa

SEQ ID NO: 131865 - DNA, 396 bp, Homo sapiens
ctgctgtcttttctgggtgagtcttttgactgggaaagcctgagaagcagctgacatgggatctttgtgaagggcagcatccatgactccctaatggggtcaaccacacgtctgcgtatcctcaccctccacagcagcatccctgcttgagctaaaaaagtgggcagactgtcaacttgggccttatttttatagctcctctatgataacaattaaacaacaaaattaacatttcaaaacagtcaagtcaaggtaccaggaagtcagtcctatcagaaaaaagtcaagatgcaaggtacaaagggctgagtgccccttccatttatcttgtcattttaattttgtttggtcttagtctttgttctgtgtttggctctctatgctagaaacgatggc

SEQ ID NO: 131866 - DNA, 447 bp, Homo sapiens
ctgtcagatgggtgacccctgtgggtctccttaaatacatatttagtggcctaaatcacataattcatgacctcctcagtcagagtctcatggggataattgttatgaatgacattcctgggctcctgcctccaccataatttgaggtgggatctgagaatctgttatttaaagttccttctgacacaaaagtgtgaggcagcaggaagtgcagcatctggcagatgtttatgatatgccagtttattccgtttatttctggcctttgttgcttctcagaaaacctcaaagatacctgatgctaagggtcttgtagcagttacagtctgagcttgggagttggtaagtttgatgttactttctgactctgggacttagaagtggtgtggctccgtaacctaacaaatcccctggaaatgaagacaacaggacccacctccatgggaa

SEQ ID NO: 131867 - DNA, 172 bp, Homo sapiens
catacctatattttccagagaaacaatggaaagataagtcaaaaattactaaaatgatgcccatagcagaagggagaagagaggataaaatggacaatgatagaaactagacttttcgtcgttttagctttggaactacatgaatgtttcataaaaacaaataaaatttaat

SEQ ID NO: 131868 - DNA, 538 bp, Homo sapiens
ttgggtggcaagggagagaggaaaagcacaggcaatgccaggtgcctgagattcaggacgcgctcagagaactctgtgacaggggtgcagtgactctactgagatcaccctgctggtcaatagaagaacctggactagaacccaggtcttgtaactctaaatctactagccacctcccaaccccactcaatgcacccatgagcctgttagtaccgtaccatatggtctccaatgggagcgggggtcccaaattagttctctactctgaaactcatggcttgggaaggtaccttcaaagatcctctttctttgaaaaaacactacctttgagtttaaaaagattattgccaaacaaataaaaagatgaaaaacctcactcataacttaaaaaaaaaagcaattcaaaacaacgagatcccatttttcatcgaatagactagccaagcaaacttcaatgttgcccacggttgtctagggtgcggcacggtaggcagtctgatattctgtggtaggaatctaaataagagcagccttttgg

SEQ ID NO: 131869 - DNA, 298 bp, Homo sapiens
ccagaatctagtgctaacagatactttcctgtatctttctttagcatctacattaagtcacacacctgttggggttcagtgagcacaagcaactataagcatgatgaggaaggactactgacacaaaccatggcaacacgaacatatttcaagcttgagtggcatagcctgctttaacaatgagcacagaatagtaacatgaaatttccaaggatgggaaaggagggtaactttttttattttgcttctaagagtactgggtggccgggcatggtggcttacacctgtaatcccagca

SEQ ID NO: 131870 - DNA, 593 bp, Homo sapiens
gtcagactccatagctggcaccaagccccctcatctctggctgcctgatgtatctttccaacccagctgcaattcacccgccctcagctgtgagtctcctaaatcatcttcagtaagactggctgctctgtgctcacccaccctgctgcccttactcactcctctttcccaccatcgtctgcctggtgggagtgtcctccctcagcactcagcttagatgctacttcctacttagacccccagacagaggagaccatttcctcctttgtgcctcagtgtagtttaccctatatggatggcaccaatacaaatgtgtgcctgcctccttagaaactgagcccctgaagaacggacccacctttcactcaacttcctggaacctgacaaatagccaacttagaaactatttcttggtctcaatcgagttgagttaaacctaactgaattgaaatatgggaggggcgtggctttgccaagagaaggttaaaaaatctacccctcttgtatatctttataattgacaaatctaaatattgacatatgctaatagcattgtatattacacttcaaaataaagtttttaatatgctgta

SEQ ID NO: 131871 - DNA, 498 bp, Homo sapiens
aaacaccgcaatctcaacaccgcaatcttcaacggacagatcatccagacaacaaaacatcatcagttaaactgtactctataccgaatagacctagcatttacacagctttccattccacaactgcgcaatgcacattccactgaatagcatacggattattctccacaacagactatgcgttaggccaaaaaaacaagtcacaacacatttttaaaaactgaaatcatggccagattgcggtgtttgaaacccgcaatctcaggtagggacttgggaggaaaaagaaaaaaagcagggcctgaatggtcatcatccatgaatctacccttggagactggttggctgtttcatctctgcttaatccagaataacactttcatgtgggactgtggtgtacccaatctcccagtgactccaagtgtatggagaagttaagattttcctggatagcttttctgcatttgactgatccaggtgtggtctggtgttggcagg

SEQ ID NO: 131872 - DNA, 372 bp, Homo sapiens
tcaggactcttatatgctgtatcactgtcttaaagaaccctacaccttctgctaaaagctctcatgaaaaagaaaaaatgtcacaggatacataactcagtaccttaaagaacacaataaaaaatcaactctctttcagacagatttaatggaggggaaaaaaaaatgtttttaacagaggagagagggccgggtgtggtggctcatgcctgtaatcccagcactttaggaggccgaggcgggctggtcacttgaggtcaggagttcgagacaagcctggccaacatggcgaaaccccatctctactaaaaatactaaaagaattagcggggtgttgcagtgcatgcctgtaatcccagctactcaggaggc

SEQ ID NO: 131873 - DNA, 961 bp, Homo sapiens
taataaaaaaaagagggaaaaataaaactgagtacacaatagagaatttgtatctatataaaatgcaatcagatattctcagaaagtttaagttattgaaaattttagcaaattaaaaataagttgtaaaatatttgttttggaaaaagctaatgcagaaattatgaatgaatttctaattttcaccatacatagtggtttatcctaaaattaccactgctataaatttaacattttttgtaaatgcttattatgataagtttaaatacagtaaacatgcatgccaatatttacttggaaaactgcagttattctctatatttttatatctatttattttgaagtaaatacatagacaaacaggaagacaaagagggtggcaactcttatgctttgaataaaagaactgaagaccaaaagacagaactgaaaacgagaatgagacatacaaaagaacaagagtgacaaccgcaggaaaactgaacacgagcttgcacaaccgacctacgaacgaaaccgacccccaacgaacgaccggaacggaactacacatacgtagcggactaacactacaaacacaccgaactgccccccggcgcacgaccaacgacaccgacacgacccaccccacacggccgcaccaacacgaggccccaagctcgccttacccacgcacacgaccccacccgcccgaagactacgaaacgccacgctgaccacgactgacccaccgcacgctctggagccgcccgccacccgcaagacgacacacgaccccgggcccacaacagggggacactgcaccacgacccaacgggacgctaccacaacagcgacacccaccacaactaaacgaacaccacacaacaggccccacacggacaaaccacacaccagcaacttcacaagacaatacccccggcagaccctaaccccaacgcccccaaacgcccaccaccca

SEQ ID NO: 131874 - DNA, 798 bp, Homo sapiens
gtgatcattattattattatttcaaacattaaaggcagacctgagatttttaagtttctttaaggtggtgtgaacttttgaaaacattcagaaattaccagctgctattgggaggaattaaaaataaaaaaggaaaaaacattgggaaacagtatttcattatttatttgtttacttattcatttatttattttggaggcggaggttgcagtgagctgagatcacaccactgcactccagcctgggcgacagagcaagactccatctcaaaaaaaaaaagtcaacatcattccttgatacattaagttttttcagagaaagtccagctatgctaatgagactcactaacatttttcaagtgtattctatgtattacctcatgtagtactgaagacagtcattggaagtatgcagatagggttttacagggaaggatatggagacacagaggatcatagtagcttgccctagggcactcaggtataataattggcagagccagcagccaggcacggtggctcatgcctgtaatcccagcactttaagaggctgaggcaggcggattacttgtggtcaggtgttcaagaccagcctggccaacatggtaaaaccttgtctctactaaaaatacaaaaaattagccgagtatggtggcacatgcctttaatcccagctactagggaagctgaggaacaagaatcttttgaaccagagaggcagaggttgcagtgagccaagatcatgccactgtactccagcctgggtgacggagcaagactctgtctcaaaaaaaaaaaa

SEQ ID NO: 131875 - DNA, 759 bp, Homo sapiens
atctgggtaatgatagaagtgtctttttgtatgctgacaagatgaatggagacttacagtccctagatagctccaggatggagccggttgccagagaaaccaaccacgtgaatagaggattggaactttcagctccacaccgggacttctggagtggggagggaggacagagaccgacttaacagtggccaatgacttaataaccatacctacttaatggagcctcctccataaaaaccctaaataatgggatttgcaggacttctgggttagtgaatatatccacatgctgagaggatagtgcagccaaattctatggggacaagcttctgcacttggaacccttctggaccttgaagaacatatatataccttttcatttggctattcatttctatcctttgtaatatcctttataataaatgggtaaatgtgtttccctgagttttgtgagccattagagcaaattgaacctgaggagggcatttgtgggaacccttgattgatcacaagtacaaataataacctgagatttgcaattgtcacctgaattggaagtcagtcttatggaactaatgccataacctggtagcatctgccctaagtccaggtagcatcaaaattgaattgtaggatacccaattggtgtccagagagttggagaattggttggtgtaggaaaaccctcacatttggtgtctgaagtgatgaaggtagaagagacagtttttcactttttacaaatgatcaaggctggga

SEQ ID NO: 131876 - DNA, 372 bp, Homo sapiens
agaagataggaaaagaaatatcccaataatgggatgatagattgcagaaagattagctcttcgttctattctcaaatggtttgaactctgaggggatgaaggagataaataatacccccaacccttaaaaacatttgtgtagaaaaagtaaaagaaaacagaaggagagttacagaaaaagaaatgtttctacaagcatacaccccaaacttttccaggataagaaaattagaccaggaatttggacatggttttttttgtttgtttgtttttgttttggtttgtttgtttgttttgagacagggtctttactctgtctcccaggctaaaatacagtggcgtgatcacggctccctggctcaaagcgatcct

SEQ ID NO: 131877 - DNA, 190 bp, Homo sapiens
ctcagcaattcccaaactaaaattcattcttctgcttcctccaaactgggtccctcctcagctttgctagctctaaatgaagagtgggatcagtcactcaagctcagtttcagaaatagcctctacttctttctcttcaagaagtcctattgatttttttccttcaaatcttctcttaaatacaatcttt

SEQ ID NO: 131878 - DNA, 467 bp, Homo sapiens
tccaaatttgctgaaataatctcatctgtttaatgacattgtttaaacaaaattacctctgaatttgaagttgccattttctcagatcagtgtggaattgtagtaattttaaaattctagaagtttcttttgtaacctttattatttgatatgtattggatttatttgtaagatgtcaatagattccatttcttaaatatccaactagaaagcatttaattgttcttttaacatttgcgagtgtggtgggcataatttttaagagactcacctattgaggagtcatcgtacccaaacactgatgaccaggcctttacaaagcattttggcctttatttacattctgggtacaagatttttcactgcaattaaaactataaccccaacttcactgaattatctttctgttaccaagactttttattcagagccacaacgggattaaatgaaaatgaccgaagcctcca

SEQ ID NO: 131879 - DNA, 1598 bp, Homo sapiens
tgctgggattacaggcatgagccacgacgcctggacaactttgtcatttttagtgatactcagatatgttccattgcagaaaattgtattttattagttattattgtgttttttggactcatctacatgggatgagtcctaagagattcagtttaaaaaagtttttttaggtacattaaggacattatttatcttttgtaacctgttcatgtctatgtctgttacttgcatcaggcagtgactcaaacaattctcaaaaaacagaaagtatatttctcttaaagttggcttattaagggactatgaggtgatccaattcaataagaaccaaactagacctactaagattagtcaggactatcagagaatttttcaaatacattcaccattaatccagagataattgtgaatcccaacttttaccctaagaaaaattattgcaatgtagtaaagttgattctgtctttaaaaagaaagaggagcacaatgagatttcctgtggccagttgaagttcatgaagtttgtcaaagaatttcacatacatagtaaatcttctgatagcatttagttccaatcacaataaattatacttgtctctgtcttctataattaatctcttctctctttaaaaaactctgtattttctgtataaaaatagtgattattggctgtgcacggtggctcacgcctgtaatcccagcactttggcaggccaaggtgggtggattacgaggtcaagagtttgagaccagcctgaccaacatggtgaaaccccatctctactaaaaatacaaaaattagccaggcatggtggcacgcacctatgatcccagctactcaggaagctgagacaggggaattgcttgaactcgggaggcggaggttgcagtgagccaaaatcattccactgcacttcagcctggtgacagagcaagactctgtctcaatataatataattatacaattataacatcctaagtatgtatttgttgggtacactgtcatatttttatgtttatgctgtaaaatgtttaaatcaagctaagtaacaaattcagcacctcacatacttattatacttttgtggcaaaaacatttaaaatatttttataccaattttgaaatatacactgcattattatttattatagtcaatattctgtgcaattaatcactaaatcttatttctcctaagtgaaacgtggtacacttccatcaacattttttctttcttcaaccacttcttccccagcctctgttacgtttttacttacactaagttacattagggccattaatgtaattaaagaaattaaatcttttggtatgcaataatgatatgaacataaataatgttaaataactttattagaaagtttgactaattaggcatataaataaatgggcagcacttttggctagtaaactaaaaatacccattattttcaaacaccagacaattattttaaatggaaaggttttgggcctaatatatgtcactgaatttatgaaagcacaaacccaggagggtagtattttctgagcattgtaagtaacaatgaaaattattgactaaagtgaattcaagtaatatgt

SEQ ID NO: 131880 - DNA, 856 bp, Homo sapiens
gctggcatcctctgtgggccatactcttgagagttctctccctgtccactgggctctgctgctcctccaaggggcagggggctggggcctccgtgagggcacctctcagcagccgtgggcactgggcctgtgggcgcctgcggagcacgagtgttcccacctgtccctccccaggctgcctaagcatccacgcctctgcagccacgctggcccagatgggcaggaggtgcacccagagggccaaggaacacacgatgtcacccagctgccccaataacaacaagttaatgatgccccatctgcattgtctcctgtgataaacgccctctgtctccatgctgtctggggctgggctgctcccggcctggtttggtcttcgtgcccagagccctctcatgcacctgtgtccagccaggcaccctccccgagaggcaccagacacactgaagatggggagtggggctctgaaggtccaggtcctgccctgtggtggtgggcagaggacagtgtggcctgtgcccagagctagggtggctcccgggtgagacttaaaatggaacggcctgccacctgaaaggcagggacttcctgatggcactcccctcatgagcacacacacattcacacacgtgcatactcaaacacgggcacggacacgctcacatggaccctcgcacccattcatgcgcatgcaaacaccacgtgctcacacagatgctttggcatgcacacccatgcagaactgctcccgtgcacacacccatcgctgcccttgcacacacccatgcatgctcccatgcacacacacccatacaggctcagttgcacacacccatacacgctcccgtgcacacac

SEQ ID NO: 131881 - DNA, 398 bp, Homo sapiens
ttccctacccagctgacaaaccatctttctaaaatataactatgatcatgccacaccctgtttaaaaacatttgatggcttctttattgcctagaggaagaagtctcagctccaaacatcacaatccaactctaattaccactgaggccttatcttctgccactatcccctaccttccctgctttctggataaatttcttgccatgccccaagtgattaatgctctttctcgttgccatattaatgcatgatgctgtctatccagaatgatatttcatacctggtaaacgtatacctattcaagaaccagttcaaagatcagcagctgaaataccactaattctgtaaaatcttttctaattccccagtgtagattttattatttcctccttagtgct

SEQ ID NO: 131882 - DNA, 318 bp, Homo sapiens
acaggtgtgcaccaccacatctggctgattttgtgtttttagtagagacgggatttcaccatgttgattaggctggtctcgaactcttgacctcaagtgatccacccgccttagcctcccaaagtgcttaggattacaggcatgagccactgtgcccagccgatacttagctcttattggccatagttctcttggagaatttggggaaaagtatgggcctctccacaccataagtatacatgatgtacttaccaaacacgtgcatgcaagtttaggggttcacaggccctggaggtttgtctgcacatctgcactgtg

SEQ ID NO: 131883 - DNA, 684 bp, Homo sapiens
taaattctctttgttcatttaactcaaagccaatttgagttaaattttccatcagttgcaaccaaaatgttgcaaactgatacagaaggtaccttcattttacagaagaagaaactgaaatccagaaaggtttaaacattctccaaatcacataggtagtgagaggtgaagccaagattcagatccaagtgtttctgaccagtgttttttcaagatgactgtggcattctagaagttccagggaggtagcagatgaaatgatgagcttaatctcaagggtatactgtgccttattagcttacaacaatggcaagtgtgtgtgtgtgtgtgtgtgtgtgtgtattcgacagttttactgtaactcaaaaaaaaaaaaaaaaaaaaaaaaaaaaatgttgggggggcggcggcgggggcccaggaaaaggttttaaaaaccaactcgggtgggggcgcggggggccatggctgatagagaacaccgtggggccaaaacaggggactaaaagaaaaacccggggataaagaagcgggggtggggggttcccacacaatataaaaagagccgcgccgggagaaaacggcggtgttgagaaaaaccccaaggagggtcagaagacaaagggggtcatcacagacaagacaagcggggagcagatataattcgcccgcggtgtgagaaag

SEQ ID NO: 131884 - DNA, 263 bp, Homo sapiens
ggctctcaaacttgaatgaacatcagaaccacttagagggctcattaaaacccagattgctaagccccagcccaagtttctcatccagtaggtcttggtcaaggcctgagaatttgtatttctaccacatccaggaaatgcctctgttgctggtcccagggccacattttgagaatcgctggtttagacttcctaccgctagtggagatggagctaatattgatactgtcagatgtcagggttgccaagggccaggcacacct

SEQ ID NO: 131885 - DNA, 445 bp, Homo sapiens
atctctactaaaaattaaaaaaaattagctgggtgcagtggcgtgcacctgtaatcccaactactccagaggcagaggcagaattgcttgaacctggcaggtggaggtttcggtgagctgatatcacgccactgcactccagcctgggtgacagagcgagactccatctgaaaaaaacaaaacaaaaaaattttattgtatatttggtagagatgggggtggggtgtggctcaccatgttgcctaggctggtctcgaactcctgaactcaagcaatctgcccgcctcaccctcccacagtgctcagattacaggtgtgaaccacacgcctggccaatttatagtaattatcttctataaaatcaccacacaccctgaattattgaatatcaagccgttgctcccaggggaaatacattcttgggtcctgtagtcccagctactgg

SEQ ID NO: 131886 - DNA, 404 bp, Homo sapiens
tcacagcagtgtcaaactactataataaaagtttctaaacactctatcttaaccctgtgtttatactgtgcagaccagtgttcccaaaccatacctcatactttgaatagcactggtttacagaatcagtaacattaagcacgtaaacagttatttcccaactcccaaaactgagcatttagactacagaagcaaacacttcttaatttatgtcacgaagtctctcaaaatacgtgaccacaatagacatgagctccaaactgtgtagctaccaagcacttatgtaactgtaagcccagtggcataagactgtggcagtagttgagaagagcaagaaatgaatagttttctctgccactccttgctgcttctacaggagatgacaggcatactcctccactgag

SEQ ID NO: 131887 - DNA, 700 bp, Homo sapiens
tatctcagtttaaccttttcttttttttctacacttgtatcaaagattaataggagaaaataatattttctcttgttagtcaattggcagaggaaatgttccatgttaatactcattcgtttaggaagactcctagtataagtgtcattttaaaagttgaccaagataataaataaactgcaataggggataagtttcacttcagatacattactttactatccttaattgttactttagaatggtcgccgttaacctgtgtctccagtgttaaggtgattttaactccagtcaactcaagcctgaatcaggttgtaggcacagcaagaagaatgagcaacaagaggtttttaccacaaaggaataacttgagaaatgggccagaactgctaatatctcttcctactctacaaaataaaagttgttaacaaaaaatatggaatcttcttcttttgggaaagtaaaaagaaagaatagatgcaaagaagggagagaattaggaaagaaaatatataaggaaaattttagtcacaatgggctcatctacaattttggtaaaataaaacgtatttcccaatcctgaaaaaataggagatgattatcaagtcattgatatgaatcaccatggtggccacttctatttaggtaaagtaaatttgagtgtgtgtgtatgagtgtgtatgcatgtgcgcatgtgaat

SEQ ID NO: 131888 - DNA, 156 bp, Homo sapiens
gaaggctgtcaggcaggggaaggctgatggtggagagcctttatgggaattgtgattttaatttaatttgagacatgatgggggccacagccaggttgaggaggtaactccatgaaaattacatttgaggttgatgacttctgtgtgcttgttcag

SEQ ID NO: 131889 - DNA, 282 bp, Homo sapiens
gtctaagtgttcattcttattagtccaataccctttattattatatcatttattaaatagtttttggttcctactcatataattaatatttggcttggccatgatgaggaaacatattctaagaaacatgagtcagtcctatgttagtctccacatagaaccttaatatagttaatatctataaatagttcgcaaatcaccagtactatctgaaagttataaaaggggaataataattgcggcacagaactgagcacgttggaacaatgagagtgtatagcc

SEQ ID NO: 131890 - DNA, 237 bp, Homo sapiens
tcccttactgctcggtgcacaccacgcagcagccaagctgaactttcacaccaggcatcatgagagcctgcagcgcctgcttctaccctcaggaattcccccaaccctgcccatgacggtgtccacactttcctcccaatcctaatggctgccactcccagcaccatctggccagccctcaccttcccttcctgggcatacattccccaaattcacagtgctctcacgagcagcact

SEQ ID NO: 131891 - DNA, 369 bp, Homo sapiens
gtgtagtgtgtctagacaaggtggccggaacagagaggaatatgcataccaggcttaaagatgggttaaatcagagcttttcattccacagaagagcaattttaataaggtcagaacatggatgttctaatagttgaaagcctgttaactaggagagagagagagtaaagtgatttgttgtaggaggacacacccggctctgacggtttaaagcgtcatgaatgcaaatttgaactccagaaaagcagagcttcctaacaatgggacttccacagcaatgggatttccttccgcattcagtttatgcctttcccatgagcgagagactcctaggagagccgcagcccgttaggaagccatgtgggaact

SEQ ID NO: 131892 - DNA, 598 bp, Homo sapiens
gttagtgctacacattccctatagtatcatttgcttggtgcctataatttcaagataagatccagtaatatagggagacaggctgctctgtattcagccaaagtagaaaatctctaacaaagatctcactagtattttatatatattttttccatacccagaaaccttcttgaattcctttacccaataaatatttattgagtcaatttgtacctatattccttttgaagactttgatgtgaaaaacatgtaattagtggcaaccacaaaagactctgcagcagcaagcatgctattgtaaacatcttttgattcaagggaaagcgggttatgtttttacctccactgttgacttgaatgaattaccattttacttctaaatattagatttgaaaatcagaaaaaacttagaatcctttcaaagactagccaatttaatttcatctcatgtatctttcacatgaagagaaacctcaaatatcggacatctccttgtagcctaattagaagctgaaaatacagtttttggttttataaattggctaacttgttaatttttcttaaactgttattaaataaaaatataatttccttacat

SEQ ID NO: 131893 - DNA, 491 bp, Homo sapiens
aggcggaggtgggcagataacctgaggtcgggagttcgagaccaacctggccaacatggtgaaaccccatctctactaaaaatacaaaatgccgggtgtggtagcaggggcctgtggtcccagctactcgggaggctgaggcaggagaattgcttgggcccaggaggcagaggtggcagtgaagcgagatcgcgccattgcactctagcctggacaacaagcgaaactccatcccaaaaaaaaaaaaaagtaacctgaccaaaaatggttaagtagtaatgttattattgattcattagcctggatggcctattttctaaactccacaaatgggttgggaatataccaagtgttaataatcacatctgagctagtctccatctttggagttcacaaccccagaataccctagataaactgaagcataattccggaagaagttctaagaactctgtcatcactgccgaactacataactacattgttagtta

SEQ ID NO: 131894 - DNA, 518 bp, Homo sapiens
tcagtctttgccccctccctcctttctctctctggtaatccccagtgtctaatattgccatctttgtgtccatgtgtatccagtgtttagttcccacttgtaagtgagaacatgtggtgtttggttttctgtttctgcattaattcacttaggatagtggtctccaggtgcatccatgatttcattctttttttatggctgtgtagtattccatggtgtatatataccatgttttctttttttctgagttttaattttttttccttcttttaacaaatttttatttccataggtttttggggaacagatggtatttgattacatgggtaagttccttagtggtgatttgtgagatgttggtgtacccatcacctgagcagtatacactgaacccaatttgtagtcttgtattcctcacccacttcccactctttccccccaagtccccaaagttcatcgaatccttcttatccctttgcatcctcatagtttagctcccgcttatgagtgagaacata

SEQ ID NO: 131895 - DNA, 308 bp, Homo sapiens
gtgaaagacactgttgagtgagaaaaaaaaaaaaaagccactgactgggagaaaaaaaatcacctatgaaaagatttctttcatccagaactcaaaactcaacaataagaacaaaacccaattatgaaacagatttcaacagatacttcaccacagaagatttaatcattacaaaaatgcaaattaaaaccacaatgagatggcactattctccattagaataactgtaatttagaaaaatcactaagtgctgggaactatgtagagcagctgaaactctgatacagtcctggtaggagtgcaaaatg

SEQ ID NO: 131896 - DNA, 160 bp, Homo sapiens
tgagaggcaagctggagaacttgttcctgcagtgcctgaaacccacactacagcagattagccacattgcccagcagatcagccacatcagccagtgcgcccacaaacccacactgcagcagatctccaggttgggctggagaggatgtggccccagtgt

SEQ ID NO: 131897 - DNA, 794 bp, Homo sapiens
gaaagtggcgaaatgtatgaattcatgagatgagagccaatttaaaaaagcatagtggacaccattgttctgaaactgaaagccaaagaaatttatggtcacattacccaggggcaggaaaatggtaaacccagttcttggttagtgtttcgttataaagattattatgtgattatttgtaagaaatatatattaagtgaggtatttttaaacagaaacacagaaaacaattatttgatcatttgacaaaaatgttgcaacaagaggctcctaggaactgaatcctgtattttccttaggagcagtggctcagtattcggtaaatcaatatttatgacaacttgatagaatataactgtgaatgatgagaattgactgcacttagggataaatctaagaaaagatgtggaagacctttatgcagaaacttataaaaacattgctgagagaaattgaggacctaaatatgtggagagagacaccatgttcatggatcagaaaactcaacagtgatgtgaattctaccaaaatctgtaaattcagtacaataccaatcaaaatcccagcagacttttttaagagaaattaataaactgattctaaatttcatttgaaaatgtgaaaaacctaaaattgccaaaactgctttgaaacataagaacagaattggagtactcccagtgacttcaagactttattttaaagctacagtaattaagacagtgtggtattggtgtaaagatagataaatagatcatcacagtggagcccagaaatagacccatatatatatg

SEQ ID NO: 131898 - DNA, 544 bp, Homo sapiens
acagaacatttgtaaaacttagtaagttccctgcttaccaaatcactgatatccctcgccctcccttcccaaagctgaccattattttaactttgtgggcaatgatgtctttgctttgctttatactttaacagttatgtatacatccctaaacaaaatataataatcttgcctgtttgggaactataaacagaaacgtatgttacatatccttttgtctgattctttaatgtttttaccaatgttttttccatataaaggtatcttttctccttgtatttctttttatgaatatactgctgtcaacttgtctatttatgtttaagatttagaatggctggatataggaatatgtatattgtcagttgcactaactaatgccaaagttttccatagtggtttttaccagcaatatatgggagctcatttatgcataccttctccaattagccaatctggtggacagtatgttcattttcatgtatttatttgccatttgggtttttcttctgttaagggctaataaaaatattttgttttccta

SEQ ID NO: 131899 - DNA, 880 bp, Homo sapiens
cataattactgttaagatctatcaaaatgtaccgagacagctctccttgctgaaatctgatgaacaaaaaggcaagcaacgtccaggaagactgtaaaagaatggatcaaattaagagcaagaacaaatgcaaccaagagatggggtttcagcacattagccagtatcgtctcgatctcttcacctcgtgatccgcccacctcggcctccccaagtgctgggattacaggcgtgagccactgcgttttgccagttctcttcctttattaaaactacatcagatggtctccatcaatgacacgtaaggctatgtgaggacacagcagcaagaagatgccatgtgaaagctgagaaatgaggcctcgccggaaagcagccctgctggcaccttgatcttggacttctgtcctccagaactgtgagaaaataaatttctgttgctttgtggtaaaaaaaaaaaaaaaaaagaaataaaaaaaaaagaaaaaaagcaagaagaaaaccatccaaaataaacagaaacaaaaaaaaaaacaagaaaggaaaaagaaaaagaacaaagaggggggggtgcactcagatctatatatacacaaggccgagcagccgaaaggtgccctgctacagccgctaatgtaaatgaaaaggagacggactacctggacgtcgagagtttgataaagcacgacggcgcgcggtggtattcaataagacgtgtatgggaaagaagcaatgcactactgccacttgatggagaaaaccccattttgtgagggcgaaaataacgaaagaccacaaacaggataatccactcgtgtcacaaacaacgtgggtgttaggtgaatccagcttttccttcgagcgaactaatcgctacaat

SEQ ID NO: 131900 - DNA, 704 bp, Homo sapiens
gtgtgaccatcttgttaaagtttattttttcctggctggatttaaagaactacactgccatgttgtaggctgcatgttgggtgaccattgtgacaaggaacttagggtggcccctaggagctgaggatggtctccagttgaacatcaacaagacactgaaattctctgtcctttaactgcaaggaactaaattttgccaacgaaaatgaatctttctccagttgagtttcagatgagactgtacttccaggcaaatcctttttgcaatcttgttcaccccaaacagaggactcagctaagctcttcccagattccagatacacagaaattttaagatgagaattgtgcatcaatgttcaagtcccaagagacgttatcagtctgaacagcccagtgaacaagtatttgtgactctccttccaaatgaaatgttctacagaaaggtggaagtgtgttgattagtggcaggcttctttggtcatctttctccctccacttctatcaacatggagttttgtactcagcaaaataaaaatctttcaaaattgagccccaaaccaaaacaaaccaaaagatatttttatattaaaaacccgagagactttgttggtagcaaattaaaactccaataaatggttaaatgaaggaatatggtatcaattggaaatgtggatttccccaaaggaattgaggacatttgatat

SEQ ID NO: 131901 - DNA, 888 bp, Homo sapiens
acctcaggctttccaaagtgctgggattacaggtgtgagccaccacgcctggcctccaaacattttaaaaagaaataatatcactactgtattccataaaatagaagagaaagaaacactacctattttatgggaccagcattaccttcatattcaaccagacaaagacagtatagaaaaagaaaactacacaacaatattcttcatatagaagtggaaaaaaaaagccttaacaatatccattcaaatccaacaatacaccaaaaaatgaatacaccgtgactagggtttattctaaaaatgtaagcctggttcaacattaagaaaccaatcaatgcccaccatatcaacagtctaaagaagaaaaaaatacatgattgttcaattaatacaaaaaaagcttttgacaagattcaaaattcattcatgattttttaaaaacactctcagtgactaggaatagaaagggacttcctcagctccctataatttggtagatgataaagttcatcatttttaaaaatcccataaataaaatcataacagtgaaagactgaatgttttcctcctgtaatgggaaaacaaagcaaggacaaacacattcaccaaattattcatcatcatactggaagtcctagctaatttaataaagcaagagaaagagataggaacgaactaaattgtctctgtttgcagatggcatgattgtccatgaggaaaatcccaagaaatctacaccaaactgctacaatatctgaatatagcatgaggacacaatacaaccaacatgaaaaattgaccatatttcaatatactatgaatctacagttggaaagcaaacttttttaagaagtaccaaacatctccagaaaatactgaaatactaat

SEQ ID NO: 131902 - DNA, 197 bp, Homo sapiens
caaccaatttactatgtgccaggtaagtgattggtatggagttattaatatctcatttaattctcataacgaattctagatttactgttttttatcctgtttctcaaaggaggaaactgaagcacagtttcagagtgatttgcccagggttgagtaggtcagcaagtggccgagctaataattgaacctggtttgtc

SEQ ID NO: 131903 - DNA, 440 bp, Homo sapiens
tgccttccccctctctaccaggctcactccttggtttagtccctcatgggggtagctgcctgggacaaggacacaggaagtgaatttccgggatataacatgtttgcacatatctgtgtcatacacacccaactgacgggtccccaaaggtgcacgtctgtgagtctgtcctggtctggccagtttccccagatgggatgaacacagccaaggggcagccagagttcggaagaaggggctggagggccagtctgtaggctgcaaactccctcgccccacgccactttgggaacaggcctgaccctgactcttggctgtggcttcggctgctcaacccagggcctccttccctgagcttctgacttggtggggagacaggggagacaaactccttagagggactgtgaggcggcctccagccctgccatctgcagggctct

SEQ ID NO: 131904 - DNA, 621 bp, Homo sapiens
ggccatagattgtgatggcatttataagtgttccactataaaaaccaactttacacagctaactttgtttttttttctctcaatgtataactttaattggaccttttgatttttacaaaaataattgaagacatataatatggatttctaaaacatttaacatttctttgtaaaaatcacatggaactttttacccaagtattagtttcccttgtcatttagaaataaatcttcaatttttaaaaagtggcttacttgcaattatatatagaaacgttttactacaggttgagtgtcccttatttgtaatgcttgggaccagaagtgtttcagattttgaatttttttttggagttttgtaatatttgtattatacttactgttcccagtctaaaagtacaaaatccaaaatgattgaatgagcatttcctttgagcatcatttcggtgctcaaaattctttttaactttggagcattttggattttaaattttcagatcgggtattctaaacctgtatccataatatttctagaatgaagatgtgataatttaataatgttttcattagatacattcatgataattgtttacaaaccacacagtaggttaactcagaatt

SEQ ID NO: 131905 - DNA, 168 bp, Homo sapiens
tataaagctgactcttcggcactctctcttccattttaacgatgagaaggctgaggactcagagaggctacctgactcaccccaggtcacacagctaataagcgtagagccaaagctgcccggagatgggctttaaggatctgggttgggagaggcatcctccctctt

SEQ ID NO: 131906 - DNA, 322 bp, Homo sapiens
tttgagggtaagagatagagccccagatgttctttttttaccacaaaggttttcttctaccctccattcttcttgacctttctgtaacatctgacctgctggcctcttcttcctgaactgttcttcagaacactcatctgtcctaatttcccttctgttgcatttggagccagtctgatgtgggttcgattggtggctctaccagttgccactgtatgctctctgtgcctgttccttgtgtaggagagggaacgccattccctcacagtggattaaataggatacgaaggtgtgtactgtactaagcacagacccttccaca

SEQ ID NO: 131907 - DNA, 760 bp, Homo sapiens
aaatgtatatatttatgtagaaaacattaaagtgttactaagaaagccaaagactagaataaatggaaaagcaatctctgttcttgaatgtcaatgctccacaaattaatttataagtttaaagtgaccccaataaactaaaaacaagcaacacagtggagaaagtataatcttttcgatgaacaaacctggggaagcaataaatcttaactcttacttcacaccatatgcaaaaataacctctagatggattgcaaatgtaaatgtgaaagagaaaactgtaaagttatcaaattaaaaacatagataagcacatcatgacatttgagtaggtatgcaaaaatttctgaaatggtatacaattcatgctaaccaaaaagtaaaacattgttcaatttaataattcaaccttaagattgatccgtcagaatacaccaatgaaattcagaaaaaggcaaatgatagaaaggaaaaaatgtgcaatacacacacaaaaacacatattcaactataatcaataaagggttcaaatccagaatagataaaacacttctataaaccagtaagaaaaaaagaaaacccagcgataataggcaaaagatttcagcaaccagttcacaatagatgtcaataaacatgaaagctatgcagcttcaattagtcatcatagaaattgcaaatttaaattaccttgcaaatcaccatgcctcttccacaatagccaaaatactgtaccaaaaaaaaaaatacacatgtaggt

SEQ ID NO: 131908 - DNA, 655 bp, Homo sapiens
attcagaatcactcaaagaaaaatatttactttttataagctaccatggccttcaaaagcattttatttacttataaaattagctttgcttgaacccttgaacaatagataagctagagttgtatttattttttaaccaatagaagataagggaacttttctgaaaatttgccttggaatttgaggctcaggatctaatcatatgttgctaggctactgtttattttgtaggtattttgcttttctgagaatatcgagggaagcactattagtttcggttgagaaatgccatcctagaatttttgtaagaggtattaatgtacctataaactactaatttacttttagaatctgttctctcagaattatagccaaatactttacgtatctaaaaaaaaaataagctttgtgacaagtccaaattgcctatggagtttaattgtaataatttcatttgcttcatctaaagtatgttttccttcttaactcttggaaatgggtaacttaacagagtctgagaaattttagaatcttatatgtggtagaaacaaaaataattatgagttaatagtttttattccatggacccaattgaaattaactcctagagttcagattttgaagtagaatggcccagtttgaaaattttctccca

SEQ ID NO: 131909 - DNA, 335 bp, Homo sapiens
ggaatttgcttgctggttgtgagagagaattccatgtggagggaacagacagcttaagcaaaggcctggagatgtcaaacaggtcaggtggcatggtcatggggctgaaagccattcgtgagagccagagcagagttccaggccaggcccggagccgatgagatccgagaggtcggtggagggggcgaatcttggagggccttgcttaggacccaggctccattctgacagtgatggggaagggtttgaagcaataaggtgatgtgacaggtgtgtttgcggagtgtctctgtggcagcggaggtggcaggtgggttggcctagcgtgtgtctaa

SEQ ID NO: 131910 - DNA, 222 bp, Homo sapiens
catggctgttttcacactatcagggtacaacagagtagttgcaacagaaaccacagaagctagaatgtcccgtcctctcacctggcctaactgggccttcaggtacaaatgctttgttaccaagtagaagtagcaggccagtaagtgtgtacatttctaatcctaccccatatgaatgaaaataaatcatgagagaggcactggcacgattcttatttccag

SEQ ID NO: 131911 - DNA, 566 bp, Homo sapiens
tttgatagagtctgttaccacttagcagtgtgagtcttaactatgtgtagagggtgtgggaaatgatatcttttgatagcttctttaatcccttggctcctctatctgtaattttcaatccatcaagacagcccatgaatatcaaaagtgttcatctaaagctattagaaaattcagattacaacaatgagttggaatacgtttttcaagaattagcctgtttaaaagattgtgttctatgaaaagcttgggaaaagtatcccatctccaatcgtactttccatttttgccattttaggctaagatgtttaccaggtcaggatcattctatgtaggacatgtgaacttataaagtgcatggatatttgtagagtaaagtggatgaagatgggggtaggcagttgaagatacagattaagggttttctatgtttcatttttttaggaaaaattgtattatctaattcctaacgtataagaactaactatatatcatttctgaaatggagttttggaaagtagttaaaatgatgagtttggacttcctttcattgcttgtaatccctg

SEQ ID NO: 131912 - DNA, 587 bp, Homo sapiens
gctcacagagctgcatacatgggctctctcaaaactcccattgtggtggagcacctgtttcctccctgctgcaaccaaaagagacagaaagagactgactcgggattttttgtgatgctatgatcataagcattttctcatattattacaattcttcaaaaatgtgattttaatgactgcataatatgcagttgcatggattcacataatttattcctttattattcatcaagttgctgctatttttttcctctagcaaatggtgctgtgataaatgtctacatttctgggtactttttccataatacatttttagtagtgggattcttcagttattgccgaatacaggagtcagcaaaatcactgccgccctccccaccccacagtggcttgcaacagtggctgcaggtctgctcatctggttttctttggaatgtcttagaaaatataagtttgagaaattatttagaaatttaaagataacgttggaaattgagtgtgtaacttccaggagaggggaaaaagaaaaagaaggaacaaagttgagaaggcaagaaaagaggtaggaaaaaaaagcaaagaaaaac

SEQ ID NO: 131913 - DNA, 707 bp, Homo sapiens
ggttgtgagaaggccagggaggaaaggtcaagaaagagggcatggttggcacccaagagggcccaggatgcaagaactgaacccaacctgtgggtttggagctgagatgtcactgctggccttactgggagcagtgccagttgagtgcttggtctgacagatgtggctgaggagtgaataagaggtgagaagtgactagacctcccacccttttgagaagcatgaaagagcaagaaaggaatgagcatagacagcttgacagtaatgtgagtggagccaagaggtttttttgtaagaggcttctgtgttcttgttttttcatgtcaggaagtcaattgtttgtcattctgtcttcacagaattaacagttgcccccacccccatttttaaacatgtttaatacttcttacagctgcatagtttccagatattcaaagaggtttcacctgcatgatctcattgatcttcctgagaggatggtaccaaatattatgcctgtttatttcttagaggaaggcctcaaagctcagagattgtggcttagaaatcaccctgctaacaagttgttttgtcacatactctacctagcccagagtttgtgaacctatattcacagcattaactaatcatgattcgccccatatttcactggttatgctttggttatcttagaaaagaacccagggcatttatgaggtaaaacttgc

SEQ ID NO: 131914 - DNA, 409 bp, Homo sapiens
cactgctcccataccctcttagtggaggagctgggaaatatatgtgcatatacgtacatatatgttatttctaaatctttgtacagatgtatgtatgaaaaccatgggatcgcactgatagctccaattccagttcagccaccacggggttcattctcatttccttcctttccatatttgtaattcccttctccaactggctccattctccttaatatattgacttatttaatcagttccgctgtatgtgaccaatttcctatgactgccacccctcatgcatcatggatgctcccctcaccttacctgggctctggtaccccacaccaggtccccctctgcaggctcaccctcttcattgtgctcaagctgtgacatgctctgccatcactcttgcagcctctctgca

SEQ ID NO: 131915 - DNA, 639 bp, Homo sapiens
cgtcatttcgcaggagggaatgtgatgtcctggcttggctcacaccctctgtgggtttaggcagggttcctgctggatccctcactgtggccagagagggagggctctgcttcaccacagggaaccagaagaggactggtgtgtgggaagaccaggtaatcataatactattaataatagcagtaatcatactgttttatacattgtacatgtcataaggattttaattttcatgtaacataattgttgtaaaaattttcccagtttgttttgtgctatttacctggtgttgaaatgggcacagaaattacattttaggtacgttaggtttattcctttttataaggtttctgtttgaaattttgattttagaagacattcattctcaaggacgtaaaacacacatacatctaattttttttctctctctctctcttttttaacatttaatactggaattaacttttatgcaaggtgtgggaccatgattcaattctatcattttatattctcaaatcattacccagtattttaataccataaatggaacaatccctcttgttttgtgaatttaaaacgttaccctgttactagataaaattacactcaatttctgtgcccatttcaaggggatcctct

SEQ ID NO: 131916 - DNA, 427 bp, Homo sapiens
ggcaaagttaggagaacagagatcttacagcaagcagttgaggggcaaaccagaggacaagatgtcttttttctccctacccccttattagggctgagagagagactaagacaaggcctcctgttgccacagcagcagctggggaattgaagaagttccagggataaataaacacatacgggaaggaggttttgcctcgactcaatgagtagctgtcaatggccctactgtgataggaaactatggcagagaagcaggtttgggggatcagtgttattacagtaatcagcagaacaggttaaccaaatcttcatttgaaaagtttacataagtaatacgagatgacatcatcaatctcccataatctcacttctatcattttaggcacacttcctttcggtctttcctcagagttgagatcatatca

SEQ ID NO: 131917 - DNA, 369 bp, Homo sapiens
gatgaggaaaccgagactcaggttaagtaacttgccatggtcacacagttagtaaagcagcctggttccagagcccatgggtttttgttgttgttgttgttgttgttgtttttgaaacggagtcttgctctgttgcccaggctggagtgcagtggcgcgatctcggctcactgcacgctccacctccagggttcatgccattcttctgcctcagcctcctgagtagctgcacccgacaccacacctggctacttttgtttttgtatttttaatagagacggggtttcaccgtgttagccaggatggtctcgatctcctgacctcgtgatccaacggccttggcctcccaaagtgctgggattacaggtg

SEQ ID NO: 131918 - DNA, 335 bp, Homo sapiens
aatataaagaatgttaaaatgagatttgaatacatacgaattcccaaaggacacataagaatttcttaaactatatgacaattaggcatgagggtattttggggggctgaatttacaattgtattgccagatatctgattaggttttagaaaaacctattaaacagaaataaaactccattagagcgtcacatttttagctggtatataaaagacattttttaaaaaaatagcaagagattgataatgaaggaagggaatttaagtggcagacatggcttttcttctgaagagctactgctcagaactgatgcattttagttaaaaatataccta

SEQ ID NO: 131919 - DNA, 234 bp, Homo sapiens
gttctgaataagagagcacttcacatccagtggacatgaaagcattctacaccttgaggtaagcaagaaaacaagcagggccatagcctctagttctagtttccaaaataaataaaatcttcaagtctcctccataagttactgactctgtcatgcaaacaactgcactctgactttgccaatggcaatctctgaaggtgggtaataatctttgaggatatgagaaccatatac

SEQ ID NO: 131920 - DNA, 512 bp, Homo sapiens
acaatagcatcaaaaagaacataatgcttaggaataaatttaaccaaggaggtgaaatatctgcctgctgaaaacttttaagaaattgaaaaaaattgtagaagacaaaaataaatgggaagatatcccatattcgtggactggaagacttaatgttaaaattcatactactcaaaacagtttacagattcagtgcaatctgtatcaaaattccaatggcatttttcacagaaatagaaataactgtctcatggagctacaaaagaccccaagtagcttgagcagttttaagaaagaagaacaaagctggagacattacattccctgatttcaaagtacagcacaaagctatagtaatcaaaatagtatgttagtagcataaaaagagacacatagaccaatgaaacagaagaaagcccagaaataaacccatgtatatggtcaagtaatctttgacaaaggcaccaagaatatataatagggaaaggaaatctctttaataagtggttctg

SEQ ID NO: 131921 - DNA, 241 bp, Homo sapiens
aaggatatgaaaacactttatgaaaatgaaattcattaaagcccttaataatcaggtagggaaggcaggtgctcacaattgtcacctgttggtgagtgaacaccttaggctcggggaggacaatgactcaagaacaaggtcgaattgcaggtggggggtgaagctgatccctaacagtgtcctccagcccctggcactgaggaaggacatggagggcttgcatcgacttttcctggcaggc

SEQ ID NO: 131922 - DNA, 395 bp, Homo sapiens
ggggaccccagagtgggaacagctagtctgttgcatgagttgctctgatgctcactgaaatctggaactggctctccagaaccaggccttctagggtacatgcacaatggtctagagcagctctcactgttcaatagaaatgtaacatgagccacatatctcattaaacattttctagcagtgacatcttaagtttgaaagagacaaatgaaattaattttaaagcatagtttagttaactcatttagaaacattaaaaaaatttagttaacccattatatccaaaatattgtcattttaacaggtaatcaatattaaaaactctcagtgaggtattttccttttctaccaagtctctaaattcttttctttctttctttttttttttttttttt

SEQ ID NO: 131923 - DNA, 436 bp, Homo sapiens
ctctgggcaactctgggtgtacattttcctctgttcctcaagagctattatgaatttcatcatccattatgctgataggcctggggactgacacatagtaagcccataacaattataatttaaaactaatttgttatatagcataattgatatattttaaaatgcaaaactataattcaactaaaatatacaaggcactcaagtcataccatgttttaagtagcttacaaggtgatcagcaagtgtcttatacaacaagcaaatttgttcaaagagaagcattgcaaataagtatttataattgtatagttttatattttagccagaagagtggaatcctttagcaatgggggaaataaaagaatgtttaattacagttgcagataattgccttttccaaagacaatgtatgtaggcagaactcatacctgttaat

SEQ ID NO: 131924 - DNA, 301 bp, Homo sapiens
tagtgaactctgggattctcatgaggaggcccagtgaagaaatggcctttcttcctaattaaagacttggggaagcaccctctagaagagcagtccccgacctttttgtcaccggggaccagttttgtggaagacagcttttccatggactagggaagggttgggggatggtttccagatgaaactcttccacctcagatcatcaggcattagttagattctcgtaaggaacatgcaacctagatccctcgcatgcacagttcgccatagggttgtgatcctatgagaatctcatgccccc

SEQ ID NO: 131925 - DNA, 1626 bp, Homo sapiens
ctaggttaacttgagcaagatgaatattttcctcagatctctgctagtcctggtgttttctcttaaaactagctgtatcttgtcggaggtccctgaaagtgaattaactttggatctcttaggtatctgtgtttggaatagagtttattccaaatctatcttattatggagtgaatgcgagcactcaaataagaaggacatattgtcttatgctagattgggcaatagtctaatagtcttagggctgtgtctcactaatgtttacgatgtttttaacattttatttctttttcttttctttctttctttctttttttttttttttttgagatggagtctcactctgtcgcccaggctggagtgcagtggcgcgatctcggctcgctgcaagctctgcctcccgggttcacgccattctcctgcctcagcctaccgagtagctgggactacaggcgcccgccaccacgcctggccagttttttgtattttttttagtagagacggggtttcaccgtgttagccaggatggtctcgatctcctgacctcgtgatccgtccgcctcggcctcccaaagtgctgggattacaagcgtgagctactgcgcccggccttaacattttatttcttaattttaaattttatttctttaaaaaactaatacagtctcacagtgcaaaagtttaaaggtacaaaagggtaagcattttgaaaatctctttctcatcccagtccctggccgcccagtttcctcacggaggccagcaatgttgctagtttcctgtgtctctttccagatagtgcacatttcagcaaatacaccatattctatgcaaattgtggaataacatatgagctcttccttttcctagtatttcttggtgattgcttccttgttctttttcagctgcttcagaattctattgtaaggatgtctcaaattacttaacctgtctcctactgaggcagtaatgtttccaagcttttgctatttcagcattatagctaatgaccctgtacatgcatcattttgcatatatgcaagtattttagagaacttcccagaagtggaattgctgggtcagagggcatgtgcacttgtaattttgatggctgtcaccatattgcatgcagctccttagggttctaacaatttatactcccaccagcaatgtgtatgactgcctgctttgccacactcttgcgaagaatattttatgaaactttttgatcctgcaaatctgataggtgaaaaagactatcccaaaatgattttattttgccgctctggattgagcactttatcttatgtttaagaactaccacatttaccatttatcagcattgtttgtttataaataacctttgtctattttttcaagtaggccagtgttcttttccttattgatttataggagctgtttttatattaaagactttagcctaatttctgtaacatgagttgcaaactttttttctatgatgttttctttaatgacacctattgaaaataatgtttttgcataaaataattgaaaggcatatttgatagtatccaggggtgttttcttccatccattttatttatactgatggagaggaaaacattggccagccattcagcctag

SEQ ID NO: 131926 - DNA, 285 bp, Homo sapiens
atcaaaaacagcatcataccaaagcttacttgtattggaatactattttagaaatactctgtgtatggaatttagttaaaagattgtcagcatataaattggataattattggatagaaaattattggttagaaaaacttaaaactacttcccttattctgattcaactattcttaacttgagaattgaggctcatatttgactctctgaatctcaccatatttaaacttgatttcctttaacaaatatttattgaacagccagtacatacaactttgcttaagg

SEQ ID NO: 131927 - DNA, 427 bp, Homo sapiens
aaaatggtcagtgaaattgaatttcagatgcacagcaaatagttttttagtataaatattggagcatacatatactaaaaaaactatgtgttgcttatctggaactcaaatttaactaggtatctggtattgtttgcaaatatgaaaatcctacttattcaaaattgtcaaagttctatgaccaatactacttcttgctcccttgaactctaaactaagaaaataaatattcatgtgcagttctattagtgctctcaaaggatgctataacctatatctatctagaaaaacagaaaacatatagctataattctttaggccttactgccagtttcttgttcatttgattttgcctagttagttttgccttgaagggaagtaagatcaccaaacagaaaggaataatatatgtgccaggcaatttgta

SEQ ID NO: 131928 - DNA, 244 bp, Homo sapiens
taggtagcaagatattgtgtttgcagtaagcctcttctttgaaaatctgatttgaacctttaaaattattaccaactttcttttaatcagattatgtgcatcttgaaatcattcaaattacacagtataattacgcagtaattttaaatgcatgtctatatttaagtcactaacctttgtccttgtaataaccaatcagtgattttgatcccttttcctcccccttgaaagcccagatcctttc

SEQ ID NO: 131929 - DNA, 676 bp, Homo sapiens
ctgaagacataaattggtaaccaatggaattatctggcctcagactttatttattttcatcatttatttcactgatgtgcaaatttattccgtaccagcaaatgtcaatttaattatattctacagtacacagtgaatcatgtatacttagttaagttgtaaatacactaaaccatataaactcacaacagtatatcagctcatgatgggtaaatgacttttccctgagaaagagtatctgtttaacctgcatgatctcactctttagtatttgcttctttagtctacgtttgtttcctagttttgaatataatcatgatatggagagacaagtgaaatcaccacaattttgttttccaaaatgtgagactatgcaaatgctgaaatgagaattaatacatccaaaatatcgaaccacaattatggctttgctttactttttgcccgtaagagacatgtggcctaaaataggtggcaggtattcctaccacaaccttgcttagcatagtggttgactaaatataaattttagagatgaaggttgttctatacccagatttcaatgtgattgctatgcccacttcactttctctaaaatacatatttttcttacttctcactttctttttcttcttggttgacattttttggctcagggatttttttttccttatga

SEQ ID NO: 131930 - DNA, 415 bp, Homo sapiens
tccacctcctaggttcaaatgatgctcatgcctcagcctcccaagtagctgggattacaggcatgagccaccacacctggctaatttttgtatttttagtagagacagggtttcaccctgttgaccgggctgatcttgaactcctgacctcaagagatctgcctgccttggccccccaaagtgctggaattacatgcgtgagccaccatgtctggcctagagttgggtatttttgtgagtgaacttgagaggaagagtttggaactgatatggtagacagttagggactacagtttcctaagcagtggagtgccaccatgaaggctgagtttgcttctgtgtggaactttacaccttataaaacccctcgatacttttacttcataatacgaccctgaaaagagaaggaacaaaa

SEQ ID NO: 131931 - DNA, 768 bp, Homo sapiens
gtcagcataaaatctcgtgaagtttaacacatttgttctgaaaattaagctgatctactaccagaaaagtagattttttgatatgtataatttgactctatttaaattcttcagaaaaattaaactgacaacattatttacaagttttttggaaattaaaaatgcttaagaaacatttataaaaactaaaagtaaaaataatttcagattcttaacatctctaaaatacttcaagttatcatcctctgacagtagatagatagatagatagatagatagatagatagatattttttctttttttgagacagagtttcactcttgctcaggctggagtgcaatggcacaatcttggctcactgcaacctccacatccctggttaaagcgattctgctgcttcagcctccccagtacctggtattacaggcacccacaaccaagcctggctaatttatgtatttttagtagagatagggtttcactgtattggccagactggtctcaaattcctgacatcaaatgatctgcctgactcggcctcccaaattgctgggattacagacatgagccaccggcccagctcagtgttcaacttttctgaatcaattaactcagcttagataatttaaatcagccaattaggggattccaagcagcccattagcacatcccaggagaatccaatcagcaaattagctcagcccggctgattagcccaggtgatttctaacagccaactatcttattctaggtgataccaatcagcc

SEQ ID NO: 131932 - DNA, 229 bp, Homo sapiens
gtacatgaattcctacaggagctagccagctggttctctatccctgggaaattcccaagtcaccaccgatagctttgccctaggtcatgaggacagaggggttcccaacagtttggtggtcagcagattgtcagaggggtgaagggagcagagcagcattcccaccttttttttttgaacggagtatcgctcttgttgcccaggctggattgcaatggcatgatcttgg

SEQ ID NO: 131933 - DNA, 725 bp, Homo sapiens
gtggtggagatagagaagaggacatgtcacaaggacacagaagccaggctgaggggaactcccactggtcaaatctgggacaatttgagcactgaaataagtatagtaatgtgtataaattattgaaaaggccggcacagtggctcattcattccaggtgttctctgatttttccactgtatagttaccactttttccattaacaactatgaaggaatctgtgagaatatgctttaagacctgcagatagaccaggtacaatgtctcacgcctgtaatcccagcactttgggaggatgaggtggatggattgcttaaatccaggagtacgagaccagcctgggcaacatggtgagaccccatccgtctctgcaaatttttttttgtaattaactgggcacggtggttggtgagacaggtggatattttgtgtctcgcaatatgactggaaaaggactcaacaccactcatgcaacattccagccaggcatggataacccaaatctaataatgagtaaacattagacaaaccccaaatgagaaatggtctattaaagatgtcaatattataaaagacaaagaaaaactatggaaatgttcctccaagaatagagactaaagagacatgacaattaaatacaatacttcgtattagactagatcctttactggaggaaacaaaaatgctatacaggacatgattgagcagactgacaaaattagaag

SEQ ID NO: 131934 - DNA, 867 bp, Homo sapiens
gaaaaatactagaattaacaagtgagtttagcaacattgcagtctaaaaaatatacaaaaatccattgtatctacatactagcaatgaacaattgaaatcaaaataaagaagaatactatttacaatagcatacaaaatgggaattatttagggataaatctgacaaaaatcagcaagatctgtacactgaaaactacaaaacactgctgagaaaaattgaagaagatcaagataaatggagagacatactgtgttcatggattggaagactcattactgttaaaaatattagttctccccaaattaatctatagattcaatgtaatcccaatagaaatctcagcatgcttcttctttttggtagaaattgctaattgtaaaatttgtatggaaatgtaaagtacctagaatggtcaaaacaactttgaaaaggaagaataaacttggaggactaacacaacatgacttcaatttcgatttcactacatgactacaagatttcaattgtccattgctagtttatagatacaatggatttttgtatattgatgtttctatactgcagtgtttctaaactcacttggtaatgctagtagcttttttgtagattccattgagttttgtacatagatcatcatatgatcagtaaactaaaagttttagtttttcaaagttatagcttcaaaacattaaaaagctacaataatcaatacagtgtgtttttgtgtgaacatagagagatagatcactggaagaggagagacaatccaaaaatggacccccacttatatggacaaatgatttcaacagggttgcaaaggcaattcagtgaagaaagaataaatagtcttttaaacaaatggtgc

SEQ ID NO: 131935 - DNA, 621 bp, Homo sapiens
tatttatagtgaaatttggaagattttcagctattaatttttctctttttttctctcttctgaaattcctacaatgagacaatgagtatgttggttctcacgatcgtattccataggtttcttaggctctgctcactttccttcattttttccccttctgttccttggatttcaatattatattaaataatatattatcaaccttcaggttaatcgattctctcttctgcctgctcaaatatgcctagtacattttttcattttatttcatttattgtgatttttagctccagagtttctgttttcatttttttaggttttctatctttttattagaatttccattttattcgtatatcattttcttgactgtctccacatctttctttagttatttcagcatcttttagaaagttgttgaaagtctttctctagtaggcctgtcatcagatctttttccagaaatagtttttattgattttttccttttatgagccctactttcctgtttctttcacgccttttgtttttcttttaaaaaactgtgcatttgagtctaatgggtggcaaatcttgaaatcagatttttccactttccccaggttttctgttttttttttt

SEQ ID NO: 131936 - DNA, 484 bp, Homo sapiens
tcaaccacgaacaacagctgtcaatatgtggtcgcccctcccacacacaccgttcaaggagcccccgtgaaagcacaggccaagcacctgggcacagactctcctccgcaggtcatgagggaggaggaagctcatcccctcccctggaagtaccctcagatttgacacacccgggtctgcagctctcccactgcctcgagttctggtagagtaaataacctcaaagacagaccaacccaaaaaaggatgactggattaagcacccaaagcaatacttcaacttctggcgagaattcaatcgggagctgcaagacatttatcactgtatctgcaaataccaatcatgacttgattatcttcgtgaaacctcatttcttcgtgtcctgggggacatttttctccagaaaagtgcagtataaacaaacaacatgctgattcttcaggacactgctgacagctctgagcaacccaacagccagcactc

SEQ ID NO: 131937 - DNA, 267 bp, Homo sapiens
attttaaattttccgttgcctcattccgagaacccaagttcttccaggatctgctgtcttatcagtttacattcctgaagaatattcatgataaaggtattggctgtttgatcagccatttcttacccgggaatgattggaaatgaaagaattacaccatttcttagcatttctgattacattttactttttattttgttttcataacttgctacaaaaggcacaggagtaggaaatttactcatttttctacttcttaataattga

SEQ ID NO: 131938 - DNA, 323 bp, Homo sapiens
taaatttttgtgtggaagaagtcagagaaaaaaattgaatgaatgtgtatcacaatattcaagattaagtttgtgtgagataggacttgagctgattttgaatacaagtaaatgagggaagagaaaccatcaaaaggaagaaataccctgcaaatgtttctgtgagagagtctaccagaaggaagaggaagattctttccctgaggaaagacaggaatcacaattctcctggctgaggtcaacatccagaacagagaaagcacatcttcccagaatatcattaaaatcctttcccttttgcgccgagaatacatgctagcggt

SEQ ID NO: 131939 - DNA, 301 bp, Homo sapiens
gactaaggtggccagagtccacagcatggagccctgaagatgagagagctgcagagagagagagaacccagagatctcagaggggctcctcgaggaccgttcagcatgtgtgcggtggggagagcacatgaggccagagaaagaaccacctgtgaggaccacagggagctttcacagggcagggacacgcctatgcccaccagccagccctaaaagccccacaggtcacggggcattgcgttgaatactcagagggtcttgcttcaggaatgatggataattagccctgcagtgatcactg

SEQ ID NO: 131940 - DNA, 663 bp, Homo sapiens
aagtacgtttcacaaactgaatctcactggagcagtgccctgagaccccactccaaatctcccatcagtatgatcaatatcccacgctccacaattatcttctcccaccctatagcagcctttgaagccaggattctatgacaatgcttaaaacaacaaatgtttttggcaaatgaccctaacaaacatataaacttttttttttttttttttaaaagactgggtctcactttgtcacccagactggagtggagtggtgcagtcacagcttactgcaacctcaaactcctcagcgaagaagattgcttaagcaatcttcttcgctggactttttttgtttgtttgtttgttttttgattaacagtaatacatcttgaggcatcacttagctgtctccttgtcaatagtaaacactcattgttttacccagcagaaaatgtagccacattcagctgcaatatacagtagacaacaggtgattcttaccatcaaatcaaattaacagaagctggaaaggagaacgagatttcatcaaatccatgccagagagaataatcctcaaaatatcccgccaataggtagtcccttatttaatcccttggacaatcaaatccttgtctcaacactcacagtgatttattttatatataaccgaatccttcc

SEQ ID NO: 131941 - DNA, 311 bp, Homo sapiens
taaggggcttagtgctccctcttcaggatgccagggaggtaggtattaaaggttttcagcgggggagcaggtggtcagaaccatgctttagaaatgtcactctggctccttgaggagactggattagagaggagaaattgaggcagggagaccatttaaaaggccagcaaccaagtgaaaggtggcagtgggaacagaggggacagacttgggaaacgtgaaggaggtgaggacagcagagtccgggcttaagcccacttggggagaggtaagggtggctctgcagttgctggctgaagagggaggcaggg

SEQ ID NO: 131942 - DNA, 648 bp, Homo sapiens
gaggggctcaggggcctttctgatcccttccaggtctgagattctgtggttctcagcaatttgccagtgcctgactggaagatggaggctggtttcgtaacctggggctttcaaagttctgaattctgggtggagttgtctcaaacggtaggctctcaaagaacacctgcatgcagcctaaccagtccccaactcagtgactttcagactgaacctcactgctacttccaagctcctctgaagcttgccacattccatcggtattatcctaattcatacgagcctctcatcctgccatctaaagtataagttacttgagagtagggactatgtctgtaaaaatacatagtacgtggcattctaaggaaaggtgtagtgagcgagggctgccctttagagtcacctgctcttcctgtttccctggttgtgtgtcttctcacctgccttcctgcatccagccatgccccactgtggccggagtagtcgtgttctacaatttgaatctaatatattgcttccctccttaaaactctttggtgcctctcctttaccttcaggaaaatacccagactccttagtctggcccagaagaccgttcatgacttggttcctactgatctctccagtctttttgtgccacctccattg

SEQ ID NO: 131943 - DNA, 470 bp, Homo sapiens
gaggcacctagcacattgcctgctttctggcaagagctaatacatgatagatttccttgtcctaccacattttaatacctagaaaagtataagtatgggcacgagctttcttctgttagtgccacagcatggcacaaaaaaaaacgtacactaaaacaggccttgggtgtctaggttcaaagccaggcccaagactcctactacacgacttcacctatgccttaattcttactaaggattaaataaggttatttttacaaaagcacacagtagtgcttggtgactgatagattttagatttttggttaaatctgaatcaatctcactgataaagatccctttgggaagaataaaaaagcaggatagatttagagttaagagtttggtttttctgcgcgttaggaatcaacaacacagaagaaaccaggataagccaagaatatacatacacacatacacgcacgcacaca

SEQ ID NO: 131944 - DNA, 445 bp, Homo sapiens
tattgctcaaagggagattctggagttcctgagccactgcagaagtcacccaacagtggtgacactgaacaaaaatattcaagtggccacttgtcttccactgtggaaagccgtttgtcatgtcaagggtcagagaccccagtaaacttacttgagcaaggcaactctctgggctagtgaagatggttaactctagaattgatggggtgcttttttggtctctcaccagggacaattaagatattctcatcgtcagtagccctctggcttacagtagtaggcatactgattctggcccatgggctggcaagtcagggcctcttctgggcatctcactgattccacaatactttctcaaaatgggtagacctgagagggcagggggcttgaagtattggctaatatttgcaccttttggctatttgttttatcaacccttttgccc

SEQ ID NO: 131945 - DNA, 855 bp, Homo sapiens
atgaaaagatgcaatgatgaaatgaaatgacgaaaagatgaaataaaatgagatgaaatgaaatgatgagatgaagtgaaatgatgaaatgttgagatgaaatgatgaaatgaaatgaaagaatgaaatgaaatgatgagatgaaatgatgcaataaaatgatgaaaggatgaaataatgaaatgagatgaaaagatgaaatgagatgaaaagatgaaatgagatgaaatgaaatcatgagatgaaatgatgaaatgatgagatgaagtgaaatgatgaaatgaaatgttgagatgaaatgatgaaatgaaagaatgaaatgaaatgatgagatgaaatgatgaaatgaaatgatgcaacgaaatgatgaaaggatgaaatgaaatgaggaaaagatgaaataaaatgagatgaaatgaaatgatgagatgaagtgaaatgatgaaatgttgagatgaaatgatgaaatgaaatgaaagaatgaaatgaaatgatgagatgaaatgctgcataaatgatgacgggtgaaatatgacatgatgacttgatgagatgatgagatgcaaagaatgacatgatgaaattgagatggaaagatgacatgggatgactgaatcctgaggttggaatgacatcttgagatgatattttgaattgtgatggagttgaatggtggattgggaatgccattgtgaatgttgatctggactatggatgaggtgtaagtgcgttatggggacgcggctgaacggagcggggctcggggatgtactggagaggatgtgtacaatgtgagagctcaggcgaagatggatattgtggggtttaaaacaaaaaaaaagtggggcgcgaaat

SEQ ID NO: 131946 - DNA, 496 bp, Homo sapiens
atgaaaagatgcaatgatgaaatgaaatgacgaaaagatgaaataaaatgagatgaaatgaaatgatgagatgaagtgaaatgatgaaatgttgagatgaaatgatgaaatgaaatgaaagaatgaaatgaaatgatgagatgaaatgatgcaataaaatgatgaaaggatgaaataatgaaatgagatgaaaagatgaaatgagatgaaaagatgaaatgagatgaaatgaaatcatgagatgaaatgatgaaatgatgagatgaagtgaaatgatgaaatgaaatgttgagatgaaatgatgaaatgaaagaatgaaatgaaatgatgagatgaaatgatgaaatgaaatgatgcaacgaaatgatgaaaggatgaaatgaaatgaggaaattaaatgaaatgatgaaatagatgaaccaaaaatacttattcattttttttcttggcatccttctaagagtattttagtgaggttaatttctaaaactaaatt

SEQ ID NO: 131947 - DNA, 273 bp, Homo sapiens
tgttgtgttcactgtagtagcactttcaatttccttcaaggactttgcattcataacttggttaacagtttggttcaagaggcccagctttcagcctatcttagtttttaacatgccttcctcactaatcttaatcatttctagttttttatttaaattgagagatttaagactcttctttcacctgagcacttaggggccattgtaaggttaattggcctgatttcagtatggatgtgtctctgagaatagggaggccagaggagaggtaga

SEQ ID NO: 131948 - DNA, 302 bp, Homo sapiens
gggatgtgctgcctgtctgtggcttccttgggttttctcaatctacttcctacacctttgatagcccctttttgcctcattgtcctactccgaccatttctgtcttcttttctgtttctcttttcacctacatgcttaatgtcggtaattctttctcagagcagagaagcttctttttcttcctgcactcttcatgagtgagctcatcccctctcaagtcttttttttttttttttttataacagagtctcactctgttgcttgggctggagtgcagtggcacaatctcggctcactgcaac

SEQ ID NO: 131949 - DNA, 516 bp, Homo sapiens
caggtgtctgaatacacgtgtgggttcttcttcccctcccatcactaccaggtttgcgggcttgggaggcacagggtcatggctgtactggtgaactctaagtgcagtacattcttccctgccagcccatcctgtcccaggggcagaagcctctagctgtgtccatgtcagcccttcacagtattgtgcagggtttacattatttccattggaactgaacgtagaataagtcaggagtcatttctagacgcaaccagagggctctatctgaggctgtctggaaggagcctatatttgatcattcttgcactgctataaagaaatagctgagactgggtaatttataaaaaaatgaggtttaattggctcgagttctgcaggctatatgggaagcatgatgttggcttctgcttggcttctggagaagcctcaagaaactttcagtgatcaccaaagggggagcaagagggagtcgggggaggtaccacagtctatttaaacaacctgatctcatga

SEQ ID NO: 131950 - DNA, 165 bp, Homo sapiens
gccaaatcagtagagaggaagtcagactgtcactgtctgctgataatatgattatttaccttgaaaactctaaagactcctccagaaagctcctagaactgataaaagaatttagcaaagtttccagatacaagattaacgtacacaagtcagtagctcctctgt

SEQ ID NO: 131951 - DNA, 758 bp, Homo sapiens
  misc_feature (558)..(558): n is a, c, g, or t
  misc_feature (568)..(568): n is a, c, g, or t
  misc_feature (575)..(575): n is a, c, g, or t
  misc_feature (593)..(594): n is a, c, g, or t
  misc_feature (597)..(597): n is a, c, g, or t
  misc_feature (608)..(609): n is a, c, g, or t
  misc_feature (635)..(635): n is a, c, g, or t
  misc_feature (643)..(643): n is a, c, g, or t
  misc_feature (705)..(705): n is a, c, g, or t
  misc_feature (707)..(707): n is a, c, g, or t
  misc_feature (718)..(718): n is a, c, g, or t
  misc_feature (726)..(727): n is a, c, g, or t
  misc_feature (732)..(732): n is a, c, g, or t
  misc_feature (747)..(747): n is a, c, g, or t
  misc_feature (751)..(751): n is a, c, g, or t
aggcaagcgcgctctgcggcgcggtccgctgtggaggcggcgcgaacggtcagggggcggccgatggctttgaggggccctgcgggcttggggcccggctctcgaaggccgttggacgaagcggtggcaggggccgagggccgcgaggcgccggcccttgtggcggcgggaggcgcgccagaggacgatgaagaggacgatggccgtggccggggcctgctgcgctgggacagcttctccgcctggctgcactgcgtgtgtgtggtgggcttcgacctggagctgggccaggccgtggaggctcactttgcccaacttcatcagtgaagcaacaagtggaccaattgatgtggaaggtacaccctcatgttatggaacgcagaaactgaggcatagaactgcgctaactgatttcccacaaggacaccatctaattaggaaccaaaacatggtttgggtaccaagtactgtactttccatccttccccagtgcctcttaagagttggacagaatgcagagctgtatcattcattttggcccaaagtcaagggtaattnatcctcagantccaaanttactgacagagaaaaanncantatttgctatnngtcttttccagattcaaattcaggtngtcttggnagatacccagtatcgtcatcagatttcgaccagtcttctggggaggagggtgtcgctgcatngnctcctggatcnatttgacnnagatntaccagtttacttanaganaggatcc

SEQ ID NO: 131952 - DNA, 506 bp, Homo sapiens
  misc_feature (306)..(306): n is a, c, g, or t
  misc_feature (316)..(316): n is a, c, g, or t
  misc_feature (323)..(323): n is a, c, g, or t
  misc_feature (341)..(342): n is a, c, g, or t
  misc_feature (345)..(345): n is a, c, g, or t
  misc_feature (356)..(357): n is a, c, g, or t
  misc_feature (383)..(383): n is a, c, g, or t
  misc_feature (391)..(391): n is a, c, g, or t
  misc_feature (453)..(453): n is a, c, g, or t
  misc_feature (455)..(455): n is a, c, g, or t
  misc_feature (466)..(466): n is a, c, g, or t
  misc_feature (474)..(475): n is a, c, g, or t
  misc_feature (480)..(480): n is a, c, g, or t
  misc_feature (495)..(495): n is a, c, g, or t
  misc_feature (499)..(499): n is a, c, g, or t
aggcaagcgcgctctgcggcgcggtccgctgtggaggcggcgcgaacggtcagggggcggccgatggctttgaggggccctgcgggcttggggcccggctctcgaaggccgttggacgaagcggtggcaggggccgagggccgcgaggcgccggcccttgtggcggcgggaggcgcgccagaggacgatgaagaggacgatggccgtggccggggcctgctgcgctgggacagcttctccgcctggctgcactgcgtgtgtgtggtgggcttcgacctggagctgggccaggccgtggaggaattnatcctcagantccaaanttactgacagagaaaaanncantatttgctatnngtcttttccagattcaaattcaggtngtcttggnagatacccagtatcgtcatcagatttcgaccagtcttctggggaggagggtgtcgctgcatngnctcctggatcnatttgacnnagatntaccagtttacttanaganaggatcc

SEQ ID NO: 131953 - DNA, 390 bp, Homo sapiens
gtggcaattaaagaagagactgaagaacatcacctaagagattcattttgaacagtatggaaaaattgaagtgacaaacccacgatcaccatataatattattcagcaatgaaaaggaatgaaccattgatacacatagccacttaaatgaacttcaggaaaataatgctgagtggaaaaagtccatctcaaaaggtctcattctgtatgattccattatataacattatgatgaaggaaagtttcatggttgccaaagactagggattaggggaatggggaatagctgcatgtggctaaaaggggctaacatgaggaagccttgaaataatgaaacagttatatatcttgattgtggtggtaattacataaagttatacatgtgataaa

SEQ ID NO: 131954 - DNA, 709 bp, Homo sapiens
cagagatggggtttcactgtgttagccaggatggtcttgacctcctgacctcgtgatctgcccgcctcggcctcccaaagtgctgggattacaggcgttagccaccgtgcccggccttagatttacatttcttatggcaaaatcatttgcaaggaaagtatgaacgctgacaaactaccttaaagcaaccttgcattcacacatgatgtaattcattcttttttaaaaagtcagcaaaagtgtattaaagtgtttatgtgccagatataaaaggcatggtcgttgacctcaatgagtttacagtctattgagaaaagaaacttgcaaacaagttagaaaagtatatttaactgctatgataaaagtacaacttctattggaggcataggcaaataaatataaaatcttcccagggtaatctgggatgataccccagaaaagggaggagttgaattctgtgtaacaccataaggatgtgatgtcaattaagtaagttattatttccacgtctgttcatctacttatctaaggaagatacacatatactactgtgtggatggaaacatttgcacctgttgcaagcacttgcaaatacgaaagtttacctagtaagtgtttataaatactaagctcagttagaaaccaagaaagggtaattcccaggtcccaacaataaagaggcagctcatggtcagagtagaggaagagt

SEQ ID NO: 131955 - DNA, 642 bp, Homo sapiens
cattctatgatttgaatctaactttaacactgaaaaaaaacaaagccaggcttcccccctcaaatatacgcaacttcacttaggaataggttacataatttctcggtcaaatatttgtaaattaaatctagtgatgaattaaaaagtatcacagaaatagtaggcagtatttatcaagcgcttcatgtttagaacaatatttatgttcatgtttagagcaatatttatcaagtactttatgtttagaacattttatgtttagaacaattctatacagtagtttctaatattatcccagttagactgatgagaaaagctaggtctagagaggtaagtaacctttctatcaacacacatgtagtaagtggtaaagctacaatttaaacccctccagtatgactcctgaactcatagtcatagcaccatattatgctgtttcactgaattttagtcaataataaagtttgaataaacctgtcactataattcatggcaatagtaaactaaagataacaactacaggttgtttccatagacctagtagagatgatgttatcatcaatgacaaaccattaactttatatgaaatggcccacaaaactttgttttattttcaaaatatgcatatttactaaaaatggt

SEQ ID NO: 131956 - DNA, 738 bp, Homo sapiens
cacgtttctgcatgcgacaaacaagccccttcacgtgtggctttgtacacctctttatcccctttgcccaccgcctcagctctcccagcccctcaaatcctgcttcagccatgatgacctgcttccctccattcaagcaaactttgctctgttgagcctcagtgcctttgctgttggctgcattctcttcatggagagctctctgcctactgaatttgtatttattctccaacactcagcttaaacatttctttctatggcctctgaagttaatcactcctgcctcagtctccttatagcatactgctactgtggtccttatgttcactgggcagaaatttgtttgacttcatcatctgctaagtctttccacatttattaagcaactaccacgtgctggggctgcgacacggtgaagagacagatgcagtctttgtcctcttggatgtccccaagcagtgagggggctggagatatgcagaagcaattatagaatgtgtcacagtgctgtgatgggggtgtgcctggaggggcccagtctcagaggggccctgggggatcagagagggcttcctaggagaaacgatgcttgttttttgttttttaaagacagagtcttgctctttcgctcaggctggagtgaagtgactctatctcagctcactgcaacctcagctccccaccccaggttgaagcatttctcctgcctcagcctccccagtacctgggattataggc

SEQ ID NO: 131957 - DNA, 140 bp, Homo sapiens
aacctgcaagtgccttactgagtctgtgttgatttacagtaaacatgaattctatttcaaaactggcagtatttccaatttttctttttcttttcttcttcttcttctttttttttttttgagatggcactgtcgcccag

SEQ ID NO: 131958 - DNA, 464 bp, Homo sapiens
agccagagagagagtgatgtgatggaggcatgtagaggatcgagcaggagaatgtgggcctggtcggcatgagaaaaggccagaatcagagagcagctaggagacaagagcagtagatgagtccccccacttcccctccacccctcctggtctttattggcttttcaaagagcatgaactctttccctaacaattcctgaatctcaggtggttttaggctctcagtatggccaccagtggttttattgtctgttggcatttgccatccatttcagctgcagttatgttctccacctcctcccatccccatattgcacagttcagaaggctaagactaggttcttaaaagcatttttctctcacttgtggagagttttgatcttagactatttccaagggtcaacttgtaaatgccattcattctctctttttcttttctgtgctattttttaatgccttgacca

SEQ ID NO: 131959 - DNA, 642 bp, Homo sapiens
ggtgaaatagccctggtcctctacccagtcatttgttcattcagcagaaacttcactgggttcctcttgggtgtcagggcagggctggggccccggaggctcaggacgagtcagtctctatccctgccctccttagttgaatatggaagactcataaaggaacttgcagtgtgaaggaaaaagagtacagtggagagttgaggaagatgcatgggaattggtcaggaactccctcaaacttttccactgaaaggcactaagcaaacatcactgtctgctgataggaagggtacttgggtactgagattaaaaaaaaaatgacaggccaaccttcagaaaatccagaaattggcaatgagtatttatgggtcactgaagtctatggcttcaggtgcagttggatctaggggctcatacagtgttgtcaggaatccttcattggggaagatggcccccagtggctccaggcaagtaaaacaccagcttggcacccctggtgagcaaacacacccggtccgactctcactggcccaggttcacccacgtggtattcacctctgcctagggcccaggaatttgctgattgattggatctggatcatggacaccaccctggggctgggcactgagggtggaggtggg

SEQ ID NO: 131960 - DNA, 159 bp, Homo sapiens
agccactgcgcccagcccctttactttcttaataaatttgctttcattaaagaaaaaaaaaaaaagaacagacagttccaccaagccttttcccaatgattcctctccccctaggaaattgatcatcatacattagttttgcctgtactagaattttgt

SEQ ID NO: 131961 - DNA, 394 bp, Homo sapiens
catgtgtgtgcctatgtgcatactatacagaaaataataaagtaaatatggtaaaatattaacaagtggggaatctgaatgaaggaatatggtaattctttgtattatttttgtaacttgtaaaaaacaagaatcaggccaggcgcagtggctcacatctgtaatcctagcactctgggaggccaaggcaggtggatcacttgaggtcaggacttccagaccagcctggccaacatggcaaaataccatctctactaaaaatacaaaaattagctgggtgtggtggcgtgcacctgtagtctcagctactagggaggctgaggcaagagaatcgcttgcacccgggaggcagaggctgtagtgagccaagatagcaccactgtactccagccag

SEQ ID NO: 131962 - DNA, 369 bp, Homo sapiens
gacaaggggagagagggagaggaaatgcctgtgagaatgctggagagcaggctcctacacctctctgtgctgttaatgggggtcatgggcacccctcagtgtcttgggctcagccttgggggttgccaaaacctataggagcaaccaggaacattcatggtttgggggtaggggtgacatggcaaagactagctttgtggtgagatgaaactggtaacatctggaggagttcagcggctcagtccttgtcgctgaggagagagccaagaggcaggggtatggctgctggacaagaaggtgcaaggtggctgagtaaagaaagcccagactagggtggtcacagctaaaatggaacagcaaattcaggag

SEQ ID NO: 131963 - DNA, 338 bp, Homo sapiens
ggaggctgaggcaggaagatagtttgagcctgggagttcaaggttgtggtgagccttgatgatgccactacactccagcctgagtgacacagtgagactttgcatcaaaaaaaagagaaaacagacaataatacattaaaaatgaaacctctgtaatttatcaatctataactattttctcatcacttaccgcataccaaactctactgcacttgtgtccagtataaagttggtgagtcttctgttgtatttaggatagagttgaggcccttcccttcgtttcaaattatttaagcttttattttattatatcttcctgagtgaggttcttgctctgc

SEQ ID NO: 131964 - DNA, 397 bp, Homo sapiens
gccataccaaccttttctcctggctgtggccttggtggataccatttcccccataggcagcccaccagcccgaccccttagagcttcatagcctgctgtgctctgccgtcctatgggcaactaagcctttttgctggattgggtccctcccctcccttcctggcccaaggccctgggtccagggacagctgagcctgatgcagcccctaccccaccccaaatcaccagcacctggttctctggctacttccttaggggtacacaaaaatcctcatgcctgttggatctccttgggtttcaaggaccttctctctaggaagtatggcctccagggtctcctgagcctaaacgcaggcagtgaaagggaaggagccgtggacttattagggctacaagt

SEQ ID NO: 131965 - DNA, 663 bp, Homo sapiens
caagcaatgatcttcccacctcgacctcccaaaagtgctgagattataggcctgagccactgtgcttgtgctcagcctccaaggattttgtttttgtttttgtttttttgagacagactggctctatagcccaggctggagtgcagtggcatgatcgcgactcactgcaacctctgcctcccagactcaagccatcctcccacctcagcctcctgagtagctgggactacaggcatgcaccaccactcccagctgatttttgtatttttttaaatacagacgaggtttcatcatgttgcccatgctaagtcttgaactcctgacctcaagtgatctgcctgccctggcctcccagagtgctgggattacaggcctgagccaccacgcctagccttacaaaggacttttttgttgttgttttgcatcttacttgccccttcccccaaaactagtaatttttggtaattcccttagtttttcagacttcctttttactcaccttgggtaattctgaaaagatatgatatattttgttttttaagatgtggtcttgctctgtcacccaggctggagttcagtggcacaatcctggctcactgcaacctctacctcctgggctaaagggatccttctgcctcagtctgctaagtaactgggattata

SEQ ID NO: 131966 - DNA, 171 bp, Homo sapiens
gaaaaagaaaaagaaaaaaaaagccaccgaccaggaaggtaaaatattttacggaaccaggcaggggcctcattttgccttttgcccctctgctggtatgagaaaagcaccctttcacaactagtagagtaccagatactggtctcatttcacaaacagtagagtaccaga

SEQ ID NO: 131967 - DNA, 555 bp, Homo sapiens
atagaatcgagctcggtaccgaatccgggcaggcacaaggtgacattagacagaagcttcagaagttggaaggttttgaggctatgaatattacccagctcattcaagtagctactaaggtgtttgttaatccagaggaggaagccaagaaagaggcaaagcacaaagccaaggaaaaggctgatttgttggctgctgctctggttgagagactggttttgtgagaggacgcggacttggtcgtggtcacagtagaggacaagctaggccagggtttgaaggccagcctaggcttgagagggatcagtgtgcaagaatgcaaacagaaagggcattggaaggttgaatgtccagaaagagaaaaggaagaaagtagcagccagggacctgatgcccgcccaaggcctgcagccactagccattgttctaaagctggatgccgatctggtcagcttagcaggagttgaggtagtcggcggagagcagaaggtcgacgcagagcagaaggtcgacgcggagcagaaggtcgacgcagagcagaaggtcgacgcggta

SEQ ID NO: 131968 - DNA, 589 bp, Homo sapiens
atagaatcgagctcggtaccgaatccgggcaggcacaaggtgacattagacagaagcttcagaagttggaaggttttgaggctatgaatattacccagctcattcaagtagctactaaggtgtttgttaatccagaggaggaagccaagaaagaggcaaagcacaaagccaaggaaaaggctgatttgttggctgctgctctggttgagagactggttttgtgagaggacgcggacttggtcgtggtcacagtagaggacaagctaggccagggtttgaaggccagcctaggcttgagagggatcagtgtgcaagaatgcaaacagaaagggcattggaaggttgaatgtccagaaagagaaaaggaagaaagtagcagccagggacctgatgcccgcccaaggcctgcagccactagccattgttctaaagctggatgccgatctggtcagcttagcaggagttgaggaatataaggactgagacagactgggctccatctctctaggcctccaggagcccctggtctctatgaaagtgggagccaaaagatggactttattgtgcccctgttagggagagacttgct

SEQ ID NO: 131969 - DNA, 583 bp, Homo sapiens
cagaacctccttgctgacaataatgggcttgttacccaagtagcgcttcggttcccctttgctagtctcactgcacaagtgaagcctgtttccctgacaagcgcatccactagaatgctgttctcaagactggctgcacaatggaatctgttcgggagccttagacattcctgaggctcggatctcatcataggacttcttcatcgcatgccctgtggcctgggtgttaggagtttgaacactctcctaggtggatgtaataagcacttgaggcccactggtctaaacctggtgctgacacctactgtggcttaggatcacctggagagcttggtaaaacagattgctggggccccagccccagaagttctgattcagtagggctggggtggagctcaagaatttgtatttctaacaagttctcaggtgatgccggttctgggaccagattttgagaaccattgcatttatggcactgagctgaatctttgatctccccagtgggagagaaggtcgatggatgctgcatctttgatctcctcagtgggagagaaggttgatggatgctgctgactactgcagg

SEQ ID NO: 131970 - DNA, 733 bp, Homo sapiens
cagttatatatgtaatgagagagatacatgtatatgtaatgagatacaaaagttatatatataataacaattttgtgtatcatatatgcttatttacatttgtatctcatatatgtttatatatgcttatatatggcttatatatatgcttatatatatatataatgagaaagataaaatgaatggaaacacatgggagggtctcctgaaattattaggatcgggatcaattacaagcatcaattccagtaggagctgacagctaaactgactttggaggacgaatagagaatggcttgaaggatgtgaattagagaggagtttggggacaagggagtgtgaaataagtaccaagaagagaaacgagccatgggcaagaaaaaaataataataaagcttttcaaaaaatgaaagacaacctatatgactaggagtagaggtaaggagtgtaggagatgaaactggagaaagccaagttgcaaagggtcattttatcccatgtcaaagaagttgttccttatcttaagagcaatggaaaggccaatatggggtctttgagcaaaaagtgacaccttcggattgacatttcagaaccattactctgcctgggaaaatgagttgggatgtatcaggaagaccattaggagacagttatgagtccaagtagcctgtaatcccagcactttgggaggccgaagtgggtggatcatctgaggtcaggagttcaagacca

SEQ ID NO: 131971 - DNA, 138 bp, Homo sapiens
ctattattattctgtggtttctgcttttgatcaagataagaatagccgaagcacccacccaggtcactctcatggaatggggttttctgattaaagattggcaagcaactgacaagcttgtagcacatcctttaagct

SEQ ID NO: 131972 - DNA, 356 bp, Homo sapiens
cttactcatgctgttccctcaactggctttgaacacatttattagtaatcatattatcccagcaacaatagtttggcttagaaacacctttgggaaatttgactcattttcagttttctcattttcccataatggctaagctatgcaactttgaatgactatataaagcctagcatcatatttatgtaaaatgaacaaacaaaaaacaaacaaaccttgcagatccctctatgagtgtatttaattttcctttcatccagacatatctgattttcagttgcattttagaaagtaaatgtgttgatttaccatgtgcatttgtcacctactcctgggattttagttcaaaattattt

SEQ ID NO: 131973 - DNA, 411 bp, Homo sapiens
ccccactgcaccccttttaatttgctggagtagtttaaatcaaattatgaacagcttattatactcaggtatttcagtatatatgtccaactgataatcttctttttaatataaccaccatgctgttacttaacagtgattctttttatttttaattgtgacagggtgtcactctgttgcccaggttggagtgtactggcttgattacagctcacctgcaacctcaacagtgattcttaatgtcaacgtgtgctagtctgtgtttgaatttccctaattgtttcaagattcgtttgttaaattgacttgttcaaatgaggggcctaacaaggttcacactttgcattgttaatgtgtcttgagtcgttttttctaatagccattagaaaaaacttacatgtttctaaaatc

SEQ ID NO: 131974 - DNA, 287 bp, Homo sapiens
tcatctactacatcagtggagaacccagcgaaagggtcacctgagaaaagttacctgtttaatcaagcaagtctggggtaccccaggtcgctacagccagctccttaatgaaagctcaccagggccagctgtctctcgtgcggctgcagcgtgtttaatttgcaggtggactccgcgggctgctcctccacaggtgaagtgaaaacagtggaggtcctgggtgaaaatgcgggttctgttcatcctcagaaggtggtaagtgggcagactagagcgtgaagccagag

SEQ ID NO: 131975 - DNA, 183 bp, Homo sapiens
aaaactataaactagtaacaatcatgagcacagataaaataattataataaaaattttagcaaatcaaatcccataataaataaaaaggattatatattataaccaagcagagttcatcccaggaatgcaaagattggtttaacataagaaaatcaatgtaattcactatattaacaaactat

SEQ ID NO: 131976 - DNA, 385 bp, Homo sapiens
aaaaaattggacattataaataatttccttttaattttagctcgatcaaacataaaattcctttcacaagattcatcttccacaaaccttttaccattttctgatcgattctgttttgtcctctaatgtttctctttctcgttttggaagaaccgtcactctactgtagaaagaaaaaattactttctttttcccttaacaaagtctcattctttataacttcctatttagaaagtatcttatttccctcacatacagagttatttccttctagttttaatggtcatccattaattagactttttaactcttggtaaccttaatttctagtgaaaactagggagtgagcaaatttaaactgttttatatcagcactttgtacatg

SEQ ID NO: 131977 - DNA, 494 bp, Homo sapiens
gcctggacaggaagaaggaactctgtctaagcacatttttggttttgtccagtcatgttgtttacacggccattgttacaaagcagaaaagccaccaggcatctctttacctctgaagcaagcattctaaatagttgagagtttgtggtacataaaaagaagccttctctcatgctaatgttttcaaaacaagttgtgacttctgaaagtagagaccaaagaaagaataacttgaacaagatttcagtgggtagaaaataaacactaactttatatgtatttcaagaacgtaaaagaaacaggtgggaaatgaatcctcctcgataagagagaaatgcttagtagggtggaaaaaaaaaaaagacaacattcagcagtttttggaactgtgcgagtccagagagtttctttctttctttctttcttttttttttttctggttagctctcatagccacaaatatgtatattatttccttcttgcccacaatttac

SEQ ID NO: 131978 - DNA, 176 bp, Homo sapiens
gggcattggtcctgcatcattgaaggagccacttgagatcacagaacagtgagaagacaccagcatgccaccactgctgtcgatgcactgcggggggtaacatttgagctcaaagggattgggagagggatattccacccaggctctgggcgccagctgtgtgcccaccaccactg

SEQ ID NO: 131979 - DNA, 240 bp, Homo sapiens
ggttggtctcaaactcctagactcaagcaattttcccacctcagcctctcaaagtgttgggattacaggcatgagccactatgcccagcaaaaactttatctctaatacttatttttcctcctaactgcaaacctgtatacagatgtcttccatgtatcttatctttttaactttttgttatggaagtattcaaacataatgaaagtagagatggtaacataactgacttgatatatcca

SEQ ID NO: 131980 - DNA, 1533 bp, Homo sapiens
tggcgtcacttcccttcccgcgatggcggcacagggagctgctgcggcggttgcggcggggacttcaggggtcgcgggggagggcgagcccgggcccggggagaatgcggccgctgaggggaccgccccatccccgggccgcgtctctccgccgaccccggcgcgcggcgagccggaagtcacggtggagatcggagaaacgtacctgtgccggcgaccggatagcacctggcattctgctgaagtgatccagtctcgagtgaacgaccaggagggccgagaggaattctatgtacactacgtgggctttaaccggcggctggacgagtgggtagacaagaaccggctggcgctgaccaagacagtgaaggatgctgtacagaagaactcagagaagtacctgagcgagctcgcagagcagcctgagcgcaagatcactcgcaaccaaaagcgcaagcatgatgagatcaaccatgtgcagaagacttatgcagagatggaccccaccacagcagccttggagaaggagcatgaggcgatcaccaaggtgaagtatgtggacaagatccacatcgggaactacgaaattgatgcctggtatttctcaccattccccgaagactatgggaaacagcccaagctctggctctgcgagtactgcctcaagtacatgaaatatgagaagagctaccgcttccacttgggtcagtgccagtggcggcagccccccgggaaagagatctaccgcaagagcaacatctccgtgtacgaagttgatggcaaagaccataagatttactgtcagaacctgtgtctgctggccaagcttttcctggaccataagacactgtactttgacgtggagccgttcgtcttttacatcctgactgaggtggaccggcagggggcccacattgttggctacttctccaaggagaaggagtccccggatggaaacaatgtggcctgcatcctgaccttgcccccctaccaacgccgcggctacgggaagttcctcatcgctttcagttatgagctctccaagctggagagcacagtcggctccccggagaagccgctgtctgacctgggcaagctcagctaccgcagctactggtcctgggtgctgctggagatcctgcgggacttccggggcacactgtccatcaaggacctcagccagatgaccagtatcacccaaaatgacatcatcagtaccctgcaatccctcaatatggtcaagtactggaagggccagcacgtgatctgtgtcacacccaagctggtggaggagcacctcaaaagtgcccagtataagaaaccacccatcacagtggactccgtctgcctcaagtgggcaccccccaagcacaagcaagtcaagctctccaagaagtgagcagcctggcccctgctgtcggacctgagcctcctggctcccagcctgtaaatatgtatagacctgttttgtcatttttttaataaagtcagttctggtggccctggactttggaggggaaggggaggccaaga

SEQ ID NO: 131981 - DNA, 1961 bp, Homo sapiens
  misc_feature (1245)..(1245): n is a, c, g, or t
tggcgtcacttcccttcccgcgatggcggcacagggagctgctgcggcggttgcggcggggacttcaggggtcgcgggggagggcgagcccgggcccggggagaatgcggccgctgaggggaccgccccatccccgggccgcgtctctccgccgaccccggcgcgcggcgagccggaagtcacggtggagatcggagaaacgtacctgtgccggcgaccggatagcacctggcattctgctgaagtgatccagtctcgagtgaacgaccaggagggccgagaggaattctatgtacactacgtgggctttaaccggcggctggacgagtgggtagacaagaaccggctggcgctgaccaagacagtgaaggatgctgtacagaagaactcagagaagtacctgagcgagctcgcagagcagcctgagcgcaagatcactcgcaaccaaaagcgcaagcatgatgagatcaaccatgtgcagaagacttatgcagagatggaccccaccacagcagccttggagaaggagcatgaggcgatcaccaaggtgaagtatgtggacaagatccacatcgggaactacgaaattgatgcctggtatttctcaccattccccgaagactatgggaaacagcccaagctctggctctgcgagtactgcctcaagtacatgaaatatgagaagagctaccgcttccacttgggtcagtgccagtggcggcagccccccgggaaagagatctaccgcaagagcaacatctccgtgtacgaagttgatggcaaagaccataagatttactgtcagaacctgtgtctgctggccaagcttttcctggaccataagacactgtactttgacgtggagccgttcgtcttttacatcctgactgaggtggaccggcagggggcccacattgttggctacttctccaaggagaaggagtccccggatggaaacaatgtggcctgcatcctgaccttgcccccctaccaacgccgcggctacgggaagttcctcatcgctttcagttatgagctctccaagctggagagcacagtcggctccccggagaagccgctgtctgacctgggcaagctcagctaccgcagctactggtcctgggtgctgctggagatcctgcgggacttccggggcacactgtccatcaaggacctcaggtgagggggcctcccgggccctgggggcaggacttgccctgagatgggccacgatcctgcttcctnataccctgtcaccatcctggccagatcccacaagggcaccaggtctggcatttgctctcatccctttttgcagccagatgaccagtatcacccaaaatgacatcatcagtaccctgcaatccctcaatatggtcaagtactggaagggccagcacgtgatctgtgtcacacccaagctggtggaggagcacctcaaaagtgcccagtataagaaaccacccatcacaggtgggtggggggctgctgtgtgtcgggggcggtgggggagtgtcagtatatggactggtaggagtcaaggcctccttattgctgtcacatgatcccaaaccagtcagaccagctcccaggatggagcccggggcaggcctctcattcctgggcttccctgcccctccccagcacagcctgcccttttgttctcacctggaggaggtgaaactggcctgagcccagaggagggcagccaggtgtgagctggcctggcccaggcccagccctgcctcccgccccttctccctggactccgtctgcctcaagtgggcaccccccaagcacaagcaagtcaagctctccaagaagtgagcagcctggcccctgctgtcggacctgagcctcctggctcccagcctgtaaatatgtatagacctgttttgtcatttttttaataaagtcagttctggtggccctggactttggaggggaaggggaggccaaga

SEQ ID NO: 131982 - DNA, 1696 bp, Homo sapiens
tggcgtcacttcccttcccgcgatggcggcacagggagctgctgcggcggttgcggcggggacttcaggggtcgcgggggagggcgagcccgggcccggggagaatgcggccgctgaggggaccgccccatccccgggccgcgtctctccgccgaccccggcgcgcggcgagccggaagtcacggtggagatcggagaaacgtacctgtgccggcgaccggatagcacctggcattctgctgaagtgatccagtctcgagtgaacgaccaggagggccgagaggaattctatgtacactacgtgggctttaaccggcggctggacgagtgggtagacaagaaccggctggcgctgaccaagacagtgaaggatgctgtacagaagaactcagagaagtacctgagcgagctcgcagagcagcctgagcgcaagatcactcgcaaccaaaagcgcaagcatgatgagatcaaccatgtgcagaagacttatgcagagatggaccccaccacagcagccttggagaaggagcatgaggcgatcaccaaggtgaagtatgtggacaagatccacatcgggaactacgaaattgatgcctggtatttctcaccattccccgaagactatgggaaacagcccaagctctggctctgcgagtactgcctcaagtacatgaaatatgagaagagctaccgcttccacttgggtcagtgccagtggcggcagccccccgggaaagagatctaccgcaagagcaacatctccgtgtacgaagttgatggcaaagaccataagatttactgtcagaacctgtgtctgctggccaagcttttcctggaccataagacactgtactttgacgtggagccgttcgtcttttacatcctgactgaggtggaccggcagggggcccacattgttggctacttctccaaggagaaggagtccccggatggaaacaatgtggcctgcatcctgaccttgcccccctaccaacgccgcggctacgggaagttcctcatcgctttcagttatgagctctccaagctggagagcacagtcggctccccggagaagccgctgtctgacctgggcaagctcagctaccgcagctactggtcctgggtgctgctggagatcctgcgggacttccggggcacactgtccatcaaggacctcagccagatgaccagtatcacccaaaatgacatcatcagtaccctgcaatccctcaatatggtcaagtactggaagggccagcacgtgatctgtgtcacacccaagctggtggaggagcacctcaaaagtgcccagtataagaaaccacccatcacaggtgggtggggggctgctgtgtgtcgggggcggtgggggagtgtcagtatatggactggtaggagtcaaggcctccttattgctgtcacatgatcccaaaccagtcagaccagctcccaggatggagcccggggcaggcctctcattcctgggcttccctgccctggactccgtctgcctcaagtgggcaccccccaagcacaagcaagtcaagctctccaagaagtgagcagcctggcccctgctgtcggacctgagcctcctggctcccagcctgtaaatatgtatagacctgttttgtcatttttttaataaagtcagttctggtggccctggactttggaggggaaggggaggccaaga

SEQ ID NO: 131983 - DNA, 1929 bp, Homo sapiens
  misc_feature (1245)..(1245): n is a, c, g, or t
tggcgtcacttcccttcccgcgatggcggcacagggagctgctgcggcggttgcggcggggacttcaggggtcgcgggggagggcgagcccgggcccggggagaatgcggccgctgaggggaccgccccatccccgggccgcgtctctccgccgaccccggcgcgcggcgagccggaagtcacggtggagatcggagaaacgtacctgtgccggcgaccggatagcacctggcattctgctgaagtgatccagtctcgagtgaacgaccaggagggccgagaggaattctatgtacactacgtgggctttaaccggcggctggacgagtgggtagacaagaaccggctggcgctgaccaagacagtgaaggatgctgtacagaagaactcagagaagtacctgagcgagctcgcagagcagcctgagcgcaagatcactcgcaaccaaaagcgcaagcatgatgagatcaaccatgtgcagaagacttatgcagagatggaccccaccacagcagccttggagaaggagcatgaggcgatcaccaaggtgaagtatgtggacaagatccacatcgggaactacgaaattgatgcctggtatttctcaccattccccgaagactatgggaaacagcccaagctctggctctgcgagtactgcctcaagtacatgaaatatgagaagagctaccgcttccacttgggtcagtgccagtggcggcagccccccgggaaagagatctaccgcaagagcaacatctccgtgtacgaagttgatggcaaagaccataagatttactgtcagaacctgtgtctgctggccaagcttttcctggaccataagacactgtactttgacgtggagccgttcgtcttttacatcctgactgaggtggaccggcagggggcccacattgttggctacttctccaaggagaaggagtccccggatggaaacaatgtggcctgcatcctgaccttgcccccctaccaacgccgcggctacgggaagttcctcatcgctttcagttatgagctctccaagctggagagcacagtcggctccccggagaagccgctgtctgacctgggcaagctcagctaccgcagctactggtcctgggtgctgctggagatcctgcgggacttccggggcacactgtccatcaaggacctcaggtgagggggcctcccgggccctgggggcaggacttgccctgagatgggccacgatcctgcttcctnataccctgtcaccatcctggccagatcccacaagggcaccaggtctggcatttgctctcatccctttttgcagccagatgaccagtatcacccaaaatgacatcatcagtaccctgcaatccctcaatatggtcaagtactggaagggccagcacgtgatctgtgtcacacccaagctggtggaggagcacctcaaaagtgcccagtataagaaaccacccatcacaggtgggtggggggctgctgtgtgtcgggggcggtgggggagtgtcagtatatggactggtaggagtcaaggcctccttattgctgtcacatgatcccaaaccagtcagaccagctcccaggatggagcccggggcaggcctctcattcctgggcttccctgcccctccccagcacagcctgcccttttgttctcacctggaggaggtgaaactggcctgagcccagaggagggcagccaggtgtgagctggcctggcccaggcccagccctgcctcccgccccttctccctggactccgtctgcctcaagtgggcaccccccaagcacaagcaagtcaagctctccaagaagtgagcagcctggcccctgctgtcggacctgagcctcctggctcccagcctgtaaatatgtatagacctgttttgtcatttttttaataaagtcagttctggtggc

SEQ ID NO: 131984 - DNA, 1654 bp, Homo sapiens
tggcgtcacttcccttcccgcgatggcggcacagggagctgctgcggcggttgcggcggggacttcaggggtcgcgggggagggcgagcccgggcccggggagaatgcggccgctgaggggaccgccccatccccgggccgcgtctctccgccgaccccggcgcgcggcgagccggaagtcacggtggagatcggagaaacgtacctgtgccggcgaccggatagcacctggcattctgctgaagtgatccagtctcgagtgaacgaccaggagggccgagaggaattctatgtacactacgtgggctttaaccggcggctggacgagtgggtagacaagaaccggctggcgctgaccaagacagtgaaggatgctgtacagaagaactcagagaagtacctgagcgagctcgcagagcagcctgagcgcaagatcactcgcaaccaaaagcgcaagcatgatgagatcaaccatgtgcagaaggtccggatcccttcccatccacgggcccaggaggcccagcttctctgccagttcccttgggtctctcgggccccagtgccaaaaccatagcaaatcccatttcttaagctcctgtagtgtgtcagggactttacctacttcctcttacttacttttcataggtaagaaaacagacagagggtaagggcttcgctgcagtctcacagcaaggaaatggcacagctgggactagaactcaggcctccggcactggtagcctcttttgtctcctagtagctgtgtcttagtagaaaaaatgacttgaagttcagtgggaaagacgagaatgttattcggcagttgctatagccaagcaccctgccaagtgctgtatatgtataagctcctcaaatccttcccaacaattcaacacacaggaatagttacttttttggtaggtgaggaagcaggctgagagagattaagtaacatgcccaaggtcacacagccagtaaaacggtgggctggaattagaataataatgccaaacacttgttagccggtgagcagaagtattcagctaaatggtttttgtgtgtgtgtgtgtgtgtgtgtgtgtgtgtgtgtgttttgttttttgtttttttttttgagacggagtcttgctctgtcgcccaggttggagtacagtggaatgatctcggctcactgtaaactccgccacctgggttcaagcaattttcctgtctcagcctcccaagtagctaggactacaggtacctgccaccacgcccggataatttttgtatttttagtagagacgaggtttcgccatattggtcaggctggtctcgaactcctgacctcaggtgatctgcccacctcggcctcccaaagtgctgggattacaggcgtgagctactgcgcccggcctaagctaagtgttttaatacatgacctcactgacatttcacagtaggcctgtgaagtaagcatgcagaagagctactcagcctcctgagtagctgggaccataggcacgtgccaccatgcccagctaattttttatttttttgtagagacgggatctgctatgttgcccacactagtctcaaactcctggtctcaagcgatcctcctgccttagcctcccaaagtgctgggattacaggtgtgagccactgcgcccga

SEQ ID NO: 131985 - DNA, 979 bp, Homo sapiens
tggcgtcacttcccttcccgcgatggcggcacagggagctgctgcggcggttgcggcggggacttcaggggtcgcgggggagggcgagcccgggcccggggagaatgcggccgctgaggggaccgccccatccccgggccgcgtctctccgccgaccccggcgcgcggcgagccggaagtcacggtggagatcggagaaacgtacctgtgccggcgaccggatagcacctggcattctgctgaagtgatccagtctcgagtgaacgaccaggagggccgagaggaattctatgtacactacgtgggctttaaccggcggctggacgagtgggtagacaagaaccggctggcgctgaccaagacagtgaaggatgctgtacagaagaactcagagaagtacctgagcgagctcgcagagcagcctgagcgcaagatcactcgcaaccaaaagcgcaagcatgatgagatcaaccatgtgcagaaggtccggatcccttcccatccacgggcccaggaggcccagcttctctgccagttcccttgggtctctcgggccccagtgccaaaaccatagcaaatcccatttcttaagctcctgtagtgtgtcagggactttacctacttcctcttacttacttttcataggtaagaaaacagacagagggtaagggcttcgctgcagtctcacagcaaggaaatggcacagctgggactagaactcaggcctccggcactggtagcctcttttgtctcctagtagctgtgtcttagtagaaaaaatgacttgaagttcagtgggaaagacgagaatgttattcggcagttgctatagccaagcaccctgccaagtgctgtatatgtataagctcctcaaatccttcccaacaattcaacacacaggaatagttacttttttggtaggtgaggaagtgtgggaggatcgcttgagcccaggagttcggggctgtagtgcgctatg

SEQ ID NO: 131986 - DNA, 1077 bp, Homo sapiens
  misc_feature (3)..(3): n is a, c, g, or t
  misc_feature (26)..(27): n is a, c, g, or t
  misc_feature (35)..(35): n is a, c, g, or t
  misc_feature (112)..(112): n is a, c, g, or t
  misc_feature (279)..(279): n is a, c, g, or t
  misc_feature (300)..(300): n is a, c, g, or t
  misc_feature (348)..(348): n is a, c, g, or t
gtnaattgccggggcaaccttcggtnnactgggtngccagagtgacaagggctgcctcggcaactagggcactgagttgtcggggcagcctgtggaaatgggccactagagntgcctgggccgctcatggcagctggggcactgagttctcggggcagtctggggcagctggagcactggagcttttggggcagcctctggcaacaggggtgctggagttgccagggcagcctggggcgccagagttgcctgggcagcctgtggcaactgtggcgctgnagatctctgttcagtctgtgntgacaacatcggagctgtcaacgatgaccgtgtcgcagtccctggagntgccctcgacgacagcgctggaatcctataatacggtagcacaggagctgcctactacattagtgggggagacttctgtaacagtaccagatgaccagtatcacccaaaatgacatcatcagtaccctgcaatccctcaatatggtcaagtactggaagggccagcacgtgatctgtgtcacacccaagctggtggaggagcacctcaaaagtgcccagtataagaaaccacccatcacaggtgggtggggggctgctgtgtgtcgggggcggtgggggagtgtcagtatatggactggtaggagtcaaggcctccttattgctgtcacatgatcccaaaccagtcagaccagctcccaggatggagcccggggcaggcctctcattcctgggcttccctgcccctccccagcacagcctgcccttttgttctcacctggaggaggtgaaactggcctgagcccagaggagggcagccaggtgtgagctggcctggcccaggcccagccctgcctcccgccccttctccctggactccgtctgcctcaagtgggcaccccccaagcacaagcaagtcaagctctccaagaagtgagcagcctggcccctgctgtcggacctgagcctcctggctcccagcctgtaaatatgtatagacctgttttgtcatttttttaataaagtcagttctggtggccctggactttggaggggaaggggaggccaaga

SEQ ID NO: 131987 - DNA, 501 bp, Homo sapiens
gttagccggtgagcagaagtattcagctaaatggtttttgtgtgtgtgtgtgtgtgtgtgtgtgtgtgtgtgtgttttgttttttgtttttttttttgagacggagtcttgctctgtcgcccaggttggagtacagtggaatgatctcggctcactgtaaactccgccacctgggttcaagcaattttcctgtctcagcctcccaagtagctaggactacaggtacctgccaccacgcccggataatttttgtatttttagtagagacgaggtttcgccatattggtcaggctggtctcgaactcctgacctcaggtgatctgcccacctcggcctcccaaagtgctgggattacaggcgtgagctactgcgcccggcctaagctaagtgttttaatacatgacctcactgacatttcacagtaggcctgtgaagtaagcatgcagaagagctacagataagtttagggacccagacaggaatttgatcaaccagctaaat

SEQ ID NO: 131988 - DNA, 1501 bp, Homo sapiens
tggcgtcacttcccttcccgcgatggcggcacagggagctgctgcggcggttgcggcggggacttcaggggtcgcgggggagggcgagcccgggcccggggagaatgcggccgctgaggggaccgccccatccccgggccgcgtctctccgccgaccccggcgcgcggcgagccggaagtcacggtggagatcggagaaacgtacctgtgccggcgaccggatagcacctggcattctgctgaagtgatccagtctcgagtgaacgaccaggagggccgagaggaattctatgtacactacgtgggctttaaccggcggctggacgagtgggtagacaagaaccggctggcgctgaccaagacagtgaaggatgctgtacagaagaactcagagaagtacctgagcgagctcgcagagcagcctgagcgcaagatcactcgcaaccaaaagcgcaagcatgatgagatcaaccatgtgcagaagacttatgcagagatggaccccaccacagcagccttggagaaggagcatgaggcgatcaccaaggtgaagtatgtggacaagatccacatcgggaactacgaaattgatgcctggtatttctcaccattccccgaagactatgggaaacagcccaagctctggctctgcgagtactgcctcaagtacatgaaatatgagaagagctaccgcttccacttgggtcagtgccagtggcggcagccccccgggaaagagatctaccgcaagagcaacatctccgtgtacgaagttgatggcaaagaccataagatttactgtcagaacctgtgtctgctggccaagcttttcctggaccataagacactgtactttgacgtggagccgttcgtcttttacatcctgactgaggtggaccggcagggggcccacattgttggctacttctccaaggagaaggagtccccggatggaaacaatgtggcctgcatcctgaccttgcccccctaccaacgccgcggctacgggaagttcctcatcgctttcagttatgagctctccaagctggagagcacagtcggctccccggagaagccgctgtctgacctgggcaagctcagctaccgcagctactggtcctgggtgctgctggagatcctgcgggacttccggggcacactgtccatcaaggacctcagccagatgaccagtatcacccaaaatgacatcatcagtaccctgcaatccctcaatatggtcaagtactggaagggccagcacgtgatctgtgtcacacccaagctggtggaggagcacctcaaaagtgcccagtataagaaaccacccatcacagtggactccgtctgcctcaagtgggcaccccccaagcacaagcaagtcaagctctccaagaagtgagcagcctggcccctgctgtcggacctgagcctcctggctcccagcctgtaaatatgtatagacctgttttgtcatttttttaataaagtcagttctggtggc

SEQ ID NO: 131989 - DNA, 1790 bp, Homo sapiens
tggcgtcacttcccttcccgcgatggcggcacagggagctgctgcggcggttgcggcggggacttcaggggtcgcgggggagggcgagcccgggcccggggagaatgcggccgctgaggggaccgccccatccccgggccgcgtctctccgccgaccccggcgcgcggcgagccggaagtcacggtggagatcggagaaacgtacctgtgccggcgaccggatagcacctggcattctgctgaagtgatccagtctcgagtgaacgaccaggagggccgagaggaattctatgtacactacgtgggctttaaccggcggctggacgagtgggtagacaagaaccggctggcgctgaccaagacagtgaaggatgctgtacagaagaactcagagaagtacctgagcgagctcgcagagcagcctgagcgcaagatcactcgcaaccaaaagcgcaagcatgatgagatcaaccatgtgcagaagacttatgcagagatggaccccaccacagcagccttggagaaggagcatgaggcgatcaccaaggtgaagtatgtggacaagatccacatcgggaactacgaaattgatgcctggtatttctcaccattccccgaagactatgggaaacagcccaagctctggctctgcgagtactgcctcaagtacatgaaatatgagaagagctaccgcttccacttgggtcagtgccagtggcggcagccccccgggaaagagatctaccgcaagagcaacatctccgtgtacgaagttgatggcaaagaccataagatttactgtcagaacctgtgtctgctggccaagcttttcctggaccataagacactgtactttgacgtggagccgttcgtcttttacatcctgactgaggtggaccggcagggggcccacattgttggctacttctccaaggagaaggagtccccggatggaaacaatgtggcctgcatcctgaccttgcccccctaccaacgccgcggctacgggaagttcctcatcgctttcagttatgagctctccaagctggagagcacagtcggctccccggagaagccgctgtctgacctgggcaagctcagctaccgcagctactggtcctgggtgctgctggagatcctgcgggacttccggggcacactgtccatcaaggacctcagccagatgaccagtatcacccaaaatgacatcatcagtaccctgcaatccctcaatatggtcaagtactggaagggccagcacgtgatctgtgtcacacccaagctggtggaggagcacctcaaaagtgcccagtataagaaaccacccatcacaggtgggtggggggctgctgtgtgtcgggggcggtgggggagtgtcagtatatggactggtaggagtcaaggcctccttattgctgtcacatgatcccaaaccagtcagaccagctcccaggatggagcccggggcaggcctctcattcctgggcttccctgcccctccccagcacagcctgcccttttgttctcacctggaggaggtgaaactggcctgagcccagaggagggcagccaggtgtgagctggcctggcccaggcccagccctgcctcccgccccttctccctggactccgtctgcctcaagtgggcaccccccaagcacaagcaagtcaagctctccaagaagtgagcagcctggcccctgctgtcggacctgagcctcctggctcccagcctgtaaatatgtatagacctgttttgtcatttttttaataaagtcagttctggtggc

SEQ ID NO: 131990 - DNA, 2031 bp, Homo sapiens
agctggagttgatataaagaccaccccatcactttccttcaacatcttttcaaccccgaaaaaataccttttttgtaggtgagaaagcaggctgaaagagatttagtaacatgcccaaggtcacacagccagtaaaacggtgggctggaattagaataataatgccaaacacttgttagccggtgagcagaagtattcagctaaatggtttttgtgtgtgtgtgtgtgtgtgtgtgtgtgtgtgtgtgttttgttttttgtttttttttttgagacggagtcttgctctgtcgcccaggttggagtacagtggaatgatcttggctcactgtaaactccgccacctgggttcaagcaattttcctgcctcagcctcccgagtagttgggattacaggtgtgtgccaccatgcctggcttttttttttttcgtctttttggtacagatggggttttgccatgttgaccaggctggtctcaaactcctggcctcaagtgatctgcccatctcggcctccagaagtactgggattacaggtgtgagccacacacccagccagttattttctcattcgtaaaatgagaataacagcctcaacctgatccacctcacagttgtggcagtgattgagtagaatggcagaggtggaccagtgaggttagctgatgtgtggccctgaactctggaaactgcttctcagtgtgcaggattccttttgttccagccttaccttcctgatgaccctagcctttttccatcacagattctgctgaagtgatccagtctcgagtgaacgaccaggagggccgagaggaattctatgtacactacgtgggctttaaccggcggctggacgagtgggtagacaagaaccggctggcgctgaccaagacagtgaaggatgctgtacagaagaactcagagaagtacctgagcgagctcgcagagcagcctgagcgcaagatcactcgcaaccaaaagcgcaagcatgatgagatcaaccatgtgcagaagacttatgcagagatggaccccaccacagcagccttggagaaggagcatgaggcgatcaccaaggtgaagtatgtggacaagatccacatcgggaactacgaaattgatgcctggtatttctcaccattccccgaagactatgggaaacagcccaagctctggctctgcgagtactgcctcaagtacatgaaatatgagaagagctaccgcttccacttgggtcagtgccagtggcggcagccccccgggaaagagatctaccgcaagagcaacatctccgtgtacgaagttgatggcaaagaccataagatttactgtcagaacctgtgtctgctggccaagcttttcctggaccataagacactgtactttgacgtggagccgttcgtcttttacatcctgactgaggtggaccggcagggggcccacattgttggctacttctccaaggagaaggagtccccggatggaaacaatgtggcctgcatcctgaccttgcccccctaccaacgccgcggctacgggaagttcctcatcgctttcagttatgagctctccaagctggagagcacagtcggctccccggagaagccgctgtctgacctgggcaagctcagctaccgcagctactggtcctgggtgctgctggagatcctgcgggacttccggggcacactgtccatcaaggacctcagccagatgaccagtatcacccaaaatgacatcatcagtaccctgcaatccctcaatatggtcaagtactggaagggccagcacgtgatctgtgtcacacccaagctggtggaggagcacctcaaaagtgcccagtataagaaaccacccatcacagtggactccgtctgcctcaagtgggcaccccccaagcacaagcaagtcaagctctccaagaagtgagcagcctggcccctgctgtcggacctgagcctcctggctcccagcctgtaaatatgtatagacctgttttgtcatttttttaataaagtcagttctggtggc

SEQ ID NO: 131991 - DNA, 1108 bp, Homo sapiens
  misc_feature (938)..(938): n is a, c, g, or t
  misc_feature (950)..(950): n is a, c, g, or t
  misc_feature (1040)..(1040): n is a, c, g, or t
  misc_feature (1105)..(1105): n is a, c, g, or t
tggcgtcacttcccttcccgcgatggcggcacagggagctgctgcggcggttgcggcggggacttcaggggtcgcgggggagggcgagcccgggcccggggagaatgcggccgctgaggggaccgccccatccccgggccgcgtctctccgccgaccccggcgcgcggcgagccggaagtcacggtggagatcggagaaacgtacctgtgccggcgaccggatagcacctggcattctgctgaagtgatccagtctcgagtgaacgaccaggagggccgagaggaattctatgtacactacgtgggctttaaccggcggctggacgagtgggtagacaagaaccggctggcgctgaccaagacagtgaaggatgctgtacagaagaactcagagaagtacctgagcgagctcgcagagcagcctgagcgcaagatcactcgcaaccaaaagcgcaagcatgatgagatcaaccatgtgcagaagacttatgcagagatggaccccaccacagcagccttggagaaggagcatgaggcgatcaccaaggtgaagtatgtggacaagatccacatcgggaactacgaaattgatgcctggtatttctcaccattccccgaagactatgggaaacagcccaagctctggctctgcgagtactgcctcaagtacatgaaatatgagaagagctaccgcttccacttgggtcagtgccagtggcggcagccccccgggaaagagatctaccgcaagagcaacatctccgtgtacgaagttgatggcaaagaccataagatttactgtcagaacctgtgtctgctggccaagcttttcctggaccataagacactgtactttgacgtggagccgttcgtcttttacatcctgactgaggtggaccggcagggggcccacattgttggctacttctccaaggagnaggagtccccgnatggaaacaatgtggctgcggtagctgagcttgcccaggtcagacagcggcttctccggggagccgactgtgtctccagcttggagagcncataactgaaagcgatgaggaacttcccgtagccgcggcgttggtacggggggcaaggtcaggantca

SEQ ID NO: 131992 - DNA, 965 bp, Homo sapiens
tggcgtcacttcccttcccgcgatggcggcacagggagctgctgcggcggttgcggcggggacttcaggggtcgcgggggagggcgagcccgggcccggggagaatgcggccgctgaggggaccgccccatccccgggccgcgtctctccgccgaccccggcgcgcggcgagccggaagtcacggtggagatcggagaaacgtacctgtgccggcgaccggatagcacctggcattctgctgaagtgatccagtctcgagtgaacgaccaggagggccgagaggaattctatgtacactacgtgggctttaaccggcggctggacgagtgggtagacaagaaccggctggcgctgaccaagacagtgaaggatgctgtacagaagaactcagagaagtacctgagcgagctcgcagagcagcctgagcgcaagatcactcgcaaccaaaagcgcaagcatgatgagatcaaccatgtgcagaaggtccggatcccttcccatccacgggcccaggaggcccagcttctctgccagttcccttgggtctctcgggccccagtgccaaaaccatagcaaatcccatttcttaagctcctgtagtgtgtcagggactttacctacttcctcttacttacttttcataggtaagaaaacagacagagggtaagggcttcgctgcagtctcacagcaaggaaatggcacagctgggactagaactcaggcctccggcactggtagcctcttttgtctcctagtagctgtgtcttagtagaaaaaatgacttgaagttcagtgggaaagacgagaatgttattcggcagttgctatagccaagcaccctgccaagtgctgtatatgtataagctcctcaaatccttcccaacaattcaacacacaggaatagttacttttttggtaggtgaggaagaaaggaattccggatcctctagagcgcctcccccc

SEQ ID NO: 131993 - DNA, 588 bp, Homo sapiens
cggcctgattatgggcaacttttagttcttcatacctcactagttactagtgagtagcccttagttttgttttgttttttaagtctatacgttagcatgtaatagttgtatgtaatacaggaaaggcattcttcaatctttttttttttttgagatggagtctcactctgttgctgaggctggagtgcagtggtgtgttcttggctcactgcaacctccacctcccaggtccaagcgattctcctgcctcagcctcccaagtacttgggactacaggtgcaccatgccatgcacagctaatttttgtattttcagtagagacggggtttcaccatgttggccaggctggtcttgaactgacctcaagtgattctccagcctcagcctcccaaagtgctgggattacagacatgcgacaccatactggctgtcttcaaaccttcaatcattcacaacccatgcaatggtccccagcctggcaaccacacggcacagcttctatggctcccttctgccttaactaggctggagggaatgagggcatagagggtgcaagagagtggacacaacagcctaataaccttttct

SEQ ID NO: 131994 - DNA, 493 bp, Homo sapiens
aataaaatcttaagaacattgtttgaaagagcattttctgtaagaaaattacaaggaaggcatttcctgcaagaaaattaacaagggacagggctactggcttcccagtcccccaaattgtaagaactgcagttataggaattttataacggtggctgattttgtgagtgtatgtttgtgtgtatgtggaaaaagtagaggatttgagaaaaaatactttaagctcttttatcagtggacatactctgggattggagaagaggaatcacgttggcttgattatgcttctaggatgatatcctacattaaccaataaaaactctttgagtgtgtgcctactgtggaattgaactgtgttaggtgctaaaggttgacgtaaaaattaaaacgaacaaacagcaaagccttgtcttcaaagactacatggcctaactgaggacaccacatgggtaggcagagcaaaagagttgtcaactattttgtcattaaatga

SEQ ID NO: 131995 - DNA, 150 bp, Homo sapiens
tgcagactgcacgctgtctcagcgcaccgttgttcgttcccaccgtgtgaattttcccataataaaaaaaagtgcctgctgtctgattctgtttacataaaattccagaaaattccggctaatctatattgacagaaaggaggcctgagg

SEQ ID NO: 131996 - DNA, 649 bp, Homo sapiens
gttcctgtgttggtttgctgaggataacggcttccaactccatccatgtccctgcaaaggacatgatctcattcctttttatcagctgccttttccaccccactttcctggcagaataagaaactgtaacccccagttttccctcctctttgcccttttttcctcacttggtccagggaggtaggaacaaatcttgtttgttttctgcccatgctatgactgtctgttctctgtgtaaacacttacttgttttgagggaaaagaaccagactgtacttctaacccctagaactagacagttgttatcagaccctatacatgaagctacattctaactgacagtttagcatcccagttaacttgatatggtagtaaatggataccctgagatattatcagcattctgatccctggaaaagggtatcaatcactgaacattaataaatttgcttactaattaattaggctacgatgagtttaaatagtctgggtgcactaaccaaatttaatatctggacatgcaaagctgaggactggatgctagaatgaggtagcctaccaagacacctgtgctgtgtgtgaagttccatgagggcaaccaacttgccttccacgctaacatttctatcttttctccctgtaactaaag

SEQ ID NO: 131997 - DNA, 398 bp, Homo sapiens
gtttcaggatatgcttctctttctcactaacacaaaaaaagaattgtcatcaaatacagatatatgaaattatatccatttcacaataacagaataaaatctatattttaaagaataggaacaacatatttctcctaaatataatcaatatatttcttcaaagccttatgaaaactattaactgacatattaatttaacattataaaagtttcaaacaggctgggcacggtggcttacgcctataatcccagcactttgggaggttgaggagggcagatcacgaggtcaagagatcgagaccatcctggccaatatggcgaaaccccatctctactaaaaatacaaaaattagctggtcatggtagagtgtgcctgtaatcccagctacttgggaggc

SEQ ID NO: 131998 - DNA, 508 bp, Homo sapiens
ttgtttccaggcattgccaggggaaagagctagaaaatgtaccatcacagggtcgtgcctaaccttagaaacttttacctgtttctcctttaaactacactaaaagtccaagtttccaatgatattatcttaaccagtcatttgctttatcccataaaatacacacaaaagccttagaataacaataccaacataacaagcataatacgattactctaacagttgaggattatacttttggagacgctttatccttcagttataatctattagggccatataatcaaacatctgacatttgaaatagtgcctctctgtatggttatgtaagcaaattgagagagagaaaaagagagagaaagaaatgaattagaatcacctgtctcgtttcaatctttagggctcttttacactttaattttgttttaaaattgtgcaagatatgtatattgtcccaaagtcaaagagacaaaacaagatatattcagaagtccagcttccagtttct

SEQ ID NO: 131999 - DNA, 379 bp, Homo sapiens
cttgaaagtaaattctactgcaaacccacataaccatttatacggcttttcctaataaaatgcctaatttcaaaaactggctgggcacggtgcctcatgcctgtaatcctgcaccttgggagaccacttgaggtcaggagttcaagaccagcaacaatatacttcgctatcaaccgataaggaaatgagatgttagagaagttaatcaatcaggaacaagattcctagatgtcaaggtttcatgataatccaaagtcctctgataacagagtttggtcttttccttttctgctaaagttctcagatgtttgtagctatttttcagctggtgacttagctttcctcgctgggttacaaattctataaagtttcactcagc

SEQ ID NO: 132000 - DNA, 387 bp, Homo sapiens
gaggtaaacatggagtgagtggtgtgggatgtgttgctcccctcgcccctgatgctgccctaagaagaggcagacaaccacagacccggggcctctgcaacaggcccagctggtgtctctcggaggctggctggttcctgactcacccccgggcttccccttccactgtggttttcctgtcagcagctgattcactgtgctgacatggacaggcagctgatggaggaaagagacctgtgttctggtccttggagttggctgctgctctgctgtgtgtatgttgtgtgaccttagataagttccttctctctgggattccttccctgacttgctgatgccccattctttccttggctctcggggagttctgggacctgggatctatcc

SEQ ID NO: 132001 - DNA, 547 bp, Homo sapiens
ggccaattgaaaatcttatttttgaaggaggtttaataacataagaagatttttaagataatattgggggaaggagagcaaattttatatgaaagcataattcatatgtaatatgcatagcaaacatttatagagaataatatcaaatattggtgaggagatggagaaaccatatttcatacacttagagttgcattttaaattgatgtagccatttgagaggaaaaatggcagtatcaaaatttaaaatcttttgacccaacaatttcacttcatggtatctttcttaaatgtttgcttgtgcatgggaggcaattcttaggatgatctttgaagcactgtgtataatgctttgaagcattttgaaacaatctaaatgttaatccgtttagaattaaataaattggaattaattaaatgattatgtccacattgtggtctattatatagcaaatgaaaagaatgaggtatagacatggaaaaaacggatcccaagacagtctacatgaaaaaaggaagttacagagaagaatatgtgtgatatgcc

SEQ ID NO: 132002 - DNA, 738 bp, Homo sapiens
actacaggtgcatgctaccacacctggctaattttttttgttgttttttgttgttgttgttgttttgttttttgtagaaacagggtgttactatgttgcccaggctggtctcaaactcctggcctcaagtgatactcctgcctcaatcgcccaaggtgctgagattacaagcatgaaccactgtgcttggcccactctgtctcttatagttgttataatattcagaatctgacaaaaacaatatttataggaacatatctgctttaatcttgtttataattctgatatcttcacatttattttaacagacagaaaacattatttatgcacttatagggttaatttttcttgtattctctgtgtaggagactgttgatccaaagtaaagacttaattaaatttgcctaacatttgttgaaaatttaggtgccaggtgtaatatggggttaaaaaaataagacatggctgtttctccaggatttaaaagctagttaggaaaacagactcatacataaatactaagtacagataaacttgatgtaatttcccaaaataatataatacttctcaaaagcaaatttcgacctttactgtaaagtgagagacacatgaaagattcctggtagaaaacaaaatagctactctctctaggtccacaactgatgtcaaagtgaacagcagcagctattggatgaggtgttggccatgtgcaacgtgttgaagtaataatattctatg

SEQ ID NO: 132003 - DNA, 494 bp, Homo sapiens
gaattccggctctctgggaggaacttagtttgtagtttagctttgaaacaaagacgtaacagtcctttgtctcatttgccattatacatgccatggtcagatcctctcacagtacaaggtgatctctggtgcccccacagccaaagaggtcaggtcacccaatacaggaaaacagagctttagacctaagaagaatctgcccatgactcttgaaactctgcaaagaaaacagaacaccccaactgcggtgagtggcacctttgttctgaattctttaaaggggttcaactcattataaacctctagactgtttttggtactgcagatggcaaagggggaagaaggaggtatagggtggaagagaagtaaatgaaagaacatttgtttgtttttttaagacaggaagcaaacagaaaccaagtgcatagttttttgtttgtttgtttatttttccctcttttgcagctgcgaggaattttagcgaaattagaaag

SEQ ID NO: 132004 - DNA, 1146 bp, Homo sapiens
ttgcatccctgtttttgtggctgtcagagctccatattatgcaaattgggcttaagcaattaaggcaataatgtttcccttgaagagtttgacaaggtggtgggagcttgggatgaattttgcagacaggagcttggatgcttatttacctacaaatagaagagaacaagaaaggggaaaacactgcagcatcaagcttacctgagcttgggctgctattttctcttgctttttgtttggttgcttcataggagaacaaagggtcactccatggcattagtgggtggtaaatttagaacaaatgaacacttttcacaagatgtagctttaacctgttgaagtcacagctgcagagatcactgaaccaagctcgctggcagggttttaaacggaactgggtgattttatgacaaagaatatttgaagcccctgggggctatgtgtctcctgtttggggtcatgagctgattgtctcgaagctagagagaagcaagtctggcaagctagactttgtctttgataaactgaattgcacagtaaatgagaatgtcacaactacctgactctgaaaaatccactgttattaggaaaacagataggatgtatcagactcttaattgggaatggcacattccacatttctatacttagggaacaatatccagatgataccatcctcaacctaagcatgtggctggacaaccacctcttatagcttgccagttattattcctcctctccctgtagtgtggttgaagcttcctgaaatctcagagtaaccacagaaaatggtgccctctcttctgctagcatttcgtatgaactgttcaacctcttattagttgatcaacaagttgttaggaaattcctgctatacatgtagctgtgtgtgtgtgtgtgtgtgtgtgtgtgtgtgtgtaaagtaagactgaaaaacagtaaaactgtaaggtacctttctccccattttttgattattctattaccatagccttcattcccagctccttctacattcatttccagtttacctcacctgcaaatatgtatcatttgtcaagcatttttaagtttctgtcttcctaaaatataagatctgccacccaatataaacatctatagattcacctttccttatttttctaa

SEQ ID NO: 132005 - DNA, 4059 bp, Homo sapiens
gcgacggagaggacccccgacggcgggtgtactagagaagagaacatactttggttgaggccttcgaatcactcttcagttctgaaatagacagacttgagcagtggagagacgtctttcctaaaactgagttaggtggatgtgaacttaagaactataacgtatgaggcagcccatcttggatcatctttgtcttttgggacctaatacttgggcaaataattgatgctgagttgaaaggtaaattattagttatcttccccacccctcgcatttcagaattataaaaattcggaggcaaattgaaaactaaaatgtttggtaggccctggagtcgccagattgtctttatcaccaggcctttggctttcttcagtttcactggtatcttttggttttgtttttgactttggtggctttttgtagttggagcatcagtagtctcttggaattgctcctaggacattgtggtttaggtttcttcctgggtacagtacattgtaaaatttagcagattaaaaaaagtacacagcattttttttctgtgcacgtcgcagagtcctgagcttgaggctgtgttactctactcattccaaacgaatgaaagatctctgttgccttactctaaggaagtgggatcgagtgcgttaggatctatggttgtcttggttttcaactctgggcagattcctgactggctgagtgtttctgaatgaagatgttttcctgtctgttttgtactgcttgagtgcagaggccagatcctctcagaaagataagattgtatgccagaaattcagattagcagtcagcttaagagagacttattgtcagaagtagtagaattgctttatttacttggttaatgaaggtggccttgggccctattgggttttagaagttttagaagctgctaaaaagttattaaagaatattgggaacatttattttttaaattacctaattctggtaataggcttcagcatttctggagtataataatggtggtttaaaaaactaatcaaacggctttagtaattttactactggtttcacagcttttcagttacagttggtctgtttagtgtgttaattattaggaatcgggtacatgcatccaacttcagtgataccttctagctaatggtttcaatttagacttcactgcctcagtctcactgggtacatgagaaggttggaatcaacatgcttagttgcctcagtgggcacttgaaaattccttcactggcagcccgagtggaggcccagtatgtctagtcctgggatgactgttgtcagcagctgttactctagtacaggtgctcctgtgaactctttattaggaactgaatgtgtcttaacctctgtgttacatcttggctggcagagatttatgttacatgagattgtcttggtagcttgtagtgtggtcaggagaaaggggatggagcagtggtgcatagctgcttactgctcttataaacggtatataaaggttttacggattttgaaaatatttttttttagaggtcaaaataaataccattttagtggcaacagctttgaactagagaggtagatgtattaaagcagcatagaaccataacttctagataatgtagttgccactaggagatattagaaagttagaatgtatgtgtgtatttagtttttcaataataatgaacatacactttcaggagcaaagtatggttgagaaattgtggcagaaagaattttaaatgttagtcgaagttgtctgtagtttctttattaagctctgaaaacacttccaatgccagtttgattctgagggcttgggaagtgggatctcccttgtggagcagctggagctggctgggagggagcctctccatgggtaatttattatgcctgccctgcttcccccagggagctgcttcagtgtgaaatgatgtgattgtcgggggtggggtgggaggagggccaccttcagtcggggagttgctcacatattacacaggtagcatcaggtggacttcagcgctgaactgtactagtagtgagtccctgtagtcaatgtgcaatttctctaattctgagaaactctgtagactctgcctgggttttactgggtcagcatagaatgctatcagtttacctctgtgaaatattcagtcagttgaaggaaacttggattcctagtcagaggtgactaaaagttaccctgaccaaaaggatctctgcggggggaagagaatggagcttcctgattttaatgtgttgcgtcagtggccctcttcgactcccgttttgggtagatgcgtagctcttcactttcttacctcaaggctctgtctagccatgttaaatctttagactcagtctgatgccgtttttctgttttgccattctcattattcacagctttcagaacaagtgttgctaaaactccggggcctttgacagttgttctgaggtgatttaataatggactttttataagttatgttttcctggctctaaagtaaatttttttttttttttttttgagacagagtcttgctttgttgcccaggctggagtgtggtggggcaatctcggctcactgcaacctccacctcccgggttcaagcgattctcctgcctcagcctcctgagtagctgggattacaggtgtgtgccaccatgcttggctaatttttgtatttttagtagagacggggtttcaccatgttagccaggctggtctcaaactcctgaccttgtgatctgcccgcctcagcctcccaaagtgctaggattacgggtgtgagcaaccctgcccggccagtaaattgtatttttttaatgacatcattgatttgaagatctagatggcataaattacgacgtctgccatcgcatattagaaaggggacagtcatatttgtaacgtggagagaacacggagcaccagtcaccacgtgcacttaggatgcagagcttaccgcacaccgctgatggggacctccggaaagagcggtgccttgtggttggcctggaagttctctcccaaggtgaaattcctttaaaacctcaggctctgacctatgtctttgaagcagctgctttgtagagtccctctctttactgtcctcgttaggactgttttgtggttccatgaaaatgtttagcatccttgcagaattacttgagaaggggctggtaccagtgtaaagaatctatttctgtaaaactacgaacttttgcatagggaatttattctaagcaggtcatagccgtgatccagagctgctgctgctcactgccagtccttgcggctggcggcgattgccggacagactctctgtggcctggctctcatccttggcgtgtcagcctgcggcaggctgccagccatccatgacaatcatgtgagctcagccacagacctcagctggcggtttgatccctggcaggtccctcgagcagtactggtaagaggcttcacacattttcccactcttacagttcatttttcatagtaggaagggcccttggcctccccagtgcctcttccagagcctccaccagcactaagctcagaggaaagaagaaaagggccaggagtcagacgtcacacccgggggctcccctttcccatgtagaagtgttggcatgcgtcagtctcctttacagaggggtggatgtatccgtggaggaggggccttctctctttctaattgcactatacttgttctagcttcagtctggagatacttaagacctccatggggtcgtgatccatagacttagcaagtcttgccttatctatggagctcgatggtgagaattgtgaccattgtctgatgtccatagttccttccccctagattgtttctttccacggattgtgttcatctgaaccattttattttttatttaccaaagtactgtacttggctatttgcagtgttttcaaaaccaaatgtttctttttttgtgtttttaatcttcgatacttggtgcaatagaagctgcaaagatgtgccactttatctatgaaatggagttttgtataccaataaattctagttt

SEQ ID NO: 132006 - DNA, 5652 bp, Homo sapiens
  misc_feature (2)..(3): n is a, c, g, or t
tnngattttaatttaatagtccagaacctggaagctgaaaattataatattgaatctgcaataattgccgtgcttcggatgaaccaagggaagagaaataatgcagaagagaatcttgagcccagtggtcgagtgctgaagcagtgtggccctttgtgggaggagggtggcagtggtgccagaatctttggaaatcagggcttaaatgaaggcaggaccgaaaacaataaggcacaggccagccctagtgaagaaaacaaagcaaataaaaaccagctcgcaaaggtcacaaacaaacagaggcgagaacagcagtggatggagaagaagaagcggcaggaggagaggcaccgccacaaagccctggagagcagaggtagccacagggacaataacagaagcgaagcagaggcgaacacgcaggtcaccttggtgaagaccttcgccgctctcaacatctgactctttggcctcttgggagttgtaagaagcggctggaaaaggattgctgtgtgctagactttccagtgaggccgtccttttataaaacgcaacacaaccaacgaagcccacacatgagctcacacactgagttagtttcgttcaagctgcctctttttttgttcgaagttttattagtgatatgttggtgttttatgaaaatgcagtgaggccattcatattctgtaatacaaaattaaaatactgagttttaggggcagatagttaggtcaggaaaaaccttttaagtggtggctttatttgccctgaaaatcagacttcagtgaccctaggatctttccttaacatttggggtgagttttgctgtaattgttcatgagtagtttagaataattgttagaaattcagaatgacaagtttccttagtttctctttcattctcaaacagatatatagggtagcttataaatgatctccaactcaggaatatgctttgatttacttctaatccaagttactcagaaaataattcaggaattgttttcccaaagttacgtgagggttgtggcctgcagtcaggatggaaattaaccgcatttctctccttcctgattctgatgttatttcagatgggatgcaggtgctgttagttcatttgcactcaagccatatgataaatgcagctgactgttaattaggcctggccttgttgggaagttgatagtggtgttgggtttttggtatttgtttcctgacagtggggagatggcatgttactgcttgtgatacagttctggaattctgatagtgtgtagagcagggtctatagttgtaacaggagacgaactcctggggttttgcctaagaggagtctaaagaattatgtttttataggagaagcctggaagaataaggtttttcatgttcgcattttaaataacgattttcttcccttctgttgtagacttagatgccttcagagagatacgtggtaacttgaccttataggtcgctaaacttagtattgtggaaattaaatcttataaaatgctacatttatttctttttatttaagccctgtttggcatttcaaagttgggaaaactccagcatctgctggaagttgttggaccagcagggttggttgacttaggttggaccagcagagaagagaacatactttggttgaggccttcgaatcactcttcagttctgaaatagacagacttgagcagtggagagacgtctttcctaaaactgagttaggtggatgtgaacttaagaactataacgtatgaggcagcccatcttggatcatctttgtcttttgggacctaatacttgggcaaataattgatgctgagttgaaaggtaaattattagttatcttccccacccctcgcatttcagaattataaaaattcggaggcaaattgaaaactaaaatgtttggtaggccctggagtcgccagattgtctttatcaccaggcctttggctttcttcagtttcactggtatcttttggttttgtttttgactttggtggctttttgtagttggagcatcagtagtctcttggaattgctcctaggacattgtggtttaggtttcttcctgggtacagtacattgtaaaatttagcagattaaaaaaagtacacagcattttttttctgtgcacgtcgcagagtcctgagcttgaggctgtgttactctactcattccaaacgaatgaaagatctctgttgccttactctaaggaagtgggatcgagtgcgttaggatctatggttgtcttggttttcaactctgggcagattcctgactggctgagtgtttctgaatgaagatgttttcctgtctgttttgtactgcttgagtgcagaggccagatcctctcagaaagataagattgtatgccagaaattcagattagcagtcagcttaagagagacttattgtcagaagtagtagaattgctttatttacttggttaatgaaggtggccttgggccctattgggttttagaagttttagaagctgctaaaaagttattaaagaatattgggaacatttattttttaaattacctaattctggtaataggcttcagcatttctggagtataataatggtggtttaaaaaactaatcaaacggctttagtaattttactactggtttcacagcttttcagttacagttggtctgtttagtgtgttaattattaggaatcgggtacatgcatccaacttcagtgataccttctagctaatggtttcaatttagacttcactgcctcagtctcactgggtacatgagaaggttggaatcaacatgcttagttgcctcagtgggcacttgaaaattccttcactggcagcccgagtggaggcccagtatgtctagtcctgggatgactgttgtcagcagctgttactctagtacaggtgctcctgtgaactctttattaggaactgaatgtgtcttaacctctgtgttacatcttggctggcagagatttatgttacatgagattgtcttggtagcttgtagtgtggtcaggagaaaggggatggagcagtggtgcatagctgcttactgctcttataaacggtatataaaggttttacggattttgaaaatatttttttttagaggtcaaaataaataccattttagtggcaacagctttgaactagagaggtagatgtattaaagcagcatagaaccataacttctagataatgtagttgccactaggagatattagaaagttagaatgtatgtgtgtatttagtttttcaataataatgaacatacactttcaggagcaaagtatggttgagaaattgtggcagaaagaattttaaatgttagtcgaagttgtctgtagtttctttattaagctctgaaaacacttccaatgccagtttgattctgagggcttgggaagtgggatctcccttgtggagcagctggagctggctgggagggagcctctccatgggtaatttattatgcctgccctgcttcccccagggagctgcttcagtgtgaaatgatgtgattgtcgggggtggggtgggaggagggccaccttcagtcggggagttgctcacatattacacaggtagcatcaggtggacttcagcgctgaactgtactagtagtgagtccctgtagtcaatgtgcaatttctctaattctgagaaactctgtagactctgcctgggttttactgggtcagcatagaatgctatcagtttacctctgtgaaatattcagtcagttgaaggaaacttggattcctagtcagaggtgactaaaagttaccctgaccaaaaggatctctgcggggggaagagaatggagcttcctgattttaatgtgttgcgtcagtggccctcttcgactcccgttttgggtagatgcgtagctcttcactttcttacctcaaggctctgtctagccatgttaaatctttagactcagtctgatgccgtttttctgttttgccattctcattattcacagctttcagaacaagtgttgctaaaactccggggcctttgacagttgttctgaggtgatttaataatggactttttataagttatgttttcctggctctaaagtaaatttttttttttttttttttgagacagagtcttgctttgttgcccaggctggagtgtggtggggcaatctcggctcactgcaacctccacctcccgggttcaagcgattctcctgcctcagcctcctgagtagctgggattacaggtgtgtgccaccatgcttggctaatttttgtatttttagtagagacggggtttcaccatgttagccaggctggtctcaaactcctgaccttgtgatctgcccgcctcagcctcccaaagtgctaggattacgggtgtgagcaaccctgcccggccagtaaattgtatttttttaatgacatcattgatttgaagatctagatggcataaattacgacgtctgccatcgcatattagaaaggggacagtcatatttgtaacgtggagagaacacggagcaccagtcaccacgtgcacttaggatgcagagcttaccgcacaccgctgatggggacctccggaaagagcggtgccttgtggttggcctggaagttctctcccaaggtgaaattcctttaaaacctcaggctctgacctatgtctttgaagcagctgctttgtagagtccctctctttactgtcctcgttaggactgttttgtggttccatgaaaatgtttagcatccttgcagaattacttgagaaggggctggtaccagtgtaaagaatctatttctgtaaaactacgaacttttgcatagggaatttattctaagcaggtcatagccgtgatccagagctgctgctgctcactgccagtccttgcggctggcggcgattgccggacagactctctgtggcctggctctcatccttggcgtgtcagcctgcggcaggctgccagccatccatgacaatcatgtgagctcagccacagacctcagctggcggtttgatccctggcaggtccctcgagcagtactggtaagaggcttcacacattttcccactcttacagttcatttttcatagtaggaagggcccttggcctccccagtgcctcttccagagcctccaccagcactaagctcagaggaaagaagaaaagggccaggagtcagacgtcacacccgggggctcccctttcccatgtagaagtgttggcatgcgtcagtctcctttacagaggggtggatgtatccgtggaggaggggccttctctctttctaattgcactatacttgttctagcttcagtctggagatacttaagacctccatggggtcgtgatccatagacttagcaagtcttgccttatctatggagctcgatggtgagaattgtgaccattgtctgatgtccatagttccttccccctagattgtttctttccacggattgtgttcatctgaaccattttattttttatttaccaaagtactgtacttggctatttgcagtgttttcaaaaccaaatgtttctttttttgtgtttttaatcttcgatacttggtgcaatagaagctgcaaagatgtgccactttatctatgaaatggagttttgtataccaataaattctagttt

SEQ ID NO: 132007 - DNA, 709 bp, Homo sapiens
ggtctttgatcttgtgtagcatctcttgaaatagagcagtggaagtactatgaaggaaataaatggtatgatgtgatagtgagtacctgtgagaaagtaggagatggtgatcagggaggatctttctatggaggtgaaatagaaggtgagatttgaagaataagaggagtaagtaaaaaacacagagaccattccagagagaataacaggtgcaacagccctaaagcaggagtgggcttggagtcatcaagggatagaaagttgccagaggatagtgagcaagagagagagtggtagaaagtagggttgaacagtcaggtagaagccatatcatcagagctttgtaggtaaaggtaaagagtttagattttagcctaagatccaaggaaagaatgttgaagcatgggactgacatcatctgatttccattttacaagattactgtgtggagaatagacggcaagaggaaagagggaaatgggctgtggcattagtccagaaaagagatgattgatggtggcttagactagagtaattgaaataaagaaggagagcagtaactaagtgtgcctggtagaatgaattctggtatataattcattggagagagggttatttccttgtattcaggtgagttaggatttcttagatgacagaatctgagcgtgtggcttcagtatagctttgtcctggtgagttttaaaaatca

SEQ ID NO: 132008 - DNA, 217 bp, Homo sapiens
ggtcccttatgtctgacccaccaatagacttactctctcgccctccatcgtcagctgtgaatattattattgcctctcctacccgcaggacctcagctagtccctcaaagtcgctgggcctcagtcgcctcatctgtaacaatggggaagatagcaccttcctcacagggctgctgggaggatgctgagagagggtgcatggaaagcctgacaaaag

SEQ ID NO: 132009 - DNA, 670 bp, Homo sapiens
caacctacagaatgggaaaaaggatttgcaaaccatacatctgatgaggggttaatacttaaaatatataaagaatccaaacaaatcaatagtaagaaaacaacctgattgaaaatgggtaaggcatctgaataaacatttctcaaaataagacacacaagcggccaataggtatatgaaaaagtgctcaacatcactaatcatcaaagatattagaatggtgtctttgacaacccatggagtgggagaaaatcttcacaatctatacgtctgacaaaggactaacatccagaatcgacaatgaacttaaatcagtaagaaaaaaacaaaaaaaaaaacaaccagtgtgcgtggcgccggcctatgggcccccggaaaaacgcttatctataacaccaattccggtgtgggcgcgcgggggcgcccaagttgggtataaggtgtgaccagtgggccaaaagcggtggtcccaaagggaaaacccgggcgccaagaagaccatagggggcgtgggagtttttctccccatatgtaaaaaaagcgcgccggggggggaaccccggaggcggtccttagaaaaaattctccaagatgggggatttcaggaggggtcataccgggagttctattaaccgggggtcacagggaacgcccgaatttcaaattacgc

SEQ ID NO: 132010 - DNA, 514 bp, Homo sapiens
  misc_feature (41)..(41): n is a, c, g, or t
ggcaggcgttcagaggagtcccctccagtaaggtgtgccantccctaagataagaaggacagctacacggtcagtatagaaaacatagaaggttatgtaccagagacgtacagagtgagtgaggaagacaatattagggtaccctcggccctggggtggaaagaggatcaaatgaaatgtatggaggagctggcatgtcagactgaaaacaagctgaatttacacatatagaaatacaaataaaggaccgagagaagtcaaaggtatcagtgtgaacaagacaagatatggaatccaatgaagagattcagtcccgtttggttagaagaaagaaaggaaataagttggggcatattatgtaatgttactctgagaaatcagtaacaacattagagtagcaaggttagagcagcatagctctcctcaaggtacatgtacctggcattaacgggcaggatggttaggaagggtaaatacttgttggctacgagaccacatggtagagtatacgatt

SEQ ID NO: 132011 - DNA, 189 bp, Homo sapiens
accatggggttagcctcccagcataagttgggattgaggtctctgccttcctagtggaccaagcaggataagctgtgaaaggtgattccttttgcccattgtccctgttttcccagtgtcctgctgccaggcagctgctttcccttactccccatatgtcccttgctccagccgtatgcctccaacccg

SEQ ID NO: 132012 - DNA, 343 bp, Homo sapiens
ctatatgtctcgacgttacctgcggacctgtaacattataacactggtgctggtactagcgttacgcacagcaatgctagtcacgttaatgcccaaagtgagcctggtcctaggtctccaagattttctttgttttcttttcttctaaaaggtttatggattttacatttaagtccatgatccagtcaagttaatttttatgtaaagtatgaggtttaggtcaaggttcattaatttgcctatgaatatccagttattttgcacaatttattaaaaaggctctccttctgccatccatactaatttttaatgcaggttttcaaaaatttttactttatatttt

SEQ ID NO: 132013 - DNA, 650 bp, Homo sapiens
atattacgttgagtttattttctggaatcagcttgccaaaagaggaaaagtttatttttagtgaaggtaaaaattgattttaattatttggtagcaacccttactagtagaataagagctgaagtaccaatattagtgattttcactgttctgaaccaagcctggttgcatggtggtttttaggacaacagtgaagagctttaatttttatgttttgggaaatagcttgtgagaggtaagaaggattgcaaagtttttccaaaatattttatgaagttagtgaagtcagttgaaatgtgtatttaaacatttgaagggatacagttaacatttttttaatgagaggaaaccattgtctgtagttcagaaataagatggagtgttttacttatttaaggggtaatttaaaaagtaaacaaaagcattggcctacaagagaaaggtgatgttggattataagtgctttttctaatcgttaatattaatcaacaggtgagtatattttccgtttccaagcagttattaatttacattttctcaaattataagtagcttcctgcttctccaaaagtgaggcttaagaggatggctatttcatcataaattagaaaaacgactacaaatatgaaatggttaattttttggtacta

SEQ ID NO: 132014 - DNA, 461 bp, Homo sapiens
gaggcatgttgtaaagccaggtatacacagttcacagggagaacaattgcattttaggatttcgcttccttcatgattgccttttccttcttcaatcttctagttcttctactcttctcagtcttcccctgaactgactgtcgtgtttctgccctcaaggcaaagcttcggctctttttatcttttctggttatgatcctcacctgccctctgcacatgttctctaggagcacttttcattttctatggtctgatcatgcttcaaaccggggcagcaatcaggattgtctgattgaagcctggggtctccaaatgccctcctgttcactaaattccaccctgttaaccacgcctactctcgtttaccataaacatttattgcatgagcctatctgctgcagctgggtgttgtgccaggtgctgggttggaatcattccagtactgggcgatatggtttgtc

SEQ ID NO: 132015 - DNA, 388 bp, Homo sapiens
gtagagatgtggttttgccatgttgcccaggctggtctcaaactcctggctcaagcaacctacctgcctcaacctcccaaagtgctaggattacaagtgtcagccactggacctggccggttaggttattattattattaccaaaatgcagatgaagaaactgaaccatggagaatgtaagtaacttgaccaggtgatactactggttaggttgaagaactaggattcaaatccaggcagtctgggccaaagtctaaattcttaaccaccatgcagaactacctctatgtcatgttgtcagatctagtagatgcaagacacactgatacatactcaccagtgaagttcattgcaaagtcaggaggcagaaacggcagccatgaaaggg

SEQ ID NO: 132016 - DNA, 437 bp, Homo sapiens
aggtgaatggcagataaattactcaatcaatataataaagacaatttttctctgtgaggcaaaggttggacaggtttgcatgtaacctactttaagaagattgaggtttcttagtcttgagtctgctcagctgtgacacaaatcttccccatgtgcaatgtccatctgagccttttgaaatccctctaaaaaatgtagtatggacaaggagaactaatacaaaaatgaggcttttgcctccaggtagacagtaaatagtaggtttttttttcatacttcagtgtctcatgccttctaccagcatccatgaaaatggaaggttaataggttcgtttacaaataggatgaaatcttagatccttcacaattatttaattttggagatgacaatgggatgctgagataaacgcaactttctgaaaggggaaaatacacaa

SEQ ID NO: 132017 - DNA, 778 bp, Homo sapiens
cattggttttaatagccgttgattatttttacctgaatcatttattttcttgtaatgatactgtaaaatggtggtttttccctctatttgtaatttcgttgaaatttattagttggcaatcttcattagggaatcttaggattacagtttggcttcccacttagtaggcttgtaggggagattaggctgggcagagatacatgcaggcatgcatgtattttattttattattattattttttcagacaaggtcttgctttgtttctcaggttggagtgcagtggtgtaatcactgttcactgcagcctcaacctcccaggttcaagcgatcttcccacctcagccttcctattaactaagactacagatgcatgccaccatgcccagctaatgctttattttttgtatagacaggttctcaccaatttcccaggctcgtcttgaactcttggacttgagtgatcctccctccttggcctcccaaagtgctgggatcacaggcatgagccaccgtgcctggcttaattttgttgttgttgttaatagataaattgtccttgtggtttctatattagtcactttcgagctttgttaaatggatcaacaaccttatatcccatcaactcttaatagttgactcacttgagtttaagttatatatcctggagcagtcatcttgacttttgctatttaatgatgtttcttgacagttagcaagttatatagcttgttctgggtgaaacccttctgccttgcatctttacccatttgtattcca

SEQ ID NO: 132018 - DNA, 473 bp, Homo sapiens
catttagccacttaatatttattgagacctattttgtgtctgattgctaagccttcaggatacaaatacaggtagaactcgatctttgccttggaattgctcagaccctgtgagggcagactgatagagaaaaaaatacttacaatgtaataagcacaatatatgaacatgaaagtatgagacaaggttctgcccctgaagagtttatatagtagttgacaggacaaagaatttgtttgtttgtttgttttgcaacagggtctcactgtgttacttaggctggagtgcagtggcaagatcatggctcactgcaacttcaacctcctgggctccagccatccttgtacctctgtctcctgaacagagctgagactacaggtgagggccaccacacctggctaattttgttgttgtttgtttgagaccccagaacacagagcccaaaaaaaaataacaaaaacgaacacaaaaaa

SEQ ID NO: 132019 - DNA, 321 bp, Homo sapiens
ggggtagggaaatgggaaaacggagtcatctgtctacagaagcactcctgtggtgttttaagatgttgacacttaattctgacccagcagtgaggggcaagaaggacacttcgtcacccacgattactattcttgaggatctaacccctctattggcctggggggtggggagatgggagaagctcctttaaggcatccttaggacccttggttgttatgttttagggtgggggttgatgcctttgtctaaaatttcctcagctcaaaaccacatgccagtttctaggtgctctgtgtagaaggcgggtggataacaggagt

SEQ ID NO: 132020 - DNA, 625 bp, Homo sapiens
gtatatagccaggtatagtaactaagtcatttgtagatttcttaaattcccattgggaaagatctacccaatgtgtcaaaagatctttactatttaatatagccattatgattatttccttgcagaaaactcttttagcacattcacatagagaaactgacaatgggaactgctgtgggttgaattgtaccttctcaaaagctgttaaagcatcatgaggaaaaagccctcacatattaatattaaccttgaatataaatggattaaatactccaattaaaatacacagattgccagaatggattttttttaaaaaatgaaccaactatatactagttacaagaaactcaccttgctggtaaagacacttatagattgaaggccaagggattgaaaaagatattccacccaagcagaaaccaaaagcaagcaggagtagccatgcttgtatcagataaaacaggctttaaatcaaaaacagttaaaaaaaaaaaaaaagacaaaggaggttattatataatgataaaacaattcaacaagaggctataccagtcgtaaatatacatgccctgaactcaggagcagccagattcataaaacaatattacgagacctaaataaagag

SEQ ID NO: 132021 - DNA, 390 bp, Homo sapiens
ccacttccgggtgtatatgcaaaagaattgaaagcagggactaaagaagatacatgcacaatcatattcctagcagcattattcacaataggcaaaaatggaaacaactcagatgtccatcggtggatggatggataaacaaaatgtggtgatatgcacatacaatggaacatcgttcccttagaaaggaatgaaattctaacacatactacaacatggatgacacttgaaaacactatgctaagtcacaaaagagacagaattgtatagttccatttatatgaaatacctagaaaaataaaatttataaatagaaaaaaggatcatggttacaaggttctgggagaaagggagaatagaatgttattgtttaatgtatacaaagttttt

SEQ ID NO: 132022 - DNA, 488 bp, Homo sapiens
gctgcggtcgacttaagatccccgaattccggttctggggtcacttaggaatttaaatgcactttctcatgaggtttgacttttgttctaagagctcatgaaaacagtgctaccactagctgtaccttgcacctttgggattaactgcaacttaaagaaccatgtatgagtgaacccaaggtacttatttgaatgatacagtccttggtaactgtgactatgaataccttggcttcccttcaggttggaatctacagaaaagacaattaaaatctcactccctgaacataatttaaccatgtattactagaaaatgtgaaacgaggctagtttctcttgcattcagtatatgggtaaagaggtaaaaaaagagtgagaaatgcatcttaagagggcaatagagaaaacaaaactcaatatctggacatgggtgatctccctgaagactaggataatgcattggtggtttatacaaataccagattcat

SEQ ID NO: 132023 - DNA, 607 bp, Homo sapiens
ctttggataaggggcatctcacaccttagcacgcttcaaaccagacttaggattgccccactccctcttctctttctcaccttggtcagtggcagcatcatcctttggttactcgatgcaaaactgtttttttccttttctcctattgcacactcagtccatcatcagcctgatcatcctaaccacgtccatagccacttgtgcgtgtgccaggccactaccctcctttgcttggattatgttggtggcctcctcactgtgtccctgcttcaactctcctgttgcctccgcctgcctcccctcaaccgccaactttcttatcttcatgaatgttatggccactgcctagagtgatcttttttaaagatctccatcagattgtttttctttgctgctcacaaaacctgcagcaactcccttgtggcctgcatggctccacttgatctgggctctggccacctccctgactgcatttgttacttctcaccctctcttccccagccacgctgtcctccttgctgcttcttgaacatgccactgtcagcatcactcttgtaccatagaggggctgacttgttctcttactgcaatcaggaatagcaatccc

SEQ ID NO: 132024 - DNA, 368 bp, Homo sapiens
acaaacaaaacaacaacaacaaaatccacaactgagccaacggtcaaactatagcctaactctagatggaatccctatactgcagcccaaactataaggcttgtcctggttctacctcatgaaacaatgacgggcagcctgcaaggttagcagaattctcaagcgacctctactatgcccccttcaatcttcaaagaagaaatggactttgcagcttctatggcagtctgcaattccccttatcctaccgcctctccactatatctcacctttcttcataaatgttgatgccccgacaaatcaactcaaaaaaagccaaattaatatgaaattggggggagtggaggggagtggcaatgacacatttt

SEQ ID NO: 132025 - DNA, 325 bp, Homo sapiens
cttcactgcttctgcatgcaggtctaggctagccttaatcggactgtcaggctgaaaaacagcttgtctattccttattttagttttggttaccaatgaaagtaaaatgaacagtaaaataaaactttccttgcttcctgcttctgccccctgaaggccatttttacctcaatgaaatatcatctaaagaaaaattatttaaaactccagttgtataatttcaagatagtttagtgtatttagtatgactcactcttcattaaacttcacaactatttttaaaagctaatttacatagttacctgtttgagctgatcgatggaaa

SEQ ID NO: 132026 - DNA, 268 bp, Homo sapiens
tttattggcccctctctgccaggcatggtgctaggtgctttgtattatttcatttcttcttcacaacaacccatgaggtgttgattattatcatccccatgttactgttaactgaagaatcacaaggttcagaaacttggagaggagagctttacttctaacaaaaggttacagcctgcaggtggccatcctgataggctgggaagcatagcctccagcagacaccaaaagcaggcacttcaagggagagaggggcggagcaggaatt

SEQ ID NO: 132027 - DNA, 379 bp, Homo sapiens
tcagaaggatcatcttcatatgaaaaagactcccattatgttctagagaccacaggagctgaaaggttttagcaccttcatccacctctaaacatttgcccttcacaacaactttaaaagcaaaaggctttgaaagaacgaaagcccttttgaacagacttcattcacacttgcctgtaactctcttactccttgtatccagtcagggttcagacagggaagcagagtcccaggggctcatggaatagggcttgattataggaatctgaccttgtagttgtgggaggagctgttggggaggcatgaaggtctggacggggtgctggaggatcggcaaacacaagcagtcagagaggccaggcacgtttagccaccacag

SEQ ID NO: 132028 - DNA, 416 bp, Homo sapiens
gaacttgctgcttctgtttggggaggacagacctgactgtgactggattatctgataaccatttgtgaatactgaaattctgttaggcagtaactgataactgctctaaaggatcattaaataggatgctgaaattatgtatcttaatacagtgtggtatgagaattaccaagtcaagagaattgtggacataagcaagtttggccccaatactgctcttaactcactttccagcttactatttgctatttaaatggtaggcaccagctaagcacttctaagcactaacacagctagaactaggcaaaaatggttagaactcagctctcttctactagtccctgtcataattatttttggtatttatgtccaaacctcgcccccccttaaatctaagggaatgcccccaaacggag

SEQ ID NO: 132029 - DNA, 628 bp, Homo sapiens
ggcacatcacctgaacttttttgagtattagttggctcacctgtaaaatgagggaagtatcatcaaggttactgtgaggatgagacggcaaaggaaatgctataaatactcaataaatggcagtattttacatacatttaaaatgcagtccactttctggagaattctacttggcaattattcacctcctggtgttttcacatcacttaggttttttggttttggttttggtttggtttttgggtaacctaaaatctggtgataaagggtagagtggtgaaagtatttgaattctgactactctcattaattattccatctaatggggtagtttcatttaaagggataatatgtttaaaaagccaaaccaaaagttcatacctagtattggttttttaaagcctgctcacggcagatatttttatctgaaatttagactttcacattcataacagggctcttatttaattgcacatatcaatatcacaatattacgcaattaaaatgtcaaagatattaatgcataaaatttctacgcaagcccagacaaactcatttctctggaggctgaggtaggaggatcacctaagcctgggaggtcaaagctgctgtgaggggcaaaagaact

SEQ ID NO: 132030 - DNA, 627 bp, Homo sapiens
  misc_feature (602)..(602): n is a, c, g, or t
tccatcgagctcggtacctacttttccacaggggacaacaagagtcttcagaatcagattcttaatgtggtcaatcaccccatcatacatttctacagcagggcttaaaaggcacaaccctcaaccccaccgcctaagaccaaagcctccaatgcacctcctagttagcaagtccacaatcttacataggccaatctctatgtcagtctgtctctgtgcttcgccagagtgtctagagcagcactcctcaaatgtcaatgtgtgtaagtcagctgaggatcttgttaagtgcattttctgacacagcgggtctggggtagggctcgaggctctgtatttctaacggactcccagaggatgtccatgctgccagtctgaggaccacactgggggtagcaaatgtcaggactccactgcaacagcatctgatggcttttctttggtcaagtcatcctggaacaagtttctagaatgattccaccctggcccccctagagtccagcccacacagcataagccctacaacttgacttataatggcagaaacttgcatttctaataaaagcccaactcctacaacgaaaatgccttgtggaaagtanggtacgagctcgaatcgtatctggc

SEQ ID NO: 132031 - DNA, 258 bp, Homo sapiens
  misc_feature (233)..(233): n is a, c, g, or t
tacttatccacagggtacttttccacagggtacttttccacagggtacttttcactttgggctcttttctttggtcaagtcatcctggaacaagtttctagaatgattccaccctggcccccctagagtccagcccacacagcataagccctacaacttgacttataatggcagaaacttgcatttctaataaaagcccaactcctacaacgaaaatgccttgtggaaagtanggtacgagctcgaatcgtatctggc

SEQ ID NO: 132032 - DNA, 319 bp, Homo sapiens
ttttctttaaccataagttctagaagactatttttaaaggatacgcagaatgtaagtcaatgaactaaagaggccagtctgggctggggaaataacatcaacatatgcgagcataattaatcagctagtggtgtgtgcattgcagaaggaaggagacaggaatgaagagaatggccatgctagagcagaggataaaggcagagattagtgggggagccagtgctggatggataagctagagacagatcacaaagatcatcaacagctagtgaggagagttatgggagtaaaatctgagagcaaaaaagattcttacaga

SEQ ID NO: 132033 - DNA, 615 bp, Homo sapiens
gaaggaatatcttgttcatctctccttctccatctctatacatcctccccagctcctccagtcttcctcctgctcccagaacaaagcttgagaatgctctcagctgaacgctcctaagagctgtcactcccagacctagaagaagctgttttcaaagcagttgtctggcagcaaagtcaccaactggtcaaaccagattctgctctgactgcagaggtttctgggaaaggggcctcaagattacagaccttccagctctcccttttgcaaagatctcagagccaccctctgtataaggggctcatgttggaattcatgttggaattcttcataaatgctccaaacggagaggaacatgtaccagtttcccagccaggctctagacagaggaggcagaatgatttaccccttaatataattttagcactgggaaagttcttttaaagcaataccaacaaccacaaaattacagaattaggaagactctccatcagaataagccaggttatgctacaataataaataagtccaaaatttcaatgccttgaaagagcaaagaactctttctcacccgtgtccattgtgggccagcagggtcagtctacttgttactga

SEQ ID NO: 132034 - DNA, 375 bp, Homo sapiens
tcgtttgcacctgggctgctgtggactgttgttgattcctcactacggcccaaggttgtggagtgggcagatgagggtgttgttctcactgcttacgacgctgatctggaggggacgagaggaaggcctggccagcaccaggacggatcacacaggccgggtgctggtgtctgtacccactgagggccactaggagatgggaactgaggtcatcgatggtgaactcgcggctcctgcttaagaaccagaatcctgacttcagacgtttatgctggagcttcacatatgtttcagaacccatcgttcaacaaaaacctcagattcatcttaagagcccttgagaaaaggacgcctctatgacatcactgtcctacc

SEQ ID NO: 132035 - DNA, 141 bp, Homo sapiens
ttttcacatatctattggccatttgtatgccattttaatttcaaaaagcacttttctttcctctgaatttttttattttgaaaaaaatttttttagagacatgttgtcactctgttacccaggctgaagtacagtggccca

SEQ ID NO: 132036 - DNA, 420 bp, Homo sapiens
actccctggtctggcccaggctggggtgctcagggcctctgtgttgttcacctgcaaatccccagccccgttctgtgtgttctgaggcccacctgggtcttctttctgttgctccagctggaggcttcttggggtagctgcactgtcctttctgcaggaaagctggtttttttggtttttttttttttgagaaagagtcacttggtcgcccaggctggagtgcagtggtgccatctcagctcactgcaacttccacaccccaggttcaagcgattgtcctgcctcagcctcccgagtagctgggactacaggcatgtgccaccacgccgggctcacttttgtatttttagtagagatggggtttcaccatgttggtcaggctggtctcaaactcctgacctcaggtgatctgcccacctt

SEQ ID NO: 132037 - DNA, 901 bp, Homo sapiens
tttgtgagagtttacttctaggttttctgttctattctatgccagtaccacaccgttttgattagtatagttttgcagtaagttttgaaatccagaagcatgagccctttaacttttgttctttttcacgattaatttggctgtatggggtcccttaagattccatatgattttttttttttttttttttttgagatgggttctcactccatctcccaggctggagtgcagtggcacaatgtcagctcactgcaacctctgcctctcaggttcaagcgattcttgtgcctcagcctcccaagtacctgggattacaggcatgcgccaccacacccagctgatttttgtatttttagtatagacggtgttttgccatgttgaccaggctggtctccaactcctgacctcaagcaatctgcccgctttggcctcccagagtgctgggactactggcatgagccattgcatccagctagattccatatgaattttaagatgtttttatggatctgtggaaaatgccattgggattttgataggaactgcattgaatctgtagattgctttggttactgtagtcagcttaacaatattaagtcttccaattcatgaacatagaatgtttttccatttattggaactccgtttttaattatattcaattttaggaaatttaaatttgtttggccatattgtagctaatcatcatcctattggccagcaagcccaagagaattatcctcagattttcttttcttcctaaatcgtaggatcgtagtgacgtcttcagaggccttgtagtatctgaatcatcattggtctcaggatgtctggattgtatggaatgcatggttagaagggtgaataaatagggggtttcggtccctccaggttatctctg

SEQ ID NO: 132038 - DNA, 444 bp, Homo sapiens
agagtcctggaatatacccatgattatctggaaacagctggttccgtttcaccatcgtttcaagtgaagccccagttttgtgcttttctgccagaaataacgtcagcccagaagccctgaatcccaacagcactgaactgccggagttccacccagtgtgggcacataagtggcttcctcaacccacagaaagatgtgttgctaagaccgtaaggtgaccttttaacttcttcagagatagtttcagtcatgcatatctttaaactgctacatctcacccttggttaagccattttttagaaaattatgagatctaatgttgtcacctagtctgaaatactgtaatactgtggcaaagtcctacaacaggcagtcattaataacaggtagaaagaaaagaccgaggagaatggctagtaagacatggaagtaagtgattaaaaa

SEQ ID NO: 132039 - DNA, 812 bp, Homo sapiens
ctcaggctttctcttactctagcagaaacaggtatgttttactttgtgtcccactatggatagactgctgaatacatcaggtatgttcaagcattaccacatctctatttgtttccgtatctcagtaacagcagagatgagctgagaatgaatcagaacgtgccctgtagtgacattgatatatttcctgaggtacatcacgatagtctaggggacaaagggcgcagggaagcccagtgtactctttatgtctacacttgatcttagccagaaggctgagaagtgatactttttatgtcttacctctgtttctggtgactacagataagagactcatcccttgattcactcattcagcaaatatgactgagcaccgtctctaagcaggacatttgccttgtcctcagggagcatagttggcaaggaatctagacagcagcccttcttgagcttgacattgatcttctcatgaggaggactgggctccaggtggggaaagaaccccatcctcacttgtgggctagacgacctgggagtccacagacactgaagacacatcattcttcctattcatttcaaccttccctcgacagatcttcctgggaccaggtcttcaggacagtgtgagctaggtttattgaagtgctctgggctgatgtcattacatttgtaacttccatgccccccaaaaatgttttgaagacattcattttatcaaaatacaacatacatgcagaaaaatgcccacattttaacttacggcttgaagtgaagttacccatgcaacacccacccacatcaagaagtagaac

SEQ ID NO: 132040 - DNA, 783 bp, Homo sapiens
tgcagtggctcatgcctgtaatccaaggactttgggaggccgaggcaggcggatcacgaggtcaagagatcgagatcatcctggccaacatggtgaaaccccgtctctactaaaaatacaaaaattagctgggcatggtggtgcgcacctggagtcccagctactcgggaggctgaagcaggagaatcacttgaacccaggaggcggaggttgcagtgagccaagatcacaccactgcactccagcctggtgacagagttagactccgtctcaaaaaataaaataaaataaaaaataaaccaggtagtttgggaagctctgctccagtgaaaataatttctgaaaaagctgcattttttctcatgttcacaaataggggcatcttctgttccatgctgttaaatccaagaattctcttttttctttagtgatctccctttaagtttacagggagagctaatgtccactttatcgcttataaggggctgcatgatgtgactgctgttccattgcttttggagacactggaatatttgtgttactgaggagctgtatgtcaaagtattttttttcaaatattcttttcgtattatgtctaaaatgtgtaacgtgagtagtggacatagtgggatttggttcagaaatcccaggaacaccaaggacagatgttgcctcttttctacttagtgttttttaatcctatggaggctgcaaatgtaattctacaaaaattcttacttagcaattttatcagaacaataagcatttcctaaatatgaaaaa

SEQ ID NO: 132041 - DNA, 369 bp, Homo sapiens
cagtaagtgaaagggctgggttaaaatttttatagatgtggccacattaccatccagagtggttttactagtttctgctcctgatagtgtatatacgtgcctaatttactttgttctcactaatacttaactattttcagtacttgaaaatgtgatattattaaaattacagatttgtgccaatctggctgaatttccccaattgctatttagtactaggttgagcagcttctcatatgattattcactgaccttttacattttatcctctgggaattgcctattattattctttgcccatctctattgggtgctttcctcttgtcttactgacttatataagtcttaaaattattaatacttagcttt

SEQ ID NO: 132042 - DNA, 290 bp, Homo sapiens
gaccttgatagccctctcctccacacgacagctcaagagcccaggccagatttggaatttcttctgtctttgcccactagctacagaagaaattccaaacatggtagcctgggccatcactccacagatgaaagagatcttcctaagttcagatcctagtcttcgccttcaagacacctgctccaagcaacagctactccacgtcctggggtcagacacactcagatctctgtgttcgccaaagtgcttcctccacatattcatacatcctaggccttcaccttcctcaa

SEQ ID NO: 132043 - DNA, 131 bp, Homo sapiens
gttccagaaacacgatgtaagagagagtttccctgacagtgggccactctccgtggccttgtagggagacagaccagggagtcagtccttagggccaaggcagaaggattgcttgagcccaggagttgaag

SEQ ID NO: 132044 - DNA, 316 bp, Homo sapiens
gtcgtgaagactgaggaaagcgtatataggggagatgtgtgtaactgtgagatcgatgtgagtattataatgaattaagaacagtgaaaaaatatgataccccaaagataagaggatcaagacagatcagatgtccatgtgcacaaaatggtgtgtgtgtgtgtaattatcttctttctcctatttcctccaatcccccttttgagcaggcatctgggccattgtgcatgtagccttatctaccgtttttactttctgcaaagtcatatgtttttagctgtgattgcagtcactaccaagtagctcaccttgtctt

SEQ ID NO: 132045 - DNA, 604 bp, Homo sapiens
actgaaatcctaaataataagaatagaataccagaatactcatccagaataccagaaaagtgttatacattctaaatctacattttaaaaaatgctttctacattcaatatattattagcagaggaatatatccaaaaagatatatttgccattttaaaacatacttatatcttgacaaagacattttataatcactccagcttttaataacttgttcctgttgtttcattcgtaaagaaatttgtttttgttattgtatatccaaaggccagagctcctttgggaaaggaagttgaatgagctgaaagcaaacacgatcatgaaatagagtttaagtgtaaacaccattttattttggcagtacataactcagaaatgtatgtaaaacagtcatcaacctataggaatctgtatgtatggctaatagggaaactgtgcattaatcctgtatttgttccacttgtactgtttgctctactaatttttctaatctttatagaaataggttccttctagttctgaacctgcttctgccctaagttaaccatagcttattatttctactatctttttgtgctactaaatcaatgctcacactgttgg

SEQ ID NO: 132046 - DNA, 742 bp, Homo sapiens
gttattcattcaatatctgtatcagcagagactgtttctcccagcagcacatgtagtttgatcctcatctaggttaagtaggcccttgaagacgctggcccatcagcactggtacctggaccctcccatttgactgcacccatgtctgtttacactggggctgtgccttggtcctgtcacccgtgaggtgtccttaaggctggaatgccaaataggctccaggtgatgggctaactctgagtaaatacaagaggctgcttggagcccagagatgagggttatgaggcagactgtgtctgggttccattacaaagaaaccgtgattgattataaatacctgccctggcaatacacattagaagtgtctggaagtggggttttgggggaatgagctcagaaagggacaaggtgtatgttccattcctgccttgggtggtggttctgctacctaggctatgttgtctcactgctcacgccttaatcccagcactttgggaggctaaggcaggccaatcacttgaggccaggagtttgagaccagcctgatcaacatggtgaaaccctgtctctactaaaaatacaaagattagccaggtgaggtggcacatgcctgtaatcgcagctactgaggaggctgaggcaggagaatagcttgaacctgggagacgaaggttgcagtgagctgaggtcactccactgcattccagcctggacgacagagtgagactccatctcaaaaaaa

SEQ ID NO: 132047 - DNA, 430 bp, Homo sapiens
ggtgtgaaggggttgggagagagtggggtaatggggatgagaagcaagaaattgaaaggtttggttagggttagattctgaagagtctcaaatatgctgagaaatggattctgtagtcaacaaggggtcagaaagtcctgttctgaagagacaggcctatgtgatcgggattgtagtagtaacaaatgaccctgtagactcactgcataaagaatacacgggggaggagagactatcaacctagaaataaaatctgtaaagacattttttcagatctgggtaaatgatagcatgtgcctaaaatgcagtcgaaaaaggaagaatggagaaaagagagcaaattcagacacaacaaaaaaaatattcattgtacaaacaagagcttgcagttgcaaaatatttttctatacctgtgggatactataccatt

SEQ ID NO: 132048 - DNA, 343 bp, Homo sapiens
tatatgtttctactctattgcttttatatttttattttataagaaacacacatttttattttataagaaacaaggtcttgctattaatatgttaccaagaccagaatgcagtagttattcacaggtgtgatcattgtgcagatagccttgaactcctggcctcaccctatcctcccacttgagcctcctaaatagctggaactacaggtgcatgcagctgggcctggcttagtttactgcttttttaaaaataatttacaaataataattgtacatattcatggaatacattatgatttttttttttttttgagacggagtctcactctgtcgccaggttgga

SEQ ID NO: 132049 - DNA, 317 bp, Homo sapiens
aagtgctgggtttacaggtgtgagccactgtgcctggccagaaattcttttttactctatattcgttccctggagggatcttctctagttccatggttttaaatattgtctatatgctaccaattcctagatttatatcagggccatccacttataccctgtatcctcctcctgatcttcctgctaaactgctgatgtccggctgcctacttaatgtcttcacttggatgtccaatagacatcttaaacttaacatgtttaaaatggaattcctgatctccatcccaccctcaaacctgttcttcctgcaactctta

SEQ ID NO: 132050 - DNA, 665 bp, Homo sapiens
gtgtggggacttctttggagaaatgtggtaacttctatgatgactgctttgatcttttttaactgaggaaattgttaatatagtaaattgaattatcccttaaacttggtaacctagttttctcttagtacttaggtaaattcagttgcacatcagtgtcagtggaaactttgatgtttgtgtgttattaccaagatatttagagttattatgaagaattcgagaacatcagaaacttctaggtaatgcttatatcacaaggaagaaagccaccgtttttctggccaaaggttgtatttctaacattataaataaggtccgtaggttatggggcctatattgcctcacctcaggaagaaagcagatcttgttaaatgatctaatagattaatcaagagtaccttttctgttcaagaacagccagagagaataagtttctgaactatgtttcaagttccagagaacactttttttcttccctttctctatgggtctttctgcattggccatgttttagtcatctttttccagttttccctccctttggtgatgacatccccttacatacactattcatacagctctcttccttctcccacactgaacagtggggtcatcagaagttattacatgccaggcctgttcagctcagaaaaggtgctatt

SEQ ID NO: 132051 - DNA, 201 bp, Homo sapiens
cagggatgctaacgatcccctcactttccttcctgccaggtgaggtctgcctgttccacccatggtacccttcaccacccatggtacccttcaccttgaggaacccctgaacatgccctccagggggttcaggaggatctgagagaccaccttcagggcaggtgcacagccatctagcagacacacacactcactgactac

SEQ ID NO: 132052 - DNA, 527 bp, Homo sapiens
accgtggacgcgctgggtgtgctgaccggggcgcagcttttctcgctgcagagggaggagctgcgggcggtgagccccgaggagggggcacgtgtgtacagccaggtcaccgtgcagcgctcgctgctggaggacaaagagaaagtgtcagagctggaggcagtgatggagaagcaaaagaagaaggtggaaggcgaggtggaaatggaggtcatttgacctgccaggcgcccttcgcaaagagtgacgaggccccgtgggagaacggactcctcagactctccccaatagcggaagtcgatcttctgaaggatggccaatctgctccggccctggtcttcccccatcccggtggacagacttaacgatccttgctgcagatcctccggagaggatctggactggctgggagtggggagggcgtggagacagtctacggaaagcgctagcagacccccgagagggtgcagtggagccctgagcattgtaatatgcgcccagcctataaacagcctccgtgcttagca

SEQ ID NO: 132053 - DNA, 264 bp, Homo sapiens
catcactttctatctggaatttgatctgcttttccaccatcacttacagggattgtttcctttagatataagtggttttctccctttcagatatgtttctatttttttttggcaatcatgaactacattattaataagaaaaaacttttctttttttaaagactcaactacttttccaatgcagcatactggcttgagtcggaaaccttgggatcaaagcacatctctaacaataaaaagttggggccaggcacagtggctcac

SEQ ID NO: 132054 - DNA, 201 bp, Homo sapiens
atgataaatactgaaaagaagatctgacatttctgttaatttagcagcaaacatgctggaaatattagaactaatgctgagaaaataaaagagcagtattaaaataggaggacttttatttttaaaatgaaaaacttctgacaacctggctctaaaattgcaaacattcaaatgcattcctaagctgtgctgtcatctgtg

SEQ ID NO: 132055 - DNA, 793 bp, Homo sapiens
tatatatatagatagataatctaaacagaagaatacagataatgacaagtgatggtgaggtatgaagtgaatggaactttcatacttggctggtgggaatgtaagtagtaccacattttgaaaaagagtttggcagtttctaataaagttaagtatatgtaattgctcaatgggttcttccagcccattacacagacaaaatcaatttgctgagaccatgccattgcagtaaataaaaagtttaattaacaccaggccagccatgcaggataactcaagttatcactcaatcagtctcctagaaggctcagaggttacggtttttcaaggacggttcggtgggccagggtctaaggaatgggtgctgctgcctggctggggataaaatcatacgggtgtggaaaacagttcttgtgcactgagtccacctctttggggggggcatgggaccattgagtcacaagcctcaagtctaggtagcatcactagttatcagaaatgcagaagtctgggggaaaaaaatctcaaaaggccaatcttgggttctacaataagaatgtcatctacaggagtaattggagaagtcacacttcttgtgacttctggaacaatggctagtattggttaactacacctgcatcttagtagaattcagcccctctcaaaatcctaagcttgtggcctttcattagtttttacaaaggtgtcttagttttggggaagagctattatcatccttgctttaaggttaaactataaactaaatttctcccaaagttagcttggcctatgc

SEQ ID NO: 132056 - DNA, 432 bp, Homo sapiens
tactatacaacgcagcaactgcactcttgggcatttatcccagaaaaatgaaaacttatattcacacaaaaacctgcacacaagtgttcatggcagctttataaataacagccaaaaactggcaacaatccaggtgtcctttaatgggtgaacagttaaacaaacctggatgaaactccagaaaatcatgctgagaaaaaaaaaaaagacaatcccaaaaggttacattctgtacaactgcatttatacaacattcttgaaatgccaaagttacagaaatggagaacacatcggtgggtgccaggggcttgtggcaggggagcaggggaagatagatgtggctacaaaaggccaacaagagggacccttgtgctgatgaacctgccctgcgtcctgatggcactgatgtctatatcctggttgtggtgtgtg

SEQ ID NO: 132057 - DNA, 217 bp, Homo sapiens
gaaatgaaaatacatgcccacaaaaaaaaaacttgtagaagaatgttcacagtaactttattcacaatagccaagaactgtaaattaaccataccagatactaaggcttgttataaaactacaggctataaaaagcatgttattggcaaaaaacaaacaaaaagcccaacaaaatagaagatttaacagaaacagactcacatatattcagtgactt

SEQ ID NO: 132058 - DNA, 335 bp, Homo sapiens
ttgccatagctgactcctgaggaaaaaactacttcagcgaaagcggtattctttaccgagggtggttcctggcagaaaactggaggctgtaaactcaaatgtttctttctagatagggctggaaacttgaatctctggaatatgcaaaatgcccccttcaccaccaagaaaggaccatcctggtccctgatccccgggggcacaacactgctgtgtgacaggggcatgacagctcccatgaaggagtccagaaccgagacctgtggagagaacatgagatgcccaaggtcacgaggtgagaggctcaaggtcacagagtccatcataagactcag

SEQ ID NO: 132059 - DNA, 305 bp, Homo sapiens
aacgacgtcagggagaagcgaagtcatgcccatggctgttgcccgagccaaaaaacctgtaaactcaaatgtttctttctagatagggctggaaacttgaatctctggaatatgcaaaatgcccccttcaccaccaagaaaggaccatcctggtccctgatccccgggggcacaacactgctgtgtgacaggggcatgacagctcccatgaaggagtccagaaccgagacctgtggagagaacatgagatgcccaaggtcacgaggtgagaggctcaaggtcacagagtccatcataagactcag

SEQ ID NO: 132060 - DNA, 278 bp, Homo sapiens
aagagagacagaggctgagaagcgccaacctgtaaactcaaatgtttctttctagatagggctggaaacttgaatctctggaatatgcaaaatgcccccttcaccaccaagaaaggaccatcctggtccctgatccccgggggcacaacactgctgtgtgacaggggcatgacagctcccatgaaggagtccagaaccgagacctgtggagagaacatgagatgcccaaggtcacgaggtgagaggctcaaggtcacagagtccatcataagactcag

SEQ ID NO: 132061 - DNA, 213 bp, Homo sapiens
attactgaggagccaattgtgctctgcttaacgcatccaaagcaaggcagctattagtggtgtccccacttcggtgtttatgctagaatacaggaggacagcctggttttctcatacgatttgatctacgacatgatgagcctatggccgatgttgtgttctgaacacaggtgtggcttgcccacccagaggcgagtaggatgtttagtttta

SEQ ID NO: 132062 - DNA, 373 bp, Homo sapiens
ggacatttggtataattcttttttattgaacattgattcatgacctagacactcacccgattatcagtatatgcctctgattagtttctgggttttaacaccaaaaaaagtacatggttataataaggtgttaggttactgaaactgcaaaccagcagttttgtatttcttctataaaaggtagccataccacctagaaacaaaagtggataccggccaagtgttcaaatagatatgatctaattctgggcccaggcattcctatctcagctcaaagcctgggcacacattaggagctccataatgtgtgcccatccaatctaagccctaaccccacttagtgacctcagtgtcttcttccattccttcttac

SEQ ID NO: 132063 - DNA, 370 bp, Homo sapiens
gtattccacagagaattctgatggtggctgtatttgccaaaaagtccccacaaacccaacaagccttgcaatgatcatcagctatgtgaagttatcccacaagggaattctagtacagtacgttctctaaaaaaaaaaaaacaaaaccaaaccaagtaggaaaactgtgaaaccaaaggttagttaagccattgatatgattccaggcactcagtcattcctctttccagaaaagtattacctattgtatcaaaaggacttttgagccctctctgaagtgtcatagctaagttataaaatctctcccttcttaaaaatattactgatcactacaaggaaaaggtgcaaagcatgaaatatttctgaccct

SEQ ID NO: 132064 - DNA, 277 bp, Homo sapiens
tcacttgaagtcccagcgactcaggaggctgaggttgaacccaggaggcggtggttacagtgagccgagatggcaccactgcaatccagcctgggcaacagagactcggtctcaaaaaaaataataataaataataaatgaagctgaggtgtcataggatctaaattatgcttttaaaatattgttctggatggagaatggactggagaagaacagagtcaggagaccaccaaggtcactattgtgatttatattgtcggttacttaggttctgtcg

SEQ ID NO: 132065 - DNA, 260 bp, Homo sapiens
tcggtacccgaactgcagtgttcccaagtagctgggactacaggcatgtgcaccatgcctggctaatttttgtatttttttgttgagacgaggtttcaccatgttgcccaggctggtctcaaactcctcttgagctcaaacagtccactcgcctcatcagcctcccaaagtgctagtacaggtgcaagccattgtgcccagcctcagacactgtcttaaacagcttgtttatattaacacacttcatcatgaaacagatg

SEQ ID NO: 132066 - DNA, 143 bp, Homo sapiens
agaattatgtggcagaatgaaaaatcaagtcagtagatgcagaggcgaagtcatcaatggtaaaccaggagattaaagaaggaaatgatagggaggcaaattgaggtcagtacaaaagaactaaccactaaaagaatgggatg

SEQ ID NO: 132067 - DNA, 462 bp, Homo sapiens
ggttgagtgtttgttgccctggtacatttcttttccccagctcccacttgctcatccaggccacagaaagtagaacaccaacctctggggcctcaacaaagcccagaataattttcttacccagattcttcttcctgtgtgtacctgggtggattctgaggggtccccagcttcccagggctggcacatgttgtcctaggaactgccaagggcatcctccatagtcccatgcacctgtcccttccagccgtgtcctccccaccccacctggaaagcagagatgacattgacagcgccaaggagtgcaagttcaaggtggccctagtctcacagtcaggactgccctgcttcttgaagcctccagcctgcctgcttcccctccaggagccccatttcctgctctctgcagctccagggctgccagacgcctcagatggaaaacaagcccagccccatttcctc

SEQ ID NO: 132068 - DNA, 164 bp, Homo sapiens
tgcttttttgtgtgatattaacagtacacagtctctcagcctggacttcacttcagttttttttctaattctctgagttttgttctcatttgtaaaatggggatgatagtattgagtgtgtgttaaagggcagtgtttggactttgggcactgtttggactttg

SEQ ID NO: 132069 - DNA, 924 bp, Homo sapiens
atttgtgtgaacaggtactcacactgtctgtggctgtccataagctgaaataattcagcccagtgagtttggtggtttctcatctgattctgtccaagcgaaacaaagccagacactaaagtgacggagttttgctcttgtcacccaggctggagtgcaatggcacaatctcggctaactgcaacctccacctcccaggctcaagtgattctcctgcctcagcctcctgagtagctgggattacagacatacagagggaaggctcaggggaaagacagccctctacaagccaaggagagagggatctgaagaaactaaacctgacagcaccttgatattggatttctagcctccagaactgtgagaaaataaatttctgttgcttaagccacaaaaaaaaaaaaaaaaaaaaaaaacaaaacaaaaaaaacaaaacaacaaaacaaaaaaaaagagagggcgggggcggcggcggcgccataaagaaattatctccccgccgagagggggccacaagaagtttatagggcggcgacccccgcgtctttttgtgggaaaaaggggggcgcccaaataagagaggggcgctcttatattatatagcgaagcaggagcgagaggagggcggcaggatttaaaacaagcggtgtcggtgtgacggggcgagaagcaggtggtgtgagtcggggacatttcttggggggggaggaggacccccatctaggttgtgtgggggggggggagaatataatgcggggcgaaacactcatcacaaaaggaggaaattagataggctaggaaggaacaataatcaacattagcaggagtgtatagatgggtgtaatcacaaggggaattagtgttggtgtgtaagaaaatttggttcacggagtatagttgataatattttcgacgaggagaaat

SEQ ID NO: 132070 - DNA, 218 bp, Homo sapiens
agcctgttttgtgtctcactgttccctaaagtcaggaaaatcttagactcttgccctgaaaggtatcactaatagcaacagcctgtaggattgttttatcctaaagaaagtaagtcgaatgccccttatgaagatcagacaaaaagcaataaggctacatcgtgacataaatccaaataaatacaacggcagctaaaaatcttttttttttttttttt

SEQ ID NO: 132071 - DNA, 225 bp, Homo sapiens
agggcacccacacttccgaccaacagtctatagattctgaggtcctactattttctcagactttataattgactaaggttttataaatgactagtagatctcaagaaagtgctatacttactagttttttttataaaggatacaaatgaacagatgcatagagcaaaatctgggcaggtcccacacaaatcttccctgtcctcaggatgcattacctgcacatta

SEQ ID NO: 132072 - DNA, 351 bp, Homo sapiens
taaaaataattaatatgataatatacaaatcagggctgctgcaatggaatgtgaagaaaatagaaaatgtttgctaaatccatcatctcccatgatatgtatacgtgcccatgaacatatacacatacacactcacatacaaacttttcctagatacacacacagaacctttactcaaagcattttgttcctagttacggaataaagatattgaaaaatgcattttcattaatgtgataaagcataataaattactcctgccagatgtgatgtgacatgtacatattttcttaaaagagctgtagaaatgggcaaagatcacacacacacacacacacacacacacacaca

SEQ ID NO: 132073 - DNA, 446 bp, Homo sapiens
acatgagcgaagacaaaagacagggaaaaaaagagtgaacatcacatgggcatagcacttacatctgaggatttcaagaagactgaaacattcattgttttctttgatatcatatataattatatgtgataattatcagctgttatatttttaaccttgtaagtgaatcactatttttatctgactgttgctctatctataactgttatatattttaccagttaatgtaattatatcttccctcctatatgagaaaagcaagagaatgcgataagactataatagaagacattgtaatttacgtgtcaaaaagacaaacctaggggaagactaagtccccagcaaacgatagaaatgattctttcatttggcaattcttatagaaaaactctgcaaagtaattgttaatggcgtgaccttgaaataatcctctttatttaaactat

SEQ ID NO: 132074 - DNA, 178 bp, Homo sapiens
tgtgcttccatgcctgctgaggcagttttaaaatgcgtcgacgaattccttgacactccttctaggtagaagagagaacttgtcctcccttcttgaacctgttttctgttttgttttgtttgttttgttttgtttttttcgagacggagtttcactcttgttgcccaggctggagtgc

SEQ ID NO: 132075 - DNA, 139 bp, Homo sapiens
ttcccagcctctcccctttggttcataacaacagctgctggtgattgagctatggccaggattggggctcgatgctttatcttcctcatgatatgcagtctcaccacaatcctatgaggtaggtgccggcattatcccc

SEQ ID NO: 132076 - DNA, 303 bp, Homo sapiens
atcggggcctgtaagatccctcaactgtccctgtccatccttcacaatcttgtgttccctcccacccttgccacactgcactttttctcttcctcacatgtcccaaattcattcccatcttcaggcccttaaggcatctataccttctctgaactgctctccccacagttgtgaaacggcggttcctcctccacactcaggtttcactcagacactacctgctcagagaagctttttccacccctctaaagcagcattcaccccacagctctctgttctattttctctgcaatgctcattact

SEQ ID NO: 132077 - DNA, 151 bp, Homo sapiens
aggttgggagagaagaggcaggtatgtgtgtgactcatcagaagttcaatgtggggtgtgctgaggtccacaggaactgtccagccctttaacttattgctcatatttgcatccctagcaattagggtaggacctggcatgcaaaagtgac

SEQ ID NO: 132078 - DNA, 411 bp, Homo sapiens
ctcccatcttaccctctctgaacgctgccagacaaatacctcttggcaaggaggaagacacaggcccctcccaagccccctctaaatctggttctcaggagatgggagccctagggagatgtcccactgcattgactttagatgagcaataactcagtcagtctggaatcagcatcaccaagggttacatgatagtcttgaaggagtgttgctcagaatttcaggcgactggtctggaggagagaagggggcaagtgcttaccttgaacccgtgcaggtggacagatgtgtggtggaggcatttgagggttacctcagaccacatgctgacccacgcagggccaaagtcgctcattgtgtggaggcattttgcggtggaaacacacctggatgcagagaggggcggagcag

SEQ ID NO: 132079 - DNA, 874 bp, Homo sapiens
tgtgtacgtcatctcaattgccttgtgctccgacaacacaatttctgttcgccctaatatttgttcccacaccaccaaatattgtggtaaaacacccaaaataaacccaccatgtttaaatgcacacgaaccagggttaacacaactgttttttgaacacgtaccaaatgttggccgtcatttgtgtgatccctcttccaaaatatgttcccccgggcccaattgaaccactacccttgcccgtgacacaaatttccactcctttcccagtgttggacttaaacaattttcgaattgtatttcttagtgtttcaaaggaaaaaagttaattattttcgatttcacaccgcaaggggtactttcccctccccaacctaacccccccccccttttttttttttttttttgagatggagtctcactctgttgcccaggctaacaaatgtctatcaggtacccaacacaaaaactaaaatcttctcaggaaacccttagacctcaaattattcctagaaatagcttttccaacacaaagaccagtgtgttgtaaagataaccggcacacaggagggtaggcaacaagggggaccgggagaagcaaaaggcctgaaatccaaggagtcttattcagactacaaaatagctgtgcttatagaaaaagacagaagaattatctgcaacaggaggagagaaaagatggaaaatacagaaaaggtaaaactcatcaccgtaacattaatatttataaaactcttttgtaaaactcttgaaatagtggctggcacaagagaagtgtatataagtgtggtattatatacatgtgtgtgtctctgtgtgtgttcgtttttgtccatagttcgtggctcctaactcc

SEQ ID NO: 132080 - DNA, 339 bp, Homo sapiens
tttaagatgcctgatcgatacttctggagagccactaccctctagtgaattcattcactcccttggttttattgccatctatatggtactaatttccaaaactgtatctagagcccagcactttttctgaagtacagattcatataattatctgcctacatggtatctccttaaactcaactcatttaagttggaggatttgctgggtatgtgatcaaaggacaaaagggcactctgtgaattcaatgaagggtagttaagaccatagcatcaaagctagatggagaaagaaatgaagataggggcctattacacatgataaacagtgtcagcatgctt

SEQ ID NO: 132081 - DNA, 209 bp, Homo sapiens
ttaggacaaacccccacaacctcctttgctgactcaaacacattgttccctatgccttaagaacctcccctccctctggctgcttaccacacttaggacaaacccccacaacctcctttgctgactcaaacacattgttccctatgccttaagaacctcccctcccttggccgggtgcgctggctcacgcctgtaattccagcaccttg

SEQ ID NO: 132082 - DNA, 268 bp, Homo sapiens
atattatcctgagcactcaaagaggatgatttgttttctcagcttatagtacagtgccttacatctggaaaatgcttggtcaatgtcttattatagaggaaacatcattcttattactacacatggtcttagaatttgtaataggccactaattctatatcgatagagaaaatcaactagaattctacatacagatgccatgaaccttcatcttcacttctcagttataaaacaggtatatatccacatttttacaaaatgggatcgt

SEQ ID NO: 132083 - DNA, 204 bp, Homo sapiens
gtatagggtagtgtgtatagtaatgttggccccattttacatattcctcttatatcaacactgacttctatcttaatttataagagcatccatgtattagtcatgaagcatgggttgtttacgtttcattttggattttgtgcaacatggtgatatagttggaaaaattggggtttgcataccaggcagcattttaattcctgt

SEQ ID NO: 132084 - DNA, 606 bp, Homo sapiens
gctacttttccacaggcaaggagttttacctttgccacatcttgagactgactgacctggcagtttgggcatctgccctggtggttagcaatgaactacagagaagccactagcatcatattactgtggctacaagtttgctctgggaactaaacatttttaataaagtgtcctgaaacctatttgctgacctccactgcatttagggaattgggtgtgtcttgccagagaaagaccaatagcctgggttaggccctttggatctgggtcctcaggaaccagcaaaacccatattaatctaaggtagtctgaaatggaatgatataagtggacattcccaagtctcttccagtcaactgactccttaagagttgaaggccttggtagatgcaccttcttgcaatcccttgaaagaccctgctgtatactcacatgtcacctcttttaacaactctagcttgccctccaccaacagttttattcacagcagctcaaaaaccctctcagtattcttacagctgtgcttagaaatatcagctgaataaacactagagatgacaggctatcttttgaaattaagcttatgaaggatggaaattttcacaa

SEQ ID NO: 132085 - DNA, 1063 bp, Homo sapiens
ggggtttacactgcggtgagcatgggaaaagcacattaggggaaactatccttgcagtggatggggattatctttccctcccatttcactaatggagaaagtcaaatgtttggcacaggaacataaaacactgtaagcagggaccaggtcctgagttttcccagtggcaacttcggtgctctgtttttcagaggaagctatctgggaatttccgtttcctagcatgcattataacatgttatttttaatagctaggtctctgatcagttattgtgactgatctcagtcttcttgcatgaagatgatgcctctgatttatgatattttctagaattctgagtcagtatgagttagtgtcacttcttccataacaaggtgggaatgcacccatacatttggtccttgtgttgctagcagatatgaattaagcagtagtttagcttaccttggaaccagctgttccttgcagatgcactgatattaagggtacacatgtctattataaggctggtaaattagagtttgctttatcagaagcttatcaaaggtctgctgtgtgcaaagcactatgctgcattcttttagagctattagataaatagcaatactctatctttaaggagcttacagtctattggacactatgggcaaaaacactaatgttagagttgcaagatgatgtggaagtacaaaggaggtagagatgaattatgagtggacagtatgggaaagccttcctgaatgagacagcaggtatttcaactgggtgttaaagtttgaaggggcgctgggtaggttggcttatgcctattatcccagcacttggggaggctaagactggaggatcacttgagcccaggaatttgagaccagcctgggcaacaaagtgagactccatctctacaaaaacttcaaaagattagtcgggaatagtggcacatgcctgtagactcagctacatgggaggttgaagtgggagaatcacttgagcccaggaggtcgaggctcctgtgagctgtgattgcatggcactctaacctgggcagagccagagcttgtctca

SEQ ID NO: 132086 - DNA, 566 bp, Homo sapiens
gtgctttgtatcaatcagcttttcataatgctaaagcagtggctttgattagtcagctagtacacaaccagttccctaatgtctatcctaaagtgctttttttttcatactgaagagttctttgaccggacatagtggctcacacctgtattcccaacactttggggagccaaggccataggatcacttgaacatggaaggttgaggctgtagtaagctgtgattgcaccactgcacccaagcctgggagacagagcaggactctgactcaaaaaatagtaataataagttattgctttatactgttttaaaatgctcttttcttatccttgtgacaagctgatttcttcagctgcgttattacctaagcatttgcttgatatttccataaataagcatttgttaagattaatagattaatcaggaattttcctttgaagaaagttttaatttgcctcacaacaaaaggctcactttgaactccatcgtaacaaagttcagtgtttcctcactttttccaaagactaaatcatgattgataaaaatagtaacaatatataagaaaa

SEQ ID NO: 132087 - DNA, 346 bp, Homo sapiens
ttcttaagtttcagtaagtgttcacacaaacaaaatgtgtcttggattcttggtaggctagcagaatctgtgtcagggagaaaaggtagaaataaaatatatgagtacttttaggtattaaaaaactgtgcatttttaacattgtctccttcatacattgaacaaatatgcactgagtgcctacaaagtgggagacattctactaagctctgcagataaaacagataagacctctactctcatttagccttaagtgaagtgaggaacaaacacaacaaaaatgacaattataaattcagatatatggtgtaagaaaacagagttctatgatcacacagaagaattt

SEQ ID NO: 132088 - DNA, 555 bp, Homo sapiens
tcaatattaagcagttgggcagagttttcatacatatatttgtctctgccttttgcacaatataaaactatgaaatctcttttcatttttctattgtgcacgctaccacattaggtaggaatcaaaatcatctcaacttcagaagtataattcataacaattataacaaagcagaaaaatgattctacattagcagaagaaatgtagtaggaatagatttaaaatagcatggttgagtacaaaagaaacatcgttttttaaaaaatggcagcctttatcactcatcagctaaacttaaagtcaatgctgtgaggctgttgcgggaaaaaatagtcatgattcttgggtgtattaaaaggagtatggcatagaagggtaagaaaacaagacgtagtgtgtttgtcagactcatcattgtgtcctgtttgagtcacacttaaaaaaagaatttggacaattgtgaaaagctgatacacaagcaacagaaattacacgcccttccaggaaaagataaggcaactgaggattttattccacacaaggctggaggatttt

SEQ ID NO: 132089 - DNA, 480 bp, Homo sapiens
agtgcactgattcgaggtgattagaggatcccggttaaggctcgagtcgtcatactggctcgttggtgttactgctgtgagaccagcctacgaagaaggtgcctacttctcccttgccttctgccatgattgttaagtttcctgaagcctccccagcaatgcagaactgtgagtcaattaaaattttttattttataaattacccagtcttgggtatttcttcgtagtagtgtgagaatggactaatgcagaaggtaaggaagatacatttgaaataatgaataatacaagttaggaggaaaaagtgctctttaattatccttattaaaaaataatattttctactgttaagcaatatttgtgaaattattaaattaaaaaatcagcaggcttcccagacaactgaggttttctcacttttgatagagaagaaaagtgacggcttaatcattgagagtacagacatagatcataccctgg

SEQ ID NO: 132090 - DNA, 215 bp, Homo sapiens
ttttgtttgtgcagtccaatatggcaggcactaaccacatgcgggtactaggcacttaaattgtggttagtgcaggcaaggaactgaatttttcgttttattgaagtttaatgaacttagctttaaatttaagcggtcacatatggctagtgttgaatgtatttgacagtgcagctctagatccctgttactccaatgatgctgtgggccagcag

SEQ ID NO: 132091 - DNA, 160 bp, Homo sapiens
gtgagtggcactgtttgaagaaaaaaaagttaagaagtgactgaataagagatttctctgtcagtgtctgagtggggtttaattccttggtgagagctattgcttagaaagcccctgtagttttatgagtctgctccctgtggatgcttctctctctcca

SEQ ID NO: 132092 - DNA, 121 bp, Homo sapiens
cacaggggagatgcaaactgacctgactcaattttgaatatgtatcctggatctgatcctttcttactacctctctctcactatgttgtttaattcagtatcttccttccctgcattattt

SEQ ID NO: 132093 - DNA, 542 bp, Homo sapiens
gctgggagactagttctggccagtaaaaagtgaaccactactgggctggagcagtgaatagctcatacatgatctttgggtttcttttgttctctgctgccatcagagtggcaacaggttccaaatatggtggctgcaagatagtgtagccatgatcattcccagaccttgagtaaatgcatggagcacagccctctgagaaactgtgctggaaacatggcataaatgggaaataaaacttgtttttgttttaagacattacgaattgggagttgttgctgccacatcgcctatctatcctattacaggaacatgctcagaatacagaaacctctgcattcccttgataactgccactagctataactctgattttcttaggatccagtgtctcagtactaaatcatttattattaattattatcaagtattgtatggcatgatagtggcaatactaataaatgttcacatttttaaattcatgtgctagtcaaggcacattaaatgtttatttcataatttattcctcataaactttatga

SEQ ID NO: 132094 - DNA, 898 bp, Homo sapiens
tgtatagatgatctccttgggcaattgtgttaatttctcttgggtatatacctgggagtaaaattaagataagggcattttcagctttaccagaccccgttaagttactctcaagtggttttatcaatttatattctagaaccaacattatgtatcagtaacatttggtaacttcaggcgttttttttccattctgctgagtgtgaaaaatgtgttttgattatggttgtcatttgttagaatactttgttaaagctttttaaagattcttggtccctctaccctccccaccccctaccccaggaattttgattgggtaggacctggggattatattcatctttatatgcagaattatattacttgttactgttaggcctgatttaagaagtaaaataaggctgggtgcagtggctcatgcctgtaatcccagcactttgggaagccaaagtgggcacatcacttgagcccaggagtttgagaccagcctgggcaatgtggctaaaaccccttctctaccaaaaatacaaaaattagctgggcgtggtagcacgtgccagtggtctcagctactggggaagctgaggcgggaggattgcctgagcctggcaagtgtaggcagcagtgagctgagattgtgccactgtagtacatcctgggtgacagagcaacacactgtctcaaaaaattttttttagtaaatagttcttatcccatgtgggcatggcacagttatgaagtacctacaccaagtatttacttcttcgttttctttttttcacaatggccgctaacgaattatgggcccctaagggccatcggtcccgggcacactggtggttccaaaaaaaattggcgccaaaaggggcgaaaatacgtgaggcacacggaagtttcc

SEQ ID NO: 132095 - DNA, 122 bp, Homo sapiens
tgctgggattatagaagtgagccaccacacctggcctgtttgtttgttgtttgtgttttttgtttgtttttgttttttgagacggagtcccactcggttgcccaggctggagtgcagtggtg

SEQ ID NO: 132096 - DNA, 393 bp, Homo sapiens
tcaagctccccactcccacattttgaatttttgatgtcacaatttgtatcattttaaattgcatattccttaacgaattattgtagctgttatttttaatagttttgtcttttaaccttcataataatttgtataccacaattattctaaatttagtacttttaccagtcagttttatactttcagatgtttttgtgttactcattagcatcattttcctttagcttgaggaactcctctttagcatttcttgtaagacaggtctggtgatgatgaactccctcagctcttatttgtctggaagtctttatttctgcttcatttctgaagaacatatttgctgggtatattattttggttgacaatacttttccttcagtactttgaatatat

SEQ ID NO: 132097 - DNA, 510 bp, Homo sapiens
tcatctctacccgccccagaaaaaaaaaaaattgctggacctcctgattgggtgatggaacatggggtgtttccttggctgtttgtatgcagcatggggggcaggtaccaaatgaagcctttttaaattctgggacctgtttctgtagagaataatttttcatctcctgcctcaaaacactgcacaggctgagtgactggtacagcgtggcagagatctgagaggacctctcgcccttcgtattcaggcttagtctttggattttctccaagttgtcccattactgccctcagctggaccgtgttctgaggatagagctgtctcagcctctgttgaaacttgtaatgcagtggctccacgtggagacttttaaccagcttctgcgtctgcaccctcacccacagccaccagagctgcctggcatgtgcagtgctgatttttcctagggctctgactcccacccccacccccaaccatccgccactcggtgaccatggagcggtgggcatg

SEQ ID NO: 132098 - DNA, 231 bp, Homo sapiens
gccacttcagcccctgattgactgctggtcgggtctcggtttcagccaatccttcacggtgtagccaattggaggcctctacagggcatcaaggggtgttgctaggttcctttagcttaataaaaaccgtaattgagaaggctcttgagctgcttgcaggagcccactcctactctgcgaattgtctttaataaacctgtgctttcgctctttccttgctccgttcttttg

SEQ ID NO: 132099 - DNA, 749 bp, Homo sapiens
atgatagttatatttttcttcatttattccttttgcaacactcttcctttaattatgtacacccaattttctgacctatatcataaccctctttctgaagaatttcctttaatatttagactgtaagacagtctgctgatgttgagtttcctcagtttttgtttgtctgaaaaagtattttatcttaatttttgaaggatatttttgcagaacttggaattctggattggcatttttttcttacaatactttaaaggtttcatttcactgtctttttgcttatgtggtttctgacaagaagtctggtataattcttctctttgttcttctgtgggtaagatgttccccacctaccgccttcttcctggcaatcttcaagattttatttctgtcttgattttctgcaatttgaatttgatattgtctgggtgtggtttttggtttggttttggtatttaccctggttggtgttctctgagcttcttgaatctgtggtttggtgtcagtcattaatttggaaaattttggccattatgtcttcaaatatttcttctgccttattctttcttccccttcttgtgttctaaatacgtatatgttatactgtttgatattgtcccacagttcttggatgttttgttctggtttctttttttgctctttttttctctttgcatttcagtttgtgtgatctctattgacctatcttcaagttcactgatgcctcagctgtgcggagtctactgatg

SEQ ID NO: 132100 - DNA, 380 bp, Homo sapiens
agctagttttttgtagagatagtgttttgcagtttcaccctgttgcccaggctggtcttgagctcctggacccaagcagtcctcctgcctcggcctcccaaagtgctgaaattacaggcgtgggccactgtgcctggccagagacacccattttgcaggtgagcaaaccaaggtactgagaggtctagcagcttgcttccttacacacagcccatctgtggctgagctggaagtctgactcagccatttggctgtaacatttgtgcatgtaaccactaatctgtgccatctctcatggagtggtcgagagagcctctacagacaaacgaccccacttcgagtcctagctcagctcctttctggctgtgtgaaagtttctt

SEQ ID NO: 132101 - DNA, 213 bp, Homo sapiens
ccagccttgctgtgatgggatacattggtttgactttaggatatgttgttaaagtcatcaattatccctgttggaaaacctaaggttcatgtatcaagtttccatgaaaaaagaattgaagagtaaaaagcaataaaaggggtaaaagcattgtgggcttactttcctcatggtggtcattttgttggaatcataagccttattgcaaaatgg

SEQ ID NO: 132102 - DNA, 178 bp, Homo sapiens
cacacctgtgacgccctcctgtgagcttaccggccttcgatcacacgccatcgcacacgccccacacctgtgacgccctcctgtgagcttaccggccttcgatcacacgccatcgcacacgccccacacctgtgacgccctcctgtgagcttaccggccttcgatcacacgccatcgc

SEQ ID NO: 132103 - DNA, 399 bp, Homo sapiens
agctgggaccacaggcgcccactaccacacccggctaatttttttttttgtatttttagtagagacagggtttcaccgtgttagccctaccgtgttagtttttctactgctattgatatctggtttcacttcattgtgatcagaaaagatacttggtatgatttaagccttcttaaattttttaagacttgttttgaggcctaacacatgatctaacctggagaatattccatgtatatgtgagaagaatgtgcattcttctgctgtttggtggagtgttctgtatgtgcctattaggttcagttggggtataatgctgtttaagtcctcctattccttgttgattgtctatctggtttttctactcattattaaagtagggtattgaaatttcctgct

SEQ ID NO: 132104 - DNA, 370 bp, Homo sapiens
cctgtaaggatgtagaaggtatgggatgaccccttgctgggctgtccaactcagctgtgcagccaggctgctctgagctgcagggcacatgcagcctcctcatcaggtcacctgcattcctagaattctccaagttccagacacacggcctttagtgtccagggctctccccgcaggaccctttgagctctgcagaagccaagcatgacgagcaacctgcagattcctcacttagagaagctagccttctccagctcccgtgaagcctggcctttagaatcctactaaccttcttctaggaatcacagaagccaaggaaggcagtcgggatagggaaagacagagggtatggctattctgaggacagggg

SEQ ID NO: 132105 - DNA, 239 bp, Homo sapiens
taagtttttggtaatgagggggctcttatttttgaagcagcacaattcttcagaaagtcataaaataagactctgaaatgctatctgagcatctaaatgttgagttgggtgtggggcagagagtgagcagtgatttaggagaggggaaagagaagaaagaagatgataagaaaagaacaccttgatctgagagctggaacctgctggggctctgaccctcctgaggtcccagttctcat

SEQ ID NO: 132106 - DNA, 418 bp, Homo sapiens
ttcttgctctaacgcttgacatcggggtgactttgggcaaagtaccgtgacttccctgggtctcagttcctcaccacaaaaatatagcaacacctgtgctgttggggtcttgggtggattaactggaatgatctggacagagcccttggcacagtatttggctcataagcagcatttaataactttctagcttctaagaaattaccacccaatatacaaaaatcaacacaaaatggatccaaaatttaagcttaagaaaaaaaagaaattaccctccattatctcaactagactttacatcaaccctatgacttggtaggtatttgccccattttacagataagaaaactgaggcacagagtgtcctgtgcatcccccaagatcacaaagccaggtaagggcagagccaaggtttgag

SEQ ID NO: 132107 - DNA, 673 bp, Homo sapiens
tgatgaatataagaaaagcccagactttaccactctgcaataaatccatgtaacaaaactgcactcgcaccccttacgtttatacaaatttttaaaataaataataactagaaaagcaagaggaaaccaaacccaaaattattagaagaaaagaaatgataaagattggggcagaaattaatgaattgatactaaaaatagtacaaaagatggatgaaagaaaaagttgttttttttttttaaaagataagcaaaatcaacaaacctttagccggactgtaaaagagagaatatccatatgaataaaatcagagatgaaaaaggagtcattacatctgataacacagaaattcaaaatattttagagactattatgagcaactatatgcagtaaattggaaaacttagaagaaatggatgaattccgagacacataaaaacataccaagattgaaccatgaagaaatccaaaacttgaatagaacaacattaacaagatggaagcggtagtaaaaagcctcttatcaaagtagaccaggacctggtgttttcgctactgaattctgccaaacgctgaaagaagagctaataagagttctactcagactgttccaaaaacttgaggaggagaaaatacttccaaacttgccagtattaccctgataccaaaacc

SEQ ID NO: 132108 - DNA, 418 bp, Homo sapiens
tctggctgcaccgccctagggctgggtgatgtgagagaaggagacccctctctcagcaggggcagcccccagagaacttggttgctgccttcaggctctagaaagcagaaagggccaccaacctgaactagaccagaacagcagaggtacaggaagcagtgaaaggagcactggaccaggagccaagagttctggttcaggcactaactgtggacttgggcaataccctctccctcttcctctgggtgaagaagaggttctctcaaagtttcctggagcacagggctaaggccaagggaccctattcctgctgccaatttctccaacacccactgctcttggagaggagctgagcctgacactcctggggtggcctgaggaagtagcctggagtttagcagggttgcaagacagagag

SEQ ID NO: 132109 - DNA, 184 bp, Homo sapiens
agagggaaagaaaactatcaaggcagaggctgccatgatcaccacatgatatgccaacttgctaagacattgagtttcaattgagtctcccaggccaggctaccttcctcatgatgaggggaacagggaaatcaatatgggttcattaacacttaatttaggttttccagtgtggagcatatca

SEQ ID NO: 132110 - DNA, 317 bp, Homo sapiens
ggaggcggcatcaccactgagttttgcagcatggctaggtgtttgctgagggtaaagaagggcaaaagtgcttcagggaagaggaaccaaatgtgccaaagcttggggtgtggcgaggcccagcagattcaggcagcaggtcagagaggaactggagggactagagggaggtacggcggtctcagacagagcagcagggtgagcagccaaggtggccatggtcctcagatttagaggggcctgcagccagactggggagtttgctggtgccaaagaagtgcaaagaaacatgtcttctcttttcaagcaggggagag

SEQ ID NO: 132111 - DNA, 416 bp, Homo sapiens
ggagatgaattggagatgtttgaagaagagcagtggtggagagtcctggaaactgtcatgtgaggaatgattgaagtagctggaaaagattaagctgaagacacatgggggtgtgagaactgtattcagcagttgagggacttccctgtgaaggaatctgatttgttctgtatgtgaccaaagagtggaactagaaccaaaccagtgggtggaagctgctggcaaatgaaatttcactcaatatcaagaagggcctttcttaacagagctgttcaaacacagaatggacagcttggggaggaagctcccaatgctggaggagttcaagcctagtctggatgtaacttggcaggtattttgcagagggtttggttgagtgttagtattagagttgtgtgaatgtcacagaaaaccca

SEQ ID NO: 132112 - DNA, 282 bp, Homo sapiens
cggggcttggtggcatcgtgcctgctggggacagagcaggagctccacagccctgcctggtcaaagttgtggccacgggacaggggccccaagtcccagcctccctcttacacaggggccagctgcggggtggggcgggaagtgaggttcagctccagggacttagtgcctcagtttctccacctgcaaaatggagacgctaatgatgcctcccatagggcggggtgagggtgtatgagattcttcagggagaggttcaaagggtgctggtggccatgtcgt

SEQ ID NO: 132113 - DNA, 404 bp, Homo sapiens
gtcttgggcacagaccaagccaggagatggataaaatgttaaaaaatcaagcaacttctgctacttctgaaaaggataatgatgatgaccaaagtgacaagggtacttataccattgagttagagaatcccaacagtgaggaagtggaagcaagaaaaatgattcacaaggtaaataattgaaatttgagtgtgatcttagttgttgtgtggtgtatttgactggtggaaattattggagagtcagcatgagatgttgtcatgcagtcagtggtatgtgaattttagggttttattagggaactgcaagactaacagtaagaccaacatgctttgtgattttatttgctgatattctgaatttacctgagtttcatacataaagctctgtacatttaaaaggtt

SEQ ID NO: 132114 - DNA, 693 bp, Homo sapiens
gacgagggtttaacggtgttagccaggatggtctcgatctcctgaccttgtgatccgcccacctcagcctcccaaagtgctgggattacaggcgtgagccaccgcgcccagcctctcctgtgtctcttattataaggggttctctcagactacggccccatcccgatgacttcatttaatcccagttaccactttaaaggccctattccaatacagtcacattggggattatggctttaaataggaagtttagggggacatagtcagtccataacactgccagtacttttgacagattttaatgaattgatgaaacaaaatataaccgtatctctagaagaaattatgtaactgcttccaaaatcatgagccttattccaaaacttgtcattttttcaactgatatattaatatatctgaagaattcatgaaggcagtagaattagggaaccttggataagtttgcaaactgtttttcattttgttttggctttttgtttttcttttggctatgattttaaacatatgtactaatagttattggatcctaactactttcaaaattatatgtatattctaacaggatgttcaggagttaagcttttaagagttatgtaactgcagaatagcttcttatttgtctaaatatcttttttagattgcatgggaattttgagatgaatgggattgccc

SEQ ID NO: 132115 - DNA, 144 bp, Homo sapiens
ccacgtaccaccaaacacacttctacatgaatggcaagcttcagcaaaaatacaacatgaagtaaccaagtgtcattcattcattcacttaacaagtatttactgagcatcttgcatgtaccaggaactatacaacgtacatgt

SEQ ID NO: 132116 - DNA, 441 bp, Homo sapiens
gggaaagaaaccaacatttgggccagacacacctgtattcaaatggtagttctattatttagctgtgggcctttgggcaagtcttttgaagctgatatgaatttgctcacctccttaggtataagaaacatcacattgcctctttcttcaagtcaaattaaatctagctctggatctccaaaagaaagcaagaaatgtattctctatcatgtgtaaggggatcaggggatgagctgccctccataggaaagttcaaaaatctcaggagagtatagtcaccagactatgaggaagggcttctgctcttcagtctatcttggaccacttgagttcttaatgtcggagccctcagggtccatttgaatgcagaaccattcaaatgcagtccaattgaatgcagcccatttgaatgcagggtccatttgaatgccaagcttggca

SEQ ID NO: 132117 - DNA, 349 bp, Homo sapiens
agaggccatagccacttagagccactgatgtcctgctgttcccctgagcttgggccctctccgcccctgggatcccgatttaggcttccgcagaccagttccccagaaatccagcccccctccccatcacttacacttctttatactctaagataactactatcctgatttattacaccatggattcattttatcttactttattgtaaaatacacataaacgttaccattttaaccattttaaaatgcacaactcagcggcatttagtacattcacagtattgagcacccatgaccactccctagtcaaaggacattttcatcacttcaaaagggaagcccatatcca

SEQ ID NO: 132118 - DNA, 356 bp, Homo sapiens
atgcttaccttctttaaatacacataaggaatcttctttattttcactataaatctgttataatggaaactctgattttatatttctctgtaatggagtcaactatcacctggcctatgcaggcaagtgcaaagaggtgacagtttttatttgtgccataaccacacacagctttaaatgtttttactataacatattttagaaagctaacaagctagagagagcggtgaagggctctctcagcatgttcctctctgtctgtgtgttagttttgctttactttttctttaatctgtgtctgtgtgtgtgtgtttgtgtatgtgtatgagagagagagagcgaaagagtcttatttt

SEQ ID NO: 132119 - DNA, 191 bp, Homo sapiens
actaatttaggcaaggcatgagttacagaggggcatcgctgataatacagagcaatactggggcagtgaagaggaagctgcaaaggtggccagaggccagatgtgccaggtcctgagcacctagcagagaagttgagggctcacctggtggggagtgcaggggaatcctttgaggaatcctgcagagctcg

SEQ ID NO: 132120 - DNA, 311 bp, Homo sapiens
agaatcactaaaagttactaaaatacagccactggaaaacgacgaatgaacaaagtggttaatgttccttcccaaaattatagcaaggaaaactccaccacctaatgaaaatcattaagagaattcagaggagttaactgcaggcaggcgtgacttctcccccagaaagtaatcagctaataagcattaatcatcttgtgcacagtctgcgcatttataatagggtttaataaagccttcaacaacaggcccagaattaatgaacggcatcttaggtctaacacaaaagtattccttagcggacgaaaatt

SEQ ID NO: 132121 - DNA, 763 bp, Homo sapiens
tatggtggcacgtgcttgtagtctcagctacacgggaggctggggtgggaggatcacttgagcccaagagtccaaaaccagcctaggcaacatagggagactctgtctgtacaaaaaataaaaataaactagctgggcatggtggagcgcacctgtggtcccagctacttgggagactgaggtgggaggatcgcttgagcctaggaggtgaaggctgcagtgagctgtggtcttaccgctgcactccagcctgggtgacagagcaagactgtctcaaaaaaaaaatttttaataaaaaataaaaaatgaggaccccagtaggagctgcagtggacagggggtgtgagcgtggatccagctgtatcagagtatagtcctgcccatcaggggagaagaggcgcttgtctcaaagtgaaatgcacaattggtctcgaatgccaaagagaacaggaaaagacaaaagactccagtggatgtatggacaacccaagaatgtttgcagaaagtcgacttgatttccctcggttcataatacctggaaataaggagtatgaaaagcagctgcgtgtgtgctacaattttggcacaatttgctcagtttcaatgggtctattcctaattgttttaaaggtgcttatgcatcctctactgccaagtactgcatttgcgtccaagcaggatttggtgttctgtctgctaaaatgctgcctggtcttggagtatctggtctgcccagaagcagggtcagcagtaagcggtgatc

SEQ ID NO: 132122 - DNA, 423 bp, Homo sapiens
aattccacagagtaaaattgtaaagattccaagataaactttgtgaagtttaaaagctcatgctataattacacaccaaaacagaagcaacttctcaaagaaatctgctatactcaactaataaaagaaacaattagagataagggcatgatataatagcttttatctgtccaaacaaaattgaattcttacttgtaccctccccttctaaataaacccagaaacacaggaggaaaataagaacaaaaggacagactttccactctgaaattatgctgctagcaacaactgctatttgtcccttttatgcctgctcaaatgatgtcacagtttggtcccaggttctgggaaatccaatcaactctcatcctggccacttatcagtccttcactcagttgccaaactgatcactgaatcctagc

SEQ ID NO: 132123 - DNA, 242 bp, Homo sapiens
gtggtacaaggacgttttgtgttcatctgaaacccagctgaatttataattatgtaggaaataaacagttaatatggttaaaaaaaaaaaaaaaaaaaaaaaaaaaaaaccttaatatagtttttaaaaagtgcaatgggatgagattatgctattagtatattaaaagcatgtttctgttttactccaatttgtaagatcatttaatggaataaagatcacaacaccatgttaaaaaaaaa

SEQ ID NO: 132124 - DNA, 3090 bp, Homo sapiens
atagatttcagaataacttaaaaaatttaatggtaagaaggggtgatgtgtcgaaaactcatactaaagtattaggtcactttaaaaaaagtgataatgtatgatttaatgaaatcttaagattcagttactatttaaattcaccatttctgttttggtcttataaagagaccttggtttaattatccagaggaagtcctcttcaccattttttttttttcttagttctgcttctggaaagtgttttataaagttttctcagtgagggttcttaagagttttctttggcctcttttctctcaacagtaaattgatgattttatatcagctttttcaataaaagatgcattatcattactggctataaatcatcctggggagatttataaccaggttaaaaataatatcttttacttctctcaccttttacttgtggttcagatgctcagactgtgcctgtttgcgtcgtgtctgttgctctgccgctttccatgcaggcatttttaattttacacaatcctaacaatatatggaactcattcctatgaatatataaaaggaggcttccaaaattttctattaaaatatttcaggataaattaagtgttgataatttgaaaaaataatttcaatgagctgcttatagtaaaaatggtagaatcagagttttcattctttgagaaatctttctgtaagattggctcatagataaaatgagacaaactactatgtatgataaaacaccttcagagtcatgccttgttttattttattttattttttgagacagaggtctcgctctgtcgcccaggttggagtgcagtggtgcaatctcgctcactgcaacctccacctcccaggttcaagcgattctcctgtctcagcttcctgagtagctgggactacaggtgtacaccaccacgcctggctaatttttgtttttttactagaggtggggttttgccatgttggccaggctggtctcaaactcctgacctcaggtgatccactccccccagcctcccaaagtgctgggattacaggcatgagccaccccgcccagctgagtcatgccttattttcgtagtataccaagaaatgttctatggaagtttacgttttaacacctcttttatacttggtaaaattgcctgtgtttcgctttattcctttttttttttgagacggactcttgtactgtcacccaggctgaagtgcagtggcgcaatcttggctcactacaacctccgcctcctgggttcaagtgattcttttgcctcagcctcccaagtagcagggattacaaggcatgtgccaccacacccggcttatttttgtatttttagtagagacagggcttcgccatgttgaccaggctggtctcaactcctctgggaatccgcctgtcttggccttccagggtgctgggattacaggcgtgagccactggaacctggccttgttttgctttattttttctcttacatgaagtaaagcgctttggtcaaacacacaaaaatactgccttgtactggtggttggtttcattagtggatcacacacagtgttctacttggcttgtaaaatggtgccttggatagggtgagtttggataagtatgtatgtatgtatgagttatagcaaaattaagtagattgaatcaagtccatgcaaaagcaataaaacagttttaattttttaattttttaaaaattaaaactttaataaaacagtttttaattttttgctaggttcttttaaaaaatgatgtaacttacatggaagtcttcacaggacttttttctttcctggaactattgaaatgtaatttaggatgatttgatcttccatctcaagttgtcaacatggctgtgtcattctggcttacatatgttttatttaacaaaattctagtcaagggataagggcataatgaagacaagcttcagttatgaaagtacaaactatttgtgtgattaatttttaaaaatgacattaagaagcccattgtaaaataatatttgcagtcaaatggtttttcttgctgtaagtcctgttgtagctatgtttagggtagtggttctcatctaccttggagtgcataagacttacctagcaggcttgtttaaaaagttcagattcctagctttgtacccagggattgcctcaggtggtatgggctgtggtcctggagtcatcacttttataaatagtggttcagagaccacagagagagactgcttcatcgaatgggaagtaccaaggagaaagtacaattcagtattgtctggaggcaagtggacactttgtacctgaggtttagaataggtggtctcttgccagtacaatccccaggcgttttctgtgttcagaagtagtaagaatgcctttaattcagaggattatctaagctctttaaagctgtttttctccattgtcatagtgccttctctgaaaaatgaatgtacaggtatcctattttctaatgtaattaggattttttaaaagcaatttttgatagtttttcttttaaaaagtaaaattcagcactgtgacttgaacccccaaatctttcacatacaggtgaaacattaagccacaaataaaaataatgaacaagaaagaagacaagatcctaattcctgtcattagtgacctaagtaccccatatcagaaactttgcaaaacagatctagggacagaagggctttgaaagacatttttctttggggcaaatttcgtgtgccagaactacagtttaaatgtttttatgagcaagggaaggtagcattgattcccatagctttctaattagatacatgctgtcatggatgtaagccttaaaggagttaatactaatcttgtacatacacaaattttcctcaggtttttttattttaaaaaatgatttgttaaaagtactgtctgctagacccttgcctttgagtggctttgaaacttaatatagtttttaaaaagtgcaatgggatgagattatgctattagtatattaaaagcatgtttctgttttactccaatttgtaagatcatttaatggaataaagatcacaacaccatgttaaaaaaaaa

SEQ ID NO: 132125 - DNA, 1533 bp, Homo sapiens
agcggccgctcgcgatctagaacgtaaaatggtgccttggatagggtgagtttggataagtatgtatgtatgtatgagttatagcaaaattaagtagattgaatcaagtccatgcaaaagcaataaaacagttttaattttttaattttttaaaaattaaaactttaataaaacagtttttaattttttgctaggttcttttaaaaaatgatgtaacttacatggaagtcttcacaggacttttttctttcctggaactattgaaatgtaatttaggatgatttgatcttccatctcaagttgtcaacatggctgtgtcattctggcttacatatgttttatttaacaaaattctagtcaagggataagggcataatgaagacaagcttcagttatgaaagtacaaactatttgtgtgattaatttttaaaaatgacattaagaagcccattgtaaaataatatttgcagtcaaatggtttttcttgctgtaagtcctgttgtagctatgtttagggtagtggttctcatctaccttggagtgcataagacttacctagcaggcttgtttaaaaagttcagattcctagctttgtacccagggattgcctcaggtggtatgggctgtggtcctggagtcatcacttttataaatagtggttcagagaccacagagagagactgcttcatcgaatgggaagtaccaaggagaaagtacaattcagtattgtctggaggcaagtggacactttgtacctgaggtttagaataggtggtctcttgccagtacaatccccaggcgttttctgtgttcagaagtagtaagaatgcctttaattcagaggattatctaagctctttaaagctgtttttctccattgtcatagtgccttctctgaaaaatgaatgtacaggtatcctattttctaatgtaattaggattttttaaaagcaatttttgatagtttttcttttaaaaagtaaaattcagcactgtgacttgaacccccaaatctttcacatacaggtgaaacattaagccacaaataaaaataatgaacaagaaagaagacaagatcctaattcctgtcattagtgacctaagtaccccatatcagaaactttgcaaaacagatctagggacagaagggctttgaaagacatttttctttggggcaaatttcgtgtgccagaactacagtttaaatgtttttatgagcaagggaaggtagcattgattcccatagctttctaattagatacatgctgtcatggatgtaagccttaaaggagttaatactaatcttgtacatacacaaattttcctcaggtttttttattttaaaaaatgatttgttaaaagtactgtctgctagacccttgcctttgagtggctttgaaacttaatatagtttttaaaaagtgcaatgggatgagattatgctattagtatattaaaagcatgtttctgttttactccaatttgtaagatcatttaatggaataaagatcacaacaccatgttaaaaaaaaa

SEQ ID NO: 132126 - DNA, 3036 bp, Homo sapiens
atagatttcagaataacttaaaaaatttaatggtaagaaggggtgatgtgtcgaaaactcatactaaagtattaggtcactttaaaaaaagtgataatgtatgatttaatgaaatcttaagattcagttactatttaaattcaccatttctgttttggtcttataaagagaccttggtttaattatccagaggaagtcctcttcaccattttttttttttcttagttctgcttctggaaagtgttttataaagttttctcagtgagggttcttaagagttttctttggcctcttttctctcaacagtaaattgatgattttatatcagctttttcaataaaagatgcattatcattactggctataaatcatcctggggagatttataaccaggttaaaaataatatcttttacttctctcaccttttacttgtggttcagatgctcagactgtgcctgtttgcgtcgtgtctgttgctctgccgctttccatgcaggcatttttaattttacacaatcctaacaatatatggaactcattcctatgaatatataaaaggaggcttccaaaattttctattaaaatatttcaggataaattaagtgttgataatttgaaaaaataatttcaatgagctgcttatagtaaaaatggtagaatcagagttttcattctttgagaaatctttctgtaagattggctcatagataaaatgagacaaactactatgtatgataaaacaccttcagagtcatgccttgttttattttattttattttttgagacagaggtctcgctctgtcgcccaggttggagtgcagtggtgcaatctcgctcactgcaacctccacctcccaggttcaagcgattctcctgtctcagcttcctgagtagctgggactacaggtgtacaccaccacgcctggctaatttttgtttttttactagaggtggggttttgccatgttggccaggctggtctcaaactcctgacctcaggtgatccactccccccagcctcccaaagtgctgggattacaggcatgagccaccccgcccagctgagtcatgccttattttcgtagtataccaagaaatgttctatggaagtttacgttttaacacctcttttatacttggtaaaattgcctgtgtttcgctttattcctttttttttttgagacggactcttgtactgtcacccaggctgaagtgcagtggcgcaatcttggctcactacaacctccgcctcctgggttcaagtgattcttttgcctcagcctcccaagtagcagggattacaaggcatgtgccaccacacccggcttatttttgtatttttagtagagacagggcttcgccatgttgaccaggctggtctcaactcctctgggaatccgcctgtcttggccttccagggtgctgggattacaggcgtgagccactggaacctggccttgttttgctttattttttctcttacatgaagtaaagcgctttggtcaaacacacaaaaatactgccttgtactggtggttggtttcattagtggatcacacacagtgttctacttggcttgtaaaatggtgccttggatagggtgagtttggataagtatgtatgtatgtatgagttatagcaaaattaagtagattgaatcaagtccatgcaaaagcaataaaacagttttaattttttaattttttaaaaattaaaactttaataaaacagtttttaattttttgctaggttcttttaaaaaatgatgtaacttacatggaagtcttcacaggacttttttctttcctggaactattgaaatgtaatttaggatgatttgatcttccatctcaagttgtcaacatggctgtgtcattctggcttacatatgttttatttaacaaaattctagtcaagggataagggcataatgaagacaagcttcagttatgaaagtacaaactatttgtgtgattaatttttaaaaatgacattaagaagcccattgtaaaataatatttgcagtcaaatggtttttcttgctgtaagtcctgttgtagctatgtttagggtagtggttctcatctaccttggagtgcataagacttacctagcaggcttgtttagtggtcctggagtcatcacttttataaatagtggttcagagaccacagagagagactgcttcatcgaatgggaagtaccaaggagaaagtacaattcagtattgtctggaggcaagtggacactttgtacctgaggtttagaataggtggtctcttgccagtacaatccccaggcgttttctgtgttcagaagtagtaagaatgcctttaattcagaggattatctaagctctttaaagctgtttttctccattgtcatagtgccttctctgaaaaatgaatgtacaggtatcctattttctaatgtaattaggattttttaaaagcaatttttgatagtttttcttttaaaaagtaaaattcagcactgtgacttgaacccccaaatctttcacatacaggtgaaacattaagccacaaataaaaataatgaacaagaaagaagacaagatcctaattcctgtcattagtgacctaagtaccccatatcagaaactttgcaaaacagatctagggacagaagggctttgaaagacatttttctttggggcaaatttcgtgtgccagaactacagtttaaatgtttttatgagcaagggaaggtagcattgattcccatagctttctaattagatacatgctgtcatggatgtaagccttaaaggagttaatactaatcttgtacatacacaaattttcctcaggtttttttattttaaaaaatgatttgttaaaagtactgtctgctagacccttgcctttgagtggctttgaaacttaatatagtttttaaaaagtgcaatgggatgagattatgctattagtatattaaaagcatgtttctgttttactccaatttgtaagatcatttaatggaataaagatcacaacaccatgttaaaaaaaaa

SEQ ID NO: 132127 - DNA, 3094 bp, Homo sapiens
atagatttcagaataacttaaaaaatttaatggtaagaaggggtgatgtgtcgaaaactcatactaaagtattaggtcactttaaaaaaagtgataatgtatgatttaatgaaatcttaagattcagttactatttaaattcaccatttctgttttggtcttataaagagaccttggtttaattatccagaggaagtcctcttcaccattttttttttttcttagttctgcttctggaaagtgttttataaagttttctcagtgagggttcttaagagttttctttggcctcttttctctcaacagtaaattgatgattttatatcagctttttcaataaaagatgcattatcattactggctataaatcatcctggggagatttataaccaggttaaaaataatatcttttacttctctcaccttttacttgtggttcagatgctcagactgtgcctgtttgcgtcgtgtctgttgctctgccgctttccatgcaggcatttttaattttacacaatcctaacaatatatggaactcattcctatgaatatataaaaggaggcttccaaaattttctattaaaatatttcaggataaattaagtgttgataatttgaaaaaataatttcaatgagctgcttatagtaaaaatggtagaatcagagttttcattctttgagaaatctttctgtaagattggctcatagataaaatgagacaaactactatgtatgataaaacaccttcagagtcatgccttgttttattttattttattttttgagacagaggtctcgctctgtcgcccaggttggagtgcagtggtgcaatctcgctcactgcaacctccacctcccaggttcaagcgattctcctgtctcagcttcctgagtagctgggactacaggtgtacaccaccacgcctggctaatttttgtttttttactagaggtggggttttgccatgttggccaggctggtctcaaactcctgacctcaggtgatccactccccccagcctcccaaagtgctgggattacaggcatgagccaccccgcccagctgagtcatgccttattttcgtagtataccaagaaatgttctatggaagtttacgttttaacacctcttttatacttggtaaaattgcctgtgtttcgctttattcctttttttttttgagacggactcttgtactgtcacccaggctgaagtgcagtggcgcaatcttggctcactacaacctccgcctcctgggttcaagtgattcttttgcctcagcctcccaagtagcagggattacaaggcatgtgccaccacacccggcttatttttgtatttttagtagagacagggcttcgccatgttgaccaggctggtctcaactcctctgggaatccgcctgtcttggccttccagggtgctgggattacaggcgtgagccactggaacctggccttgttttgctttattttttctcttacatgaagtaaagcgctttggtcaaacacacaaaaatactgccttgtactggtggttggtttcattagtggatcacacacagtgttctacttggcttgtaaaatggtgccttggatagggtgagtttggataagtatgtatgtatgtatgagttatagcaaaattaagtagattgaatcaagtccatgcaaaagcaataaaacagttttaattttttaattttttaaaaattaaaactttaataaaacagtttttaattttttgctaggttcttttaaaaaatgatgtaacttacatggaagtcttcacaggacttttttctttcctggaactattgaaatgtaatttaggatgatttgatcttccatctcaagttgtcaacatggctgtgtcattctggcttacatatgttttatttaacaaaattctagtcaagggataagggcataatgaagacaagcttcagttatgaaagtacaaactatttgtgtgattaatttttaaaaatgacattaagaagcccattgtaaaataatatttgcagtcaaatggtttttcttgctgtaagtcctgttgtagctatgtttagggtagtggttctcatctaccttggagtgcataagacttacctagcaggcttgtttaaaaagttcagattcctagctttgtacccagggattgcctcaggtggtatgggctgtggtcctggagtcatcacttttataaatagtggttcagagaccacagagagagactgcttcatcgaatgggaagtaccaaggagaaagtacaattcagtattgtctggaggcaagtggacactttgtacctgaggtttagaataggtggtctcttgccagtacaatccccaggcgttttctgtgttcagaagtagtaagaatgcctttaattcagaggattatctaagctctttaaagctgtttttctccattgtcatagtgccttctctgaaaaatgaatgtacaggtatcctattttctaatgtaattaggattttttaaaagcaatttttgatagtttttcttttaaaaagtaaaattcagcactgtgacttgaacccccaaatctttcacatacaggtgaaacattaagccacaaataaaaataatgaacaagaaagaagacaagatcctaattcctgtcattagtgacctaagtaccccatatcagaaactttgcaaaacagatctagggacagaagggctttgaaagacatttttctttggggcaaatttcgtgtgccagaactacagtttaaatgtttttatgagcaagggaaggtagcattgattcccatagctttctaattagatacatgctgtcatggatgtaagccttaaaggagttaatactaatcttgtacatacacaaattttcctcaggtttttttattttaaaaaatgatttgttaaaagtactgtctgctagacccttgcctttgagtggctttgaaacttaatatagtttttaaaaagtgcaatgggatgagattatgctattagtatattaaaagcatgtttctgttttactccaattaaccgatggtaatgatagcacccccccgggtgctgtgtgggggggggggggccg

SEQ ID NO: 132128 - DNA, 923 bp, Homo sapiens
atcgagctcggcaccctgattgcatttagaccacttttataaatagtggttcagagaccacagagagagactgcttcatcgaatgggaagtaccaaggagaaagtacaattcagtattgtctggaggcaagtggacactttgtacctgaggtttagaataggtggtctcttgccagtacaatccccaggcgttttctgtgttcagaagtagtaagaatgcctttaattcagaggattatctaagctctttaaagctgtttttctccattgtcatagtgccttctctgaaaaatgaatgtacaggtatcctattttctaatgtaattaggattttttaaaagcaatttttgatagtttttcttttaaaaagtaaaattcagcactgtgacttgaacccccaaatctttcacatacaggtgaaacattaagccacaaataaaaataatgaacaagaaagaagacaagatcctaattcctgtcattagtgacctaagtaccccatatcagaaactttgcaaaacagatctagggacagaagggctttgaaagacatttttctttggggcaaatttcgtgtgccagaactacagtttaaatgtttttatgagcaagggaaggtagcattgattcccatagctttctaattagatacatgctgtcatggatgtaagccttaaaggagttaatactaatcttgtacatacacaaattttcctcaggtttttttattttaaaaaatgatttgttaaaagtactgtctgctagacccttgcctttgagtggctttgaaacttaatatagtttttaaaaagtgcaatgggatgagattatgctattagtatattaaaagcatgtttctgttttactccaatttgtaagatcatttaatggaataaagatcacaacaccatgttaaaaaaaaa

SEQ ID NO: 132129 - DNA, 2483 bp, Homo sapiens
atagatttcagaataacttaaaaaatttaatggtaagaaggggtgatgtgtcgaaaactcatactaaagtattaggtcactttaaaaaaagtgataatgtatgatttaatgaaatcttaagattcagttactatttaaattcaccatttctgttttggtcttataaagagaccttggtttaattatccagaggaagtcctcttcaccattttttttttttcttagttctgcttctggaaagtgttttataaagttttctcagtgagggttcttaagagttttctttggcctcttttctctcaacagtaaattgatgattttatatcagctttttcaataaaagatgcattatcattactggctataaatcatcctggggagatttataaccaggttaaaaataatatcttttacttctctcaccttttacttgtggttcagatgctcagactgtgcctgtttgcgtcgtgtctgttgctctgccgctttccatgcaggcatttttaattttacacaatcctaacaatatatggaactcattcctatgaatatataaaaggaggcttccaaaattttctattaaaatatttcaggataaattaagtgttgataatttgaaaaaataatttcaatgagctgcttatagtaaaaatggtagaatcagagttttcattctttgagaaatctttctgtaagattggctcatagataaaatgagacaaactactatgtatgataaaacaccttcagagtcatgccttgttttattttattttattttttgagacagaggtctcgctctgtcgcccaggttggagtgcagtggtgcaatctcgctcactgcaacctccacctcccaggttcaagcgattctcctgtctcagcttcctgagtagctgggactacaggtgtacaccaccacgcctggctaatttttgtttttttactagaggtggggttttgccatgttggccaggctggtctcaaactcctgacctcaggtgatccactccccccagcctcccaaagtgctgggattacaggcatgagccaccccgcccagctgagtcatgccttattttcgtagtataccaagaaatgttctatggaagtttacgttttaacacctcttttatacttggtaaaattgcctgtgtttcgctttattcctttttttttttgagacggactcttgtactgtcacccaggctgaagtgcagtggcgcaatcttggctcactacaacctccgcctcctgggttcaagtgattcttttgcctcagcctcccaagtagcagggattacaaggcatgtgccaccacacccggcttatttttgtatttttagtagagacagggcttcgccatgttgaccaggctggtctcaactcctctgggaatccgcctgtcttggccttccagggtgctgggattacaggcgtgagccactggaacctggccttgttttgctttattttttctcttacatgaagtaaagcgctttggtcaaacacacaaaaatactgccttgtactggtggttggtttcattagtggatcacacacagtgttctacttggcttgtaaaatggtgccttggatagggtgagtttggataagtatgtatgtatgtatgagttatagcaaaattaagtagattgaatcaagtccatgcaaaagcaataaaacagttttaattttttaattttttaaaaattaaaactttaataaaacagtttttaattttttgctaggttcttttaaaaaatgatgtaacttacatggaagtcttcacaggacttttttctttcctggaactattgaaatgtaatttaggatgatttgatcttccatctcaagttgtcaacatggctgtgtcattctggcttacatatgttttatttaacaaaattctagtcaagggataagggcataatgaagacaagcttcagttatgaaagtacaaactatttgtgtgattaatttttaaaaatgacattaagaagcccattgtaaaataatatttgcagtcaaatggtttttcttgctgtaagtcctgttgtagctatgtttagggtagtggttctcatctaccttggagtgcataagacttacctagcaggcttgtttaaaaagttcagattcctagctttgtacccagggattgcctcaggtggtatgggctgtggtcctggagtcatcacttttataaatagtggttcagagaccacagagagagactgcttcatcgaatgggaagtaccaaggagaaagtacaattcagtattgtctggaggcaagtggacactttgtacctgaggtttagaataggtggtctcttgccagtacaatccccaggtacaaagctaggaatctgaactttttaaacaagcctgctaggtaagtcttatgcactccaaggtagatgagaaccactaccctaaacatagctacaacaggacttacagcaagaaaaaccatttgac

SEQ ID NO: 132130 - DNA, 472 bp, Homo sapiens
gctcggtacccggcttaaaagggagtcttcacgctctgtgatcagaggccctgcgtagagagcactatctcctccacgcgcaccccagtgctattgaaacttctaaaactaggcctagttttagaagtttccatagcagtttaaatgtttttatgagcaagggaaggtagcattgattcccatagctttctaattagatacatgctgtcatggatgtaagccttaaaggagttaatactaatcttgtacatacacaaattttcctcaggtttttttattttaaaaaatgatttgttaaaagtactgtctgctagacccttgcctttgagtggctttgaaacttaatatagtttttaaaaagtgcaatgggatgagattatgctattagtatattaaaagcatgtttctgttttactccaatttgtaagatcatttaatggaataaagatcacaacaccatgttaaaaaaaaa

SEQ ID NO: 132131 - DNA, 307 bp, Homo sapiens
aagaattcctggtgagaacagctaggggagctgttggcctttagcactgctggaatcctgtggccgtctcctaactctttcaaagagctgcaggctggtcagcttgaagtggcataaaaagatttatttaggatctaaatttttccttgatcttgacctaagttagttacatgttacaagcatttgttggccatgttccataatgtactttggcttctgagcctctgagttgaagagtgagctagtgctgctcttaaaaaacaacaacaaaaacaaaaaaccagtcatagtacacacatgttgatta

SEQ ID NO: 132132 - DNA, 503 bp, Homo sapiens
tggagctcggtacctacttttcacaggggtatagaatattattcagccataaaaagaaggaaaccctgctatttgtgacaacatggatgaacctggagaacattaggtaagtgaaataagccaggcacagaaagacaaataccgtatgatttcacttatatgaggaatctaaaaagttgaacccatagaatgaagcagataatagaatctgcttctattatcggccaagagccgttgggaggtggggagaaatggggagatgttagtcacagggcacaaacttgtagttataggatgaatgtgttttggttactagccttgtagtaatactgttgatttttaaaaaatgttctgtgaaagagtagtaaagtagtctaccttaatatcactgccttttaaattaggtgaacagaggaactattatctccacttttaaaaacgaatttaagggatatggtccaggtcatgcaaacatagtatgtgatggattgaactgagaaccc

SEQ ID NO: 132133 - DNA, 137 bp, Homo sapiens
gccttaaaacttaagtaataaaagaaggtgttcttttggctcatgcagtgtgtcgatctctgtctctcccaagcatttttagactttatgccagagaccacctggaggcaaaagacaccatttatttaattccttcc

SEQ ID NO: 132134 - DNA, 260 bp, Homo sapiens
tatgggatatagcgattgtttttaagagttggttgcttaacatggaaaatgtgcttctgggaaaaagagttttaaaaacccagctttcatgttttattttacttcattgaaatgaggttcttcttgcgtgccccgaggctttatctctggaatgatttttactaaataattcttcatattcaggtagtactttcatagacataatcccttgtagtcttcaccattgttctgtgaggggtgtggtatcatctcagttttac

SEQ ID NO: 132135 - DNA, 150 bp, Homo sapiens
caacgtgcaacacaagtccagaggtgcacacatgttgtaaatgtacaactctgtaagttttcacaaactgaacacacctgtgcaaccagcatcccatcgagaaacattacccgtggctgggcgtggtggctcacgcctgtaatcccagca

SEQ ID NO: 132136 - DNA, 302 bp, Homo sapiens
gtgcccggctgctcacctgtgcacgtgccctgagtgtagctgggtgcagacctggacggcgctgctcagctgggcagtcccggggcactcggcccctagtaggtgccacagagaaaccggcaccaggtggcagggaacaggctgagtctgtggaggggacccactggagtggcccaggaggctgggaaggcttccaggagaagccccgcctgctgctcatcctcattgcctgacccttgtccaagtgcagaccgcagggccggggatgctgactggccagttccaggtgttcctgagaacca

SEQ ID NO: 132137 - DNA, 431 bp, Homo sapiens
ctgctccctgggccccgggctgcttcctaggaaggacaatctggaggcaaccataaggaaagaaaataacgaactgcctggccctgcattgcataacccgtgcgcagtaaaccaggagctctgctgggacacagtctgttatctcaacaggtaaacaggaaccctgccccctccctgaccactgtcagcactgggccaccacagacactccagacacagaccgatagcacatgaggaggacaccactgctctttagcctgtattttcacactcccatttccctgcagctgctggcatcatcactgggcacactcaataacggacactccacccactccagcccttccctggctacctgctccaaaagggtggtcccgagtgactcaaagctgccttctgcaccttgctcttttccatccacggagaccaaa

SEQ ID NO: 132138 - DNA, 260 bp, Homo sapiens
caacaggaatttctcccatatctaggtattcttttattgatattctatcagctcctaacaacagaactcctgtgcacatcgtatacaatatctaataatattacactgccttgaattttaaaaaaccatagacattcagttctagaagactaagtggtcttctcatatatgaaatttacaaatttggccaggcgcggtggctcacgcctataatcccagcatttttgggaggctgaggaaggcacatagctcgaggtcat

SEQ ID NO: 132139 - DNA, 579 bp, Homo sapiens
ggtggtgtggtggctcgtgcctgtagtcccagctacacgggaggctaaggcacgagaattgcttgaacctgggaggtggaggttgcagtgagctgagattgtgccactgtactccagcccgggagatagaatgagactctgtattaaagttaaaagagctggtgagagcaggtatttttgtctggtttctaccaataatataatattacctataactttttcatggatattgtttatcagattgggaaactccctctattcctaatttttggcttaattgaaccagcttttggtttattgattttcctctgttgttttgctgttgtctgtctcaggaagttccttcctattccaaaagttttttttatcataaatggatgttgaattttgtcaagtgctttttctgcatctgttgagaatgtaatatggtgatattgcgttattataatgaattacattaactgattttcatatgttaaaccaaccttgcattcctgggataaacctcggttggtttttgtttttgttttcttcctatacacacaaacagccagaacttgatcttttttatgattgact

SEQ ID NO: 132140 - DNA, 511 bp, Homo sapiens
ttctatctgaagcacagtaatgaaagctttcccaattccagtttaattttaaacccaatgcctctcatccttggaagcttcataatcatttcctactcttagctgttcagacaaaattacctccaaaacagatttagaaatgttacctcacatttctaccattacaggtatcaaagaatttaaatacaaataataacaattataaagcatgtgttgcacccaacaggaactgaaaatcttgcttgactcagaagagatgacttaaaccccagtgagaaaatatgagtatgatgtaacactgtaagtacaaagctaaaaccattattatagacattaagaacattaaggggaaaaaaattaaatgttcaaaacataaaaagctcacatgccaactcacctgttttaggatttggtttttcactgataatttctaagttatctttcttaaaagctctcttaaataaaaccagcatacacactgagaatctacaaaatgggctgggtgtggtgg

SEQ ID NO: 132141 - DNA, 718 bp, Homo sapiens
tgatctttagtattttctcctttctttgctttgggcttatttgctcccttttctagcttattgtggcggaagctcagatcattgattttaaaatttacttatttatttatttatttatttaattcaacactgatcagaaggctttttgtgcttttctaaaaaaagcatttaatgctataaatttcccatttgctttatctcacaaattttattgtgttgtaattttgtgttcaatttagaatattctgatttttcttggtattactataattttcaaatatttagagtttttttcagttatctttctgttactgattgtaatttattgttttttaaaattatagttctttgaatagttttgcagtatttgctctagggattactataaacatacttcactttttacagttcacttagaagtcaatattttaccagttcaagtggaatgtagaaaaatcttaccactgtttacattcctttaccctctcccctttatgttataattttcttataaatcataagacttggctgggcacagtggctcacctgtaatcccaggactgggaggccgaggcgagcagattgcttaagtccaggagttcgagaccagcctggacaatgtggtgaaaccccaactctacaaaaaatacacaaaattagctaggcgtggtagcatgttcctgtagtcccagctactcaggaggctgaagtgggagga

SEQ ID NO: 132142 - DNA, 257 bp, Homo sapiens
ccaattacccaggccctaccagagatccactcactcgggcacgtctgcccatcacttatcacagttaaatacagccattacgtgctggctgcggcaacgctgtttatctgggacaataacgagtccctgaggactggattgctctcaggtagccgcagctattctgggacactcacaagggtagagccctgcggtcaatgaacagagccgcctgcactagctgataaactctgagtgtgatgccagatagtggtccc

SEQ ID NO: 132143 - DNA, 739 bp, Homo sapiens
gtggacatcacggacctaccaatatgatgtcacccctggaggcccagctgtaaaattcctctctttgtactctttctctttatttctcagaccagccaacacttacgggaaacaaaaataacctacattgaaatattgggggcgatagaccatgggaatgcaagtatctcttcaacatcctgatttcaattattttgaagaaaccctggcagcctcggcatcacctcatcagcaggtttgcaacttgcaaccacttcccagcacttggcaaaagaaggcaagaaagccgccctgttctcctgtgatgtctttactaagtaactgcggaaggaccagtgcattttctaccttccaaggcagacactctggcacctgagagtgatgatcttgtgtaaaccaatcagggtactggataaatacagctctgatgcctctggtatgccagtggctttagtgtatggtagaaccaaggtaataatagtattccgtggtatgtgtgacatcttccttatcagcagtaagccaagattttttttagagtcaatatcaactacaatcttgcagcgtcataacgtttaaataaattacaacagttagaccccaagaggttggttcttgactttaagcagtctttcctgcttgctttagagatttaaaataattcaacttcctggaaaagaactctaaaaataagcccctagaattataaaaacaatgtaaaagatcgccatcattaccg

SEQ ID NO: 132144 - DNA, 350 bp, Homo sapiens
tatggaataggtttagcaattcagaagcttttccacgtgcactgcagagccggagcccaccccactggggggaaagggaggcacagatgtggaatgagatcagagatatcaggaaaggttcatggtttttattttattttattattattttttgagacgaagtctcactctgtcacccaggctggagtacagaggtgtgatctcagttcactgtaacctgcacctaccaggttcaagcgattctcctgcctcaggtgatctgcctgccttggcctccctaagtgctaggattaacaggcgtgagccaccacgctcagccttatatatttatttggagacaaagggaaaca

SEQ ID NO: 132145 - DNA, 828 bp, Homo sapiens
tcagcatagagtagttgcatttcagagtatctttgtgtctgaaaaatccgtgattctgctcaactgctgttttacttccatatttttaagcaaggaaactgtttttaaactgtaaagagttcagaactgcagaggcctctgggaagtgtagcttagtgtgggaggagatattcagtgactactgttaaaaattagtggttctgcagtgagaacacatggacacaggggaggggaataacatactctgggggtgggggagagagcatcaggaaaaagatctaatgcttgtggggctcaatatctaggtgatgggttgataggtgtagcaaatcaccatggcacacgtttacctgtgtaaccaacctgcatgtcctgcacgtgtatcccagaactttaaattaaatttaaaaaatattaatggttctcagctgggcgcggtggctcacacctgtaatcccagcactttgggaggccgaggccggcagatcatgaggtcgtcaagagatcgagaccatcctggtcaacatggtgaaaccccatctctactaaaaatacaaaaattagccaggcgtggcggtgcacacctgtagtcccagctacttgggaggctgaggcaggagaatcacttgaacccgggaggcagaggttgcagtgagccaagatcgcaccactgctctccagcctggcaacagagcgagactccatctcaaatatatatatataatttttctcaaactctcgggtgtgctgaaggagcatgcaaatattgaaaaaccctgatgctgactttgagaaatcatgcagaataggggccgaatgcaagaaaaa

SEQ ID NO: 132146 - DNA, 542 bp, Homo sapiens
tgcctgcctcagcctcccgaagtgctgggattacaggcgtgagccaccgcgcccagccaggagtctcttgatttagaatgggaacttgaaatcatctcctcttgccgtgtacttgaacgcgataacctggcacttatctttttaattcttttactcacctgcatctttgttctttttgcctctgatgttcagggaagcctcttctcccactgcatctgtgatctctcctgaaatgtagcacccacacatccctgagaagctagctgcggcacgtgtgtgtgcacatgggcatgcgtaagtctgggcgtgccttccacaacagattaaggatatcaatcctgacgccatgctgggatgttttagtgaatcttgacagggttgttgactcccctgtttccctggaggactttaccatgaaagtcttctgctgtgtgactttggacaggcgtcttggcctctctgtttctctttattcataattgaggctaaagtgacacctttgccatctctgccacaggatactgtgggcatctgtgtagttg

SEQ ID NO: 132147 - DNA, 399 bp, Homo sapiens
gaacccctccctggggcctggcttgggggatactcaggtttgagtccctctcccccactggggctttgctctgtgtgaggtctgtgctcacccaccttcttctgctcatacccctctcctctgacacacaccaccagctctgctgctctcccagagttgccctgagtattaggtcaccctaggaagttgctcctagtcagccagttctggcctaccaaaatggcatttcatatggtttcagctacctcatccccagctgctgtgtttcttgagtgggctggggggcttctgatttcaggaacctgctagattcttggctcccatccttcaggcgatgcttcaggttcctcgagtccttaattttctttgcagtaaaatggagaaacagtgaaaaaatat

SEQ ID NO: 132148 - DNA, 118 bp, Homo sapiens
agattttcagccagtgacaaaggttgggagcagcagagttcatgcaaggagtccacacaagggttcctcacttctgacagcaacagcacactgaaggggttcccaagccaacttcaga

SEQ ID NO: 132149 - DNA, 388 bp, Homo sapiens
cacacatctcgcacgtgcacccacacatctcacatgcgcactcacacatctcacacgtgcacccacaaatctcacacgtgcactcacacatctcacacacgcacccacaccgcacacgtgcaccctcacacatctcacacacccacatctcacacatgcaccctcacatctcacacgtgaatcctcacacatctcacatgtgcaccctcacatctcacatgcgcactcacatctcacacgcacactcacatatcacacgtgtacccacaaatctcacacacgcacccacaaatctcacacgtgcactcacatctcacacgcgcacccacacgtctcacacgtgcaccctcacacatctcacatgcgcaccctcacacatctcccgtgt

SEQ ID NO: 132150 - DNA, 595 bp, Homo sapiens
gctccagccactcctagagccataacagggttacaaggccacaactgtttaagaacagggaactcttctttacaaactgaccagcaaacaagtacaggagaatgctaccaaatcctcaattctatattcattagatcagtagccctcttcagctacacaataaaatcacctgaagtgattttgtttaaaacactgatgcccaggttcctctccagatgaaataaattacagtatctgggagtaaggcctaggcatcagaactttgcaaaaaatctcccccagtgaatgactctaaggtgccaccagatagagaaacttaactgattggttctaactcactggctctcaagagattgagagagacttcccacaagcattgcaaagtttcatttctaagttttctaattatgacctggcttaagacattcaaaaccaaatgtataccatggtatataaaacttacctgggggcttgcttctgtaatattaatacccaagtatttttcaccacttaggttaccaagccactgcaggaagtttcgaagtgctctgccacaactcacttgattctcatacccagtctatgcagcacagaa

SEQ ID NO: 132151 - DNA, 431 bp, Homo sapiens
ggttgcagcgaggcgagatcgtgccactgcactccagcctgggtgacagagtgagaccccatctcaaaaaaaaacaaaaaaaaatttgaaaagtcatcatcaaatgatttctttttggtttcttgtcatctttctttgtcttgtttttaggctatactcagaagcgcattaaaaatctcatgtcattctctttcttgtaaacgattgtttttttgatgaagttcctccttaagtaatgtgtattagtatgtgtatggtggtaaacattatgaatccttgcatgtttaaaaatgtttttatcttgccctcacactcgagtaataatctggctggataatagtttcaatatcataattattttcttcacaactttgaaactactactccatcattctctagcctacaatctccatgtgctctaggccctagtc

SEQ ID NO: 132152 - DNA, 323 bp, Homo sapiens
tggcaatcagtattaaattgcagcctctattactgattatcattcataaattaaaactataattgacatattccaacctggaggaagagaaacaacagacttgtttttatgcaacagtttgcccactgtttaaaagagaatgggctgggcacagtgcctcatgcctataattccaacactttaggaagctaaggtgggagcaccacttgaggccaggagtttgtgaccagtctggacaacatgtcgagaccctatctctacaaaaaaataaaataaaagccgagcattgtggcatgagcctacagtcttagctacttagaaga

SEQ ID NO: 132153 - DNA, 591 bp, Homo sapiens
aaataagtacacatgcatatgagtaacacgcactccatgagtacacatgcgtacaagtaacacacgttccataaatgagtacacacatgtgtactatcacgatgcctggtcattataactaccatttacttagcacttactatgtgtgagttaccctaagacatttgatgtgcattatctcaatcttcgcttcaaccctatgatccaaatactagtattatccccattctacagatgaggaaactgatactcaaaaagatttttttcccttgtatcaagggttgtgagctcaagcataagcagagctggatcagaactcaggtagtcttgactccagaacttacatctaagtttttatatttttgttataccttccttgacttctgaatcctgccatgtatcttgctgtccaggagactggctgtatttcattgttttctctggttggctgttcttttcacaatggctcccacggtatccagggtttgcaggtggggagggaggaggagggtgtagggttcaaggctaaccagggcagtctatactacagccaaactcactacgctagcaagttcattttgagtgatgggg

SEQ ID NO: 132154 - DNA, 295 bp, Homo sapiens
caatgccaggtctcctctcagaaacacaggtgctggtctcacgcagctcccactctgcgggctcaggccctttgcaggcatgatgcactcagctccctggagctgagagactgtctctctccttccacttacccatcagaaaacaaaacaaacttttatccagatccttctctgtgttagatgccaggagtgtgatgaagactctgctctggaaatgtcctgaggctgagggagggagggtgacaccaaatcccaacccaggtcccactgggaagtcacatccttcaaatgcagg

SEQ ID NO: 132155 - DNA, 564 bp, Homo sapiens
gtagctgggactataggcgcgtgccaccatgcccagctaatttttaaaaaaattttcttcgtagaggcaaggtctctctgtgatgctcagtttctcaaactcctgagctcaagggatgctctcgcctcagcctgggattacaggcataagctgccatccccagctccttgaaatgagttttaagaggccaagttacgatttattgttggaaaggaatgggatatgtgtttattcatgaaatactgcctggggcctactgtgtatacagccttctcccaggcaccatctcatgcacacacgcctggtctgggaggaactttgttgccatagtaggagggaaagggcacgaaggtggtcgggggtggccagggcaccgcccactgctggatctggctgcattcgggcctcaccgccagtgctagggctagctgtgcacttgagacgtgctagacagctggagtggaagtgtagtccttgattaggacatctttaatattcgatcaagttatgtgttcggggagctactgtgctgatcctgcactgtgcatggctcatgggtctgcc

SEQ ID NO: 132156 - DNA, 288 bp, Homo sapiens
accagccaacttcagacctttctttagactaattgcccagaaagaggtacccatctaaagataaggaagtcatttcctgtctgactacctcccattctcccttggcatggaaagaggggctcagggcatataggaaagtgaggaggaggcctggagagacggagggaaagaagaagggagaagaatagatagaaccccacttagcccaagtcaaaaccccaactgagatctagagcaggcagagggaatagactgctaatgggctttacccacaggaagtcatctagg

SEQ ID NO: 132157 - DNA, 415 bp, Homo sapiens
catcatattgatcaggctggtctcgaactcctgacctctggttatctgcccgcctcagcctcccaaagtgctgggattacaggcgtgagccaccgtgcccggccgaatattcttcatcacagattcctggaggggaatttccaggtcaaagttgtgaccctttcaaagtccccagaccaagctgccttccaggaggcagtcccaccagccgtacacagcgccaaggactgcgcctctcatctcttcttagaggtggcaaaccttttgaagactgattgattgattggtttggtttggttctttaactgtcagaagttactcagggcccagcttggaagggatgctggaagggccctgggacttagaggccaaagctggtggtgaatctgatgtcatgccgagatgcccggttctg

SEQ ID NO: 132158 - DNA, 193 bp, Homo sapiens
cgggacttcagggtctccgcgggagcttaggaggctcaggatctgagttggagagctggaaggccaaactccgagccgctgagggactgcgcaggaagaccacagaaataaaccaaagggacaccgcggacagatgtaccagaggacaccactgaagtccaggagaatctccaccaaaaccatcagcgttttc

SEQ ID NO: 132159 - DNA, 412 bp, Homo sapiens
atacatgtgcaggatgagcaggttggttacataagtaaacttgtgccatggtgacttgctgcacagatcaacccatcacctaggtattaagcccagcatccattacaaatattaaagatggtatgaacagaaaaccccatatttacttctccaaatctattatataacattaaacaatcaactaagataacattttactgacttttgcagagtatgtgttccaaaaatagcaatattgtttgttgaagtaagccatctcttcttttgttaattgaataatctcaagcacacaattcagaaagtaagtgtgctgtagtgaaaagtgggctgagcttggtgccttaagattggggctcaagggaaatgggtgctatatgatctatcttgggatgtcctatgttggtatcggtca

SEQ ID NO: 132160 - DNA, 256 bp, Homo sapiens
gttaagacacctgcatatattcacatatattaacaagagagagggtttgaataaatatgacaaagtaatatttatttaatattacaaaacaaatacaacagtgttaatgattggtaagtaaaagcattaaaaagaaccaagctggttacagcgtgtcatgtctgtaatcctagtgctttcagaagcacaggcaggaggatcacttgagcccaggactttaagactagccagggcaatatagcaagaccgtctttac

SEQ ID NO: 132161 - DNA, 438 bp, Homo sapiens
gtactccagcctgggggacagagtgagatcctgtctcaaaacaaaatcaataaaagcagtatgtatagttgctatcaactatatagaaatggttttctccaggtgaactctggtacagaagccaagtcacatggtacaatacaggtatggatataaggtcccataaaggaatgactagaaaccaaatccacagaatgttattttcagtgagaacaaattactgtcccccctcacaaggaaacttagtattgcagttattcccatcaaagtatatttcacattggagctcagttgtggtaatgtttaaacttgagtggatactcatgttgaagatatgttcattgcctttgctgttaccaatctatcctgctgctccaaccctttaaccacgaagatgattagatattgatctgtccagaagatacctgtaaactcatg

SEQ ID NO: 132162 - DNA, 651 bp, Homo sapiens
aagtaatgtttatgagatacagaccataattataactgtatttctttaatgtttctcctaaaaactcagaaagtgttttcatttgattacattgttacagagtaggtagggtgttttggttaacagaaagccaccatgtatttcataagggtgttacaaatttccaaagaactagaatgtaataaaatgtagcagcctactaaatgtgatgtcatctttgcctctgtaagcatcctagagtttatagtattatgaccatcagtcatgtgctggatattgctgaagtggtgactcatagagacttccgcctactgtcatacaacataaacgtttctctaagaaagtataatattagctatggtgaagggctcactttatatagatagttagctgttgaaaaaaagtttgatgttcagcatgtcttctttgttacacacacagagaatttagaaaagcactgtgatcccagtaacattacatatactgttctacaggttgcttttgttcacttaacaaaatagacatattttcatatcagtgcatatagctctgtgttattctttgaagtggttaaatgagtctactgtatgaatgtcccattagttatttgagcagttccctgttaatggatagttagatattgttcttata

SEQ ID NO: 132163 - DNA, 789 bp, Homo sapiens
gaaacttcgtggatggggttaacggcagctgtattttctgggcgctccatggatggggttaacggcagctgaatttgcaaggaactccgtggatggggttaatggcagctgtattttctgggagctgtgctttaattggataaagtaagttctggtaagatttcttccttcatcttcggtatctcaaatgttttcatttaaataatctttataataactcttgatgtctgagggggttcccacacagtcatctattgtaagactttctgattcctttttttcctttggtcattatgaatagggcttctgtacataattgcatggtagcttttgtttggaaatcacatcaaagtggttgtcaaaatacttaggaatgtcgtttttggattgtaaggagagacttatttagctttggaaaaaactgcccaacttgtaataggtgaggaaaaataattttctctctatcttttcagaattcttagattggaccctctgtaacaaatgacagattaaaatgagaaaaatgtagaaaagtttaaaaacatgtataccttatggatacatgggcgatactcagggaaaaatgagtaaatctccagcaggtggttttcaattcaagtgtaaatactatcttcaacttgaagatttgaggcacagtagtggggagttaaccagcaaaaccacattagacaagagtaacgtttgttatgcagactgaagtccatgcgtcctccattgataagactctagtgatttagttatccttctcttcttggtgccgagagagag

SEQ ID NO: 132164 - DNA, 437 bp, Homo sapiens
ggagagattaaatgggaatagttgtataaaggccttggatcccaagctaaacagctaagacattttcatacagacaataatagggagccattcatgctgcaaaagagtacaaggtacttttttcaatgcctacgaggtacttttttctatgcctaagaatccaataaatagctctactctctgttacttgggttctagtgaataatttatttattagatttatagtacagtattaataagtgatatgaagaaaagcaaaataaggtattttaaattaaggtggtcaaagtgtatttttctagacattggaattaataacatttgtgtccctgaaggctataatacttgttctctcgttttatcttacccaactctaggaatgccttgggaactgccccttcagtctagatatctataatttaaaacttgagttccta

SEQ ID NO: 132165 - DNA, 199 bp, Homo sapiens
tcattatccccttttcgcagataaggaaactgaggcagagaggccctgcctaaggtcccccagctggtgggaggcagagacaggaaccagccctcatggtctcactgtgagactggacttttcacagctgtgcggtcgagtctgagccaagtaaagtaaagcgagtttttgtacttcgaagtctgggacataaaatctt

SEQ ID NO: 132166 - DNA, 393 bp, Homo sapiens
tagcatttcttacagggaagatctagtagagtgatgaactacctcagcttttgtttatttggaaatgtcttatttccttcctcgtgttttgccagtataggattcctggttgacattttttttctttcagcactttaaacattattagccttctgagctccaaaatgtctgattagaaatcttctatgaccatattaagtatcccctgtatgtgtgacaagtcactgctctcttgctgctttcaagattctctgtctttgacttttgacagtttgattataatgtgtcttggtgtgtgtcttttttagttcattatccttggagttccttgaacttcttcaatgtttatatttatgtctttcattaaatttagggaaaattttgaccattatt

SEQ ID NO: 132167 - DNA, 100 bp, Homo sapiens
tcgaattacaggcatgagccgctgcgcctcacctaaaaactttctaagaagtgatctcaattctttcctgaattgaggctttacgacattcagtgaaatg

SEQ ID NO: 132168 - DNA, 408 bp, Homo sapiens
agtacagacggggtttcaccatgttggccaggctggtcttgaactcctaactttgtgatccgcccaccttggcctcccaaagtgctgggattacaggtgtgagccaccgtgcccggccaattttattatattttttaatagtcctcagattagggatgttactgttcattctaagctctaaatgctttttagggtttttttcctttggatttcttagaaatacagaattctgtctctcctttttaaagtgatttttttttttgagacagagtctagctctgtcacccaggctggagtacattggtgcagtctcggctcactgcagcctccacctcctgtgttcaagcaattctcctgcctcagcttcctgagtagctgggattacaggcccccgccaccatgtccggc

SEQ ID NO: 132169 - DNA, 476 bp, Homo sapiens
aggcactacataaatatttgttgaatgaagtcatgattgaatgaatgaatagacaaatccaagaaagaggagctcagttaacattattctctatccttggctctcaactgagggaacgattttgtagtagaatgttttgaccaagggtacaccctctagggccagctcagccacttactaactgcataatcttaggccagttacttaacctctttgtacctcagtttcctcatctggataatggggttagtaatattacatactttgtaggtatgttggggaggttaaattaatgaatacacaaaaagcacttagaatagtgcctgaaacatagggaatgttccagaagtgtcagcctttattattttgttgcaacttaaaggattcacttcaattttatttattttttaaaattattgtttcagaaaattcaatgtaggtattgaagggagtgaaaagaaatcccatgattaaaa

SEQ ID NO: 132170 - DNA, 377 bp, Homo sapiens
aatcaatcggaagttagcaggtgaagtaaaggcaaacagaaatcgcacatgtgtggtgccgtggtcaagcaccatgggctctggggacaggagtgttcctttggatgcacaggcccatgagggcttccaggggggtgtggagtaacaggctccagcatctgatatggaggcaagagagaatcatgaggaggagtagaaagcaggcaaatgggaaatggagaggacagtcttgtatgcacctgcagagagggtgagattcaagggtccctcagtctaaaatgaaggcatggtaatgtgaattcagccttcccaagctgcttttcggtggcttggttgctaacaccatcgttgcatgtgacaaccagccttagcgcttg

SEQ ID NO: 132171 - DNA, 295 bp, Homo sapiens
  misc_feature (94)..(94): n is a, c, g, or t
  misc_feature (243)..(243): n is a, c, g, or t
gagtacagcctgggcaacatagtgagacctcatcataaaaacgaaaagaaaacaaaaagcaaacaacttttctatatttttaaggcctagccanaaggttcttttcaaaatatgactgctcattgacagtgcacctggtcaacaagagctctggtggagatgtacaagatgaatgttgtttccatgcctgctaacacaacctgcattctacagcacatggatcagggagtaattctgacactncaagtcttattttttcaagtaatacattttgtaaggctatagctgccatagc

SEQ ID NO: 132172 - DNA, 326 bp, Homo sapiens
ggaaatgggtggtccctgtggaggcgcgatgcacagagcaggaggagggagccgccctgagaggagaaaggcagcctgctaagcaagagctacaggaagcacttggacaggccatcgggccagaagcacctcgcaagggtgtccgggagctttggtgatgaagggcaagaaagaagcagctaagaggggggcctcatcacagagatgctgtcaaagattcaccaagcccacctaaaagtatcttttattacgggaactgcaattcaccttagcagcgcaagagggcatgattgcactaccaaacccagaaaagcacccacgcattc

SEQ ID NO: 132173 - DNA, 484 bp, Homo sapiens
gactacaggtgcccaccaccacgcccggctaatttttttgtatttttgatagagacagggtttcaccatgttagccaagatggtctcgatttcctgactttgtgatccgccagcctcggcctcccaaagtgctgggattataggcgtgcgaccacgcctggcccaaccatgaataattttttaaaaatggtatcaagagagcagctcagataattcatttaatataatactattactaataatacctaataaactaatttcattctatgtatgagctttatgaagttaaagaaattagtatgttagaaattcatgttactcgtttaattaaatcattatctccaaatggatagaaataattttaaactagtattgtgacagtaattccataatgctcccaaattacaatggctattctaggagagtagtagagtcagttcaaaaacagaaacacatgttctagattcagacaaacctgggctta

SEQ ID NO: 132174 - DNA, 480 bp, Homo sapiens
gttaaattgttgtccctgtctccccactacaacttcctcctaccttatagcattgttttcttgaatactggctatcctccagtctttgagatgctctcgctagcctccttttattttactaaagcatatagtaatagcatggtaagatttatatgttttgacttgactctgctaccactgtcagtcatccagttaagttataagatcctttgttattccctgcaatgataaatatttcagaattccttctcttttcttctgatacagattttagttctgaacctagttctgtaatcattggcttttctccagttacaagttttaattcctttacccctgttctatttcatttcagaaaccagccttttaaagttccagttagcttccaagttactgctattgtgaaaactgtataacattgcttcttatactgaccatgaattgtgatactggacctgtgctttcttctcacatcctgcc

SEQ ID NO: 132175 - DNA, 200 bp, Homo sapiens
tttcaccatgttggtcaggctggtctcgaactcctgacctcgtgatctgcctgccttggcctcccgaagtgctgggattacaggcatgagccaccaagcctggccaaagtgtttaatttcaagcagccacaatggcacagactcttgaataaaaccaacaaaataggccagtgatgatacctgggggttacaagcttccc

SEQ ID NO: 132176 - DNA, 602 bp, Homo sapiens
gagtggatattgcctctccagcaggctaaccctagctagtttcaagcaggtgccaaatgagtgagtggaggcatgtgaatcctctcatggctcactcttggcactggcacgcaactacttctgaagcattttcttggcccagtttcaaggaatgaggaaatagtctctattcttaatgagaggaactgaaaagtcaaggagagtggatatagaaaggcatggaaacaatgggaacacaactattctattatgaaaggtattatgtgcatacacttcaaaagttaagaaacttactcaaggtcataaagctagaaagcagcagagacaggatttgggccttaatcttctgaccgaaaatctcattctctttcaacacttctttctaatattgctgattgatctgtgcagtccagatgtcacagtgtaattagtttctaaaataaatctgttcttagattacttttgaatgacttctaagttattataaaaaagttctttgttgtaataaaggtattaactttccatgagtatattcttgacccacacccataagcatttttgctcatatttgtatccacaataaaatgaagttcatattttca

SEQ ID NO: 132177 - DNA, 1113 bp, Homo sapiens
acattaagccgtggtcgtgccactgcactccagcctaggtaacagagtgagacccggtcacactcaaaaaatacatcctagatattgaccacttcatcattcttacttagcaataatcgtttcctgtttcctcctgtcttactccattttcacactgctataaatttactacccgagactgggtaatttgtaaaggaaagaagtttaattgactcacagtattgcatagctggggaggcctcaggaaacttacaagcatggaaggcaaagaagcaagtacctgcttcacaaggtgccaggaaagagaaagtgagcagaaagagccccttataaactgtcagctttcgtgagaactcactcattatcacgagaagagcataggggaactgcccccatgatacggtcacctgggggtttacacgtggggattacaattcaagatgagatttggatagggacatacagccaaaccatatcacatcctgaccatgctttatgatatagctaagaaagtctacctgctcttttcccatgctaaactctgatgatctttcctgattcctcttgccagaagctaatccagtgtggacttgagcctgtagtcttagctacttgggaggcagaagtgggaggatcgtttgaggccaggaattagaatctgcactgagttatgatcttgcccctgcactccagcctggacaacacagcaaactctatctctgatgagaatgctgagaacacattctattctatactgaatttatgttcccaggcaaaagaataaaaaaaatacaattttaagaaaaaaaaagggaggcaggagatacagtgtctcacgcctataatcccagcactttgggaggtggaggcgggtggatcaccagagatcaggagtttgagaccagcctgtccaacatggtgaaaccccatgtctactaaaaatacaaaaaaaaaaaaattaggcatggtggtgtgtgcctgtaatcccagctagtcgggaggctgaggcaggagaatcacttgaacctgggaggcagaggttgcagtgagctgagattgcaccactgtagtctagccagggcaacagagcatgaccctatctcaaaaaaaaaa

SEQ ID NO: 132178 - DNA, 435 bp, Homo sapiens
ctagcctttggaagcttccaaactggtggtaaggagagtggggagaggtaaattcataaaatatgcataatctgtagtgggaacccaggtttttcaacttttgaagtttattttctcactcgaaaccttttatgtaaactcctttgaatacccacataaaggaaagaaagttggtgctgataaactagtgggcagcaggttcatggtggttcagggtcggtcagcaaaccagtgccaacactgaagatgatgccaaacaaaattgactgcaatctgttctagccaggatcatggtttagatattttctagccagaattaattaatttattatttttttctttttttgagacagagtctcgctctgttgccagctgagattgcaccactgtagtctagccagggcaacagagcatgaccctatctcaaaaaaaaaa

SEQ ID NO: 132179 - DNA, 699 bp, Homo sapiens
gaaaatattgttaattttctttaaaatactttgattattgtgttgtaattatatagaagtgtactgttcttaggagatgaatgtatttagagaaataatcacgacaaatattcatcaaaagtgtgtgtgtagaaagagagagagacaaagcagatgtgcaaaatgttaacaattcttgaatctaaatggagacttgtggtacacaggcttacagtagttcccatgattccgactcctggtgttcatactcttatgtgacacctctccctctcccttcttgtgagcaagaactgtgacttgcttctggacaataacatatggcaaaggtgacaggatatacatgattacctaagttctctctttttcctttattagctttgaggaagcaagtgaacatcttgggcaatcccaacaaggaagtaacatggcctctatggggtgagggtagcttccagctgacagccagcaagaaacagaagacctcaatcttatagatgcaaagacctgaattatgcctataatgtgagtgagcttagaagttattttttcccccagtcaagcatctgatgagaccacaaccctggctggcatcttgtacagtcttgtgaaaccttaagaacaggatccagctaaaccatagccagcatcttgagccacagaagttgtgagataataaatatatgttgttttaagctgcta

SEQ ID NO: 132180 - DNA, 731 bp, Homo sapiens
ccctaagccatttttgaagagaggacctgccctagctttatgacttaagaccatgactatgcatcttaagttgcccctctgactgggcagctttctcctgaacacagtgaggaatgctaagttacatggtccagtaactgagtggataccctgagcctctgcatcccactggctgctatgcagggataagtccatgcacctgtggatggcagtggttgagctggttctctataaaagtatccagtgcccagacctttgttcacacatgcatgtaaatttactgggaaaactctagagaccaatgttctttcttccacagaaatctggcctagcagtctattcttaaattgctctttgtgtgtaagacacatctgtttgataccccactctgccctgacttttaggcaaatccgttaggacagaaccactattttctttccttccctttgaatcatcttttaaagcagcagaggcaaatgttggcagaggtccacattggaaagctagtgcatcacgactggtgttggtaaatgaactagtgatgggattggggcagctgggctttgaagcgggtgctgtaagaggcactgctcctgtgcatggcagaggtttcagggaaaacggcagctctctgatgttttgcccatgctgtatgattttattcaatgcagttcttcttttatattgaagattcttgtttttatatctaggaatgtatcagcctttccagt

SEQ ID NO: 132181 - DNA, 107 bp, Homo sapiens
tccagggatgcaggcagggatggtgataactgggagctggccgtgggggcagcacagctgagagaggagggtgcagggacaggactgagggacacgatgaggtgggg

SEQ ID NO: 132182 - DNA, 261 bp, Homo sapiens
tctgtggtcaatactgtggactccaccttcatatcaagttcatccagctctataacatagaggtctatgaccctgggcaagttgcttaaccacttaaacttcagtttctttatccataaaataagaacaatagtagtagctacctcttagaattgctgtgaagtttaaacaagttaatatttctaatcctgcttagaactgtgtgtggcacatgtaaagtgcccaataaatcttaaatcattataccactaatccacacta

SEQ ID NO: 132183 - DNA, 314 bp, Homo sapiens
gaaccagtattagattaggagaccagttctcctgagtcctagtcctccaatacactgaattcacaggtttggctgccttaaagaggcaagggagaggagcctgtgtgttgaggattaaataaaaatagtggaagcagaaagcccaatgcccagaatacaagggtatgtaaaaaccaaagctactactgaggaactatcagtcaagagactaattctcattaagttgtcaatgactaataagggaactctctatccccatgctagaaataaaaagacagctcttaacaaaaatgaaaaataaataaataaataaa

SEQ ID NO: 132184 - DNA, 355 bp, Homo sapiens
ccagaaaatgtactacacaacctttaaggtcctgttgggaaagctgtgggattccacgagaggaggatctgccatcagaaggccctgctgcttgcatgcttcctacctgcgaactgcactgagagctgagatgagaacagaccatgcagctggcagctctagaggaatggctggtctgtctccccggccctttcctgactgacttgtcatctctcatgctctatagttcacttaggtgtattttgtgttcttttatttccccacactacccagaatataaaccccaaaagggcaaggattttttttttgagacggagtctcgctctgtcgcccaggctggagtgcagtggcgtga

SEQ ID NO: 132185 - DNA, 486 bp, Homo sapiens
cctccacccacactaatttatgcattctttaaagccaaaggaatcaaagtgaaatttcacacctagtctgtatcaagcatgtgctaggttaatttaaccttactgctctgtgaagtaagtaagcattgctggccattttattgttgagagaagtgtcattcagacaactaaggtgacttgtagatttcccagctagtgagtggcagagctgggttccaaaacctaaatattgcaaatgccttgccttgtggctcaaacgctatcagtcaataaatagttaaggaattgaaatatatgttcctagagggaaacagacttctagatttaaagttttacatttgctgcatttctgactgtacaagtctacaaaatgcatataaaagtatgctaatgaatgtccttttaaaaccactcattttctacgtaagcatacaaagtgtatacatatgcatattaatgaatgttttctgaaacttctcattgtct

SEQ ID NO: 132186 - DNA, 819 bp, Homo sapiens
ggtatacatgcgaaggatatatatttagttgttttttaggatggcatatgtgtcaatatagtacagttgacttacagtgttgtaccagtcttctgttttcttgttggtcctatctgttattgaaagagtggttttgaagtctcccgttattattgtttaattgtatagttctgtcttaaattttgcatttttaccttatttatttttgtactgtgttaagtgcatacgtgtttataattattatatttttctttgggcttctctaatttcttaacaatttcccctgttatatataatgatgtttttgttttagatgcctttttttgtcttatattagttatagccagttcatctttattgtggttgctatttgcatgatacatatttttttcattattttacttgaagtatatatgtttttgaatttaaattgtgtctcttctctcatgtcttttgttcttctatttttgctattttattttgtattgaaataatattttctaataaagaattttaattgtattatttttctttcctttttttgattgctttgaaaggcagcatttatttatgtggctatgttctgagaactatgaaacaaataatttcattatattgtatcacaattcataccatttttcctgtatttatgataggaaaatatgacatgaagcatggtgtatacttaatgtctcatttgttttacaaactaagaagtgacaaaggaaattaacccccaaaattacagacattagaggtctactctgctgcttattgtcacatggtaactacttgtgtagaatcatatggagttttaaa

SEQ ID NO: 132187 - DNA, 685 bp, Homo sapiens
tgagctcggtacccgtccaaacagtgccctatagcacacgctgtgcttccacacaccagagcagagtgtaattgattatgtcactgtcatgaccagttatcaccattgattacagtttgattggctctctctgtttcctgtaactgatttgattagggccttgtttgctcatctttctgatataaaggcacaattgtgtcctgagagtaagccctggtcatcttcctccaggaggatgttttcctctctctttatccacttcatgagtcttcctttgggtatatcatttttgcaaagagctgatgccatccactgtgaattttactagtttaattttcagaagttaacctgatttccaagtttagggaggagcacctcattgttcttttgtgctgaaaaacagagagcagcaggttagttcatattaggacatgttccatagagtcagcagtgaaaagggtcctgaaaaagaggtaggatttaaagcagtgacactggggacaggaagaggctttccaagagtggggaacagcatgtcaaaaggcagggaggcctctgaacagtaagtagttcagtttgactggagtatggattatatttagaaaagtatctaaaatcaagatcaaaaaggaaagttgacagcagagaatgaagggcctagaatatcaggcagagaaatttggaa

SEQ ID NO: 132188 - DNA, 514 bp, Homo sapiens
tctggaaccaaacagtcaagttactgaaggaaatcaaaagtgccactccgatgaacacacaaaaaagaaatcaaccttattgctgatatggaaaaagtttgctggtttggatacaggatcaaaccagccacagcatgcctcaagccaaagcctaatccagaacaaggccctaactctcttcatttcaatgaagattgagagaggtgaagaagctaaaggagaaaagtttcaagctagcagaggttggtcatgaggtttaaggaaagaagccgtctccataatataaaagtgtaaagtaaagcagcaagtgctgacggagaagctgcagcatgttatccaggtctagctaagacaatcaatgaagatggctacaacaaacaatgaattttcaatgtatttggttggtgcaaaagtaatggcagttttgccattgaagttacttctacaccaacctaatagatgaaacagccttttattggcaaaagatgccatctagtactttcatagctagaga

SEQ ID NO: 132189 - DNA, 329 bp, Homo sapiens
acgggaaagctctgggttgaagaactggcaacaaactaatcaggaatattggacccccaaaagagagagctgaaaaaaataaaattcacttccccagagaaaaaccagagaactgtctcatatggatcggtccactgagatgccataaaagagaaaggcccatccactaattgccaggaaagtcttccagtacaggaagcggagagaaataaagtgattacaggttttatctggtatgtagtaaagttaccttgagcccaagatcgggcaaggtcatagcatagacttgtgaaggaacaaaagcctctgaggtcagtccttaggaccac

SEQ ID NO: 132190 - DNA, 457 bp, Homo sapiens
ccagatggggaggggctgggagagactgacattctgttcagattccaggctgtggagctgggccctggagcagccacacttggcggctgtgagttggcctcagggtcctgctgagtgccaggtccctgcacaccctcacagtccctgggggctggcggtggcattggcattgctgagggtcttggccaatctgttagggaagtggggtctccggggccgagctctgctctggggtgtggatagcacagcgtctgccgggtgctgcgggagccttttctgtggggatgtgggtcctgcaaatgtgagcaccagctgtgattaaatcaaggacagtgaacagcagcgccgtcatcttcatgagttcacaaaaacctattgctttatgtcttattaggtgaatttagaatgtatacagggtaggaaaagcagcagaaaatagcaggtgtgtttgggaaga

SEQ ID NO: 132191 - DNA, 161 bp, Homo sapiens
gcctaaaattctacattccgtaagtctagcaatttgaactgagtcatagtccataaaggactacagagtgtcaggaagttttattagtggtggagtggctgagctgtcatttcaacctgctcaccatctggaggaaaaaggggcaatacctctcatccaca

SEQ ID NO: 132192 - DNA, 909 bp, Homo sapiens
gaggctttgcggtggctgcttggcttggcggtggtcgcttggcttggcgtggcagtgatcgcttggcttggcatttctggcttggcggtcctcctttcgcagattggaaaccgcgggctatcctgctgggaggttgtggccgaggcagtagctcgctactgatggcctcctggggtggagaaaagcggggaggggctgaggggtctccgaagctggcagtctacgccacgaggaagacccgtagcgtcaggagccaggaggaccagtggtacttgggctacccgggggaccagtggtcttcgggcttctcctacagctggtggaaaaatagcgtcggcagcgagagcaagcacggtgagggcgccttagaccagccccagcacgacgtccgcctggaagatcttggcgagctccacagagctgcccggtcgggcgacgtccctggggtggagcacgtcttggctcctggagacactggcgtggacaagagggataggaagaagagcattcagcaactagttcctgaatataaggaaaaacagacacctgaaagtcttcctcaaaataacaatccagatgggcatccttactaatttgacccttagtggatgagacctgtccagagatccaaggaatctgaaagtggtggataaacaggccatctgtatcacccattcaatggctgaaaatcagtcaggcaacccagagaacgggacaggttgacttgacaggaccgggacaaaatgggcccgggggtggcctccctcggggaggaacctccggaacgggcacccagccgaaaaagaggcaggcgaaagagtgggcgcccagaggacacaaataggggaaaaagccgcgagaattaggcccagaaggaaaaaaaaaggggccggaaaaacgggcggaaaa

SEQ ID NO: 132193 - DNA, 188 bp, Homo sapiens
cctgctccctcgttttcctggaagaaatgcctacctaagacacagacacctgcatcccacgctttgtcacccaatgcctgtttccttaaggagaaaaaatgggcgccagaaaacttctaggtctagatcctggctctgttgctcgctagttgtggaacttgggacaggcgacctcacccttctgattt

SEQ ID NO: 132194 - DNA, 618 bp, Homo sapiens
attttacattagcaaaaaaatgaggaacaacctaaatgtccatcagtcagggatttataagtaatagtacatctagccgggcgcagtggctcacgcctgtaaccagcactttgggaggccaaggagggcggattacctgaggtctggagttcgagaccagcctggccaacatggtgaaaccccatctctactaaaaatacaaaaattagctcggtgtggtagcgcgggtctgtagtcccagctacttgtaaggctgaggcaggagaatcacttgaacccgagagacggaggttgcagtgagctgagatggcaccacggcactccagcctgcgacagtgagactctgtctcaaaaataaataaagaaataaagaaataataaataaataaataaaaaatagtacatctacatgatgaaattcaatatcggtatttaaaggaataaggttgaactatcatactttatcaattctgaaataccactaaatctaagataagccatctatttagtagcaattttttagcaggaagaaagtaaacataaagcttttattaataatagcatacatttattcattcaattgtataccattttcgtctgtcacaataaagtttgagt

SEQ ID NO: 132195 - DNA, 672 bp, Homo sapiens
aaaacttctatgttcaataatgcacataataaacttgtaactgcaattcaaaatattaataataccatcactattcagaagcaaacaaaatagcaacaagtttcctaaaagaacaatgtctaacgcctccccgcaaattccaaaattgaatcactgaccagtttataattcaagtaaggatatgaaaatacaagagtcctgatttcatcaacatctaggactccccataacatgttagtttcaaacagcctttttctctcagcaagagtgctttcttgcctcttatctgtagccacttctcaaaatgagaacatgacattactatagccaaaagtcaatctccttgtctcatggtcacaagctaggtccccagccaacactgctctctcaaaaatggaagacaacaaaacagggccaggcacggtggctcacacctgtaatcccagcactttcggaggcagaggtgagtggatcatgaggtcaggagatcgagaccatcctggctaacacagcgaaaccccgtctctactaaaaataaaaaaaaattagccaggcgtggtggtgggcacctgtagtccccgctactcggtaggctgaggcaggagaatggcgtgaaccctgtagttttaggacagcaatgagctatgactgccaactgacttcagcctggat

SEQ ID NO: 132196 - DNA, 179 bp, Homo sapiens
gacaggcaccatgctaagcacttaagcactttacacgcattatctcagataagtcacctaacagctctctgagttgctgtagtaggcacaagcaggacatctagcagatgcaggacatctaagtcagatactttccactttccacagtgtgactttatcagggacatcatagctgttct

SEQ ID NO: 132197 - DNA, 252 bp, Homo sapiens
aggcaaattctattttgcatacatacaaaaggagataagtagttgaattttgaatattttaaaagagcatcactggaaaaaaatctttctttaaagtcatggattcagattaaagatgtatatcacaaaaatctttttaaaacttaaatatctgtgtaaattgtttaatactactttcttcatattttcccaattagcttgactaatattccagtactatttttttttcttcagagaaaatgactacaagaa

SEQ ID NO: 132198 - DNA, 326 bp, Homo sapiens
tcctcctctcacctgaagatggagcactgagccagatgacttttcattgtctcttgttataattttccacatgtggttttgaactgggagtagccattaggtgacgaattctgaaaatgggctaaatgacatgccaaaaactgaaaaatggggtgtgaagaatgtgcttcttgctttctaaagcataaccataggaatgcagggcttctgaatgtcttctttttcttaacatgacaataagaaacaaacaatctttttcttcatctgtctatttttctggcttccattttttaaaaaaatcgtgaaaaactatctttctctatagg

SEQ ID NO: 132199 - DNA, 492 bp, Homo sapiens
tgcttacacctgtgagcgctgatgggtacggctgggtgcttacacctgtgagcgctgatgggtacggccgggtgcttacacctgtgagtgccgatgagtacggccgggtgcttacacctgtgagcaccaacaggtatggctgggtacttacacctgtgaatcttgcggtcctgggcagcatacgatctcaagaggacagagaggctgggtgctgtggctcatgcccttaatcctagcactgtgggaggctgaggtgagaggattgcttgaggccaggggttcaagaccagcttaggcaacatggcaaaaccctgtctctataaaataaaaaataaaaaatttagccaagtgtggtggcacgtgcctgtggtcccagttacttgggaggctgaggtgggaggatcacttgagcccagcaggtcgaggctgtcgtgagctataattgtgccactgcaactccagcctggacaacagagtgagatcctgtctcac

SEQ ID NO: 132200 - DNA, 640 bp, Homo sapiens
ttttttttttggtattgctaaaacaagcatacattactttcagagtaattaaaagtgacaattttattttatatatatttttaatttttattttattttgagttagagtcttgctctgttgcccaggctggagtattgtatttgcatgagaggagagcaagagatataaaatatttaactggtattcaaaagccaattttaaacaattcaagtaaattctaacaataatgtaatgacttctttcacaaaagaccaaatactcggcaactcttttgccccagggtctctagttagttagccgataataagtcctacattattctgctataactttgacttctcctagtcttttcttttctaaaaatggcctcaaaaaacaagtccatgattaatttactcttcctataagtatcttaaaaaaaaaaggtctctttatttaacacttccaccttccagtccaaaaatgttaaatgaaggcattaattcagaataatcttacaatgaacaggtctgagggctatattcaacctcactggttaaaaaaaaataaaaatatgaaatacctttttctacttatcaaataactacaacttttacatgatctcagcattggagaggtatgatggacaggcatctcaca

SEQ ID NO: 132201 - DNA, 675 bp, Homo sapiens
gcgcacctgtggtcccagctacttggaaggctgagctgggaggactgcttgagcctgggaggtccaggctgcagtgagctgacattgtgccactgcactccagcctgggtgacagagcgaaaccgtgtctcaaaaaagaaaataaactgctttgaatgagggtgaaggtattgtatttgcatgagaggagagcaagagatataaaatatttaactggtattcaaaagccaattttaaacaattcaagtaaattctaacaataatgtaatgacttctttcacaaaagaccaaatactcggcaactcttttgccccagggtctctagttagttagccgataataagtcctacattattctgctataactttgacttctcctagtcttttcttttctaaaaatggcctcaaaaaacaagtccatgattaatttactcttcctataagtatcttaaaaaaaaaaggtctctttatttaacacttccaccttccagtccaaaaatgttaaatgaaggcattaattcagaataatcttacaatgaacaggtctgagggctatattcaacctcactggttaaaaaaaaataaaaatatgaaatacctttttctacttatcaaataactacaacttttacatgatctcagcattggagaggtatgatggacaggcatctcaca

SEQ ID NO: 132202 - DNA, 408 bp, Homo sapiens
tttttctaatttatcactttgaaaattttgtagcagttctaacacagagacactttccaaagccttaggactgatacaaaatccagtggagacacagaaattaataatacaatcagaacagtcaagaaaaaaagagacaggagaggaaggtaagcaaaaagcaacataatcaatggcaattataacttgctgtggcagagcaaaaggagaaagctgtgtgttacataaaaagtcaaagataataaagcagaaaatattaacagacaatttcagcaaaaacataatgaatttgatgccatctcccctcgacagtcaaaaacagatcaatgaaattagtcactcaaaataagaatggccaaaaaaattgttttaatgattttttacatctcagctcataactctggccag

SEQ ID NO: 132203 - DNA, 856 bp, Homo sapiens
ctcaaactcctggtctcaagcaattctcctgcctcagcctcctgggtagctgggactataggcattcaccaccatgcccagctaatttttaatttaatttttttttttgagacagatctcactttgtcacccaggctggagtacagtggcgtgatctcagctcactgcaacctctgcctcccgggttcaagcaatttttgtgcttcagcctcaaatttttaatgtttttggtagagatgggatcttgttactttgcccaggctggtctcccattcccagactcaatcaatcctcctaccttggcttcccaaagcactgggattacaggtgtgagccaccatgcccagcctccaactttattcttttgcatgtggatatcaagtttcccctataccatttgttgaaaagactgcccttttcccaatttgtagccttgatacccttgtcaaaaatcatctgaccatatacttgagagtttctttctgggctctggattatattctgtctctgtctttatgccaggaccacactgtaatatgttttattttgtaaatcaggaagtgtgagtcctcgaactttgttctcctttttcagaattgttttggttatttggagccccttgagattctatctgaatttaggatgaatcattctattttgagtcaatttttgataaacaatatttttctaggaacatgcttttttttttttttttttagacagaatctagctctgtcgcccgggctggagtgcagtggcatgatcttggctcactgcaacctttgcctcctgggttcaagcaatcctcctgcctcagcctctcgagtagctgggattacaggtgcccgctaccacg

SEQ ID NO: 132204 - DNA, 201 bp, Homo sapiens
ttcatcgagccggtcccaagttatagaaaaaaaaagatttgaaatttgaatacatgttccacatacaaatacaggcctataatcatcattgtgcataacatacataccctgcttcctgtcttgagccaagcactatcaaatttgggatcagacattccatctcactttacttatacttagtgaaccatttgccagagtctc

SEQ ID NO: 132205 - DNA, 1721 bp, Homo sapiens
tgagcagcctcctcctcctcttcatggcttaaagaatttccctcctggattttagcactgattccctttctgtgctttccactttccaagtgagtcctcttcaagactttatatctttatgaagctttgttattgaccttcactaagtctcttttttattttctcttctctttctgtaggaagccctccctctaaatgattagatcagccactgactcacaggctacgggacatggcaaactcatgcaaggcttacggcgtttcaccagttgctgccataacagcaggtccttttcctgccccttttcttttctcacacacttggcttcagaaccaccatctatggacatgagtatatcacagaaccagagtcctgctaagaagggaattttttttaataactcatggttgcaggtactattctccagcttgattttggacttgaatcagaccctcccacctactctgatccctacacctccctgttcctgagcctgtagttctttctgaattcccaggttccctcatcctgaccattggtatctgtcgttttccacatagtgtctagttcctcctatgctggagaatctttcatccctaatataacatatttaaaattaggatctaactttagaggtaatttcatttagtcctctcatttcaaaaaactgagatccaacaaaacgcagttaatgagagagccagggctcaaacccccactgcctgattctaggttttggcacattccattatacgaggctgttttgtggttcatcttctccatctgagcacgcagtgaagggccacgtctgatagacacttgggcatcatgaaggttagtgagtcagcctgaaggacacttcactaacacttactgttagcaagggcatgtctagttcatagcttttcttatccaccattgttcttcattctgaaaagaaagcttagttgtctaattggtaatttctggaagaaataagaaagagtacccgtgtaaatataaataaataaattctttttatcacccaaaacttaaatcatccccaagtatttcagaaagtttaatataatggatagaacataaattacttttatgacttccaggatattactgaaaatctatttatgttattttggctttacattttattgatttttaaaattttaattgtcctcattttatcagtaaaatacataaaatgaatctaagctcatacataagttaagtttccaggaatagagggcagtaaatgagtagtaattgttttttctggttttatttgttggattttttttaagtcaaaagctatacctcaaatgcagtacttcaattatcttacaccttgtacctcatgaaggaaatagagtgattggaattttataggaccctcaaatctaatatttttattacagtctcagcaatatggatttagtcaaaagagatggaggaagttatgtaatttcttgtgcatgccctccctcatctttagggctttagaaagtttgtattattttcctattatggagacataatgtgtgtgttctttcagtgtctgtattttcctttttaggaaaatttcaaatgcaatattaagagatcataaggcatttaggcattatgagacgttttaaaattacatctgacaaaatgtgcgcacagcagaacaagttcatatttttcattttgtttttcataaaccaaaaaaagctgacaattcact

SEQ ID NO: 132206 - DNA, 566 bp, Homo sapiens
cagctagaaagaaatagttggggggagagagagacagaaagagaccctgcgtcctccgcccttcctccctcctccttcctcctctgcccgcttcgggatgcagggataactgtgctaggtgcctgcctgtggcccccagtcccttttcctgtccccatccctttgtctttgggttcctaaaggatggcacagagcctccaggagcggagtggggcggtgtaggcagaggacacagctcctagcagcaagtggaagcaggaaacggttctgtttccaggagctttcctcatgtggcccgggagatgagggggtaggggaccaggggactggccacggaggagcttccctcttgctctaccctcataggggctgggaagtgggccgtgccgtgggagcaccaattacctgttgtcagcacgcagtgggacccctgcttgacccctggcttctgccacccaagccggagtgtcctgcttcctgccattctgaaccccaaacatctccctgaggtcctgtctcctccttgcccccttgccctggcctgggctttgtcattgcaggcctgg

SEQ ID NO: 132207 - DNA, 205 bp, Homo sapiens
gctctacccatagggagaatactggtatcaggccagctgtctagactccggccactccgaagcttctagctcagcccaaactgctcccgtgagcccctgctggctcagcatctgcccaaagatgtgtgttgggcatgtcaaactcaatgcaccccaactcagtgcctattacccccttttccaaaacctgtgccagcagccatct

SEQ ID NO: 132208 - DNA, 527 bp, Homo sapiens
aacattccacagggtaagcatcagcttctttcgtacatcatcagagatagaccacagctttgtaaccaagaggaacctaaggtgtctgtggtcagaagcagctcagaggccaatatatatgttaataaaattgttttgttaataatatggggcaaatcaagtttccagaaactcttgagtttctgaaggtagaaatgaaaggctgcactttggtgacctgaggaggaaaatgtgtagaatgcggcaagttggaaaaaaacagattgatggggctagtgatcaaaaaaacagacaagcacctgaacatgatacagtgtctgctactgaggacacagtagagccctcgaggggttcttgtgaggacaagagaggctcatgttggaggtagatacgagtctgtagtgttgcagacagttagctaaggagaaagttgagagaccagttcattcccacacggagaaaaggggtcccattcaataagattttctgtgtctcactccacagaatttctctctcttttaaaagat

SEQ ID NO: 132209 - DNA, 472 bp, Homo sapiens
aatgctcaccactatgacctgccagtttttgtacttttggcacagacggggtttcaccatgtttgcggggctggtctcaactcctgacctcaagtgatctgcctccttggcctcccacagtgctggggattatagatataagccaccgtgcccggcccattcctgtctttttaatttaatctgctcgtccctgacatcgaaaatttttcttgcttaacagcttccacttatttctcggaatagacctttttctgcaggaagggtgtagttgattcaaccctcacccactcatgccaaccgtagtgagtgctgtgactgcagctgcactgtttatcctgttttctgcaggtaatttttccagtgtaccattccaacctgcaaaacctcacatttaaatgcaaatttcttggtaagctgtgaaatgttggctgtggctaatatgagaaacaagctattatagacaagatgaatc

SEQ ID NO: 132210 - DNA, 155 bp, Homo sapiens
ataaaaggcactatactaggcacatggcacgcaagctttgtctttaaaataatatgattatacatattacaattaaaaatcaaaagacaaaagtatgtagagaggtaactagaagctctttgttacaaaaagctttctatttatagaaagctatg

SEQ ID NO: 132211 - DNA, 366 bp, Homo sapiens
ctccctagcttctggttcactttttcttttctgcctcgatttagctgtctctaagctaccttgatttagttgtcactccaccctcaatgattggctaacaggtgtcaggacatgtctggttttaaggggtaccctcttttgagggatgcccaaacaaacgggcctggaagagaggttctggcactctgaggacacttccctagattctcacacttaaattgctgtccgagtcagacaggaatcacgttccaatctgcatggccagtgagggaaaaacagcgaagccgtcaaaagcacatgtgcctctccctctcttcccactgcgcttcccgctatgagttccgggatgggaaacccagttcagtg

SEQ ID NO: 132212 - DNA, 708 bp, Homo sapiens
gtcgcccatgctagagtgcagtggcacgatctcggctcactgtagcctttgcctcctgggttcaaacaattcttgtgcctcagcctcccaagtcgctgggattacgggcgtgtgctaccatgccctgctaatttttgtatttttagtagaggcagggtttcgccatgttggccatctggtcttgaactcctggcctcaaattatttgcccacctcagcttcccaaagtggtcagattactggcgtgagccactgtggctggccagtaattttgtttttaattgaactttgaaaacgcagttctatcattggtgttctatttctagccgactcagactttcacctggcaagttggtctctgtatttgatttgtaactccttatttaaagcaatttatgaggatgcataaaactacaaaatgcctcagataaaagtaaggagaaagaagaaacaaaaacaaaagataaagataaagtcaagtcaggatgtaggccaaaaaggtttattataattttcttcctacaggcagagcacagatttgactctgagctttctaggaaccagcaggagagaaaaacttggtagtttatttttttacagtgtccttaagatacaaaataactagatagttcagaaagataactaaccacttggcactatcaggctagagcagaagtgtccaatattttgacttccctgggccacattg

SEQ ID NO: 132213 - DNA, 580 bp, Homo sapiens
tacttcacctttcttcagaggggaaacccaagaaaggtggagtctggatccttgattgttaaggtctctcactctgcttaacacacctttcattgtgtgggattaattagcaggtaattcaacttgagggtttaggtttggtatgctacaaatgtcacaatgttagggtagttcataaactgttagcaactagctgtgtacttttagtgttttacaatagtatgtctattgtttgtatgtgagagattcagagagagagagagaaaatgagtcttgtttggcaaatttacactataacatatattcatcatctttaacctagagataatctggtattatgtgtattaatgatggtaatgttctaagacataaagcgtcatcactgtaggcttctttgggcaatcattcgtttattgggacctttactaattgctgagatttgtgtgaataaactgtcaaaagacttcagaagcaaattatcttaaaatgttttgcaaagtttgaaaacagtggcagtgtgatctccagataaagctaagttcattgttaacctctttctggaacatcttggtgacatata

SEQ ID NO: 132214 - DNA, 461 bp, Homo sapiens
tctagtggcccaaataagcatgcaatgaaactagcttatgcaaaatagcaataataataacaatctgttcatattgaaaactttggaaattttgcattgaaggagaatataggacatgtcggtgtaacccagtacaggattccctctacaaccatcttcatgcatgttttgcaggcaaatgggaaatgaagaaaggtcaaaagaaggaagggagggagggagtaaagggaagaaaaagaaaagagatgaacggcgacaagcgggcagggggaaagagcgggactatgtagtgtagtgtttcgacgtccagcagtaagcattagccttgagggctcgtggtttaggagtgaaagtttgggccatcacagcagggagagaatcctaacaggttgacgtgctgcctgagggcacagggggtgagatttgggtagagaacaaaagaatgaacatagctgaagtca

SEQ ID NO: 132215 - DNA, 316 bp, Homo sapiens
attgaggatttttacctctctattaataagagagagtgggctctagtgtttttttggggggtggtgcgtgtgtatgtgtatagttctttgtcaggttttagtattagggtaatacttgcctcataaaagatgtgtcccctccttttattcatcctctttgttttggaagagtttgtaaataagttagtattaatttttttgttgtttgttaaaattcaccagtgaagccatctaggcctgagtttttcttttgggtaggtttttttttggttttggttttttggtttttttttttttttttagtaattcagtctct

SEQ ID NO: 132216 - DNA, 719 bp, Homo sapiens
ggagtcagacactcacaggtcatgtccacagaatgttaaatgtgatgccctatcagggacccctctaggtatggatgcatttccccaaattctgacctcaggaccaagtataccatttaaatagattcagaaaaagtatttgacataacttaccattcttttatgataataactctcagtatattcagtgtagaacaaatgtacctcaacccaatacagaccatgcatgacaaatgcacaggtaacatcatactaaacaaaaacaagtaaggctttttctctaagagctataacaagacagggaaggccactttcatcacttttgttcgacatagtactggatgtccaaatctgagcctttagagaacaaaaaaaaaaaaaaaaaaaaaaaaaaaatttggggggcggcacttgagcgcccttgaaaaaaaggttctttttagaacccattctccgtttgggcaggcggggccccatattggttgtaagcagaaccggggctcacgacgaggtgtccccagagggaaaatccgcggcgccaacgacaaggaggcgctgggggatttctccaccccaagtaaaaaaagcgccgcggggggaaacacgacatgttttcgtgaaacaacttccccaggaaggagttcggaaggtcacaaggacggtgtacattaacaccggaggggtcccaaggggacgactcccattatcaaatttagccc

SEQ ID NO: 132217 - DNA, 185 bp, Homo sapiens
tcaggagtttggggccgtagtgagctgtgattgcgccactgcacttcagcctgagtgacagcaagaccctatctcaaaaaaagaaaaagtctcacccgttgtctctgtgtccttttagcagaagaaaaaaccaactgtcttctgtgaggaatacagggtcatcctcaggctagtctggaagagag

SEQ ID NO: 132218 - DNA, 331 bp, Homo sapiens
ctaccctggctgagggtgggtcggcctctcccagtccactgactcaaatggtaatctcctttggcagtaccctcacagtcacaccaggaacaatactttgcatccttcaatccaatcaagttggcactcagtgttaaccaccacagggaggaagggattttcctgagcacttgctgtgtgcggccgaccctttatgtgatctcccttcatcctcagaacacctctgtgagaggggattatcagccccctcatgtggatgagccagctgaggctgagagtggttagggaactgttttgggcagttctgtgtgaccacaaagcatagcaatgg

SEQ ID NO: 132219 - DNA, 184 bp, Homo sapiens
ccatattgctataaattcatgtcatttgtctcacttctcccattcaatggtacattctctaaagtgattggttaatgctatggtttgaatatggtttgtccccaccaaaactcatattgaggcttcatccctaatgtggcagtgttgggaagtggtgcctgtaagtagtcattgggtcattaag

SEQ ID NO: 132220 - DNA, 406 bp, Homo sapiens
ctggcttcctccttgactctattcaaactttttgccaggctcaccaatggtctttccattcagcaaacagttcccaaacacctgctgtctgcccagcactgtcctgatgctcgagtaccctatgtcttcttcctctccttccggagttctttctgtcctcctcgggggtggtgcgtgttctccttccttgtcatttccacagtcctcctgggcctgccttcctgcttgttgtattaggaaagctcccagtagggctctgctttcagatccttaacctcattcatctcccacagattcctaggatccccactcgtaagtatagacctgagccagtcttccatgctcaggacccacctgttcctgcagccctcatggctcttgataatctagccatcacctcttgtgc

SEQ ID NO: 132221 - DNA, 439 bp, Homo sapiens
ggaagttcattgtggaattagtttttctcatgagatttaatgttttaatgtttttcattttacatgaagaaggggacaataagcaaacgtattgcctctggaccagtatcaaatgcatttggaatttaccctgtgttatgaagaaaatattgtcagtctatcaaaagcatcagatagagttggtgatgacttccttctcaaacccttcattgccctctaggtttttcttccatttcacttggtgtttctaatttttctgtgctcagtcctcctaattattgttcatcagtgaatgttagaacatccaaggactcatcttccatgtcttcttttctttgcctacagtatctttctagcagatgttatcaagttcatatatcttctccacgctgattgcttccatatttacattcctgaccctgaccttgtccctaaattt

SEQ ID NO: 132222 - DNA, 352 bp, Homo sapiens
gttacaattattttattacctaacatactagatgaggacaaaagttctttaccccactttcccacttttataagtgagaaagagatatcaaagactcatctgaggctccagggactagatctgttacctaaacatcagcgtatgagcacaggaggaacaggagtggaaagtaaaggatgaaaaggtaactgcaatcatcagagtgcatgtcccattcatttcagatctccttgttgtctaggcttccttatgtccaatttaggttccttctaagaggtggcacaggacaaagccacaaccatcgactgggagaaagaaccaaaaggagccacctagtggccaagcaagcttt

SEQ ID NO: 132223 - DNA, 633 bp, Homo sapiens
gtcagacatagaacgccacccactccttccaaactacatacgaccaacaacctctgggcactcttccgagcttcttgttcatgctttatcgccaaggcctagaaaagtgaatgcaaacagttaagaaccggccctacattcttgctgtctctgcctccgagactcaggagccacttttcaagagccgagacaactcgttagagaggagccgtggcctgctctggccgaaaaccccttcctattaacagactgcaactagcccggaacgactttcaatttgcagagtccaaccatattccacaagacaatctaccacctcaaggttcacgcgtggattctacaccttaaatccttggatactgtctttgatttggagatgagcaaagaaaggaaacaagacaagagaaagtgacaaaatgcttaccaacccagaacaaagagtacctaggaggggcaaaatgtacaaaggaaagatgggactaaggaacagagaagtgatatgcagatgagaagagaatatggtttgtgttctagctactgttgcatttgtcttatgaatattaggaatgtatatgattaacgtgagttggttctattgcttaaatatagaaataagaatgaaaggtgattttt

SEQ ID NO: 132224 - DNA, 375 bp, Homo sapiens
gaccaatgctctgagctcacatgcctcccccagctctggttagcaggtcgctccaccttgcatggcctcggcctcggcctctgctctggagtcatgcatcctttaggagtagggaggttgctagcacaggattgtccatgcccaaggagggttggtgccaccactgagcccagcttgaagccaggctacctgaagagcaggtgaagtttgcggagggatgcccagcagcctggttgaatagctgagtagcaacacagggaccaacctctgctgcccagttagctactcttcccccagccaccaccacctgctaactgctctttgagcaacgagctctgtcttaggctgtctgcttgtgggtgggagcagggtaag

SEQ ID NO: 132225 - DNA, 774 bp, Homo sapiens
tgtcctcctgcccccctccattactgggggcatggaggggaggtgaccaagagggacatctaagcagctgctctgaagaggaggcccctggcaccacagaagcacaggatggcatttgacctggcctgggagtgttggcgtcagttttccagacagaggagacggcacatgggctctgaggagaaggagggcttgcctggttgaaccaagggtgacccagtagcggggctgagctgggggtgccagggggagagggctgggtgaggctgggcctctgaggtgctacatcccaaggaggccatgggaggctttaattcggggtgagggggtggccggtgggttgagtgccctttccatgttcctgaacgccctggtgttgccaggtccttactgggctgaggcctggctacaaggcaactcagatggcaccagttcagggtgggcattcccatctgggactccaggcagggtcttccctgcggtttctccctggcagcccctgtgggagacagtttcttccaccagcctggctccctgggccacctgcacagaggtccctgctggcaccctggccagtccagtgccaggccgtcctcccgccaccccgcttcccagatctctgggagctcctagaaagtgctgccaccatctgaaccacatggggctctgagcaggcttgaggcttgttcgggtgtagttgtgtgtgcctgtaattccagctacttgggaggctgaggcaggagaatcgcttgagcccaggaggcggaggttgca

SEQ ID NO: 132226 - DNA, 347 bp, Homo sapiens
ccactgcacccggccccctgtgttcttgtatcccatctcacaaaatccccgtgtcctaagacccactttacagatgaggagaactgaggcctggtaaaggggtgtgactcgtccaaggccccacaccactcagtggcagagatcgggttcgttccaaggcgtggtgttgtgccacagcagcgtgtggggttgcttatggtggcaggagggacactcggggggccttactggaagggcgaggcccagtggactcggggaagcaatgccgaatctcagcagccattagtggtggcttctgtactgcctgggcatgagggcatggacccagcgtgggccttggggtaacc

SEQ ID NO: 132227 - DNA, 580 bp, Homo sapiens
agaagaaattctggagaagataagagagttgcaagtgcctgtttgaatcatcagcagaagagaggcatgaaatctgcaaggaaggatgagtccttccaggaagagagtgcagggggaagagaaagagaagcggggctgagccccaaggagggccagaagagcaaagaagggagagagggtcagtaggaaagatcaagacgttgtcggagcagtggcaggaataccgagagagtctggtctcctagctgccacaggagaggtggctttagcacagggtctgctggcggccgcctcttggacattgctgctttctcagtgatctccctgaagcctcgttgcctgtggactctccaagtctgtagagtgattaactatttgaggtagattctattttcatagtcattacacagagaatactaaagctgaggcagttttggtgacttacaggacatcacgttccagcttaaacccacatagcaccctctccagagctctcccccagtctgttagatgcatctgactttctaaggtgctcctggattggagggtccagctggctacatgtggtcaagacatacca

SEQ ID NO: 132228 - DNA, 146 bp, Homo sapiens
ctctagaggactccccgcacccaggcgcacttctgggggaaagatgttgaactcagagtggtccttgttagtctgtgttggaacattctagtagccagtggacagctgggaggagaggccaggagctcgagaagtcaccagggctg

SEQ ID NO: 132229 - DNA, 439 bp, Homo sapiens
ccctgttccctacccaactgcgtgccaaagccctagcctctgaatttccggggaggctgacttgagtaataaaactttagtctcccatttagccggttctgtgcgtattaaactctttctctattgcagttcccctgtcttgacaaactggctttatctaggcagtgggcaagatgaacccactgggcagttacagtaccaaaaaatatagtcttctcccagccaagattctgtgtctgctgacgaattactcaaactgttcctgacgatatagttcacctgttccttcccttcttccctcacacacctaggtctttttcctgtccttccctatcctcaagaagcctgaattcatgttcccaatttgctgggattacaggtgtgagccactgcacccgcgaaggcagtcttttttaatgagtttgtgttggtttttatc

SEQ ID NO: 132230 - DNA, 364 bp, Homo sapiens
ccctgcagtatgccctttatagaggctgtggactctaaattcaaaatgtgtggccaggcacagtggctcacacctgtaatcccaacactttgggaagccaaggcaggtggatcacttaaggccaggagttcaagaccagcctggccaacatggtgaaaccccgtctctactaaaaaaaaaaatacaaaaaaaaaaaattagctgggcatggtggtatgcgcctgtagtcccagttacttgggaggctgagggagaagaattgcctgaacctggcaggcagaggttgcaatgagccaagattgcaccactgcactccagcctgggtggcagagcgagactccatctaaaaaaaaaaaaaaaaaaa

SEQ ID NO: 132231 - DNA, 409 bp, Homo sapiens
gtctggctacaaacagtgtcacgtcacaaagcaacatgtgttccaagtattcacacattcaaattttcagaaggtgtaaaaagagttcagagatttatcagagattagaaatgtttgagctttaattttcaggtttttggtgaaattttagcctcataaaggtgtaaatttttatggtaagccttatgtagtgagcagagcctggtatgtgtctagcgagttattggcattatttagtaaagggaaactaggcattgcatgtatttggcctgatctctaattctgtcagcctgcttactagaaaccaaataactgagtgctgttgaataccagtcatcaagaaaaccactgcagtgatgatggccaccgtttgttgtcttcttaccatgtattagacactgttttcagg

SEQ ID NO: 132232 - DNA, 277 bp, Homo sapiens
aagcggaggagggggccagcctcatcccactgccagctggcccacagttcctcaaacacagtgagtgaggatggacctcaggctgtctcttcgggtcaccgctgtgaaaacaaggcaggtacagcaccagggcagacacttgcccccaggggtggctcccccagatcccaggcctctaggccccacatcaacactgcactgcacgttgaggacaaggccatctcggactgcagaccctcacgaccttcccacactttgtcctcacttgcaacagagg

SEQ ID NO: 132233 - DNA, 342 bp, Homo sapiens
catctgcctcccgggttcaagcgattctcctgcttcagcctcccgagtagctgggattacaagtgcccgccaccatgcccggctaatttttctatttttagtagagactgggttttgccatgttggtcaggctggtctccaactcctgatctcaggtgaccaccggcctgggcctcccaaagtgctggggattacaggtgtgagccaccgtgcccagcccctggggtcccttttgtaagggcactgatccccttcatgaggttccaccctcatgatcacaccaccttctaaagaccccacctcctagcaccatcactttgcggcacagaaatttaggggaaa

SEQ ID NO: 132234 - DNA, 771 bp, Homo sapiens
atctgtcctctgattacatctttaataaacataagagggacctgcgaataaactttagcttttgattcacagatactaaacattggactagataaatagaagtaacaacacttaaccagatggaactgatctcatactggatgacatacatactgttacattctcatacaaataacttaagaactcagaaagctcaactatagttttttacaagaattatctttccaatgaaaatttatttaaggccgggtgcggtggctcacacctgaaatcccaagtttgggaggctgagccaggagaattgcttgagctcaggaatttgagaccagcctgggcaatgtggcaaaaccccatctctacaaaaaaatacaaaatttagctgggtgtggtggtatgcacctgtagtcccagctcctcaggagactgaggtgggaggataacttgagcccaggaggttgaggctgcagtgagtcgtgatcatgccactgcactccagcctgggtgataaaaatgagaccttgtctcaaaaaaacaaacaaacaaacaaacagtttaaatgaccgtctatatactagaagggcctcaactgctatccaaatgaccaactaaattataatctaagtaggtgtttatgagatatactatttactttatctatctatctatctatctatctatctttacagtcttgctctgtcactcaggctgtggcagagtgcagtggcatgatgatacatgctattaagtgaatgaacacattttgagaaagaa

SEQ ID NO: 132235 - DNA, 774 bp, Homo sapiens
ctaatgaatttgaagaacgtgattttggataatgttcttatcaagaagtgttcaaatgataccaatagtcaaatattagaggaaatgcttctactccagataactggtcttttacacaattaagaaaaaaattgtcctcacaaaaaagttaaggtgtttttcatcaccaaatatatccagttaatcaattattatttgaaattctgaactcccatcaaattatagataacttcaaggaaccataaaaaacatactaagggcggggcatggtggctcacacctgtaatcccagcactttgggaggctgaggctggaggatcacttgagctcaggaattcgagaccagcctggccaacatggcgaaaccctgtctctaccaagcatacaaaaaactagctgggtgtgatggcacatgcctgtgttcccagctacctgggaagttgagatgggaggatcacttgagccctggatgcggaggttgcggtgagccaagatcgcaccactgcactccagcctgggtggcagagtgaataataattcagatgagtccaggtctttctggtagcatttagcatgtaaaactgttgtcatgattcatcagctcagatgatttgttgtctaatccatagtcccagatttcttaaaatgcactggtatgttagtgctaatataaaataaaatgatctatcatataaaatttaaagtaggtatatttgcacctaattattctttaagttaactgattcgttcctaggatattcagataataaataa

SEQ ID NO: 132236 - DNA, 729 bp, Homo sapiens
aaagaaaagcctggcatgttaactcacaagcaaataaattccatattcactaaacatccctgacaggctttcccagccctgctgtttgttaaggtagtcaaagcatggcacatgaagaaaactacatctatggatattgtacaaaatattgtttttatgattttttaatatttttaacagacttttattgacttgtgtttgtatttttatcaaacatacttcatttatttatttattttgagacgaaatctcactctatcacccaggctggagtgcagtggtgtgatcttggcttaccgcaacctccgccttccaggttcaagcgattctcctgcttcagcctccggagtagctgggattgcaggcatgcgccaccatgcccagcaaattttcgtattattagtagagacggggtttcaccatgttggccaggctggtctcgaactcctaacttcgggtgatccacctgcttcagcctcccaaagtgttggtattataggcatgagccaccacgtccagcctcaaacatacttcagtttttcacctcagcactgttgacattttaggctatgtaattctctgccttgtaggatgtttagtaatatccctggcctctacacattagatgtcaggaagaccccctcagttataacaatgacaaatatattcagattgccaaatgtcccctgtggaacaaattcatcccttgttatgaaccgtgatccagag

SEQ ID NO: 132237 - DNA, 201 bp, Homo sapiens
actatcgtgcccagcccttattttcttcattttaaatgaataaactaaggcacaagataagtgaatttattgggggaacccacccccaatatttcaatgtaggttctttctattttctgtaagtgttggccggctgagaaataaagagtacaaagagaggaattttacagctcggcccctgggggtgccgtcacatattgg

SEQ ID NO: 132238 - DNA, 467 bp, Homo sapiens
ctctgatacaactgaagggactaagctaagatctccttcctctgctgctggctgacctgccacttgtcaagcagagccagctctttgctgtgggtgtgcttgagtggccctgtctccgtggcctctgtcctagtgcctgttccttgcgggagtttggcacctactctgggttctcacagtatttctcaagaggaatgggtgaaaaggcccttaactcatctagtccctccactggctgaatgcttgaatctccactgctacattcttgccaagtagtcaccgcttactggatccatcttgggggttgccattatggcttagaccgctgcatcagcccctctgcgctctgtctgctgccttcctccccatctcccctgagagcctcctggggaactgtcctgacactcagccagccggaggagccacagcaggtcttcccaaggaggctccacgatgctgctccccat

SEQ ID NO: 132239 - DNA, 308 bp, Homo sapiens
gagacagagtcttactctgtcgcccacgctggagagcaatagcactatcatagctcactgccacctcactctcctgggctcaagctatcctcctacctcagccttttgagtagctgggactacaggcgcacaccactatggaccactgcacccaactgtattatttttgtgtgtgataaggtctcactgtgtcaccctggcctggagtgcagtagccatgatcttggctcactgtagcctctgcctactcagttcaagcaaggggattctatacgagcctcctaagtagctggaaccacagccatgca

SEQ ID NO: 132240 - DNA, 100 bp, Homo sapiens
cctccctctatcctagataatggttggaagtgggccagatacacaggaaacttcaatcagtccagaggcgatcacttcatttaagaaagtgcattttaat

SEQ ID NO: 132241 - DNA, 359 bp, Homo sapiens
tctgtctgcctatgtgacgaagaatcaaaattctagggtaaaaagtgtcctgaaattttcacctggaatttctggggagaaatttagttttagacttcatgttacattaattatatatctcagggagaagagatttcttttcaagaatggatttattaaagtcagatggatccacggttcattccacttggagcataattaccatgttctaaagcagtttgagttcttaatgacttgactccttcatatccagcagtgtcaaatttaaaaccgaccacacgaaatgttgggggcaaaaagtagtccagtaaacaaacttattaatagaaatgaaatcccacagggaacacagacacaca

SEQ ID NO: 132242 - DNA, 318 bp, Homo sapiens
tgaagggaggctagagtttgtcacgttatatatttcagcaaagtcaacttgacttactcagaatttatttcatctaacttgtacctaggtttggaaaataagaaaaaaatcgttatcctgcaaacttaaaatccaaaaaaattgcttcaacatctgaagtgatttttctccatttaatcataaacaatctacaaccattttgctacaaaatggtctctttaaaaggcctccaaagagttattgaatgaatggctattacctagaatgtaaacatctgttattctagagtagtccaacctttagttataaagagagatg

SEQ ID NO: 132243 - DNA, 505 bp, Homo sapiens
cgctcaggggtgtagacaccctctctccatcgctcaggggtgtagataccctctctccatcgctcaggggtgtagacaccctctctccatcgctcaggggtgtggacaccctctctccatcgctcaggggtgtagacaccctcccttcatcgctcaggggtgtggacaccctctctatcgttcggggtgtagacatcctctctccatcgctcaggggtgtagacaccccctctccatcgctcaggggtgtagacaccctctctccatcgctcaggggtgcagacaccccatctccatcacttagggggtggaaacctctctctatcactcagcaggtgtagataccctctctccatcgctcaggggtgcagacaccccatctccatcacttagggggtggaaacctctctctatcgctcagcaggtgtaggcacccccctccatcgctcaggggtgtagacaccctctctccatcactcaggggtgcagacaccccatctccatc

SEQ ID NO: 132244 - DNA, 313 bp, Homo sapiens
ccaattattggttttaaaggcaaaagccaaccatgtttttatacatatttatgacaaaactccagcagtggtccccatcagagcggcttctgattttactttacaccatgtcctgtagttcgggaaatttttaccttgaagatggcatcatatattgcatggatttaaaaaaagaatactatggactatttcaaatatgtattaaaagagagaaaatagtgcaatgtcccctcatgtcccccattatctactcatggataagtagtttcatctataccgccatccatcttatgatttcttttttttttttttt

SEQ ID NO: 132245 - DNA, 419 bp, Homo sapiens
tgctgcggtctttctagaggatccctttcttgccaccagagtcgcctcatacccaatctatcaaatttttcctcttactgaaccgtccatccaaatacttccaatcatatccaaaaactatttattttcagttatctcaactacccagttcaagccatcattttctcctgaagtattctcttttgctataatccgttcaagacctaagaactgtaaaaactaacaaggcatcacgtgactcctctctaaaccagcttctcattcaccttgtaattaaaccaaaattctgtactttgatgacctgcaaaaattccattcaatttaaatcctttcctctctctctaaccttgtctaatactaaactactctttactcatactagcctttatcccttaaacataacaaggttggctgggtat

SEQ ID NO: 132246 - DNA, 411 bp, Homo sapiens
tggaacccgcttacttctcatcacccctattgctcccacgttggtgcaggtcattagcaactcttgcctggaagattgcaataagtgcccctccctatcaaccctgcttgttttagttttctccattgtacttactggtccttaactcgctaatttacttatattttaattattgtttatccccttccactaaaatgtaatctccaccagggcaagggatttttgtctgttttgttcacttttatatcccttatacctagaatgctggctggcatgtagaagacgctcattttatttattggaaaaatccagctttttaactccctgctttaattctttaattcttgctcctgacaatctattttcaacaaaaccttcaggatgtatctattaaaatctaggtggcattac

SEQ ID NO: 132247 - DNA, 403 bp, Homo sapiens
ccctagtagctgggaccacaggcacacgccaccacgcctgtctaatttgtttgtatttgtagagatgggttttcaccatgttgcccaggctggtcttgaactcttgagctcaagtaatctgcctacctcagcctcccaaaatgctgggattacaggcatgagccaccatgcctggcccaataacaatgtttgatttcttcatttattcaaccagtatttgtagagtcatattgctctgtgctggacactgtacctggtaatggaagtaccaatcgacaaaacaggcaaccctacacgctctcccacacctgtaggggaaacgtgtataaacgatgatggcaattccatgtaccctatcagagggctgggggtgggagacctcctagggagaatatagtcttca

SEQ ID NO: 132248 - DNA, 106 bp, Homo sapiens
aacaaatcagtaacatttatgcaaaaaatcataaaaaatactataacttatggtaatatggtaatatcatgattccacaagtaaaacatctaaaagaccttccact

SEQ ID NO: 132249 - DNA, 150 bp, Homo sapiens
agtctggacaaaaagagcaagactccgtctcaataaataagtaagtacataaacaaatgaacaacttgatacttgtatacctagaacttggtatacatcaaatactaaaaagaaagaaaagtcagataaaaagcagaagtgtctctgggg

SEQ ID NO: 132250 - DNA, 655 bp, Homo sapiens
tcttttggtatcatccaaacaattcacctccacattaattctcctgctggtactcaaacttttttttttacatcttaagccttatcagtccctttaagattttttttgaagcaaatagcctggtttttcatagattgtcatatgtatgtttatgagagttttaaaatcttactatttatttacagcaggtttaggggaatatgaagttgtaatatactgatggagtaaatttgattgtgattccttagttattgtcatgaaaacctaatttcccatccagacccactactttctcgagtagtaaaatcctccatcaaaaactactgagcaagaaggctttaccctatggggaagacaatgaggagaggaagtgaagaaaaccagctgtattatatgccgtagtatataatgttgacattttgcagcttattgatcagtggatggttctgaaagtatctgttgccatctttgcttgtcaaataaaatccaaactttacttaatgaccctaaccatactaaccttgagtaaaagcagaacttccatttctgtttgggcagaaatccagcttttcacccttaacatctgctattgaaagtgctagctatctttctggtgatctgtaaggcaccataatactatttgtgttaacaattt

SEQ ID NO: 132251 - DNA, 137 bp, Homo sapiens
cacagggccttgggactggctggacagacactgctacatgccctccaagggcaggagtcatggtaaggagcgactggggtggaaaatagggaaaaaagtaacaacaactagatcatttttggcattttaacatggag

SEQ ID NO: 132252 - DNA, 476 bp, Homo sapiens
ttaatcttagttgactctgtattgttatcacactgcactctgttgtggttgtgccatttttgcaaaattgagctctttcggttgttttcgaaataagggaacttagtgttgaaaaaccagagaactttttctttaataagaaactaaaaaagttgcagccacataggttcagtttggctctttggtttccagtggctctcaaatcccctaaggttaaaagaaaacactacagctaccctagggtttctcaaccttggcattattgacatcttgaatcaaataattcattattgtgggggtgctgtcctgtgccttgcagaatcttgagcagtgttcctgacctctacctattgagatgccagcagcacacccccatcccagtgtaataaccaaaaatgcctccagacattgtctcatgtcccttggagagcaaaatctccctagggtgagaaccactgagaccattgtttaagcag

SEQ ID NO: 132253 - DNA, 206 bp, Homo sapiens
ggtcaggcactgagagcctgtcaggcactgaagcctggtcaggcactgaagcctggtcaggcagtgaagcctggccaggcctggtgccaatcatgaactgggcttggtgatacaccaataaccctcagaaccaggaagcaaaactacctgctgacccatgtaactcctttctcttttccttctctattcctcctcaagtgctcctc

SEQ ID NO: 132254 - DNA, 511 bp, Homo sapiens
aatatgctgtctagcctaccaagtagctaggatacaggcacacgccacgcaccgcaccagctgtttttttttcttttgtattttgagtagagatggggttgcaccatgttggccaggctggtctcgaactcctgacctcaagtgatccactcgcctcagcctcccaaagtgctgagattacaggggtgagctaccgcacccggcctaaaagtttaatttaaatctccatttttattacaatttgttgaagtaagaaggtcagcttcccaaagtttgaattttgctgactgcatccctatggtgtcctttaacatgtttcctgtcccgtgtatatctcctgtaaattggtaggtagaaccagaagcttaattaggtttgtgttcttttctctttgtgcaagactacttcactggtgaaattgtttaccacaaggtacttaatacctgattgtatctcgtttttgtcactgataaatgctttaactttttttttattttttgagatggagtct

SEQ ID NO: 132255 - DNA, 894 bp, Homo sapiens
tgtttaatttctgatagtgggatttgagtccattttcttacagttaacatttaacattttggccaaaataacaatgctgtttgcagaaacaaaaggaagtctgctataatctagcccatagagagatcatcactgttagtttattttctgcatttttgtttgtcttcaaaattagactcacgctatataaaaagttgtacattctgaattttttatgtaagattaggtggtgaacattttttccattgggtagttttgtttttgttatgaactacttcagatatacagaacagttccatgaaaaataataaaatgataaccagcatatccactatgcagctcgaataaatcttaacattttgttacacttgctttgggtgttgtcataatttttttttatttcttcaaatatatatttaagcccctaagtactactcccaatctcagtcccctctccttctccagagttactcactttttcaacattaaaaatacttagaggttaagatttttttaaacacatatttacatttaacactttgcgctaaaggaattactacatagagattcttttagatcactgcaaataatcacccatttattttcttttctgcagtactaggcctgtctaatccaatcctgggtagaaacaaaagaattagaatacaaaggaaccaaatcttacattatctgcatatttcatatgactgtataaagtctattctgtataatttaagaaaataagatggatattacatctaaatggatatgtagttatttcttttcaatatatttaatattgctttagtggaattaaagacttaaatcctggtaaatgttacactttttagacattctaaaataaaaatgggtaattataataattagaagaat

SEQ ID NO: 132256 - DNA, 408 bp, Homo sapiens
tgcgtggtgactctagacgatcgcttagagccttaccctcccttaccctggcgtacacttgctgacttggtcccacacggttccccagatgccccatttcctcaggtctgctcaatccccaccatatgactaccgcagaacaatgagcaagccaatttcactgcatcttcacaaccaggcacacgctgattcttcatcattatccccattttgcagatgaggaatctgggtccaaagaggggaaagtactgctccaggggcacacagagagcacaactggcagagcgggggttcaaacttcagtcaccctcaactcttccctctacattacccaccagcaaatcccatcagcccccctcaacatgtcctgactgtaaccatacttcccccctgcatgctaacactggt

SEQ ID NO: 132257 - DNA, 326 bp, Homo sapiens
tgaggcatgaggtgatacctggggattagtggcctgctgggacttctgctggggcctcttcataccagagccctgtagtgaggtatcttactgcgggggaaggaaggaggcttgcctgcagcattctcttgctgggaaagacagaagggcacgtggtaagaagagggtcattggatcgaagctcatgtgcaccacagctgtttccccatcctccagtggctggcacaggaccccagggtagcacactggcacttgggacctagaaggggaggatctgggaagttcttggggactgaaggccctctctgctctagcctcaccatagt

SEQ ID NO: 132258 - DNA, 687 bp, Homo sapiens
tgatctagaggatcccgtgtctcagtttcgggacgaaaaaagatttactacgaaaacagtgaccaaaagacagaggaggtcctatgtgggtactagaaaagctggattttaagtaaaaaataggagggtaaaaaaaggaatgcttgaaggtgtaataaacaagaagagatatgtaacttacaaatgcagtctcaaaacataagaagccatgctgagggctacgggtgcagaggtatccctgactgtggggacttcggcgaaccctcttgggaagtggctgttagggaaagaatgagccgtatcacgggtggtttgtacagcacagtcaaaaccaccaaactaagagatgccgtgagatttcctatctgatatggtctggctctgtgtccccactcaaatctcatcttatagttcccataattcccacacgtggtgggagggagctggtgggtcttccccgtgctgtccccgtgagagtgaatgggtctcacgagatctgacggctgtaaaagcgggagtttctccgcacaagccctctccctgcctgctgccatccacgttaagatgtgacttgctccttcttgccttccaccatgattgtgaggcctccccagccatgtggaacgctaagtccagtaaacctctttcttctgtaaattgcccagtctcaggtatgtccttatcagc

SEQ ID NO: 132259 - DNA, 858 bp, Homo sapiens
ggcagcagaagtcggagagaaagtgccatggatggacgcgtgacaggccgccagatgtgtcttttgaagacttcgtaacaaccgttaactaaacagattcagattaacagaaagacagactctggagtggatgtctttagcaacatgctgtctaaagaagacccacttgatacaacggttagtgaaaagttgaaaataaagggacgaaaaaagatttactacgaaaacagtgaccaaaagacagaggaggtcctatgtgggtactagaaaagctggattttaagtaaaaaataggagggtaaaaaaaggaatgcttgaaggtgtaataaacaagaagagatatgtaacttacaaatgcagtctcaaaacataagaagccatgctgagggctacgggtgcagaggtatccctgactgtggggacttcggcgaaccctcttgggaagtggctgttagggaaagaatgagccgtatcacgggtggtttgtacagcacagtcaaaaccaccaaactaagagatgccgtgagatttcctatctgatatggtctggctctgtgtccccactcaaatctcatcttatagttcccataattcccacacgtggtgggagggagctggtgggtcttccccgtgctgtccccgtgagagtgaatgggtctcacgagatctgacggctgtaaaagcgggagtttctccgcacaagccctctccctgcctgctgccatccacgttaagatgtgacttgctccttcttgccttccaccatgattgtgaggcctccccagccatgtggaacgctaagtccagtaaacctctttcttctgtaaattgcccagtctcaggtatgtccttatcagc

SEQ ID NO: 132260 - DNA, 618 bp, Homo sapiens
acttgatttgttcaaagttttgacaatgacttatttgaaggtaaagcatggtactccaagctggtagcagccacttgggtctgtgccttccttgacctataagatggaagttaagcttctctctttcaacagaagtatgtcccagaaaagtttgagaagcactaatatagtgcacagagcacttgcattgacatgttgtgcagtcaccagcctaggtggtactggccagtcatttaacttttttgagccatagtttcctcttctgtaaaatcagaataactagtaattggtgtagacataagcactgaaaacagaggaaaagaatctagttcaaaggaacaggcccaagagagatagtaggacagctaattcttgtaatctaatgagtttgagtaaaatgcacttgggagaattattgtggaagagattggaaaggtaggtaggggctaggtcatattccaagctcaaaggaatttggacctagtccatggtttactagtagaatactaaaagaaggccagatttagctgacttttcttgaggcctgcaataagccatactttgggctttgggcatttggaggtagataggaactagttagagactgttaaaacaggc

SEQ ID NO: 132261 - DNA, 710 bp, Homo sapiens
taagcacttgaaatgtccttggtataactgaaaagcttcatatatatataccttaaattttaattcaaataggcgcatgtggctagtggctactctattggaaaacataacgtagggttttcaggatcttcttggattctatatgccccatctctcaattcacatgagcattaacacaggaaaacaaagacttctccaacagtggaagaaatgattagatttggggacaagatggagatcataaaccacctgttttcttccaagaaaaagaaaaggaaaaaaatgcatttgttgagaagagaacacacgttcacatggttgctctaaattgcctgtgagccagacttggctcttaacatttgtccactagtgaaaaggttctcaaactttagcatgcatcagaatcacctagagggcattgctgagtctcaccacaacagtctcggtttcagtaattttgaagtggagcctgacagtttgcatgtttactaagttccaggtaatgctgatcctgctggtatgagactttgagaattgctctagggattttcttaatgggaaaaacaaccccctcagatcatgtatttttttttgcctattggagtgtctggaccactgttaatataggaagattctctcaccaagaatcagttctcttgaaaaaagagaaaattcacttgcctttgccttccccacaaagtaagaaaaaa

SEQ ID NO: 132262 - DNA, 191 bp, Homo sapiens
tacgcttgcgtactgagtccgtccctaacaaagatagggctgcgaatatcccatgatggcatttacattttattaggtattgtaaataatctagagatgatctaaagaagcagtccccaacctttttggcataagggagtagtttcatggaagacaatttttccacacgccgctgtgtatgtgggggtgag

SEQ ID NO: 132263 - DNA, 608 bp, Homo sapiens
caaacggacctaatacacctaaatgcatttgaagctacttggtctcggttcttaccaacgatataatttaatttttttttccaaacgatgatgttgttgcatacctgtggaaagcaaaatgattctgtgaaactatacttttagttttgcaaccatttgataacttcaaagattatcaatgtattatatctttagtcttagctttccagataacccagaatcatatggttccaagttgattaagctttgttaccagcagactatggtaggatcctgatgaacgacactatggaagaaacttgttaggataaacagtcttcaatgtgtgcatattgttgacagaatttgaaggcacaaatttaagagtaactagggtgtaaaaggcgagcaaagaaaagtcagcactactgggtaagcaggtgagggggcttattgataggagagtcggctatgtcaaatagggactcaaggcacaaagtcaatttctttactgacaactttcaatccaagtaataggaattttgtatttgtaaattactaggtagtggctctggctattcttgttttttcattgatttctgtgagcatttcttagtatgtattgtgtg

SEQ ID NO: 132264 - DNA, 280 bp, Homo sapiens
ttcctgagaatgctgttttcagataccttcagattttccccgttttcaaatacctggagacttcctgtgaaaatgctacgtagagggtcaggattttcacagaactttaacggccctgagcaaacaatcgactgtaatcaacgtgtagcttcctgtccccaagaacacaccttaccccatggcagggcattgagtcatgttctgtgaggtgactcctagtggagccattacccggggatttttttttttcatttctaaaaataaaatgtagaaaagcatg

SEQ ID NO: 132265 - DNA, 225 bp, Homo sapiens
cgagctgcatcgctgatcaagttaacaagttgtttatatgcatttggagggaaaaaacacaatcattagaattactagacagaaagattcatgaagaccaaccatgccaagctaattttcttttccgatatgtctactaaacatgtagagcaatagatcgcatcggtacagagcacctccatctccacaattatcactctaccatgattcatgataaacctcagg

SEQ ID NO: 132266 - DNA, 216 bp, Homo sapiens
tgaccttcgggcgtctgtgacaaagacctgtcacagtgtatctatttgcttatgggagggaagggggaaaaaaaaaaggattctaggcctgctatatgttaaatcaccatgaacataacggcacagttaaagacacaaatggccaataatcatacgaatagatatttaacctggctaataactaaataaaagcaaattaaagcaagatgcacatta

SEQ ID NO: 132267 - DNA, 239 bp, Homo sapiens
gaggaaactgatcctcagagaaagctcagtcatacagcaagcccgaggcagagctgggacaggtccccggagctctcagctccatgactctgctacctccttcctctgttaagtcctacgaagcccagaaagaagccccttcaggcaggacacactgatacccctgtcttagtccattagtgttgctgtaaaggaatacccgaggctgagtaatatataaagaaaagaggttaatttgg

SEQ ID NO: 132268 - DNA, 787 bp, Homo sapiens
agcattgtgccgttttaagaggtagatctttgagcaccttttctatttttgtttggatatccatctcagtggttttctttttgagttaattttggtaattatatcttcctggaaaattggtcatctgttttattttttagttcatttatattaaattttaacatactatctgaattttgaaagtaataattctatcctttttctttttgaaattcattttgccaaatatttgactggcttaggtgtctttgaaatcaccaggttttggttttattcattaactctactattttctgtttcttgatttctcattcatctttttattgctatattaatttctcttttctatatgtttattttctttctcttgtttttaactttttgaattgaaatttttggcgacttactttttattgttctcattttctaaaccagcatttaaggctataaattttcctgagtgctacttttccagtaatacataggatttagtgtatagtgcacacatatcattcatttttaaactgctggtgattttcattttcacttttttactttgacctaaaagtttctgaagtgtttttaaatttctgcatgtatagaattctttgagttgtttagatctgtcaggtaatttggcctgtatgttttctgtttgggaatgtttttgagtgctactctgtggcctaatacaagatcttttttttgtgaatatacaaaaaattaaagcttagtaaattattattcagattttctcatcatctgatgagaccctggtgcctgctat

SEQ ID NO: 132269 - DNA, 889 bp, Homo sapiens
agccatgagaaggtcagttggaacttgtggactgaaactcatcaatttgattggttggtaaaacaaaagtatcacatattccataagagttaagcaagacacatagtctcaaaacacattaaaaatgtcccagatactatctaaaattatttggcctaagaaaaaccagaaaaatttcaacctacatcaagaaggcaatgaacagatacggatgttttgaagatacagatgttggacttttctaacagccttttggagaaactattataaaaattgttccaacaagcagtcacaaacactcctgaaacaaagttaaagtagaaaacctcagcaataggaaataagaaatagaaagaaaaatcaaatggaaattttagaattgaagaatacaataacccacaataaaaatcttattgggtctgctcaataggaaaatggcaatggaagaggaaagaatcagtaaactcgaaaataaatcagtagaaattatccaatctgataaacagagaaaaaccagactgagagaaaaaataaacagtctcaaagatgtgtgggacaatttttaaaaaaaaggtttaacatttgcatcgtaggagttctagaatgggatgacaaatagtgtggtgctaaaacacacttgaagaaataatggccaaaaaatgccaacactaggagaaagaaaataacccatagattcaggttcagtgaaaatcaacttgatcaatatcctgtcgacctctatcaaaaaaaaaaaaaattgggggcgcggccaagattaaacactttgggccgcccagatgagacggctcgccagaccgccaatggggttcccaaacggcggggtgaacagtgttgttgttgtctgccccccctcgcgaaaaaggcaaag

SEQ ID NO: 132270 - DNA, 468 bp, Homo sapiens
tctgaaaaaaaggcccaggtaactcagaccatgtctctttttccagatttcccagactcaatggttaagtttgagaacacattcgaacctttaacatctaaaacaaaaactcctgcagaagggatcttgcttcattgatttcccaagcaacttctactacttctttattttgtcctgaatccctgccacagaatgagcatgggacccaagcatgatcgttcagctcccacacaccctacaccactcaccagcccatccccaccctcaattctcaccataggccacacagagagcgtaagagtcagatttatgttaagctggctagggcccttccccaaaagtttttcaacaaagatggttggaaagattttttcctccctgtattaatccattctcacactgctaacaaagacatacctgagactgggtaatttataaagaaaaagaggtttaagggactcacagttc

SEQ ID NO: 132271 - DNA, 365 bp, Homo sapiens
taatagcctggaccagaatgaggttcaccgcgttagccaggatggtctggatcttctgaccttgttgatccgcccgcctcggcctcccaaagtgctgggattgcagacgtgagccaccgcgcccggccacaatgctgactttctattaactgtcactctcaataaaaagacagaaccaaatctacccatgtctctagaactaactcccagtttatagaataaacagcagataatggaacaagctcaatgacattacaagttcatgaccagcaagatccaaaacgtgggaaactgtatagcacaaaggatactgcatatttctttagcaaataaaatgacacttaaaaacaaaggaggggctgggt

SEQ ID NO: 132272 - DNA, 864 bp, Homo sapiens
ggcgctggcagaggggacgggcaccacgtggtcatccccatgacaggttctgtcatggtgacagtgttgtgggaggatggtgtgctgctgcccctgcaccccgtgagatgaatcctgcctctgggaggtacagctgggacggggcgagggacccactcagctgtccaggaagggtcccctgccctgtgcttcctccaggtgtcctggtgcactcctgagcacggcacctagtgggggtccccacaccctcaccctgacccatgggtgcctccccttggggactccacgcccttcgctggcactgagatggagagcgacctgtccgtggcagaagggctgctgcacctgaggtgcctaaggcgacaccaagggccacagccccagtagctccagcctccgtgtgctcaatgccaagccctgtgcccaggaggacagggaaatggaggcagaggtggccttgatgtcccaaggtgggcagtggctgcctctgccctggaggcctgtgagggtcagggtctgagggtctgaggtgcactatgacccgggggcactgcctggccacggctgagactcgcagagggtctgcagttcccacctgcctctcggaagctgccctgggtcagccgtcagtggtgctccgccttgggttttctattatcagaaagtcattgagcaacagcagtgctgaggacgcaggcagggctgtgggcactgcaggggccgctcccagtgtccacacgcgtgctgggctctgccaaggtgtgggaagcctgtgtttcaccctgaggttgtcctggtgcccctggtttggcccctccccacctcggggccctggcgtgcattaagggtggcgggttcccatag

SEQ ID NO: 132273 - DNA, 375 bp, Homo sapiens
agttcttttttataatatctaaagtgagtgcacatgacaaaagaatatttttaccaacctctttttaaggtttctattatattaactgttgcctacaagtacaatttttaaatcactctggctttatagtgaattgacttgactttggcatcaaatgggtagcgaaatataaatgggtatcttcatgtgaatgaagaggagaattctcaggtaaacagtgggccactgctgttgcagatgttggtaaagagaattgccttttacggctccatttcttattaggaacacaagttacaggataacctgcaacccattaagactgtaaatgcatatttgggtataaacatgaagtggtatcagaatttttatgccaag

SEQ ID NO: 132274 - DNA, 257 bp, Homo sapiens
ctgaatcaactcacctatttttatcagtccaaatcaaagtacattgtgcccccttatcgggtgatgctctgtccttgtactttttctctactattattttaacccagtcactgatcccaaacattcctcatcagattctttggctttattatgtctaagttgatttgttcacatgcgtgaatgagcgtgttgtgcctctgctgctggcaagattcttgtctgatcagagttttgcgtctcctgtgtttactctaggc

SEQ ID NO: 132275 - DNA, 428 bp, Homo sapiens
aagactcccaggtttgaatgctggctctgacatttattagctctattacttaataagttacttaacctttctttccttcagtatcattatgtacaaaacggagacaataatagtatattaaagttggtgtgatgactaaacgaacacaggtaaagttcttacaacaatgaactggcacatatatgaccaataaattcaaattatctctgataccacacagaattttaatggttgttctgaaattctcaactgtaattccaagtttcattagtctaaagttactagactacactgctcattttctaaattaatctagttggatttttatgatatttaaagatttttttccattatactttcactagaaattacagaaatttcactgggtacagtggatcatgcctataatcccaacactttgggaggcc

SEQ ID NO: 132276 - DNA, 570 bp, Homo sapiens
tgcacagtcttactggctgtttacaggccacttcccttctgcctggatcacagcaccctgtcaggtgcagcagggcccaggctgtgccacttgtgaagtattttgaaaactaccttggattagctcacagaatcactgaaagtgtggagaaacaggttttaggctggtcttcctagaacaactcccagaaccctgctaaagaactgacccaataagggacctgataccaatccactagccactcacccaaactgctttctcacatatttgcaaatcaaaattccacataggattatctggttaggagaacctagaccatgattctactctcttgctgcaatggaagctgggaattgtaggttggctggttggtttacggtttttggaacctaccttgaggtgacaagattcacgaaacatggcactactgaaatgtggaaatatttacaagatttgggcagccacacatggtagatttccattataactcacaaggcggaaagcagtggccacaactgtacggcttatagcttcaacgcactgaagaaagattgacctgactagctgtac

SEQ ID NO: 132277 - DNA, 464 bp, Homo sapiens
atccttagcctgtccgtcgattttacaatcgtgtctgtaattggaaaaccccttgcgcgtgcaataacagaaacctagcttaaatcaactagagtaagagaagagggggatttttgagtcacaaaactaaaaagtctagaaaaagacttttaagcatgaatggggttccaggcatggctggatctaggagttcccaagataatgttgggaataacaacgtctctgactctcagctctgctttcttgatggtggtttctttattagctggtagtttcctgatcatcctgtcacctcagcaacccctgtgaacagagagtcttactcttttcccctaatatttcctgcaaagctatgggattgagtctcattggttgtggtctatcacatgcttcttcctgagccagtcactgaggccaggcagataggatgcttgggtcagccaggactaggtcatgtctttcag

SEQ ID NO: 132278 - DNA, 411 bp, Homo sapiens
attaatttcacctcttttcattttttaatatgtctgtttgaaaatttaaaattacatttgtggttcacattatatttttactggatatcactgttctactgttgccattctgagttgacaattctaatcaaaagcaagggaactaggtatttcacttagcttgtgcagctgttttagtagacatatgatttctgttagttcttgtgaaatactaaaaataggtcaaagatttctatttctactttttcagactcccaggaagtctgtaatttatatatcctttaatgtttgttttcccatctttggagattccaataatgtaggggttgaagcccaaaggggttagacgcacctaacctaaggtgaaggacatagagctgaatttgcttccaaatgagagagtggaaaaga

SEQ ID NO: 132279 - DNA, 176 bp, Homo sapiens
gagagctggaaggcttcggttctgtcccagtacacgcggtgcaggaccacggttgagcagaaggtgcatctgcgtggcaccgtggcgctgaagtccaggtgtgcttgggccctaggctcccaagacgttcccactgcctcctcctgggcacaaggctcaagcacagggaccgccgg

SEQ ID NO: 132280 - DNA, 314 bp, Homo sapiens
cctgaattgtctccatcaatcctttttacttataacacttgttttatcattcttaagttctaagggtagaagccttccacactgtaatttttctacactttctcattatttgtttcttgtttcagggaatatttcaagatgcttagttttataactgtttcttgaaaggcttcttctttaacaaatttgaaaaatattagttttagcttccactgaattttcctgtcttgtttctgcctctcatttcttgttttttttttttcttttcttttttttttttttttttgagacagagtctcgctctgttgcccagg

SEQ ID NO: 132281 - DNA, 214 bp, Homo sapiens
tactgagggggctgaggcaggagaatcacttgaacctgggaggcagaggttgcagtgagccaaggtcgcaccgctgcgctctaccctgggcaacaagagcaaaactctgccttattgaaaacctagaaaaaattgtgtcataaacaaagcagggacaacattgattaaaaatacatagatagggccgggtacagtggctcacgcctgtaatccc

SEQ ID NO: 132282 - DNA, 559 bp, Homo sapiens
gcgattctcctgcctcagcctcctcagtagctgggactacatgcatgcgccaccacacctggctaagttttgtatttttagtagagatggggtttcaccatgttggccaggctggtctggaactcctgacctcaggtgatctgcccactttggcctctcaaagtgctgggattacaggcttgagccactggtcggccagagtggcaaactttctcaactctcagattgctttatagcttccctccgtggcttccaagcaacacaaaaagatgttcaagtatgtaggttgaactgactaaagtgcatttatggatttcccatcattctactttttaggtctctatagcatacctggacctggatactcatcctgggaagatgtccttctgctaaaccttttaggtgttgctggtatcccctgaattctgtatcctccaggctacccctaaggttggctttaggcagagatgaaatattttctcttggaaatgatgtggctgcctgaaatattgataaatattctgaggctatatctctgagcctcatatgtagatatgta

SEQ ID NO: 132283 - DNA, 532 bp, Homo sapiens
gtctggagttggggtggttttggaggattgaataaaatgcataagaaacaaaataatcatcatgggaaagtgaacttcctctcagactctctccctctttctggtcacctggtgtgatttctccttctttctgtaagtcacttcattcttttctctcagaaggcaggtttcctctgcttctctgtgcccatgacagaaaatggccactctatgcacaattctttatagaaaaatattttatttcttaatttcagattcccaaaggagaaaatttaattggcccagctttagtcagttgttgaactcgggtgaaatcaaccatggccagaggggcaaggttatttgggacatacatagctgtcaggcccaaaccctctatgtgttgggggaggattggttctcagagaagagggatattagtttgtcagatgacccacgaagcagctaccaaacttattttctgagaccctgaactctattttaaggagtacttctgccctgccttcttttctagtattgttttctttcattt

SEQ ID NO: 132284 - DNA, 452 bp, Homo sapiens
gaagtattaaatattagttcataagattgttaatctgctgggtcaggcaaatacagaagagtttttcactttattcttgattattttacttatgatcatttccaatttagttggggtaataacctgatcagttatatacattgcactcattcattcttcagcaaacatgtactgaatacctgcccctagtatgttcttggcccagactaggccctagcaacccaagtgaactgcctgtctggctgccttaatgggggctcccaatctagtggggagcaaatgaaatgatcagtgcgatcatttactgcactagcagctgttctgccaagagtgtgcagaatcactctttattaacctagaaatgacctgagagagcatgtagtcgagttctggtcattttgtaagtaaagcatatggccacagaggtgaaggacacatagaggctaaggtca

SEQ ID NO: 132285 - DNA, 1280 bp, Homo sapiens
agtgtgagcttcctccctgaagcagtgccatagtataatctcctggcagctccctatgttaatttcagggcctgtgacgatcaaggggctctcccatggtagggttgcaggagtccatggtagaaatgtggactgctgatggtctgtcacttaccttttccctgtactggggagtcccttttgactgctagacattcctggacaggcaggcgttcccacttccttcttaagtatttcctatccctttgctgttgacttccagtattctctcttggatgatctatttgaagtgtgattatctactcaccactgtggttcttcttggtggaggcggcaactactaaatgcttctagtcagctgtcctgaagtgcctgttggaatttggtgcttaaaataatttcttagttgatttccaattttgtttggtttttctgtgttctcctttagttctttgagtgtattttgaagtctttagtacatctgatgctttaggttaagggacagtttctgcacattttttcctatgaatagaccatgttttgttctttgtatgccttgtgatcttttgttgaaaactggacatctgaaaaacagccaagtttcccagtctttgcagactggctccatgccaggagggacctccactcactagtaagatgtgttctgacctttagcatcatcccacgatgaagccccaaagaccctccaggactttgcttggtaagggtcttgcctgaggccctgtgtgtatttgtttttattctgttacaccacgcttttaaattttttacttttccaaagagtcttcctgtaccttgttctagtccataggtctgcagtcctgcagctttcagttacccaccactttctatggcttttccaaggctgcgctctaagtataccacttttcctcatccaagctccaagttaggcaaaacagagaccagttcttcagcagcccccaaaatgttgcaaataagatctgtcctgctccctcctacttgagggaggtcactggtacctgggctgctgcttcctcccaacactaccacactgtggagagggtggggcaagcctgagtaaaactaccacaaaatttcttaccattttgaatgtgacttttccttgattgggcattagcttggttcttgtagacctttgcctttcagagttcccataaagttttctttagtcagtctctacttgtaatctttccatggggaatgaagacatgtagctgcctattcttcttgctgctgtatagtccaagcacagtgca

SEQ ID NO: 132286 - DNA, 496 bp, Homo sapiens
acaccaaatgctggtgagaatgcagacagactgcgtaactcatatatttctgatgggaatgttaaatgctacagctgttctggaaatcactttggcagtctgttacacagctaacatgcagttaccacaaaacccagctaatacaatcttgagcatttattgcagagaaatgaaaattgatgtttatacaaaaacctttacctgaatgtttacatcagatttactcatcagagctaaatattggaagcattccaaatgccctttaatgggcaaatggtcaaataaaatggtatatacatgccaatggaatgttactcagcaaaaaaagggaacaaatgatcaatacaagcaacttggatgaatttccaggaaattatgctgaataaaaaaaagccaacttgaaaaagttacatattgtttgatatcatttatataacattcctgaggcacatacttttaaatttataattaaaggtttatccatgttttagcatga

SEQ ID NO: 132287 - DNA, 459 bp, Homo sapiens
gttttgtataattataaatataacatgtattctgaaaattctaggaaaatgtagacaaaatgtcaatcacctataattcatccctatgagacctcccttaaagttggagcatttttttcttgcatttggaaacacatgtatacatgcatgtgacctgttttcttaagatactgtaaatatttcctcttactattaaaaaccacaaggaggtttaacattggattcccaagtccacagttaaaaggaaaaaggaactattactcaatagatgcttccaaagcactcgataaaatttatctcattaacaaaagcttcatataaactttaagaaaactagagttacctaccagaagtcataatgggggagctgaggcatttccattggattcaaaagtcacacaaaaatgtcagacattaacttctgtcatttacatttgtagtacagatgctaaccaacag

SEQ ID NO: 132288 - DNA, 294 bp, Homo sapiens
ggaaagcatttattttgtttggcatataaccattaacaaatgttcattcctgacctttcttgaatttagcaaaattaatctataatattgtactaaattttaacatttattttcattttggataaaaactcagtggtaccaatttgctcaatactcgttcttcagtgctgatgtaaaaaccctgcctagggctggaagtggtagctcatacctgtaatcccagcactttgggaggtcatggtgggaggatcacttgagaccagtctgtgcaacttagcaaaaccctgtctctac

SEQ ID NO: 132289 - DNA, 464 bp, Homo sapiens
gagagacagggcccagtctttccagcagtgggctgggttcctacacaggggccagatcctgtcttccaaggacatcacctgtttcaggtagattagttctgtagactccctctcctctcactggagactcggcccctacagagcccttttaatccttctgatggattttcccatcagatggggtctccttgatgaccccagcactcagtgcccagtgaaccagatgcctggacagtggtgtgggtgggagcatgctccagggaaccaaattccacttctctcagatgacacagctatgaggcatgaggggctgcaacagtgggcccggcagctcccgggggcccctttgtgcaactcgggctgccgattcagccgtttctccagccactattgactgagcacgttgagcatgtgctgcctgctgtccttactgggggccatgaaggtgagctagacgatcaagt

SEQ ID NO: 132290 - DNA, 659 bp, Homo sapiens
gaccctctgcgcggcggctgcgacctgccggcggtccccgggcccccccacggcctggcccgccggaggcgctttactaccccggagccttactgcctttgtaccccactcgggccatgggctccccgtttcctctggtgaacctgcctacacccctataccccatgatgtgccccatggaacaccccctttctgctgacatcgccatggccacccgtgcagatgaggacggagacacgcctctccatattgctgtggtgcagggtaacctgccagctgtgcaccggctggtcaacctcttccagcaggggggccgggagctcgacatctacaacaacctacggcagacaccgctccacctggctgtgatcaccacattaccgtctgtggtccggctcctggtgacagctggtgccagccccatggcgctggaccgccatggccagacggccgctcacctggcgtgcgagcaccgcagcccgacctgcctgcgagccctgctggacagcgcagctccgggcacgttggacctggaggcccgcaattatgacgggctcaccgccctgcacgtggcagtgaacaccgagtgccaagaaaccgtgcagctcttgctagagcgcggtgccgacatcgacgcagtggacattaagagcggccgc

SEQ ID NO: 132291 - DNA, 363 bp, Homo sapiens
gtgtctcaggtttctgttcctggggaagactgcaggatgaggaataagggttcagaaaacctgagggaggcaggactagagagcagggctggacacaggtccctcacagtcactgttccccagacaccgctccacctggctgtgatcaccacattaccgtctgtggtccggctcctggtgacagctggtgccagccccatggcgctggaccgccatggccagacggccgctcacctggcgtgcgagcaccgcagcccgacctgcctgcgagccctgctggacagcgcagctccgggcacgttggacctggaggcccgcaattatgacggtaagcatttaccgcggggcaccgctgggctgtcc

SEQ ID NO: 132292 - DNA, 358 bp, Homo sapiens
ggataggttatatgcaaatatcataccattttatataagggacatgagcatctgaggatttgggtatctgtggggcaggaggaggtgtgtcctagaatcaatcccctacagttactgagggacagctgcatatctttttctgttcctttactcttaacctatttgtgtctttatatttacagtggatttctcataagcagcagatagatgggtcttgctcttttattcagcctgacttaattggcatattcaaccaatttgctgttgatgccttgctgtgcttcggtttaacctcttgatactttgctgtgcttcggtttaacctcttgatactttgctgtgcttcggtttaacctct

SEQ ID NO: 132293 - DNA, 325 bp, Homo sapiens
aacaaatgagttcacacgcagacttacctagcatcccagtaacagtctttcccctgcaatttgcaggatcacagcctcttgcaacctgagtcgacccaattatttctgagatcaccaagtatctcacatgttcaagatcaatcttttcatgatttccattctaaaaattatgttgatgatcactacatggcaagaaatccaggtggccattgccataactaatgataccctctttgagtgaaccctttcctattcaggactcccaaagccacccactctcaatgccgtgtgcatctcaatgccgtgtgcctctcaatgcggggat

SEQ ID NO: 132294 - DNA, 508 bp, Homo sapiens
atagcctttgcaatttcttttaattgattgagctaccctacaccagaatgggtgaaaaaggaccttattttttctgtatatggctgtgttgttttgttaagagatgagttcctgcatcaggacatcatgggcactagcatttcaaaaatagtggaggcaataacctaagctcagtggcatgaatccacactgcacattttattagcagtgtaataattttctaaaagattagtatcacagatgcactgatataagaatgctttgaattctttgagttctccagaggcatattttaagcgtcagatacaaactttacttttccaaataatgaaaaccaaggcagttttcctgaaagtaagagcatctttaattaattctaggtaagcgattctgaaggttagccagaagaggcaggtataccttaggggtagtggataatctccaaggtttggtgagtactagcgtgtgtgagtctgtgtgtttgcatagctgtttctgaaaatatttg

SEQ ID NO: 132295 - DNA, 733 bp, Homo sapiens
tgtggtggctcacacctgtaatcccagcattttgggaggcctaggcaggcagatcacttgagtccaggagtttgagaccagcctgggcaacatggtgaaaccccgtcataacaaaaataaataaataaataaataaatacagaaaaactattataagtatggcaggaaaacttgaatacttttatatgataaagcatgcacataagttgattaaaaacatcaaatccaaataagtattataataaacaggaaaaggatgtaaaaagtatacaaaagaagtatatcgtgaaaaatgtcaaatttactgtaattaagaaatacaaactaaaacaatctaaaaattgataaaattatttaaaaacaaaaacaccaaagctgtcagggatgccacaaaacaggaactgcttttgagagcatgaagggcccaacctttgggaatgcaacctggcaacagtaatcaagaactttaaaaaacattaacaagtttcaatctagtaagtctatttctgggatcctgtcctcagagtgcaatcctacatatggaaaaaacttcctgcacaaagacatttattggaaatggaaacatcctcaatattcaataacaggagaactgttaaataaactatgtgactataaaaattacgctaacaaagaccacgctataaaatggaaaatacatgtgcttcactgctacagtaaaaccaggctttaaaactgcatatatagcctaatg

SEQ ID NO: 132296 - DNA, 698 bp, Homo sapiens
gtggggccccatagacacccggctatgcatagaagcaatatagcatttggaatttgaaaataaattttcatggaatatgttccatatattaagtagtttttcagaaatgcaagcttcttggagcatgcattttgtgaactgtgataagcttttttatccgtcagaaataatgtgaggggagttaggaacaagaggtttttcaccctttgaaaaagtcaggaatgtggattggctcattgaagatcttggctacatataaggagtggacagcattgctctaggagttgtgatgatgtaacttttgccataaaaggatatggattttttttttttttttactatacacagtactgagtttttaggatggagaaaaatagtgaatagtcccatgggggtgctgcccagaatgtagtaaaacaaacctttgcttgtttcagcctctatctcttgagacattggagaaactaaggtagtttcaaagattattcaaaaagaggcagagccttccttcattccttctaggcaaagtagtctagacatctttaggaaatatgtccaggtctcctggaagcatttcctacctggtggtgtagaagattcctagggctgtctacgtggtgtttctctatttccctgacgtccaggaaagctgccccctcactccctaaagtgccccagggacatgggcagccctccta

SEQ ID NO: 132297 - DNA, 734 bp, Homo sapiens
gggtttgtcattgaatgttgtgcactccatcgtgcaatgatgtctgctgcctctctcacctgttgtgtcgtggctgctggtcccaaagtttctgcagtgtatttggctgtgcccaccagaacttgaagttgtttaaaaatcttaatacttggggggcttccagtgatatctgctccaaccagttggaggagctgttgcctgctctccattcttcttaagcattagattagaatatattaattgcttattttagagctggtgtcaatcgtgctgatttctttatgtggtcagagcaaaattcacatttttttaagtgttcagagactgcgtattgagagacgcataaggagaaaggtagtgtgagtgagcctgtcagcttgggcagtgttgggcagagcttttgtcccgggacatcatctgtgctcacagtgatcctttttcccattccatctcagcctagccttttaaaaaattatttttcctttgggcttgaccagtaagtaattgggaaaggggggtgctggagtcttggagatgctgtttgtgtgtgtgtgtgtgtttgattcattagtatcccgactccctaaaattgtatttgacagttcttgacaggttaccccgtaagacagtgaaaatatgactagttctctccgtgcatctgagtgtaatttccttattttatgagtccgaaagcagacataattatcacatgcaatgtagaatatttattctta

SEQ ID NO: 132298 - DNA, 381 bp, Homo sapiens
agggcagccgtagtgtgtggcttccccagggctgctctaacagatcaccatccttgccatggcttaagaagctgcagatttatttgcttacagctctggaagccagaagtccaaaatcaaggtgtcagtagagtctctctctctgaaacctgctgaggatgatgcccctggcctctccccagcctctggtgttcccagcagcccttggcattccttgccttgtagatgcaaaactccgatctccacctctatcctcacagtgagttctcctgcatgtctgtctctgtgccttcacattcctctctgtgtgtctgtgtttccatctccttatgaggacacccatcactgaatcagggcccactctataccagtaagacctca

SEQ ID NO: 132299 - DNA, 638 bp, Homo sapiens
ttggctattcctgagttgtgtcctttataataaatgggtaataggtgctttcctgagttctgtgagtcattctaaaaatgctcaaacctggtgaggggtgcggggaaagtatgggagtaggttgtgagaacctctgattttatagccagttgatcagaagtatgggtggcctgggacttgtgattggcacatgaagcaggggcagtcttatgggactgagccctttaacttgtgggatctgatgctaattccaggtagatacagtactccctccttatccaaggggaatatgttccaagacctccgtggacgtctgaaaccatggacagtactgaactctatatacactatgtttttttttcctatacatatatacctatgataaagtttaatatataaattaggcacaataagagaataacaataacaacaaaataattataacgatatactataataaaagttatgtgaatgtggtctctctctcctatcttattgtactgtactcaacatgcccagctgttttgtatttttagtagagacagggtttcaccatgttggccaggctggtctcgaactcccgacctcaagttatccatctgcctcggcctcccaaagtgctgggattagacgtgagc

SEQ ID NO: 132300 - DNA, 775 bp, Homo sapiens
agagtgagtgtgtgtgtgtgtgtgtgtatgtgtgtgtgtgtgtgtatgcactgaatgtgagtatatgcttatataccgtggttataagtgtatacatgtatatgaacatagacacatacatgttccttaaaagttcctagtcctatttactggatatttaaatttgaaaaatattttgccttcaaagtgattccagctaaagaggtggttagaattctagagttagagaaacatgtgatccttaccatgctttggagactctagcagaacatggcactcagtttcctttatactgttttgttcttttcaactcctcagctcttgtgggatctctggcgcctaactctaaaagtcagtttgtttttcagctgagctgcttacctttattggcatttaattactgttttactctgatgcctatttttttatctaaattagtaacactgtataacatttatatagttttatgagttcaacactttatataatcattcacatagtcctttgacatacatgagtattatgttctacttttacagatataaaaactgaggttcagtggggtggtatgtgttatgctttacagcacacatttgagtctgagtcagtggcacagttgggaacagaagtcaaaattgcatctagtccgtctcctcagaggacaaactatgatgcttccttctcgattacttggaaggagaagaatgtgggctttccctcttaagtcctttgaattagcagttgctgcagattgcctactactgtttcttgaatt

SEQ ID NO: 132301 - DNA, 742 bp, Homo sapiens
gccttggcctcccaaagtgctgggattacaggtgtgagccaccgcacccggccaacatcagcatttagaacctaaaccctaaataaaatctaactcactctttaagctttggcacaaatgtcgtttcttatttgctctgatgtgggtcagtcttccttcatgctcccgtaagtatcagagttccttcaatcatttgcacatatctgtgttataatgttgaactgtaattatttatttaattttcagtctctctcctttaggcagtgagctctccaaggacaaaggcatattatttgtttagctagcttttagagatagggtcttgctaagtttcccaggctggagtgaagtggctattcataggtgagatcccactattaattagcacagaaattttgacctacttcatttctgacctgggccagttcacctctccttaggcaacctagtgggcctcactcctgggaggtcatgatattgatgccagtttagtgtggacacccagtgagcatagctcactacagcccagaagttctgggctcaagctgtcctcctgcctcagctcccaagtatctgggactacaggtacatgccaccatgtccagcaacaaagacatattttagttatcctgtgtttgtgtctgtctcaatacctagccttagtataaacatttagcaaatgtttattgatgaaatggatgaagtcccacctcccattttggaccacttgcccttctcagaa

SEQ ID NO: 132302 - DNA, 350 bp, Homo sapiens
tgccatgtaggcagtgccttttgccttctgccatgattctgaggcctccccagccatgtggaactgaaagaattcatagactctcctcatgtggtccaatggctctcatgccagatgaagggagagaagttaagtagctgaagttatctctctgcccccaccctcccccacccagccatgcacagttggtgtcatcacaaggaggactggcagtggaggagcagggagagccaacggaagcattacttggcatcagaaaaatgatctggtctacagctcccagcgtgagcgacgcagaagacgggtgatttctgcatttccaactgaggtaccgggttcatctcactggg

SEQ ID NO: 132303 - DNA, 240 bp, Homo sapiens
tgatattgatgactgatgggtaagtagcatatatagcacagctacgctggacatagaaataatttatgtctctggcaggacaaagtggaacaacaaaagatttaatcacacaaatcaggatggcacacaatataaaaactacgaattgtttatttctagaattttccatttagtatttttggagagcagctgaccacacttaactgaaacctcagaaagtgaaaccttggatgagggggg

SEQ ID NO: 132304 - DNA, 473 bp, Homo sapiens
agttgagaacattttatttgctctttttgtaaccagtgcaacaaatctgcatggtatttaaagttcagacccagtttctttatttaaaaaataatactctgttatactgtattttatgatacataggaggtattcttgcatcagacatgataggtgtttaataagcaacactgctgggtcaaactgggttgcaaagtagattccattatatctacattgagataatgataaagatacgcaatttagtactaatgtttggagtatgagtctcaaaagatcagaacccataacataaaagttaaataggcaacatcactggcaattttttgtatgattaaattgcctggtttttaaattgttacaagtattttctttataaatagcagcattcctagagagtccttggatgatgtgtacctggtagttacaggagagttctggtgttcattaatcaaaccacccttgatttctgt

SEQ ID NO: 132305 - DNA, 421 bp, Homo sapiens
aagctcaaaatgctttgaaaggacaacttaaaaaattaaaacacatcattgtggtcctttgtaaatgaatggacctttgttaaatgactcactttggtcaataacttctccaccttagggatatttagccatctgcttctctctcctttcatgtctgtgtctctctgctttctttcaactccatctttccattcacatagtcccacttggaccctcgtcatgatgtatctcaaattttaacatacgcttgttctctttttcatgcatgctgaatggcatccctcttgagctagatgctaaaccattctgtattcattttccttggaagtttacatatatatatatatagaaaaatatatatatttaaaaatataaaatatatatgtatatttcctaaagtcccaaacacttaaatcttttt

SEQ ID NO: 132306 - DNA, 141 bp, Homo sapiens
ccccagtaaagcaaggacttctctgatttcttcacaggacactttgcatcagcctcctgaggactagagaaggttcagggcaagcactgccacttgcatttgttgttgccaagctaattgttcattacttgaatttctgtg

SEQ ID NO: 132307 - DNA, 801 bp, Homo sapiens
tcctgtcatgcagctggttttgatcagacatcctgtcatgctttatttggccattcacaatcaataataaaagacttctttaaggggataggtctcagttcatctgtttgtcccataggcctctgccctgcctgggaagctgctgggtactggaagggtactaaggtactaagtggaagatgctttagggcacatgagcaggagcagcagttagactgagggcccttcacgtgttagcataaggaggccagtctcttactagaagccctcgatcaatcctaggcagttcattcaatttatttaaagaggcctcctgtctttggctgtggttctgcagagcttttgggccctctgtgtgctgcaggtatgggatagaggagctggctggcacaggaccttcagtggatcccttaattttttggcccttctgaatcttctcgacgcctgctgtcttcaggttcagagcctccctggggtcccacaccattccttgtctctcatttccaatggtgctttcttgtccttgtgctccaaacttcagcttctgttgtcatacctctctgaactttttctatcttccggaaattatttgaaatgaaatcccttgttctctaatgatccttccttcagcaaaaaaaaaaaaaaaaaaaaattttgggggccgggcccggaaagtttaaaccctccgtgggcggcccccgagggagaatggccactgtgcagggaccggcaggaggtgtggttccaaaaacggggcggggtgacaccggggcgggctggtcacaggcgcaccgcccgcgg

SEQ ID NO: 132308 - DNA, 260 bp, Homo sapiens
tagagggtagggttgaaaccacaccccgggcatcttggcaaccctcccagagccagatatcgtttttccatatgtagcagcctctgctgtcgcctgaaggtttgtgtcccctaagcaaattcctatgttgaaatgctaatccccaagtttatgacatgaggtggagtctttgggaggtaagagccctgaagaatggggctagtacccttccagaaactgagaactgggaagaaacaatggaaatatatatcttttttttt

SEQ ID NO: 132309 - DNA, 396 bp, Homo sapiens
ctattgcattagcccaaaaactatctgttgagtgaatggatgagccatgtcctcccactcactgcctggatggccttggcaagttgcataacatgtgggagcctccggtttctcttctgtcaaatggagatagtaaataaaacagtaggccgccgcggtggctcacggctgtaatctcagcacttggggaggctgagacaggtaatcacttgaggttcaggagttcaagaccagcctggctaacatggtaaaaccccatctctactaaaaaatacaaaaattagcctggcatgctaggcaacatagggagagctcatctctacgaaaaataaacaaaaattagctaggtgtgatggcacatgcctgtgatcccagctacccaggaggctgaggtag

SEQ ID NO: 132310 - DNA, 413 bp, Homo sapiens
attcacatgttgaaatcctaaatcccaaggtgaatatattaggaggtagggcctttggtcataagggtggggccctcatgaatgagattaacgcttttataaaatagtccccagagagttcctttgtccttttgccatgtgaggttaaagtgagaagacagctgtctatgaggaattgggccctcaacatatatcaaacctgctggcaccctgatcttggattttctagtctccagaactgtgaaagatatgtttttgttgtttataagccacccagtttatgatattctattacagcagcctgaacagactaggacaatacgaaaaaatttatggaaaaagggtagtctatattggtactatgacttaatcccacatacacccacacacaacacctgaagtgccggaatgtt

SEQ ID NO: 132311 - DNA, 490 bp, Homo sapiens
aggaggactgctcagccctgaaccctgaaccccagattcatgcatcaccttcaaatggggtatctaactggcacctgcaaccaagcttctttctggtcctccctaaaacacatgcttccccccgagatcttgccactttcattaattctgtcttttcagtcgctgaggccccaaacccagtcagccttgactcttcttgtcggtcataccccataatttcccacccagaaatcctggtggctccatcttcaaaatgcatccggaatctgagcatttctcactggtccgagccaccatcatcactcgcccctcactgctctccctcctcctgtccttccccatggaggcttctctaccacagtagccagagtgaccctcttagtacacaggtgagaccatgtcacatctctgctcagccttcccctggcctcccaaatacctccctcagagtgaaatcaaaagtcctgcccctcctccagatatgccactg

SEQ ID NO: 132312 - DNA, 449 bp, Homo sapiens
gaccctaggagtttgagggctgcagtgagctgtgctcatcctactgcactccagcctgggtgacagagtgagacccagtctcttaaaaaaaaaagtcattaacctacaagtgttcttagagtctgtgtttgatagttaatgattactacttaaagactgcttacgaaggccgagtatagtggctcaagcctgtaatcccagcactttgggagggtgaggcaggcgggtcacctgaggtcaggagtttgagaccagcctgcccaacatagtgaaaccccatgtctattaaaaatacaaaagttagccaggtgtgctggtacatgcctataatcctagctactcaggaggctgaggcatgagaatcgcttgaacctgggaggtggaggttgctgtgagccgagattgcaccattgcactctagcctgggcaacagggtgagacggtctcag

SEQ ID NO: 132313 - DNA, 870 bp, Homo sapiens
catgatggtgggtgtctgtaattccagcaaattgggaggctgagtgggagaatcacatgaacctgggaggcggaggttacagtgagccgagatcatcacaccattgcactccagcctagatgacagagcgagactccgtctcaaaaacaaaaaaacaaaacctagtgcaaatggactggtaagccttccaaattattaaaaataataataggtatactgcaatttatattgccctttccctggcaatattacatcaacatgatacttcaaagcccaccttaattcagtgcttggtaaataatctttacagctagattgaggttctgaaaatagtagtgcagttacacagagcatatttgatgttcacttgcacgcccatacccatgttgatactggtgaagaatgaatttcagaaaaggataggcagagccagtcacggtggctcacacctgggatcccagcactttgggaggctgaggcagaaggatcgcttgagcccaggagttcaagatcagcctgggcaaaaatggtgagactcatctctacaaaaagttcaaaaattagccaggtcatggtgggacaaaactgtagtgcagcttacttgggagactgaggtgggcaggtgttgacccaggtatgaggaagcggtgcagaggagaccgctcaaaacgaaagaggaaggcaactgtaatgcttgcacagattaggaactagaggcaggacaacaacaacgattcagccagggaatctgaccaaaaaacacgttctaaggggccaaaaaaaaagagggcgaggaaataaccgggcagaaaaaagacgaggaaaacaacgagtaaggaatagaaacaggagagaagaaggacaatacga

SEQ ID NO: 132314 - DNA, 915 bp, Homo sapiens
caagccgggtgctgtgattcttgactatggctgagtagaatcaaccgtcagtgcatgcagatagctgggccagaatctggagggtggaactggccatttaaaaaagttctttagatttaataatgtggagctatcattggtgggagtagtattataactcagagcttcctaacttcctaagctggcagttcagtagtggctgataatgagtgaatcatgtatatggcaatcttacacttgttattgtatgtcttttttatagccatcctagtgggtttgaagtatctcgtgattttgatgtggtttacattctgactaatgatgttgagcatttttttatgtacttcttggccacttgtatttctttggaaaattatctattccagttctttgcccattttgaaatgggttatctcatttattacagtttcaggagttctgtatatataatagacataaagccactataaaataaattaattacaaatattttctcccattccaggaattgttttttcactttattgatggtatcagttgcagcacaataattttaattttgatggggtccagtttatctatttcattttgttgcttgtgcttttggtgtcatatccaagagaccattgcaaaattgaagattatgaagatttacccccagtattttcttctgttttatagttttagctcttgcatgtaggtctatccattttgagttaatttttgtgtatgatgtgagataggtgtctagcttcattctttcacctgtggatatctgttttcctagcaccatttgttgaaaagattattttttctctgttgaattgtcttgacaccctggtgaaaaatcgattgaccacagatctatgggtttatatctgaagtctcaattctattacattgatttatatgtcg

SEQ ID NO: 132315 - DNA, 861 bp, Homo sapiens
caagccgggtgctgtgattcttgactatggctgagtagaatcaaccgtcagtgcatgcagatagctgggccagaatctggagggtggaactggccatttaaaaaagttctttagatttaataatgtggagctatcattggtgggagtagtattataactcagagcttcctaacttcctaagctggcagttcagtagtggctgataatgagtgaatcatgtatatggcaatcttacacttgttattgtatgtcttttttatagccatcctagtgggtttgaagtatctcgtgattttgatgtggtttacattctgactaatgatgttgagcatttttttatgtacttcttggccacttgtatttctttggaaaattatctattccagttctttgcccattttgaaatgggttatctcatttattacagtttcaggagttctgtatatataatagacataaagccactattattgatggtatcagttgcagcacaataattttaattttgatggggtccagtttatctatttcattttgttgcttgtgcttttggtgtcatatccaagagaccattgcaaaattgaagattatgaagatttacccccagtattttcttctgttttatagttttagctcttgcatgtaggtctatccattttgagttaatttttgtgtatgatgtgagataggtgtctagcttcattctttcacctgtggatatctgttttcctagcaccatttgttgaaaagattattttttctctgttgaattgtcttgacaccctggtgaaaaatcgattgaccacagatctatgggtttatatctgaagtctcaattctattacattgatttatatgtcg

SEQ ID NO: 132316 - DNA, 206 bp, Homo sapiens
tagcctctagatgcacagcagtgcctctgaaatgaatcacccatggttaacaacgccaaatgccaaccattagcagatgagaaacagaactgaatcttgagtgtttggagagcagagctcttttgatcacaactagagcctccttcccctctgccattacaggagcgtagatatatatttccttttgactggtgtgcctgtcttac

SEQ ID NO: 132317 - DNA, 640 bp, Homo sapiens
cttgcaaagacccttcttccagtttctgggcaaggaacaacccattttaactcaaaacacaaaacgaccttttatcctttaaagaaatactaccaaatgtaacacaccttgatttacattttttaaccccagattccggatggcgaacacggaatgcaaaggcaggtaactagtttgggtctgacagtccccattcagcgaccgagcctgtgactccgttcaaaatcgacagtgcagtagagcatctttcccttttctgcccattcaccattgtgacaaaaatcaaagacgaaaaaaattatctactcatttctgaatactgagagaaatgtgctcattttgcgcctgactccgtggatcttaaacactaacatcccgctcagagatcaaccatgatttccataccaatctcatccactcagttttacttagcaaacacctttgctgcccttccacagtgagaaaaatggtgcaccaatcccacggatgacaggttgctactcgactgtacccgctcaatagttttatcagcaaccggaaaacttcacaatcggtcaattagctacttaaatctgtctaagacaaactaagaaagcatctcagtttcacctgtcttaaatctagtctaagacaatccccc

SEQ ID NO: 132318 - DNA, 396 bp, Homo sapiens
acaatagtgaaaagaataagagcagattaaacattcattttcctgtaacatattatttattttaaaaatgtcatgtgaggtaaggctgctgtgtattctaattggctaaaataaaaggtttaagtgagaataaaggaacacagatatgacacaaaatagcaagtgggaatctaagtttttctaatagaaagttgaaatggcaaaaaaaaaaaaaaattcctcaagaaatctcaccataacgaaaagaattgagcaattcttaaaaatattaaaaagctcccaaagcaaactgatttgtatggtcacttgaaaagaggaagagtaattgctgtttctaaatggtgagttgaatgtttagaaatctacatggaaattactttgttagtatgtctcctc

SEQ ID NO: 132319 - DNA, 379 bp, Homo sapiens
atttgggcatccatgaaacctgctaagtaacagagaagcagtaacagtccccagaggtttaagacaagtatgtaggaggggaaaacttacatttgagaaaattctgttgactttaagttttatgagaattgagaaaagaacactgttatttggtgttattggctgtatggcttaatccatttagaatgaaaattactgaccaagtttttataccttcaggtataaaggttcatgcccttaactcctgaatatagatgtttcatcattaagctcgtttcccatgtggacttggggatttctggggaatactgaagaatccattcagttctcttgcctattataccctatatgctatgggaaaatgagccttctgtgagcc

SEQ ID NO: 132320 - DNA, 781 bp, Homo sapiens
aatgattcattcatttcttcaatcaattcatccatccataattcaattatccaatccctttttattaaatgcctactatatgccaggaatcatggtgggcacgacatctatgagcatatacaagaaatctctgccttcaggaaggagaacgctgctgcgaggagggtcttctctcctttttagaggaaggagcaccgttgtggaggcagacaatgatatatccaaagcttggctttcaactagctgtctgaccagacactctaaaatcctgggggacagagaaagtgtgaaagtttttattcattttaagtttgcagaccctggcacagtgtgtggcttataaatgatgcccagagtacatacatggatgggatgagggaatgaatgagccgaagaacaccgagtgcagaattcatcgaaaggggtgagggaaagagcggaggtttttaggtaggaagcatgtgagcagaaaacccagttaggaggcttcttctaattgagggataattagagttggaatgagtggctccatctggctctttgctgagagtctgcgtgctttatttccttcaattttcacaactatccttggagatagggactggtttttgaatcttatttatttttacataaacacatgtctgtaaaatttaactaactgcaaaattatggtcatatagatgatgattagtgctctattttttctttttataatttgtttacatgcattttccccctcctgtctctttattagcaattcctaaccttgttaagaagttca

SEQ ID NO: 132321 - DNA, 532 bp, Homo sapiens
caagcaaacagagagagtcagtggggacaggcctggagcacacagtatctttgtaggtaaggctgtggaaaggtgtctgtgtgattggggcagagcaacccacatatccacgttcccacaccactgactgataatgcagttgctagaattagcaccaagagcctgttctttctgcagtgtgcctccaataccctctactgagaaagtttaacatcatgctcactgtagaggatagatgatgcttaaaggaattctcttctttatctcagagcaggtattgaaggattaatttgaagcttagtggcattaaattgataaccagcatagacatttagattgtttatacttttccactattatagtcatcaatgctacagaaacatccttcttcatattctttttgtatatatgtacacagactttttctggcatatatatggaggcatggaattgataagtcttggaataaactgtataaatttttaggagtaggatcaataggtcaggaggcatgcatattttaatgttgttt

SEQ ID NO: 132322 - DNA, 192 bp, Homo sapiens
tatagtagttcagtattgattaatgaatgagtcagcttttgaaccttttttttttcacatagggtatagagaattgagttcatcatactcctcagttcaaggcctagtagggaatgttgtcccatttagagtgcatttccctccacgttctccttcccctttgctttctaacatgtttgatgcatatactct

SEQ ID NO: 132323 - DNA, 200 bp, Homo sapiens
ctgtggccaccaggcctaaaatattgatgactcagccttttcagcaaatattttgaaacccctgatttaaaggactgacaagtaaaatattgtatccaaggcataacaatttttttctttttcttttttctttctttctttctttctttctttttttttttgagatggagtcttgctctgtcgccaggctggagtgcagt

SEQ ID NO: 132324 - DNA, 129 bp, Homo sapiens
tattcctgttgtcctgccctagcttgcacggcacacacacctttgctcggttcctggaatatgtctattaattttcttacttgaggcctttatattttctgatccttcagcttgtagtgctttaacccc

SEQ ID NO: 132325 - DNA, 530 bp, Homo sapiens
tgctagtggtgttcttggtatcttttcatatttgaggctttggtgctagtgctgaagtattacactcaccatccaaggttcacaggacttttgttttaatatggaacagatggaactgtttagttctgcatctttgcaggtatgcaaaatgtgcctaccaggactctgcttcatatccatggaaagcaagaagtaatacagtaaaactttgtctggctagaggctttgaaggaatggagtgttctggttgaattctattaacttggaagtatgaaggtgaaaaaaattcagaacttaaatttcctttgaatgcaatttgaaaatatagccaataattccacttttcttctctagtaagtttggacattctgatctacttggtgttttatgatagaacccctagtgtgcctgagacttactttgtgaagatacttttttaaaactttagctgtaagaggatgtaaatgactttgtatgagatcaagctggatgagaactaatacttgtaaatatactttttagactaaact

SEQ ID NO: 132326 - DNA, 176 bp, Homo sapiens
ttagttcttaaacacttggtatctatccatcgttaataccttagtgtaaattattttaatcagtttgacatcacagtatcacagactggcctgatttaagctaagatcagacttcactgaccgagtacaaaggatgttggtttgctgaaggataaaggaggaggcaaaggaatagg

SEQ ID NO: 132327 - DNA, 340 bp, Homo sapiens
atttcctccagatgcctctaaaattgtcctttcagtgttggttaaggatccaaatgagagtcaactattgcattttattagtgtgtctcttgagtcttttaacctataaattatcccttcttccccattcttagaccatttttcaaattgaagaaattagatcatttgctctacagaatttcccacattctggatttcactgtatctatggtattaatgtatccctctatcaacctctattttttggtaattgttagatgtgacacctttattagattcaataggtggtgagtgcttccgactgattcacatcagaggatgcataatgtctggttgtctc

SEQ ID NO: 132328 - DNA, 174 bp, Homo sapiens
caggactcagttctcatactctgggcaaataagaatctcctggtaacttgctaaaatcacatatccatgtgaggtctaaaaacatctataaaatgttctgtattccttcctcaaaaagctgtaagttatacatgttaaaatataattacttactgacttaatagtttgtttagc

SEQ ID NO: 132329 - DNA, 199 bp, Homo sapiens
ctcatcccagcaagactgcactagaaacttctcaaccaaagaatcctatctcattttcattcatttccctgagtacattttggggacacacagtggagtcggggctgagcaattgcttgttgagaaaagattgcattcttctctgagctcctagagcccaccataggtcccagcactcaggaggcactaagtgatgtgt

SEQ ID NO: 132330 - DNA, 272 bp, Homo sapiens
accatgtaagaggttcaccgctttagatttgcagctgtagggaagtagccagactattaggcgaacctggggggctgggatagtagtacaagggtaacagacacttgtatgctcttaccatgtgccaggtacccttctaggtgttttacatgtattcactcatttaattctcgtaaccacccatgagttagatattgttgctgtgtccactttacaattgggaaactgagccacataacttctctagattcacatgggcaggatttaaaccg

SEQ ID NO: 132331 - DNA, 560 bp, Homo sapiens
caaagtgaaagataaggagaagttttaaggtttaaagaaccaaaagtacctggagcaaggcccctccctcccgtttcctcatgactattgtgcttagaagaaaatcgcattaatacataagctttcaggaatggaggaggaaataaaggatattaaagtctgtcctcggcattcatttttttcgttctatgagaaaacaatgattaaatcttgagagagggagaggcgtatctgatcaggacatctgttttataaaactgcaaaggtgcttttcagcaagtatttgaggcaatggatcaagctggcaaagccatagagatgggatcaaagagtgtgctctctactgttcttttctaaaagtacccacttatcgcgagcacaaattgcaaagagatgaggtgtaagaattacctaaaggaatgaataatggaagaggtagtcaaaattagaaatttttaagtctgcacgtttgttgaacaccagatactctgagcccggtgtggggatgtggagctaaatagggttcttgcacttagttgtattcaaacacagaatctaaa

SEQ ID NO: 132332 - DNA, 301 bp, Homo sapiens
aggtgggtggagattggaagtaggctggtgatcacagtaccttattgatttacagtcattatcaaatctcccaggaaggagtttaattgcaattcaggagaaataatgatgtacaaaccaactagaaagagaaccaaaataggactgactctcaaagcacattgctagcatccaccaaaaagcaaagtggtagagaagcagtgagtgggattaggggtgagagaagatggagaacattaggacaggcaagataggcaatggttagatggaagctaaaaaataagaaaaggaagcagctatg

SEQ ID NO: 132333 - DNA, 791 bp, Homo sapiens
ttgagatggggtcttgctatgttgccccagttggtcttgaactcctgggctcaagtaatccccttacctcagcctcctgagccagcaatttctctatgtgttgtttcctgtctttcaatggtggccctgctgctgctcttccaagaagcacatacgctgtgccccaggcctcccactgaaggccttatgcctctaggcagaatggtgccatctcaggtggggtccatagatagtttaaaataccagccaagctgaccaaactctttatgccagagtccaaccatgggcctctaactcccacatcatttgctctgccctgttcgttcctcagattccaggaagcctgagcgcctcattcagccagatgatgcaatttacacctggctttgaggaaaagcagggatgtggaaagacaagagcagctttcagaattagcttttgttagtggaaagaccctggatttaaagccagaggacaagagttttggagatagcagtgctgctgccacttagtgcctggaattctgttacccttactctcatctataaaacagaagaaataagctctgccccacaggactggtgtcaagatgaactcatgtaaacgtatatagctcggcaccttggtttcataaatattagccttttcctcacatggaaaagtgctttgagaaccagaaagcccgataaaccatatggcttttgatgaaaacgaggcacattttggagtcagatataggagagaatctccctttatgagctgtgcacctgaggcaaattgcacagcctctc

SEQ ID NO: 132334 - DNA, 202 bp, Homo sapiens
ctgacttggggtgctgcagtgggtgaggtgaccctgcaggtatgtggcaggtgggagatcagataagcacgttattatgaccccctgcacatgtgactgtggtgaccagctgtaattgcttcagatgatttcaggtggcaggtgttacagcctccctaggggaaccccagacaaagccactgagcaggcactttagggaaag

SEQ ID NO: 132335 - DNA, 392 bp, Homo sapiens
ggtgtttcaccttctcagtggattttcttaatattctaaaataagcatgaatatttcttaatattctaaaataaacatttattgcaatgatatttaaaaagcttttaattttcaaagtccctctgacagccatcatcattcctaactgatttctatttagccctctatcctcatctctcattcctctatcacagaaccagacacagaattaagaagtactttatttatttatttatgtagcccaggctggagtgcagtggcacgatctggctcactgcaacctccgcctcctggttcaagcaattcttgtgcctcatcctctggagtagctgggactacaggtgcccaccatcatgcccatctaatttttttgcattttagtatggacagag

SEQ ID NO: 132336 - DNA, 713 bp, Homo sapiens
ggcatgaatacccacgatctttactctcagtacacagcttcatacttacatgcagggttacaatgtgcttggtaaggcaagaaatctctaccaacacaggatttttttgaggattaactaagaaaacataaataagcacacagcctgttgcctgatacacgttaggaactaagtaaatgcttattttgttttaaaatcattaccctacattctggaaaatgtgccatggaatgggacgggcccacaatggtttttctatagagtttttagcgggttctggggacaactattatatattttaaaatagcaacgctcacatgctccatagtaaatcagttggccaagttaaaaatagattctaaacatagcaagagcagaaattcaatctaagatactaagtcatggaaagcagttgacagtggttgcaacagagaaaaggaagcgcaggcacacactgattctacatgtggataaaattctccaacctccatttcaggtttgttctattctctatagcagaaaacatgcacacatatatatgcatacatgcatatacatatgcatgcaaataaataaactaagatgacacattctatttatctgcaatagcaccatttacaaacctattaattttgagattttggtacttattagcacgtactagatacactacaacaatatatagttcctcaacatttttaggtgtaagagag

SEQ ID NO: 132337 - DNA, 256 bp, Homo sapiens
ctcttttctcttggcaaatggttatatgacataccttgtagggttgtttgttaattttttcaagtatcttttgtttgtcaggcacggttctaggtaatgggaattcagtgacatctgtagttgctgccgttaatctatatcctattgagggaagtagaaaataaacgagtgaacaaacaattgcagtcatgtctggtggtgatgattctaggaaggatatgaagagtattagcagagattggggaggtcagacaag

SEQ ID NO: 132338 - DNA, 729 bp, Homo sapiens
atgatcgtagttcactgtagcctcaaactcctgggctcaagtgatcctcccacctcagtctcctgagtagctgggactacaggcacatgccaccatgcccagttaattttttaatattttgtagagactgcttcgctatgttgcccaggctggtctggaactcctgagctcaagcaatcctcccacctcagcctcccagaatgctgggattacaggcatgagccactgtgcctggcccaacatttcttctaatggcatcctgccaggtgccctcacactctcctccttacttgctcaagtttcagagtatggttctgattagcataaaatacaatggatctgttacctctcctgtcctggacattgctattattagtgaaagctgaggctgaataaaataactctttctgagttacttcccccacctcccttgatccagatcaacttccactatgtatcttcctagttctgatgtttaccctcagcttctagccattccattttatgtattttctctgcctttcccttggcatttgggtatttagataccatatattgcatgtttctacttggccaggtacatttatttactcattgagtcctcctaacaaccctatgagttaggtactactataattcctgttttcttagtagaggaaatagagcttacccaatgttacattgtaagtgatggcagcagaaataactcaggcagtctgactgcatcat

SEQ ID NO: 132339 - DNA, 778 bp, Homo sapiens
gtagaaaacacaggtgtcattgaggaaattgtgacttgagatatgagactcagcatcccaaagttagaaagaaatggaccttaagcttgacactacctacttccactctgctttcatttcctccgttctgtatccacttcccctttcaagaatttctcactaagccattctttttggtatgaaaaacagtaagctagatcataaccaaaatgcaggggccagcttgggatttcattcaagatatttggcttgggatttgggaaatattcaccatgaataaaattaatattacatatacactagcacaaattactaatgaattgtcttagtctagtcgggctgccataaatttattttctcacggttctggagaatagaagtccgagatcaaggagacaatcaacttagtttctgatgagggctctcttcctggcttgcagacaaccaccttcttgtgatctcacatggcctttcctcagtatggtaacatggaggaagaaagagccctgttgtatcttcctcttgttttaaatataattatttattttgtttgtcaaataagaattgtatgtatttactgtgtccatgttgttttgaaatattctgtttatcttcttataagggtaccagccctattaaataaggcgcccatccctgtgacctcatttaaactttatcacctcctcacaggccccatctccaaatacaattacattaggaattagggcttcaacatatgaatctggggccaaggacacaaacattccatctaatatta

SEQ ID NO: 132340 - DNA, 206 bp, Homo sapiens
gtggaccagacaaatctctaagtccctacccctctttgttaaatggaaacataactggaccacttcctaatgttatacctgaagcatcaacacagcacccagcaagaaactctcagtgatgttcatctttcttttttttttttttttttttgggccttggattggtgcccagggtggccctgaaccccggggccaaagggattcct

SEQ ID NO: 132341 - DNA, 471 bp, Homo sapiens
tgagaagagtcctggtctggtgagtttggaaacctggcttctggcctgtttctaacactgtatgtccttgggccagaccctttcccctggggtgctgatttcacacctgtaaaatgaagaagtttgacttgcacagtgcttttcttagactgtggtaaggggtggatgtgggggtagtgccaagaccaagtgaaagaggcttctggacctccatccttgcttcagccagagcagcgtgggttcatttcatttttggattttggtttgtgggaagaaagggttctcttgccggtgtgtgtgtttctgataaacaaagaagtgtggaagtggctgaatgagatgacccaaggactctttctgggaagatgcaggaggaagtaggtgagctgaggggaagctggtggggataggcctggtggggcctggggagaaggatttgaaggctcaagtcacacggtgcaggatgggact

SEQ ID NO: 132342 - DNA, 616 bp, Homo sapiens
gcaccctcagttctctaagcctagcaccctcagtactctcagcttagcactgtttagtactctcagcctagcactcagcactctcagcctagtactgttgatactctaggcctagcactgttagtactctaagtctagcactctcagtactctaagcctagcactcttagtactctaaccctagcatgttagtactgtattcctagcactcgcaatactctagggctagtactgctggtaccatatgcctagcactgttagtactttgtaagcctagcactcttagtactctggacccagcactgctgacactctctgcctaccactatgagtgctctgtgccaagcaatattctagactctgctgacacagaggtacagagaacaaagtccctggcttcgtggagcctatttgcttgtaggggcaagcagagtgtgttagatgtcatgacatctccatgtgtgtatctgggcggatagtgacaagtgaagagagaaaaatgaagctgaatgagcatgtggcaaatgggggtgtgtgagcggtgccctcttagatggtatgcttagggaggcctcactttgggtggctgcgccctgggagagatgcaagagcaggg

SEQ ID NO: 132343 - DNA, 513 bp, Homo sapiens
tcccagggaatcagccagatctttgaatttggttcccagtggagacttttctccctcctccagtggggcctgcagcttggaaagggggtctgtggttggcttctcatttcccacgttaagcttccatccttctctcctctggcttactgatgattctgactcctggcagggggaaggggaaaagagaagaggcaggaaaggagctggaagtccgtacttggttaatgctgtggcaagctggcatttcagtggcaggttctggtgggtgtgtaaacctagttctttctctctaggcacaatcttgtggatacttcagagagcaccattatttctcatctttggggatctctgagttgctggtcccttgaagctggttgcctaataagactccttccttagttccctggcatctaagcagtgccgtattagtttgctgggactgccatgacaaaatatcacagactgaggggcttaaaccagcagtccccaatttttttggtaccagagaccagt

SEQ ID NO: 132344 - DNA, 424 bp, Homo sapiens
gctgcccaactgaggggaatgaagtaagcagccaggcttcagctgtcagatcttcccaatctgcctcaattgcagggagccccttcacctgaggtaatgcccttcctggggtagcctgtatccagaggctgagacagaaaagaaagacccagccattgtagcctgacacaggatgctttgttggtcttcactctacagagctctccaccaggttcagggaaggtttgtaaggcctgcatcacggctcaatgtctttctctgccaaatcctacttttgccccttttcttcacaggcgttgatccctaataaacatcttgccctccacactgttctaccgtctgctcttggggaaatcaacctgcaacctacttcaaggcattggtagatattgctatgtcaagatagatttggacaatggggtga

SEQ ID NO: 132345 - DNA, 193 bp, Homo sapiens
agaggatcccccgtccataatgtgtgccataggtggtaggtagaaggagcttagtagaagtagaataaaatatttaaagcgcggatggaaataaaacgcgcagtgaggtcgcggctggaaggaaagaagtggggagaatatgagagaaaatcatattttgaccggctgggagaaatctagtagatgcccgacg

SEQ ID NO: 132346 - DNA, 239 bp, Homo sapiens
acacagacctaggggtccagcccggagctttgcaatgtccttctagttccctagaggccctctgctggctagcagcccttgggtgacagcttgctttcttttcacatctcttgcctctcaaatctgtttaagattctgcttcttaaactgtctgaattaggtgtctccgcagatttccctgtggccagctacctcccaaaccaaacacctatgtaagcccaccttggttgttgttcctg

SEQ ID NO: 132347 - DNA, 449 bp, Homo sapiens
atttctcagtcatgggtgactttctgattaattaggatcatatcctcagttttgtctgaacttagatgtatctcattagaatgggaagaacagagactaccattcatatctgctggatatagcttaccttttggcagaagaaaaaaagtctactaataccatcaccacaggagaagaaggatgtgtggactgcatggtaaaaaatggggaaatagaactaggccctaagagggttggaaggaaggaagttcaagattttgtaggtactgaaagtcagagacactgaggcatttgtaaggtaccatgaaggtacccctgaaatcagaaataccttgtcttggaaccaatcagatgaatagcattcttttaccctaataaagtacaattttgtaagacatctatacagtgaaagaaagtatgaaaacatggtaaattttgtttaatagaag

SEQ ID NO: 132348 - DNA, 275 bp, Homo sapiens
tcaagcataatgttgagtgacagataaacagataacaaagatcacacctagaccggataaagactatgcactgtattactatatttacataaagttcaaaaaataggtaaagttaatctgtggtgtcagaagttgggagagtgactgtccttgtttggtggtaaagacaaagtgagcaggaagtggacttctgagtggattggtaatgatatgtttcttgatgtaagtacctgttacatggttgtgtctatttttttttttttttttttttttga

SEQ ID NO: 132349 - DNA, 323 bp, Homo sapiens
gctgggactacaggcgcccgcaaccacgcccggctaattttttgtatttttagtagagacggggtttcaccattttagccgggatggtctcgatctcctgacctcgtgatccgcccgccttggcctcccaaagtgctgggattacaggcgtgagccaccgcgcccggcctaaatagtgtttttaaatgacttttaaacataaaagcttgttggatatttgtgcaagcctgccacatacctctttttcacaaaatcatgttacacattcacagtattataaaattttggccactctaagttattcttagggagcagagcacatg

SEQ ID NO: 132350 - DNA, 407 bp, Homo sapiens
tcttcctagttcaaaacagaaatgcccaaacgtatatgaacataagaaaaaatcttaaatagcactcagcctggaaaaaagggagcaatccatatttcctactgtttcaggaatttctaccagaaactaggtgagaaaaaagaaagtctccaatagctcgttcacaatgtatctaagaatttgtttctaggtcctaaaaggaacttatgagcatgaacatccattaacactaagggctcagagaaagctgtggtactgatgggagatcagctcctgaaagcccttcctgctgaaaatcatgatgcttgcaataaacatgttcaagaagcaaaaggcaaagtgtcagaggaaaaaaaccctgaaatccaggggtttttaatatttcccctcatctgggaggaagatcc

SEQ ID NO: 132351 - DNA, 392 bp, Homo sapiens
tgaagatttcactttgttaattgtgcaacaaggtttccttccttcctttcttccttccttcctctctctcttcttctttctctgtttctctttctttctttctctctctctctttctctctttttctctttctttcccttcctccctcccttcctttctttttctttttttcttttttttttttttgagacaagatctcactctgtcatctaggctggagtgcagtagtgcaatcttggctcactgcaacctccacttcctgggctcaagtgatcccccccacctcactactcaggaggctgaaatgggaggatcacttgagcctaggaggtcaaggctgcagtgatcacaccactgcactctagcctaggtaatgaagtgacccctgtctc

SEQ ID NO: 132352 - DNA, 621 bp, Homo sapiens
gaaatggatcaagtgattttttcattgtgtaaacatcatagggtatatttacacaaactagatgttatagcctactatacagctaggctatattgtatagcctgttactcttcggccacaaaactgtacagtgtgttactgtattgaacaccataggcaattgagacacaatggcatttgtgtatctaaatatagaaaaggtaatgcattgtgccaccaaatcaacaacagctatgatgtcactgggtgataggaatttttcagtgccattataatcttatggaaccattgtttcatatgcatgcagtttgctgttgatcaaaatgtagttaagcagcacatggctgtaattaaaacactattgtttgttataatagaaaataaaatttttctttttagcctctgtattaataaagagcactagaaagtactttgtttatcagataatgaatatgtttgacagatgtacatacgtatttatcaaatgaatctttttttgtgggggaaaccttaactaagaataggcctgtgttttaaaatggctgcctggaggacaagtgctataaggaaatttcagtggtatttgcttgacctggcattaagtggggggaaaaacaagcc

SEQ ID NO: 132353 - DNA, 299 bp, Homo sapiens
agatcctcctgcctcagcctcccaaagtgttgggattacaggtgtgagccaccatgtccagctcggcagctttataatcctaataaagcatttgtgggatttgggtccatctttaaatgtcctcaagaagcatatgtgtgtgtaactcaaactcagaacttgagttctgaaacccaagttcatgattccttccttcactgtgatgtgggcacttctccaaagtgaggtattagtggaatggaacttggatttttaaaaggtgtagtggaatgcttatataatattataactaagtaaaa

SEQ ID NO: 132354 - DNA, 468 bp, Homo sapiens
tcatctttgagacgatcctgtagggcacttagcataatactaagcaacatggagagggctcagtcaaagttagctctcctgactgcctggggcatggagaggagagttctgcctagcatttctgagatatgcatacaaatcgatggagataatgtacattgacaattttaatgagcaaagaaataaaaggtacatgttaagggaaaagtaaaaaaggatttcaagtctatttgcacatcttcaattttccagtgaccagggagggcaagaaggccaagcccctttgcttgtacttcactccccatgacacgggacaggtggcagctctgcagtggaagtggcagaccagaccaaaaaattcatgtcaaaaccaggatttctgtagatcagggatttccggtttttctgcctgaacttaccaaatagtaaacgtttatctccttttctttctttctcccttccctccct

SEQ ID NO: 132355 - DNA, 761 bp, Homo sapiens
ttaaattttttgtcttgaaaaagttatttgtcattaaaaatgtgttaggtaatgaatttgttatttaaataatttttaaaatttcttacatagtaaatattaacaaatataaatcacacaaaacactctttaggtgttctaaataaatttttttttttgagatggagtctcattctgttgcccaggctggagtcaggaatgcccttcagttgttccaagttgaggcacagcagctagatcatcattcccctacatggtctagccactggctaaaagtgtcccctgtgaggcagtgttaacactgaatagccctaattatcttcactgaattacagactgatacggctgacattaaaaatgggaaagtcgagactttcagagcacagacacatgcaatctccaaattcacagaatagttaagacaacactagcaaaaaaggatacacaaacataagtgagtagaaaggaatgggtgtacttcatatattcagatataaggaaatacacacaatggtgacaatcactgtgctttatgcctggtgttatggtgactgttttacatatattacctcatctacttctcggaatgtactggacaggtactatcatcatacccaatacacaaatgacacaaaacaggttaagtaactcacccaaggtgacaagtaaacaactggcggagctgggcatcaaacccaggtctgcctgacttcagagcccatgtgcttaatcaaccaatccattccatgatctccctattt

SEQ ID NO: 132356 - DNA, 318 bp, Homo sapiens
ttaacacacactggtccaatttctgccccatcactcttggcaaaatccattatgacctccaggctgctaaatccaagatacagttcaggcctcaatctgctcatcctttcagcagctttcacagggcttctgagtagggttgagcagttttgccctgcacacaggtgccctgcagaggaatgaggtgggctgaatgaaactccttttttaaaaattcttggctggcatagtggctcacgcctgtaatcccagcactcacgagcaagacaaggtagggccgatgacgacggtacatgcggaggttcgagaccactctgt

SEQ ID NO: 132357 - DNA, 405 bp, Homo sapiens
tgcctttcccttctggatacccctctgggctccaaggggtatgtgcccgcagccccaccagcacttacaggaagctgcctttttggttttagctgctggttctcctcccatatttatttcatacagtattgcccacctctgagaccattccctagggcaaccacatacaatccattcatttgacaagtatttgttgagcatcccagcactggactgtgctgtctcccatgaagttgtaatctagaggctggaggaaatagcaaacatgtaacctcagcttacagctgactggggctgtgagggaaagggatttaccattatgatctaacaagggaacctgcttttggtgcctaagaacatggtatttaagttaagtcctgttggacaagtagaagttagccaggt

SEQ ID NO: 132358 - DNA, 713 bp, Homo sapiens
tgtaaaaaaaaaacccacacatatttaatcatttatgtgttccagtatttattatctctgactcttttgaaaacattgctttgagcatagaaagaaaccctatactatattttcctaattatatatggaagttttcttttcacaatagaattatttctggaaactaagaacattttgttgtttttaattaaacaggttcttcatttacttatgcttaaaaagagttattcatctacctattccctaagttagttatttattactgtgatttatttactcattatggatgtgattctgtatgttttctagccattgcataacaagagaagacatgtaatagagcttttttaccaatatttaatggatttttaattgatgggtttatcagtctgtatccagtgccacaatgccaccaaacaagtactacaagtgggaatggggttaaaaatgtgaacacgctggttaagtgtttgcaataaatcgtatgtcagctctttcaactagagtgctttttttcctaagtaaacaatataatttgtacatttttccttcaagtttaatattaacttgcctcatatgttctgggttactttgctgatctatgcactggctttagcactctggagggggtacagaacttgttagtggaaaatcatattaagccccaaattcataagctataaaataaaagacagttgtctcttgtggaattt

SEQ ID NO: 132359 - DNA, 738 bp, Homo sapiens
attctaaaactattaatagtaaacataaaaatatataattctgattaaaaacaacgttaattctaaaactattaatagtaatcataaaaatatataattctgattgaaaaacaattttaaacatctctctttagttgaaagctctccctccttatggcttcaatgtgaattctgtcacaatgcacttagtgatgagcattaaaaagcccacttataatttgtcattagaaattatagtgagaaatattttttaagacacaatgctagttacatggatgaagccctctcccatccctcccctttgttataaaggagttgacattatcaagtgcaagggcttcagatttaagacgggaatttaggagaagactctagttaaaataagtatttgaagttatattgaatataggaatttcaataaagagaaattttgatgttattgcaatgagagtaaaattaaactgtagggtacagtcctaattttgtgtatgtgtagtaacaattctgcaagtattaagagaaataacttgttatttaagataaaaaaaaaacccatggatgaggtaatacaatctttactgaccatctagacacaagcttgttacaagaacataaccttggcagatggatctccaattgctgcatgtcaaaaagtcagtctgccacctcacctgagggtggagaacctcttataccaaatatacctataaaaaagttttcttttttctatattcaatg

SEQ ID NO: 132360 - DNA, 335 bp, Homo sapiens
ttttttttgcaaaaagggagtaaattgaagatactactaatcatgaaagcacaataagaagcatatcgatgatagggaaatgtgctcaatgcatatcttcaaacaagagcatgcagtcaaggctaggagtaatggctcatgcctgtaatgccagcactttgggaggctgaggtaggcggatcacttgaggtccagagttcaagaccagcctggccaacattgtgaaaccccgtctctacaaaaaatataaaaataagttggacgtagtggcatgtacccataatcccggctactcgagaggctgaggcaggagaatctcctgaactcaggaggca

SEQ ID NO: 132361 - DNA, 552 bp, Homo sapiens
atgttggtttggtgacaagggcattctcagacatttgtggcagcagcaaaaggggttcaagcctttcagataggatttagcatggtatcttaaattgttgcaccttttgacccattaatttcacttcaaggaatttaaagaaataagaggaggctgggcgcggtggctgacgcctgtaaccccagcactttgggaggccaaggagggcggatcacgaggtcaggagatcgagaccatcctggctaacacggtgaaaccccgtccctactaaaaatacaaaaaattagccaggtgtggtggcacacgcctgtagtcccagctactcgggaggctgaggcaggagaatggcgttaacctgggaggcagagcttgtagtgagccgagattgtgccaccacactccagcctaggcagcagagtgaaactctgtctcagaaaaaaaaaaaaatggtttccctatttagtatgagaacaatatattataatgagtgacatgattgtcagaattactcaaatttgtgtacatgttttctccactaaactgtaaacttct

SEQ ID NO: 132362 - DNA, 234 bp, Homo sapiens
agggaggcaggacactggtacataggacaatatacgtgaggaaggaaaaaaagcaaggaagatagggaatagtcccactacagcttccacgctggaaaagcaaatggggaatgggtcagaatgttgcccagacactgggaacatgcaacatcataaggccttgcccacctctgctccccaagaacctccgatagaactatcacctcaggcagactgtgcctccctgagccaagg

SEQ ID NO: 132363 - DNA, 412 bp, Homo sapiens
tccccagttgaactcctgaacctccctgaacacaagactcatacagccaaccaccctctcagcatttccatctgaatgtctaataagcatttcaaacttaacacgctcccaaaccaaatcttactttcccacccccaaacaagggttccctatttgagcaaattgcacatcatttacctactgctcaagccaaaatactttggcctcctctgtgagtcctctctttttgccacaatatacatacaacctgacacacacacacacacacacacacacacacacacacaaacacacacaaatctgtgagctcaatctccaaaacttacaccaagtctgaccctttctcatctccccagggatgacatgccactccctagctcccagccatcctcacttcttgcctgacatcctg

SEQ ID NO: 132364 - DNA, 606 bp, Homo sapiens
cattgaatggtataaatcaatatatttgagctaagcaagttaaaaaaaaatcagttatctttgggaacagcaatctattattgttgtttccctgagtgccactttaactgtttcactcaatggatggtggtttattcagttcaacacgtaatttgatttctattttcttaaaagtaaccatgttggacttacaaagagacttagaatgtcagaggtgttaggcagatattggataccagtaaaattggctggatatgtctgaaggtcggtggaattgtgagaaagaccaatggtgatggggttacattgaagaaaatataagatgagctaaatcaaaaccagatttgatttttttgggactccaccagaagtggaaactcataaacaagagatgaaacagaaaactacatttttattgattgtatgaaggagttaaatatatggagacatttcctcagtgatgatcaagggtaggtggggaaattccaataagaatgtaggatgacaataccttagatatgttgaaaaccaaggaggatggggatatagtatctttcgtattataataagcataaagttagcaaagggacatttaatttggttagc

SEQ ID NO: 132365 - DNA, 331 bp, Homo sapiens
tgtgtattttctcagatcctgaggtggtgtaatttcatatacagatcacataaaagggctaggttgtaataataaatcctggagtgctctttttaaaaaactttccattaagagccaatgttagaaacaagctgatagtatcctcaggaagtttgttttaattcaaccttggcctgattgaacaccagctttgtaaagtttgcgttgagatttgttttctgtttctgtgcactcacgtctgggatgaccagaacttctgctccacttgctagcaaattccctcgcgggaaaaccagcctaagggctccgcttacttctctggcttcccatt

SEQ ID NO: 132366 - DNA, 769 bp, Homo sapiens
caaaagggtgatgtgacatatttctgaaattcttttgagaagtaagcatttgttggtaatgaggatgtgattaatcctagaagatagaaagatagtggctgtagtgggttggatggcatgccgcctccacccccacccccccaacagacaccaagagatgtcagcctggaaggaaaagcatcttgcacgtgtaattaaggatctcaagatgagatcatcctgaattatctgagagaggcttaaatccaaagacaaggggtccttataagaaagaggaaggcacagaagaagagaaggtgatgcgaagacagaaacagagtgcagtaatacatctacatgccaaggaatgccaagggttgtcggcagccacgggaagccatgggtgagaggcatggaacagattttctcacagagcctctcgaaggaaccacactacaaacaccttgattttggatttctggcctccaaaactgagagagaataaatttcagttgttcagaggtaccaggtttatggcaatttgttatagcaatgaatacagcgactttttggtgatgtttacatgatttttggggacagatgggggttagtaggtggcagaaatttggggagggagcaagatgaacttggtaatttggatatttactgtgacttgattatgaaaagttttgtgttacaactaccagaagatagagagcagtgtttggtttgattagatgagaaaagatagattatgctataacaacctcttctgtcttgtcttgtgaac

SEQ ID NO: 132367 - DNA, 214 bp, Homo sapiens
accgcagtggcatgaacatggctcagtagagaataggctgtgtgcatcttagctgcatcttccatgctctgtgcatcctccccgtgctctgtgcatcctcttgtgttctccatcagcactctctacttaccttgctaaatgccttttctttcaacgccaccttaccctgcccaccccatggctgctacctgtttattttgtcattttgctaaga

SEQ ID NO: 132368 - DNA, 346 bp, Homo sapiens
ctcggatctaccctaggcattacaccggacaatcccctatctaggccttcttacgagccaaaccctgcccctactcctcctagacctatcctgactagaaaagccagattctttcacagctgttcatctcagtgctgtttgcctcaagttcttcaagctcttcacttgctgtcttctgcttctcctcccctcttctaggctagctcgcactggagtcgctgtgtttctcctcttgtgttctccatcagcactctctacttaccttgctaaatgccttttctttcaacgccaccttaccctgcccaccccatggctgctacctgtttattttgtcattttgctaaga

SEQ ID NO: 132369 - DNA, 312 bp, Homo sapiens
aaagcaccctgtgcttcttccactaacagaatgtcgcctgacagggttagacacgttttcaggatcctttcatcaccaccgtatatgttcaaagtaactttatcctatagttctgacaaaaggttaggactggaaatacaaggttttgcagaaccaattagttattgtttaattaaaataatggtaatcttgtgtagagtataaaatgggagactctggtgatagattgctattgcccagcatgttaagtcctcatcattcatttcattgcatctgtgttgcctgtctaaaataaaacatctcctatgttcc

SEQ ID NO: 132370 - DNA, 254 bp, Homo sapiens
aggctttcaactgggcacttctgggacctccgcctcatgccgttcccccctttcaatgacagagtccctccttatccccactcccagctgatgatctggtttcttatttggctgagagaacagaagccgtggacacagagccagctcatccctgcatctgcttcgagtactgaagcccctccttgcccctccttgttgggtgagccgcctctgctcctctggcaggaggctccctccagctgtgtgccaggtcg

SEQ ID NO: 132371 - DNA, 555 bp, Homo sapiens
ctcaagagattaggagtcttgctcatgataaaacaggaagtggtgggtctgcgatttggaattctgcgttcctgcaggacaccctgccgcccgtgccacctgttctctcccacgtgatgggcgcaaacccctgagaggtcccttttcagctcttgctccattctcagctgttgtgtttccctctccagatcccccacattgacacaagagatgtgatgcctccgggcagttaagggtgaaaagcgaatgcaggttttctctctcctctttgcccccaatcctacgggtgaatgaggcttgcatctctcttttgctaccatcgagagcagcagctcagtcagctaacttccgtttgcctgccggcatgagttcagcgagtttccccttggttttagagccaaagcctgagcacttggtgtaactttgcgtgctgtcgccctgagaggcggcaccgtcgggccccgagtcagccgtgtgctcgaaccgccccactttaccattcctgttcctcaccggtcactctttagtagagtcccgtccacttaaggagcactt

SEQ ID NO: 132372 - DNA, 361 bp, Homo sapiens
tggatttgtggcgtaggggattcatcaaatttcagtcctgctatgtaatcttggacaacttgtttaattttctgaacctcaggttacttatctgtaacatgtaaatgacagtatgcctcacatatttattttgaggataaaaagagttaatagatataaaatcactggcatagtgtcctgcctataagtaaataactaagtaatagtgattcctccctccctttccactactttgttttcagtcagggagcatccctagttctaaaaatcagaatgtaccaaccatctggtctgagaccagctattcgacaccaaattgtgttttctgaagtcctggcaaaatagaattttcaaaagttag

SEQ ID NO: 132373 - DNA, 241 bp, Homo sapiens
ttggatgccaagactcaggcatggctctggatctcaccacagaaagaggttcagggggcctctctggctggcggcacctgggctgccctaaggattgtgtatccacttggggaccttccgtctttgctaccagaggcaaggaatcccacaactccatgtgccacagagaccttaaagccggaggaacgacaaacaccaccactggcacttggctccggaggcttccctttcgccctcacct

SEQ ID NO: 132374 - DNA, 785 bp, Homo sapiens
gttggtttttgtttgtttagacagttgattctccttaaataaatttaaataataagaaaaagacttttctgtttgcctacatgtttgccattttcagtgttccttgttttgtgtagatctagagtgtcatctggtgtcattttccatctgcctgatagacttcctttaacatttcttatactgctataaagaaaaatatagacataaatgactacataaatattaaaaaccttttagtgaagggtaccgtaaacaaaatttaaaaaaaaaaataaaaggctgggaagtatttacaacatatcaggtaataataacagcagtacataataataataataataataatagcagttattaaatgtgtactgtgctataccaggcactatactgaacactttacaatgtattttctcattcaatccttagaacagctgtttgaaggtaatgtactattatgacttccatcttacaaacaaggatatgagactaacagataagtggctaaagtctctaacaataaaagatctaaaaatcaatgagaacataattttaattggcagttcttcagaaaaatgtgaatggcttataaacataaatgtaatactcagctgctgtcatcatcagaagaatgaagttgtttttaagctcttcaactgtcaagagtaagaagcaatgttactaataccggcaagatatgaaaagacgctcatacattgttggaaataaaagttggtatagcttttcagagaccatttaggtttaactgttgtcatttaaaatatcca

SEQ ID NO: 132375 - DNA, 244 bp, Homo sapiens
aggggatagaagaaaaagttaaataataccaagaggaaaaatatcaggtaaatccagaaagtgagaaattttgtaggacaagtgacacaatttgtctaacaaatcagtggcatgaaaacagacactggtgctgggaagggggctgatatggactaaaagaggtgcaagaggcctaacaagcaaacatactctgtggggcttttgtttgattctgatttgaacaaatcatatgtgaaatatgggg

SEQ ID NO: 132376 - DNA, 165 bp, Homo sapiens
tcttatatacagttacatattagtttttaaaactatatgcatatatgtacatacagtgcgggggatggactgagacccagtactaccacgtaacaaatagcaaagcaatatactaaacacctagcaccctcaagtggccaactgtgttatttctcattctgatct

SEQ ID NO: 132377 - DNA, 646 bp, Homo sapiens
tgacaggtcagggcattgacaatctgctccctcttctatgcaaattacatgcccagcctggctctcagcaagcgacttctcctccccatgataaatcagtttctattgctaccaagaaaatgcatgcagtaagattgctttgttttcttttaaaaaatacattaattctactttttcgtaattaaaagttgccagaaattgtaagccctgcactcagttttgtaacagctttttgttaaggttgaggaagtgaaacagcaaaactaaatatctcctattaattatacctattgattttaagatatatcaagttcagaattttaaatgtgacaaactttgtgccttgcaaacatgaaggcattgtcttcaaacatgaagtaggtagcttgcataatttcctatagagctcttattaagagataggagaaaagcactgctccagaatacacataatttaggttttcagtatgaaatttgaagaaactgaatttacattattaaatcaactaatatgagagcttctaggggaattttgttattgttttattagctatgaaataacatattgcctttgatatctcattttctactctcagtattctacccacttctagccacctttcatcaccacctatttcagcaaaaa

SEQ ID NO: 132378 - DNA, 326 bp, Homo sapiens
caggggcccaaaggtgagactgagcgagtgggtgaactgtggatgaaatgttacgaactcaggtctgcggagatggaaaaaggagagaaggcagtgcccacggaatgaatcgaagagaaaaatagaattagtcactgaacagattatcgaattgagcaaatctttaaagaattccaaagatagaaatgtcttggacacagcaggactaatttttgtttcaacattggaaggcagccctgcttcttattatagacatgttcaaatagtttaagtgctggttactgaccagattatctggtacaaacatttatattacagcaagttac

SEQ ID NO: 132379 - DNA, 366 bp, Homo sapiens
atatccacaccagggattagtcatgagaaatcatatagtggtggctttaaatgtattaacatgaaaagatgtccaagatggatgaaagaaagctgccaaaatggtccttgtggcaggcaggactccacgcctgcaaacatgtaaaaccaaaacaatatcaaaaggaaaggaaaagggtcacaagtcaatctccccttcttcctgtgtttttaactcacttggtgaaaaaatatgctatgaagaatttaaaagatattttatgtagatctcaaactacccagacttctcacaaatgacagggctgtgactgaccccaaaataccagttaaagggggagtcaggcatctgtccaatactcgaccatgc

SEQ ID NO: 132380 - DNA, 390 bp, Homo sapiens
tctgcatgccttttgtttcatcctttttagattaaagattatttcccttgctatggaaaatggaagcaaagtaggaggtgagcagttttgcttcctctttgttccctggtatatttacatcatttcctccaaacaatgtgtctttccttttcttgttcttcttgatctatacagagccataaaacctccttctgatgagttcagcattttctccaagcctctgctcttctcaagctctagtttaagcctctgttcttcctgagctctgtttggaggcagccctgcttcctccatcttttatatatggtctaagtctgtacctggaggagcttccaagaagcttcactaattccctccatgcttcctccttccctctctcactgtgcaata

SEQ ID NO: 132381 - DNA, 208 bp, Homo sapiens
aaaagcctttcattagatttgagttgaaaacttgataaggtaaatcaggtgatatgcaatttctaaaccactagtcttttccaaatatgagttgaactcctcttccagcattttatatttcctgtagtatttaagtttctttagattcatgcagtcaaaccttgacaattatctccttccttctgaaatcacacaaaaatcttgtttg

SEQ ID NO: 132382 - DNA, 337 bp, Homo sapiens
ttttttcttttgagtgtctttatagactcaaggacttttatttaattcagggtgttagtaccatttaaatgttttctttgatgctcagattatcacagctagtcatttggacctttataccacctcctatgtccatttgatataggccattaatctctataagccttcctccttctcttggaatgaaaaggtatcctaggctcacctgtaccttccctactccagacctggcactgtttggactctgggcactgtttggactctgggcactgtttggactctgagcactgtttggactctgggcactgtttggactctgagcactgtttggactatg

SEQ ID NO: 132383 - DNA, 526 bp, Homo sapiens
atatactgtttatgtgaaataaaatactgtgagatttgtgtaactactgcacagtaccagaaaatacgtaagtgctgaaattggaggtagcagtggacagacattaaagtttgagagataatatttcttaagatgtaccaatttatttcatttccttatttcttgttactttatttggagaagaacgtttaaaaatctacaaaaatattttcctagaacttaaaaaatactgtcttataacaatttttgcttgcttgctgcttgtagtagcttctctaagctcagctcacttagacactggccaagcagaatgatgacacagatgcaaattacttatcgcttgctccattctagatggggagctaaccttccttcaatataatagtagagctctgtggcttcccaaatatgtctctgtcattaaactattcttcctgaactttaaaaaaaggaagtcttaaaagtcagcaccactacttgatggtacttgtacacgaatctcccagcctctcggttttacctgcag

SEQ ID NO: 132384 - DNA, 218 bp, Homo sapiens
caaaaggaacaaagtcttgatatacagtaacctggataaatctccagaaaatgatgctgagtggaaagtaaaatctcaaaggttatatagtgtatgattccatttatgtaacgttcttgaaatgacaaagatacagcaaaattagtagttgtcggggtttaggaggggtggaagtgggaggaaagttggtgaaactataaaaggggaacatgaggcat

SEQ ID NO: 132385 - DNA, 883 bp, Homo sapiens
catcacggccggctaatttttgtattttgggtagagcgaggttttaccatgttggccaggctggtcttgacctcctgacttcaggtgatccgcccacctcggcctcccaaagtggtgggattacaggcatatgccactgcacctggccttggattcgcattagagtaagaaaatgtaatgaacagtccttacaagaaacagagctcaaataggataaagatcataaatgaattcactttggctatttaatgcccactcaaccatggctgaggcttctcccacctttgttctgctattgtttctacctcatcatctgctatcccaccgtgctttattatagataagagaaaccttgtaggacctaatatttgtgaagagactacagaatcagcatatcaggggaattgtatatacatttttttctgtagaaaaggaaagcaatggtaatttaaacttatttatatatttttaatatagtttaattatttgagtatgttttaacttcacattgcaatgactaggcctttttatacacgttgggaggattataactatatcagatgaattcaggctttgattaatttgtgcttaacaaaatgttgataatttttatatatcaaaaatcttttaaaggtgttaaatttttagcagaaatagatgaaaagggaccagagtcttatttctttaaaatatctttcaaaaatcagagatctgagatcatctagtataattttcaagttatcattttgttttaaattttacactacttgagagtactcaaattattaacctctaaagagatacagaaaccatgttaatttagaatttggttttcaatatgtgaaaaccacattggctgcttttattaaaatttttggatttt

SEQ ID NO: 132386 - DNA, 609 bp, Homo sapiens
tgcattgcacaggggaagtggatttcaaaatcatagaatgaatccaaccagatggaaaaaacaatcaggtcttggagacaagaataaacagggctctcctagggaatgatgggagttcagtttggatgaagcaaagtgtcattccagggggcatgaggccggcgtgcctgggagcccgggtaggctggactttgtcaagggaacaacagagaactggagactcccggccctggagcgaccttccaaggtcatccagcctgaccctctcccagggtcatctgacctgaccctctcccagctgcgtccatcccgtctcacaccttcctagccatggtcctgggcaaatgattcccctagccacttacacacccatttctgctcagctgtagcaaaatcagtcagattaaaaaataagttttcaatacaagtgccttcgaggtcatgatgtgcttatgtactttatcaaaatgtgtatcacctactcctagtccaactgcagtacacacgtctttccatatccacgcacagcatatccttcgctaagatgctgctgatgcaaatacacatcactctgcactgtaggccctgtggaaaaatggcatcccacga

SEQ ID NO: 132387 - DNA, 434 bp, Homo sapiens
cacatgaaagtcagtgcggggggacatcatgcttaagtctttctcagcttgacctctctttgcagaaaccaggctctgtgttctgaggggtagatcaggaagggaatgtgatatgtaatgagtcatggtgtgtcgcagtggatagcacagtttcgaataagtgcaatattggcatataaacatgagggagactttgaggttggggtgagcagggctgaccccgtgtgtgtgtgtgtgtgtgtgtgtgtgtgtgtgtgtgtatgtgtaacttggggacaggatagggtagcatctttacatctttacatgtcattggcctggaatagggggtcctgaagggtttgtcgtaagaaagagaaagtgctcattgctgcaaggggagcacagccgggttctgagaggcaaaacacttccctcacttcccacccaagagt

SEQ ID NO: 132388 - DNA, 168 bp, Homo sapiens
ccctcctcattctcttatccacactctctccttaagcatccacatccagatcttcctgatgatgactccccagtggatatctccagtccaggcctcttccctgacccaactaacgtgcccacctctctattctacagcaccaccaagatgccttacaggcacctcaaa

SEQ ID NO: 132389 - DNA, 323 bp, Homo sapiens
aggtgttgggagactgggttgataatatgggggttgggagtgaggagagagtccagctttgaacatcttcttccatttgaggaatttaagatcatccagctagaaaattagaaatactaggatggagtgtggaagagaaattagtgctgaaaataaagagctcgaatcatcagtgtatgaatagtagttaaacctctgaaaatgagtgaacttgtcccctgaaaatgtgtggcaggggagaagcgaggttcaaggacagtgcccccgagaatgccagcatttaaagggtggaccctcggtggctcacgcctgtaatcccagca

SEQ ID NO: 132390 - DNA, 487 bp, Homo sapiens
caggcgatcctcccacctcagcctcccaagtagctgagaccacaggtgcgagccaccatgcccagctaatttttaaataatctgtagagacagggtctccctgtgttgcccaggctggtctcgaagttctgggctcaagcactcctcccaccttaggaggaaccttcaaagtgtaattcttcaaagctccaggattacaggtgtgatccaccatgccaggcctaatatgcaactttaatatgttgcttactgtgtgttttcagaacacctgagtgtctatgcaggtgtgtgtgtgtgtgtgtgtgtgtgtgtgtgtgtatagacacacaaaacccactttttatagatatagggtataggcatgtgggtttttttgggagagagggtctcgctcggtggcccagagcgggagcgcatgggggagatcagggctcagggcagccgtgagctcgggggatcaaacaatcctcccaccatagccggggag

SEQ ID NO: 132391 - DNA, 751 bp, Homo sapiens
caagaaaagggaatcgcattagcatcagaatttgcatttgcatcagaatttacaacagcatagatgctagaggtcaatgggatcagagagaaaatgattttgaaccttcaattctacaactaggcaaactatcaattaaataccctttcagacaaagattgtttgaggacatattacatgcaaaattagaaaggaatctgaaagacaggaaggcatggggtagaacgaacagtggaattagcgcagtgtggtgccctgaaaggaaatcccagctgcgggctgcacaggaaccagaaagccagttcagaaccttccccactgattacaaatctgggtgattttaaggacatggaaaagaagagtgtgtttcttctttggatgagaaatgaaaggcagaacaagaaggagccaggaaaaagaacaaactgaacacggcagtcatggcccaaatatgtacaatttaaactaaagtgcagcaactgatgggtttgagaagctgatggcgtgtgcagtaagagaatccctctgaccccaagtcttgtgtcttcttcaagcagcctaggtttagtgacttgagaatacagttgcttctctgaggggccaacctggtactgtttttgtaatcatagtactataagagctatgttgaaatcgacctatagacaaagcccagaagtcatagcttagaaatgcggtaaccttgatcatataaaagaagttaataaagtaaaagaattggtaatatatttga

SEQ ID NO: 132392 - DNA, 3650 bp, Homo sapiens
aaaagcaactgaggtcttaactttcagacgctgaattctcatctaattgaaattactgggcataatgctatatatagccaatgaagagattttgagctctcactcagtgccttcaagacatgtcgttttgtagtcagagaaaacagagatcaatgcattttcaaactgacagagggaacggatgctctttagtagcacatgcccaggatcgtgtgtgtggggcttgcgctgtgctgagaagctgaataccggtccatatgctccttatttactgcaatgttctttgcatgttactgtgcactccggactaacgtgaagaagtatcgatatcaagatgaggacgctccacatgatcattccttacctcgactaacccacgaagtaagaggcccagaactcgtgcatgtatcagaaaagaacctctctcaaatagaaaatgtccatggatatgtcctgcagtctcatatttctcctctgaaggccagtcctgctcctataattgtcaacacagatactttggacacaattccttatgtcaatgggacagaaattgaatatgaatttgaagaaattacactggagagggggaattctggcctgggattcagtattgctggggggacagataatccccacattggagatgaccctggcatatttattacgaagattataccaggaggtgctgcagcagaggatggcagactcagggtcaatgattgtatcttgcgggtgaatgaggttgatgtgtcagaggtttcccacagtaaagcggtggaagccctgaaggaagcagggtctatcgctcggctgtatgtgcgtagaagacgacctattttggagaccgttgtggaaatcaaactgttcaaaggccctaaaggtttaggcttcagtattgcaggaggtgtggggaaccaacacattcctggagacaacagcatttatgtaactaaaattatagatggaggagctgcacaaaaagatggaaggttgcaagtaggagatagactactaatggtaaacaactacagtttagaagaagtaacacacgaagaggcagtagcaatattaaagaacacatcagaggtagtttatttaaaagttggcaaccccactaccatttatatgactgatccttatggtccacctgatattactcactcttattctccaccaatggaaaaccatctactctctggcaacaatggcactttagaatataaaacctccctgccacccatctctccagggaggtactcaccaattccaaagcacatgcttgttgacgacgactacaccaggcctccggaacctgtttacagcactgtgaacaaactatgtgataagcctgcttctcccaggcactattcccctgttgagtgtgacaaaagcttcctcctctcagctccctattcccactaccacctaggcctgctacctgactctgagatgaccagtcattcccaacatagcaccgcaactcgtcagccttcaatgactctccaacgggccgtctccctggaaggagagcctcgcaaggtagtcctgcacaaaggctccactggcctgggcttcaacattgtcggtggggaagatggagaaggtatttttgtgtccttcattctggctggtggaccagcagacctaagtggggagctccagagaggagaccagatcctatcggtgaatggcattgacctccgtggtgcatcccacgagcaggcagctgctgcactaaagggggctggacagacagtgacgattatagcacaatatcaacctgaagattacgctcgatttgaggccaaaatccatgacctacgagagcagatgatgaaccacagcatgagctccgggtccggatccctgcgaaccaatcagaaacgctccctctacgtcagagccatgttcgactacgacaagagcaaggacagtgggctgccaagtcaaggacttagttttaaatatggagatattctccacgttatcaatgcctctgatgatgagtggtggcaagccaggagagtcatgctggagggagacagtgaggagatgggggtcatccccagcaaaaggagggtggaaagaaaggaacgtgcccgattgaagacagtgaagtttaatgccaaacctggagtgattgattcgaaagggtcattcaatgacaagcgtaaaaagagcttcatcttttcacgaaaattcccattctacaagaacaaggagcagagtgagcaggaaaccagtgatcctgaacgaggacaagaagacctcattctttcctatgagcctgttacaaggcaggaaataaactacacccggccggtgattatcctggggcccatgaaggatcggatcaatgacgacttgatatctgaattccctgataaatttggctcctgtgtgcctcatactacgaggccaaagcgagactacgaggtggatggcagagactatcactttgtcatttccagagaacaaatggagaaagatatccaagagcacaagtttatagaagccggccagtacaatgacaatttatatggaaccagtgtgcagtctgtgagatttgtagcagaaagaggcaaacactgtatacttgatgtatcaggaaatgctatcaagcggttacaagttgcccagctctatcccattgccatcttcataaaacccaggtctctggaacctcttatggagatgaataagcgtctaacagaggaacaagccaagaaaacctatgatcgagcaattaagctagaacaagaatttggagaatattttacagctattgtccaaggagatactttagaagatatatataaccaatgcaagcttgttattgaagagcaatctgggcctttcatctggattccctcaaaggaaaagttataaattagctactgcgcctctgacaacgacagaagagcatttagaagaacaaaatatatataacatactacttggaggcttttatgtttttgttgcatttatgtttttgcagtcaatgtgaattcttacgaatgtacaacacaaactgtatgaagccatgaaggaaacagaggggccaaagggtgggacagaaaagacattgcagtatgaaggaaggctttggtttgctcaaagtgccaggtgtagggatgaacctctgacgggctttctgcccaagagatgagatgagagcctcctcaccccagcagatgtccagagctgatttagctgcagagctctctgtgtcttttgctttaaagaaaaattgccagcactcgaacctcatcagccttcccattacccacatctgtaattggtacactttgaattttataactatgcacatcttttgatttcttaacaagcaaatgaaagaaagaaggaaaaaagaaaggaatccctttggagacgacatactatcagggaaggataagtgtgtagttttttgactggcatctgcaaagacaagaatttcataaaatttgcaagtgtatggaggactaacctcactgacaggaggggattccacctgggattagctttatgattgttgattgcctattttgccatttataaactgaaagaaggcactaaagatgagaataatttatacaataaaaatatattaaatgtatagaaacaaatttctataggttaaaaaagtt

SEQ ID NO: 132393 - DNA, 787 bp, Homo sapiens
ataaaggcaagtgtgaaccggacagcagacaggagaacctggcaccaaggagacggagaagctgcctttggtgcctcctgcctcctccctgctttgttccaataattttgtgctcgattacgctcgatttgaggccaaaatccatgacctacgagagcagatgatgaaccacagcatgagctccgggtccggatccctgcgaaccaatcagaaacgctccctctacgtcagagccatgttcgactacgacaagagcaaggacagtgggctgccaagtcaaggacttagttttaaatatggagatattctccacgttatcaatgcctctgatgatgagtggtggcaagccaggagagtcatgctggagggagacagtgaggagatgggggtcatccccagcaaaaggagggtggaaagaaaggaacgtgcccgattgaagacagtgaagtttaatgccaaacctggagtgattgattcgaaaggggacatccccggattaggtgacgacggttatggaacaaagactctgaatactttcttcatttgctaaaaagaagaaacagcaatcaagcagcgggttcctgtaaaatggagataaagttttcatcttctttatcttatctgagttttcttaatgcagcctcctctgcggcttttacttgcctttcgctcacatttctggtagccttgcatgagtgtattcctttccgttctggctgctcttcaatgcttggtatctctttaatttgctgtgctgttcttgcagaacatgtttcttctaatgcca

SEQ ID NO: 132394 - DNA, 3169 bp, Homo sapiens
aactgtgaagctctccgggccccaaactatcagtagcataaaatatgaccaaggtcaatgggacagaaattgaatatgaatttgaagaaattacactggagagggggaattctggcctgggattcagtattgctggggggacagataatccccacattggagatgaccctggcatatttattacgaagattataccaggaggtgctgcagcagaggatggcagactcagggtcaatgattgtatcttgcgggtgaatgaggttgatgtgtcagaggtttcccacagtaaagcggtggaagccctgaaggaagcagggtctatcgctcggctgtatgtgcgtagaagacgacctattttggagaccgttgtggaaatcaaactgttcaaaggccctaaaggtttaggcttcagtattgcaggaggtgtggggaaccaacacattcctggagacaacagcatttatgtaactaaaattatagatggaggagctgcacaaaaagatggaaggttgcaagtaggagatagactactaatggtaaacaactacagtttagaagaagtaacacacgaagaggcagtagcaatattaaagaacacatcagaggtagtttatttaaaagttggcaaccccactaccatttatatgactgatccttatggtccacctgatattactcactcttattctccaccaatggaaaaccatctactctctggcaacaatggcactttagaatataaaacctccctgccacccatctctccagggaggtactcaccaattccaaagcacatgcttgttgacgacgactacaccaggcctccggaacctgtttacagcactgtgaacaaactatgtgataagcctgcttctcccaggcactattcccctgttgagtgtgacaaaagcttcctcctctcagctccctattcccactaccacctaggcctgctacctgactctgagatgaccagtcattcccaacatagcaccgcaactcgtcagccttcaatgactctccaacgggccgtctccctggaaggagagcctcgcaaggtagtcctgcacaaaggctccactggcctgggcttcaacattgtcggtggggaagatggagaaggtatttttgtgtccttcattctggctggtggaccagcagacctaagtggggagctccagagaggagaccagatcctatcggtgaatggcattgacctccgtggtgcatcccacgagcaggcagctgctgcactaaagggggctggacagacagtgacgattatagcacaatatcaacctgaagattacgctcgatttgaggccaaaatccatgacctacgagagcagatgatgaaccacagcatgagctccgggtccggatccctgcgaaccaatcagaaacgctccctctacgtcagagccatgttcgactacgacaagagcaaggacagtgggctgccaagtcaaggacttagttttaaatatggagatattctccacgttatcaatgcctctgatgatgagtggtggcaagccaggagagtcatgctggagggagacagtgaggagatgggggtcatccccagcaaaaggagggtggaaagaaaggaacgtgcccgattgaagacagtgaagtttaatgccaaacctggagtgattgattcgaaagggtcattcaatgacaagcgtaaaaagagcttcatcttttcacgaaaattcccattctacaagaacaaggagcagagtgagcaggaaaccagtgatcctgaacgaggacaagaagacctcattctttcctatgagcctgttacaaggcaggaaataaactacacccggccggtgattatcctggggcccatgaaggatcggatcaatgacgacttgatatctgaattccctgataaatttggctcctgtgtgcctcatactacgaggccaaagcgagactacgaggtggatggcagagactatcactttgtcatttccagagaacaaatggagaaagatatccaagagcacaagtttatagaagccggccagtacaatgacaatttatatggaaccagtgtgcagtctgtgagatttgtagcagaaagaggcaaacactgtatacttgatgtatcaggaaatgctatcaagcggttacaagttgcccagctctatcccattgccatcttcataaaacccaggtctctggaacctcttatggagatgaataagcgtctaacagaggaacaagccaagaaaacctatgatcgagcaattaagctagaacaagaatttggagaatattttacagctattgtccaaggagatactttagaagatatatataaccaatgcaagcttgttattgaagagcaatctgggcctttcatctggattccctcaaaggaaaagttataaattagctactgcgcctctgacaacgacagaagagcatttagaagaacaaaatatatataacatactacttggaggcttttatgtttttgttgcatttatgtttttgcagtcaatgtgaattcttacgaatgtacaacacaaactgtatgaagccatgaaggaaacagaggggccaaagggtgggacagaaaagacattgcagtatgaaggaaggctttggtttgctcaaagtgccaggtgtagggatgaacctctgacgggctttctgcccaagagatgagatgagagcctcctcaccccagcagatgtccagagctgatttagctgcagagctctctgtgtcttttgctttaaagaaaaattgccagcactcgaacctcatcagccttcccattacccacatctgtaattggtacactttgaattttataactatgcacatcttttgatttcttaacaagcaaatgaaagaaagaaggaaaaaagaaaggaatccctttggagacgacatactatcagggaaggataagtgtgtagttttttgactggcatctgcaaagacaagaatttcataaaatttgcaagtgtatggaggactaacctcactgacaggaggggattccacctgggattagctttatgattgttgattgcctattttgccatttataaactgaaagaaggcactaaagatgagaataatttatacaataaaaatatattaaatgtatagaaacaaatttctataggttaaaaaagtt

SEQ ID NO: 132395 - DNA, 3526 bp, Homo sapiens
gattttttaaacttttattttagcttacagattgcagtggatcaaaggaaaatgcttcatgtattgagcaaaataaagaaaatcagagttttgaaaatgaaactgatgagacgacaactcaaaaccaaggcagatgcccagcccagaattgttcagtggaagcccctgcttggatgcctgtccaccactgtactaagtatcgatatcaagatgaggacgctccacatgatcattccttacctcgactaacccacgaagtaagaggcccagaactcgtgcatgtatcagaaaagaacctctctcaaatagaaaatgtccatggatatgtcctgcagtctcatatttctcctctgaaggccagtcctgctcctataattgtcaacacagatactttggacacaattccttatgtcaatgggacagaaattgaatatgaatttgaagaaattacactggagagggggaattctggcctgggattcagtattgctggggggacagataatccccacattggagatgaccctggcatatttattacgaagattataccaggaggtgctgcagcagaggatggcagactcagggtcaatgattgtatcttgcgggtgaatgaggttgatgtgtcagaggtttcccacagtaaagcggtggaagccctgaaggaagcagggtctatcgctcggctgtatgtgcgtagaagacgacctattttggagaccgttgtggaaatcaaactgttcaaaggccctaaaggtttaggcttcagtattgcaggaggtgtggggaaccaacacattcctggagacaacagcatttatgtaactaaaattatagatggaggagctgcacaaaaagatggaaggttgcaagtaggagatagactactaatggtaaacaactacagtttagaagaagtaacacacgaagaggcagtagcaatattaaagaacacatcagaggtagtttatttaaaagttggcaaccccactaccatttatatgactgatccttatggtccacctgatattactcactcttattctccaccaatggaaaaccatctactctctggcaacaatggcactttagaatataaaacctccctgccacccatctctccagggaggtactcaccaattccaaagcacatgcttgttgacgacgactacaccaggcctccggaacctgtttacagcactgtgaacaaactatgtgataagcctgcttctcccaggcactattcccctgttgagtgtgacaaaagcttcctcctctcagctccctattcccactaccacctaggcctgctacctgactctgagatgaccagtcattcccaacatagcaccgcaactcgtcagccttcaatgactctccaacgggccgtctccctggaaggagagcctcgcaaggtagtcctgcacaaaggctccactggcctgggcttcaacattgtcggtggggaagatggagaaggtatttttgtgtccttcattctggctggtggaccagcagacctaagtggggagctccagagaggagaccagatcctatcggtgaatggcattgacctccgtggtgcatcccacgagcaggcagctgctgcactaaagggggctggacagacagtgacgattatagcacaatatcaacctgaagattacgctcgatttgaggccaaaatccatgacctacgagagcagatgatgaaccacagcatgagctccgggtccggatccctgcgaaccaatcagaaacgctccctctacgtcagagccatgttcgactacgacaagagcaaggacagtgggctgccaagtcaaggacttagttttaaatatggagatattctccacgttatcaatgcctctgatgatgagtggtggcaagccaggagagtcatgctggagggagacagtgaggagatgggggtcatccccagcaaaaggagggtggaaagaaaggaacgtgcccgattgaagacagtgaagtttaatgccaaacctggagtgattgattcgaaagggtcattcaatgacaagcgtaaaaagagcttcatcttttcacgaaaattcccattctacaagaacaaggagcagagtgagcaggaaaccagtgatcctgaacgaggacaagaagacctcattctttcctatgagcctgttacaaggcaggaaataaactacacccggccggtgattatcctggggcccatgaaggatcggatcaatgacgacttgatatctgaattccctgataaatttggctcctgtgtgcctcatactacgaggccaaagcgagactacgaggtggatggcagagactatcactttgtcatttccagagaacaaatggagaaagatatccaagagcacaagtttatagaagccggccagtacaatgacaatttatatggaaccagtgtgcagtctgtgagatttgtagcagaaagaggcaaacactgtatacttgatgtatcaggaaatgctatcaagcggttacaagttgcccagctctatcccattgccatcttcataaaacccaggtctctggaacctcttatggagatgaataagcgtctaacagaggaacaagccaagaaaacctatgatcgagcaattaagctagaacaagaatttggagaatattttacagctattgtccaaggagatactttagaagatatatataaccaatgcaagcttgttattgaagagcaatctgggcctttcatctggattccctcaaaggaaaagttataaattagctactgcgcctctgacaacgacagaagagcatttagaagaacaaaatatatataacatactacttggaggcttttatgtttttgttgcatttatgtttttgcagtcaatgtgaattcttacgaatgtacaacacaaactgtatgaagccatgaaggaaacagaggggccaaagggtgggacagaaaagacattgcagtatgaaggaaggctttggtttgctcaaagtgccaggtgtagggatgaacctctgacgggctttctgcccaagagatgagatgagagcctcctcaccccagcagatgtccagagctgatttagctgcagagctctctgtgtcttttgctttaaagaaaaattgccagcactcgaacctcatcagccttcccattacccacatctgtaattggtacactttgaattttataactatgcacatcttttgatttcttaacaagcaaatgaaagaaagaaggaaaaaagaaaggaatccctttggagacgacatactatcagggaaggataagtgtgtagttttttgactggcatctgcaaagacaagaatttcataaaatttgcaagtgtatggaggactaacctcactgacaggaggggattccacctgggattagctttatgattgttgattgcctattttgccatttataaactgaaagaaggcactaaagatgagaataatttatacaataaaaatatattaaatgtatagaaacaaatttctataggttaaaaaagtt

SEQ ID NO: 132396 - DNA, 2277 bp, Homo sapiens
  misc_feature (2132)..(2132): n is a, c, g, or t
  misc_feature (2137)..(2137): n is a, c, g, or t
  misc_feature (2140)..(2140): n is a, c, g, or t
  misc_feature (2145)..(2145): n is a, c, g, or t
  misc_feature (2157)..(2157): n is a, c, g, or t
  misc_feature (2173)..(2173): n is a, c, g, or t
  misc_feature (2177)..(2177): n is a, c, g, or t
  misc_feature (2186)..(2186): n is a, c, g, or t
  misc_feature (2188)..(2188): n is a, c, g, or t
  misc_feature (2191)..(2191): n is a, c, g, or t
  misc_feature (2195)..(2195): n is a, c, g, or t
aactgtgaagctctccgggccccaaactatcagtagcataaaatatgaccaaggtcaatgggacagaaattgaatatgaatttgaagaaattacactggagagggggaattctggcctgggattcagtattgctggggggacagataatccccacattggagatgaccctggcatatttattacgaagattataccaggaggtgctgcagcagaggatggcagactcagggtcaatgattgtatcttgcgggtgaatgaggttgatgtgtcagaggtttcccacagtaaagcggtggaagccctgaaggaagcagggtctatcgctcggctgtatgtgcgtagaagacgacctattttggagaccgttgtggaaatcaaactgttcaaaggccctaaaggtttaggcttcagtattgcaggaggtgtggggaaccaacacattcctggagacaacagcatttatgtaactaaaattatagatggaggagctgcacaaaaagatggaaggttgcaagtaggagatagactactaatggtaaacaactacagtttagaagaagtaacacacgaagaggcagtagcaatattaaagaacacatcagaggtagtttatttaaaagttggcaaccccactaccatttatatgactgatccttatggtccacctgatattactcactcttattctccaccaatggaaaaccatctactctctggcaacaatggcactttagaatataaaacctccctgccacccatctctccagggaggtactcaccaattccaaagcacatgcttgttgacgacgactacaccaggcctccggaacctgtttacagcactgtgaacaaactatgtgataagcctgcttctcccaggcactattcccctgttgagtgtgacaaaagcttcctcctctcagctccctattcccactaccacctaggcctgctacctgactctgagatgaccagtcattcccaacatagcaccgcaactcgtcagccttcaatgactctccaacgggccgtctccctggaaggagagcctcgcaaggtagtcctgcacaaaggctccactggcctgggcttcaacattgtcggtggggaagatggagaaggtatttttgtgtccttcattctggctggtggaccagcagacctaagtggggagctccagagaggagaccagatcctatcggtgaatggcattgacctccgtggtgcatcccacgagcaggcagctgctgcactaaagggggctggacagacagtgacgattatagcacaatatcaacctgaagattacgctcgatttgaggccaaaatccatgacctacgagagcagatgatgaaccacagcatgagctccgggtccggatccctgcgaaccaatcagaaacgctccctctacgtcagagccatgttcgactacgacaagagcaaggacagtgggctgccaagtcaaggacttagttttaaatatggagatattctccacgttatcaatgcctctgatgatgagtggtggcaagccaggagagtcatgctggagggagacagtgaggagatgggggtcatccccagcaaaaggagggtggaaagaaaggaacgtgcccgattgaagacagtgaagtttaatgccaaacctggagtgattgattcgaaaggggacatccccggattaggtgacgacggttatggaacaaagactctgagaggacaagaagacctcattctttcctatgagcctgttacaaggcaggaaataaactacacccggccggtgattatcctggggcccatgaaggatcggatcaatgacgacttgatatctgaattccctgataaatttggctcctgtgtgcctcatactacgaggccaaagcgagactacgaggtggatggcagagactatcactttgtcatttccagagaacaaatggagaaagatatccaagagcacaagtttatagaagccggccagtacaatgacaatttatatggaaccagtgtgcagtctgtgagatttgtagcagaaagaggcaaacactgtatacttgatgtatcaggaaatgctatcaagcggttacaagttgcccagctctatcccattgccatcttcattcantattnctnggggnacagataatccncacattggagatgacnctgncatatttantncgnagantataccaggagatctgcagcagaggatggcagaatcagggtcaatgagatatcttgcggtgaatgagaactcgtcagagctg

SEQ ID NO: 132397 - DNA, 544 bp, Homo sapiens
ggattcagtgtgctcagattttcttaagaacatttataactatgcccgtgggggatattggtgtgtagttttcttgttaatgtctgcatttagttttgctgcctagacaacactgccctcataagaatgacttaagtagaatttctttcttttcaaattcctaggtgagttttgagaaatgggattatttcttccttaaatgtttggtagaatttatgagtgaagcaatctggtctttttttctttggcaagatattttactactatttcaacttttttttttttgaagacattagtgctatttaggctaagtatttcttcttgtgagagctgtggtagtttgtgtcttccaagcaatttgtccattttccattacatttaagttgtcaattaatagaaacaaaattgtacataatatttcctcattatccctttaatttctgaagagtttgtagtttgtgtcacctcattcctgataatggtaatttgtgccttctttcttcttttccagattatagtctgttttaggaaatgccttgtgtgg

SEQ ID NO: 132398 - DNA, 613 bp, Homo sapiens
ttaaaccctggattgttttgcaataaaagcaaccaccgtttattgagttaggtgcatatatgttatttcatttaagttggaagtaggaaggatctaagaaaaagcaatggatctgaagtagttgttttggcacaactcctagggctgggttttgggcttctgactcttcaaaacttacatgtcagcaaccccaagtattagtttcttgttgctgctgtaataagttgctacaaacttagtggcttaaaacagcacagatttattatcttatagttctagagtcatttattgtgttcctctgtgcattgtcagtgtaatggggtatgtatgccagcctgtatggcagtgtaagatattaaaataagaacaaagcccagttttcttagcactgcttgtatcaaagtgtgatttccatataagctcacatcatagggaatcagttgcaatctggtttcatggataacaagaccaggttatggaatatttttcattgcatgaagcctgttaaaagccagaagagaaaagcaatactttctgctgacattgggatcaactgagaatgtggtgggcttagtggtattaaataagataaaaagttgaaatcaaaatttaa

SEQ ID NO: 132399 - DNA, 208 bp, Homo sapiens
tgacctcaagtgatcctcctgctttggcctcccaaagtgctgggattagaggtgagccactgaacccggcctcatctgggtaccacgttctaatagcatctagtgtatccgtctcaattgctattgtctcttctttgtatgattatcttttagactcatacctctccttaaaaaaattaagataattttaggtgggttttgggaagga

SEQ ID NO: 132400 - DNA, 481 bp, Homo sapiens
ctggaacaaatgaatattcttaggaccaaaaaaaatgaatttcaacctcacaccaatataaaaatttaatagaagtgagttctatttccaaatgtaaattatatctcaaaatgtaaaaactaagattatagaacttctaaaagaaaatataggagatatttttggttcggcaaagatttattaataaaaagcacaaactatagaaaaaaattgacaaactgaacttcatcaaaatttcaaactttgttcttcaaaatatagtattcagaaaataaaaggcaagccacagacttggagaaactacttgcaaaatatatatccaacaaagtacctacatgtaaaatatagaaagaattcttaaaactgaataataagaaggcaaacaataatgtatcaaagaagatgtatgggtagtaaataactacgtgaaagatgctcaaaaacattagtcattagggaaatgcaaattaaaaccacaatg

SEQ ID NO: 132401 - DNA, 361 bp, Homo sapiens
agcctgctagaggcccagctcctgcctcgcaattgcctttgtaggccaagatcatgccgcgaagtggcctttcctagcctaacttttgctttttgacgcatactccggtcccaaaacttcctccagtcagccagtccaggccaagctcttcctcccaaaggcttctgcaggccaaaatcgtcctgaagtcaccctctgcaggcccagctcctgcctccaagtgctgtgtaggccaagctaatgcctcacagcacactttccaggctgagcatttccttttgtgcatcctctccaagccctgaacttactccagttggcctctccagaccaagctctccctcccagtggcctctacaggcca

SEQ ID NO: 132402 - DNA, 395 bp, Homo sapiens
ccgtggcccagagagatgctcataagatgcacgtttgctactcctccccatgttgtttttaaaaatgatatgattataggatgtactgtgtgaaagttacaaacacagtttttggtgccgacagataaatgattctcttgagtgaattacaaggatatgtataggttgagaagtgtttgcatttacttgcatggccaggttcagtggccggtagctaaagtgagtcaagtagcttgggtatttgtgtcaccatccaggatgtaacaaagcccctgggtctctttgctgagtgctccgtggtagaggcagtgctctgggctcccctgccagccctgcccttatgagcaggcaaagcatggtggaccagggtgttgatgaggatgaaacggccatgc

SEQ ID NO: 132403 - DNA, 423 bp, Homo sapiens
tgagaccctgtctcaaaaaaacaaaaacaaaaacaaaaaaaaaccagttggaggctgtacaatttcaacttgcttctgtcaaaaaacaagtttgcccttctatttgatatctgggtggtttttatgttctctacccatgggtgagcagtaagtacagctttataaagttatacttcactcacttttttatattactattttttaatttttatgttttgtagagaatagggtctggctctgttgcccaggttggtctcaaactcctggcctcaagcagccctcccagaggcctcccaaagtgttgggattaaggtgtgagccactgcacccctccacgcccgatatttctatttttttgactgatttgtgtgatcactgttttgcatggtgcaataattaggggttcgtgaaagaattttccca

SEQ ID NO: 132404 - DNA, 791 bp, Homo sapiens
cccagcaccgttgtggcacagggtagacttccttaaatgtgtgctcacatgatatttttaggctgtcccgcatgttagctcttcttttggttactcagcatctcttgagcagccaatatccaattatcatagtccttctaggactcattgctaatttccacatcccacttctctggcccataagtctaaatatgatattgcagtatagtattattaatgctgctgctgttttctaataagaagataaagtgttttaggtccagtttccttttttatttttatttttaaatttcttttcgaaacagggtctggctgtgtcaaccaggctggagtgcagtggcgtaatcttggctcactgcaacctcaacctcccaggctcaagcgactctcccacctcagctacttcagaggctgaggcagggaatcacttgaacccgggagggggaggttgcaggagccaagatcatgccactacactccagcctggtgagagagtgagactttctcccaaaaaaaacaaccatccaaacacacaacaaaaacaacgtgtgtcgcgccgccgcccgcggtcgcgaaaaacgtcttttaacaacccatcggtggggcgcgcggcggcccgccaggttacagctgaaccatggccatagcaggtcgcccacggaactcgggcccggcacaggtgcgtgtatttccccacaataaaaacgcccggggggaaccgccgttcgtcacaacccgaggacgtccagagccacagcgcctactacccagaacccgccagccaataaatg

SEQ ID NO: 132405 - DNA, 246 bp, Homo sapiens
atgacttgttttaagtgttctcaatatatctctttaacaatcaaaaaaatatcagcccccatagttgaaagtttgcaaaaaaaaaaaaaaaaaagaaaagaaaaataaattaaccatgaaagcttcagtgatactttgggctcaaatgagttctcaggcattttcagtaatataaggactctcattataacagctgagaaattcatagcaaaattactgactgtggttatgtatgtcacttactct

SEQ ID NO: 132406 - DNA, 303 bp, Homo sapiens
gaaaaatgggagtaggggagaatctccattttctcctcccacctttctgccagcccatttccccaagggtaaccattgttaagtttcttatgatttcttccaggagaaaaaaatatatattaaattgaggcataatgtgggagtcacattaatgtggtaagagctcatttgtttggaggtgactttctctctggaccatcaagaagaaagcactgacaaaaatgtcccagtgtaaatgaaaagcaacaagttggtagaacaaggagagggatgtcaagtcaaccagagtaggacagaataatg

SEQ ID NO: 132407 - DNA, 191 bp, Homo sapiens
ctagactcaaggcaataaatcatctctaccttcatcagattttcttttataaaaggaaagagaaattctaagttcttcaagacatggagaatattttcataatattctaggttattttgtagacattaaatctgaaaacctcaatatagtcaatgactgtattaaagcttgtagactggtttgggaaaaaa

SEQ ID NO: 132408 - DNA, 397 bp, Homo sapiens
attataactcataactatttcaacccaaggcatcggtttggaaatcaaagtttctagcttgcagtctattgtaattgtgctgaccatctcaaacattttacacatccttcataactcctttttacatcagtatcaaggaataaaatctttaacctgatgagtgtgctaaaacaataataattatataataaaatgtaacaacaatataataataaattagctcttaaatgtatctaaggttttctgatatctgggtaaatatgcatgttgaattcaaaagaaaacacagaaaataaattgaaacaaattttagacgctagtgtaaattaatatttccatttggaatacttccttgatggtagatggtaaaaatttttagatcaacacattttatgat

SEQ ID NO: 132409 - DNA, 362 bp, Homo sapiens
aatgcagtctttaaatatggaaacagaggaagtttacagtttaatcgaactatcatgccatcttttttttgagaaagtatctcactctgtcacccaggctggaatgcaatgacgctatctaggcttaccgcagcctccacctcccaggctcaagcaatcctcccaactcagcctcctgaaccatgcccagctaatttttctattttttgtagagacagggtttcaccatgttgtccaggctggtcttgaactcctgagctcaagcaatccacctgcctaggcctcccaaagtgctgggattacaggcttgagccaccactcctggcccatacaatctttttgaccaagctttcactatttac

SEQ ID NO: 132410 - DNA, 669 bp, Homo sapiens
cattattccaatttgaggagcaaaaactaaagatcattgagatccatggatctgctgccaggttcagtgactggaatgcacttgccccagcgggttcaagttctttgtagaaacagacccctcaaagatgacagcagctggcttcctccagaagtgtccttcaacactgtctttcagtactaagtgaccagtagaagttactccataaagaccatagccaggaatgaattatggggcttcctgcatatcaaatggttacctagggaaggcatatggtaaactagttaagcacagaggttctggaatcagactgcctaggtccaaatcctggctttacaacttactagctatgtgaccttaggtgatataacctctttacgcctcagttttcttacctacaaagcaggagaaataatagtaattagctcaaagggttgctataagaatcaaagaaaatcatgcaagcaaagcacttactacagtgcctggcacatagtaagctcttataacagttttctggtattattcttattaagccattttgtattatatccataaatgtagattcataaaatacataaaaatacaacttggtagaatttgtcttggttggcagcagttgaagcttctcatttgctaagaattaggtttagaatgttagaagggtga

SEQ ID NO: 132411 - DNA, 670 bp, Homo sapiens
gtcttagtgagtccaggatgctataacaaaataccatagactgagtggcttaaacaacagacatttatttctcacagttctagaggctcagaagtctaggatcaagggcttgcagacttgggcctggcagactgttttgatgctgatgaaagactgataaccatatggaccactaacatataccttaggtgtcttgataccccttacaactaaaccctgagaggcttacagcatccgtttataagaccctcttcaaaagcacagctttcttttagagtagattgcattttgtcatttcatcaacacatatgctttataacctcatcagaagtggtgtctccaatatcctccagaggtatttgggtgtgtttaacggccagaggatattggcagatctcattttctacaggctttgtgctacagaggcttatcttgaggagggccggtggcatccaggtgatgcctgttcctctacagagaatttaatacatcaattttatgtgttcagcaatttaaaggaagacatgaacataatgagggaaaatggacagtatgaaaaagaaacaaatgaagcctctagagttgaaaaatgttgtttctgaaatgagtatttcactggataggattaagaacaacctagacattgcaaaagaaaagcttagtgagtttg

SEQ ID NO: 132412 - DNA, 320 bp, Homo sapiens
ggaggtcgaggcaggagaatcgcttgaaccccggaggcagagactgcaatgagctgagattgcgccactgcactccagcctgggagacagtgtgagactccatttcaaaaaagaaaaaaaaataaaaagaaatgtgaccctattccgtggaattaattgttctttgtcatccccggtccccctcttctgttcaatgggcccagtgggtcctactgttctgtgcagctgtgacgtctccaccatcttccatccccccatatcttcttcagcttctacctatccaaccaatgtcagatttttcattatgagcggacagggtt

SEQ ID NO: 132413 - DNA, 672 bp, Homo sapiens
gcaactgaaatacttgtttgttcttagaaggagagaggtctaggtttggctcattcacagaaaagaacttttcaaaataaaaagagatttattataagtgtaacagattgatgtggggcactgattaagtatttttttctgccccatgttactgaatagtgaagaaataactgggtagatggcttcttgttgaggaaaagttactgaactcacaaaggtcaaatttaagtaaggcctctatagcactgtagggtgactacagttaacaacaatgtattctatattttcaaatagctagaagagaggattttgagtgtttccaacacaaagaaataaaagtttcagatgatggatatgctaattactatgatttaattataatacatcttagacatgtgtcgaaatagcacactctactccataaatctatataattatttatgtgtcaattaaaaaaataattaaaaagccaggagtggtggcacacacctatagtcccagctacttgaaaggctgaggagggaggatcattttagtccaggagtttgaggttgcagtgaactatgattccaccactgcactccagccagggtgacagagcaagactctgtcccaaaaaaaaaccaccaaacaaactttttgggcgcctcggccccaaaaaatttttagaaa

SEQ ID NO: 132414 - DNA, 745 bp, Homo sapiens
attaacccacttgctcattcactcactcatgctgtttctccatcatcatctgttttcatgttaacaagtcccagagggtcaagtgtcgagtgtcgggggctagggaggcaggtgtgtactgcatgcccagaaggtagcgagtagtctccaccccacatcgctgctcctctgcatgtctgcggcagccctcattcaagcaccgcgctgagtctcacagtctatgtctgagcgggagagaagccacagggagtccttaaacaggctcacagagtgaggaagcaggtctggagtctggcagagcagccaccatggctctgcagagcacgctgggctctgagtgtctgcagtgccacagtgggagcgggtgaggcaggcaggacgagcctcatcacaggcccagagactcggagagcagaagggttcgggaggtttctcttctatgttccaaaatgttagttttctcacttgttgaataattaaatgtgtgccacccagatatgctcagtttggatcactaagctttataactgtctgttcatttcttagcttagacttaattaaagtgatacgcttctcatttaaatagaacagggcacctatttagtattttggactttgccctaagtgtgtttcatgctatggcaatgcattcggatggaaagtaggaagaatgtggaaaagaccaggattcagagaatccacaggtactttctggagctttgcaaagaaagatttaaaaagaaaa

SEQ ID NO: 132415 - DNA, 354 bp, Homo sapiens
gtggccacccaaactgctggttttacagatgtgagctactgcgactggaccaaatgatgccaaatatattcctgaaaacaaacatacacacaacttctaaagtgtgatcaatgcatgactagtctagctttcatagttcaaataagactaaatatttgtgtggattttaaaagatatacctattccaggggttactggtaaggtttaaccaacaatcaatcactaaggcaattatttctggatcccatcacagacatcagtaacaggcagctggggagacatggaaggtttttgactatggcaaagatatgatccatactcagatttaagaaaaattactggggggaggctggg

SEQ ID NO: 132416 - DNA, 288 bp, Homo sapiens
tggcagtgaccaacctcaactcaaaaggtaagtatattttgtgttcctaagaatccagaaagttcaaaatttctattaagaagttgctgctggccaggcacaggggctaacacctataatcccatctctacaaaaaatacaaagaagccaggcatagtgacaggcacctatagtcccagctactggggaggctgaggcaggaggactgcttgatcccaggaggcagaggttgcagtgaaccaagattgtgccactgcactccaggcccagagcaagaccctgccttta

SEQ ID NO: 132417 - DNA, 153 bp, Homo sapiens
aaagcatgactgtgttcaggtactgaaatgggatgtaaatgaaggtaactaggaaggagctggctagcatttcaactgaatatcaacctggatagtgacatcatcactgaagactgtaattggtgggggtaaccatatgacccagtttgcctg

SEQ ID NO: 132418 - DNA, 293 bp, Homo sapiens
ccatccctatgcatcagtggcctcattgccacagaccagtagcctcattcctatggaaccatggtttcatccccaaagatcaataatttggtcttctaaaatctgtagccttcagcacattaaccaataagcccatcctcatggaaaaatgccccaccccattagatcaatagcctaactcccagggattggtgccccttttgcaatgaccagaggctccctatcttcatctccatagatcaatggtcttatccccaaagatcaatagcccagcctccaagaatcagtaacca

SEQ ID NO: 132419 - DNA, 727 bp, Homo sapiens
gggagacgcgggtgcggctcacccagcgttacctccgctactttcaccctagtccgagccaccgcttcgctagcctgggttcctgtgaggaccttctcaccagcctgggttcctgtgaggaccttctcaccggactcgctgctcccgcctttgctctcaaaccatccatttacccaagacgatggtttagcccctggaggctgttgcctggaggtgtcccatgatttcatcccttcccttagctaccacctgtgttcactctgccgtatatagtctctctctcccccctttccttattttgccttgtttcccaagcttaagataaccctccccacccacacccccatggagctagggctgcccactattttcactaaactcatagctcaaatatcatctccggcaccccccaccacaacccatttcaaatagtcaccctgtgtcacatcgtcctgtgctaagtttttgttgggcacctgtcactatctgatctttaacccatttattccttgtctctgccccgtgttaatgtgttcagagctgtatccccaggacctagaacaagacctgttatatagtagaaacccgatatgattgaattgaatgctcgctcttatctggaatccccaccactagcacaattcctggcacattgtaggtgctcaaaaaatgaataaaggtctggatagcagtccaaaggaatacatcccaatttggcagacaatag

SEQ ID NO: 132420 - DNA, 496 bp, Homo sapiens
gttcaagtgattctcctatctcaacctcccaagtagttgggatcacaggcacgtgccaccatgccctgctaatttttgtattttttagtagagacaggttttcaccatgttggccaggatgatctcaatctcttgacctcgtgatccacccgccttggcctcccaaagtgctgggattacagcatcaattcttgtgctcaagcggtcctcctgcttcagtctcccaagtaattgggactacaggtagcaccaccatgcccagctaattttaataaattttttttttaagagacaaggcctcactatgttgtccaggttggtctcaaactcctggcctcaagtgatcctcacacctcagcctcccaaactgctggaattataggtgtgagccactgtgtctggcctaactgttctttaagcttgtaaagaacatcttctgactgcccacctttttgataatcctttaagttcttgtctttaagtcataggcacccat

SEQ ID NO: 132421 - DNA, 1094 bp, Homo sapiens
gaaatgctgtttagttttaacaagtaagtgtttagtttcatcagaggtatgagaatgaggggaacgggggtaattaaatgctatattctttaataaagtaggtcagtttttatttcaggtcaatatcttttttatgaacattcctaatatacttatgtaaatgtcctgtcttagtctgagcagaaggggaaggaaaatgaaacttctggatgtcgtggtccttttctaatcagaagagaccatccctctctctcaatttgctttttccatcttcagcttctacaatatagctatgttcaattgtcctttcaactaacgttggtggttttgcagcagtttttgtacttgacttaggtttaactgtttattcagaatttgccatgttaaagctaaacaggaaattaaatcacagatataaaatgatgtctgtattaaatataacctcatagggtttatgtaagagataaacacaaactcaagcctaaaatacagtgagcagttgtacatacattattgatatataattaggttaattattctttaatttaacaaatatttactgaatgctgttgtgtgtcaggcattagtgctgattactaggaatataacagtgaagatgatgttcaaaatcctgctcccacattttagtgggaaagttagtaaatgttttagaattttctctttcctttatttggtcaactgtttttttgtatttgaaaggaataatttaaaaaactcattagtaaatgacaatgagccacattgttaggaagaactttcccttgtcacacttactgaagtaggggccagatgtggtggctcatgcatttaatcccagcactttgagaagctgaagcaggaggatctcaggagcccaggagttcaagatgagcctgggcgataaagtggaccccatctttaccaaaaaatgagaaaaataattagctgtgtgtgttggcatgaacctgtagccccagctacttgggagacttaggcaggaggatcacttgagtccaggagttggaggctgcaatgagccatgattgtgccgctgcagtccagcctgggggtaccatagtgagattctgtctcta

SEQ ID NO: 132422 - DNA, 637 bp, Homo sapiens
ctccaggagacatctaagtatgtctcattggccagagctatgtcacagggccaccctagctgcaaggaagtctgggaaagaggatatcttgccaaagactatgcacatgtcttccatgaacaaatctgtgcttcttcagtgaaggagaagggccggataatattggtgggacctggaagagtctaccctcacacagcctggtggagatggtcaggggttacagaagagcaagctggctggagcagcagccaccccccacacacgtgccgcatttgccttcagcttagatcacaccctgatgcttccatgaggatgctgagtcaagaaagcagtcttagggtgtggacaagaggagcttcttcatgcagcactgctaactctgcatgtttattccagctactgacatggtttccaattctgtgagattcataagggggaagggaataaaatttcagctacccttaggtagcatatttgcgtcctctgtgtctttctcgagtttgtgcccttctgtgcctttgtgtgtggcttaaatattgaagaatcaaaggctgccacgccagcagacagctgtgccacatcacaggcattccacaggcaattcctcactcccacttttttgacagttgcaccagtg

SEQ ID NO: 132423 - DNA, 495 bp, Homo sapiens
tatcctgtggttcttagctgaaatgtcccttcctcagaggagccaatttctaaagcttaagactgggctgtaaaaaatcacatacctcccctcccattcttaatgtgtaactgtgtgtttatttgtggtaaagggtttactggctggctccttctatcacattcaaggagcatgagggtataggctggctgtttctattcagtgttttatcttcagtgcttaatccatatggagcctgtcacggaccctcagtgaatgtttgacgagtgagtgagtgagtgagtgagtgagtgagtgagtgagtacttgtgcccaggtcaaaccaggtgctaggaccctggcaggggttccataaggctatgctggggttcaggcaacccaaggctggtctggagagtgtaaggcttgagagctcttcttcaggctcagtcatccctgcttccccagggctcatgtccacatgctattgtccatagaagctggggtccaaagttg

SEQ ID NO: 132424 - DNA, 488 bp, Homo sapiens
cactgaggtttcaagcagcttgtcaacagtgaggatagatgctggccagacctacttgtgcattcttggctgtggtagattaatgcaaagccatctggcttgtatctctttaagcttgattaatgcagtttcacatcccaatttcagcatgctgatcaaatcaggtttctgagccatcatcacgtctgaaaacttgaccttgaggtgatggattcaccaaggcttagccactggtaaggatctggttgagtgatcagccaaccttctcgaggttgggaaatttctttcagcaataccaataaccttgaccacgagactaatgttcctggattctcttgctagttgcttctcaggtgaccactaaagtgaccactaagtctaggaaaaacgcctttgatgtctggctcagataactgctctactatgaccttcactgtcatctcttgctgccaagttctgttatctcaaggtgatattcaccttgaaaa

SEQ ID NO: 132425 - DNA, 405 bp, Homo sapiens
agtatatgcttttcatcttactcccatattctcatttttctttgttattctggtagaatggtttcttttcctgtataaagctgcctgtcagtctgtgctctgagtcatacttttttctgtcttacgaaagacttcaaacctatgagtacccttactttctgctacttagtactctcacctctttaacttttgaacttgttacagtctcacttgtttggggaggagcacacgcataccttcattggatagttactatttcagtcatgaaagtttcttctttcaaggagatcagaatctcctgggggagaggtagataaagataatcacagttacatataaattctgtgataggtgtatttatactctgctttaggaataatagctcctttagcttaggagatggag

SEQ ID NO: 132426 - DNA, 135 bp, Homo sapiens
cccttgcagtactgtggtgttggatgtggtaaagggtagcctgggactgagtattctagaaaaattgctcagccttgtgctgtgcacacctggttctctttccagtgttatttatgtagctgaggaccatcgttg

SEQ ID NO: 132427 - DNA, 445 bp, Homo sapiens
gatcggcatactggaccttctgtctaacctgacggttctctggtaccttcaagtggatttttattttttggacccaattttctagtctcatggagattgttgacctgccatggttattaaatcataattgcaagtggtacccaattgggatttaaatcctggttcactgtttactagctgagtaaccttgggttaatgacctcttctctcttagtctcaatctctttatctgtgaaatgggtatagtaataattgcatcctcctcatcagatggctgtgggaactaactaataaacacaatgtttgcatgtagtatgcactcaacaaaggatagctactataataatacatttttagctttgtttttgttattgtactatcaagtaagaaaaaactgtgggaaggtgttaggggtttcatagcatgactttgaggggactgaggg

SEQ ID NO: 132428 - DNA, 437 bp, Homo sapiens
gatcggcatactggaccttctgtctaacctgacggttctctggtaccttcaagtggatttttattttttggacccaattttctagtctcatggagattgttgacctgccatggttattaaatcataattgcaagtggtacccaattgggatttaaatcctggttcactgtttactagctgagtaaccttgggttaatgacctcttctctcttagtctcaatctctttatctgtgaaatgggtatagtaataattgcatcctcctcatcagatggctgtgggaactaactaataaacacaatgtttgcatgtagtatacagctctttctcagtatagtacccacctgcggtgctttgtcattttagctgtaaagtatgaaatggtgaggcgtttctaggccaggagacgtctgatgggtctggggtattcagggccta

SEQ ID NO: 132429 - DNA, 1621 bp, Homo sapiens
tttgctatatgtaatcccaactactgttttcttgagagtagcagaggattagaaaaagtcctccataaattatgtaaccggccttcctgactagcctgactcaagcaatgtaagagataattattctgttttcataatttataagtgtgggggcatgcctcagcataaaaacaacctattagggaaaaacatctaatagattacctttatcgcctgttagggttttatgttgtttttaactcagatgccataagaacaaagatacatgtaatttataatagtaatcattaatacctatattgtgctttaaggtttacaaaataatttttctcatactttatcttagtttagtttcttgacagtccatgaggtaaggtggtagctttatcaccattttacaaagtgggaaacgaaggttcctcttaggaacctagttgtcacctttgtataataaaacttcgaagctcggagctgttaactggtttgctgaaggcttagctgtaagagccagaattcagacccaggtctgagtgacttcaaactgcacagtccttcccattattacccatatgctatcccttatatttttaatttattaggaattcattcatttataaacttggtgattcacctttattagattctggtcgctgaaggctttagtaacttcagagtaaaacttgagagatgagatgtaaaatgcagccattcttgagagttcctttttctataacattcatcaacacttcattgagaagtgaaggttcctatggctgtctctaccttcaagaggcttagctttagtcactgagaaagacaaggaaactaatgatagaatatagtagcttcttctggcgttaggtatcacagagtcacagctagttacagctagccctttattattgaaagaagaggagctagcagtcccactatcagaattaagactagagatggtaataggagctagtatcagaaaagcttaaggcaaagcataaagtgtaggctagaatgaagctggagaatggggagggggcttgggtaacatccagaacctggctggggacctggaactacatgagatgtaagaatggagaggttctagcagtcagaggtcaggtacaaatgaacagctgggatctgcgcatggcagacagtgaaaaaacccaggcaagcaaaatggtcagagcagaaaggggcccaaggccacgttcttgagatgtggagggggctgaggaagccacgccaagtaaggacagatgcagctcagcagttcctagcgagccctgacaagccagctcagctgaagcttcgggtgggagccagtcatggcacagtggagtgaaggaagagcagtttcaggcacccaaaacctgacccccacgacctgttttccacctgaagagccacccattccatccaaacccttggcaaaagtctgctaacagagagaaccggccagtgtgctggccagtcgcgatcatgcctgtctttaccctctaagctgaagctgctcatcaacggtgagatggcaaaaaggtgggtccagaagaggggaaaagaagggagtctgtgaaaacaaaatgctgaagaatctgcatcaaataaacccttccttccttcc

SEQ ID NO: 132430 - DNA, 457 bp, Homo sapiens
acatgtcttgtattttattagagagtttaatattttattcatgttactggaaaagttcttataaaaatagcactaaataactggatacaggttcttcacaaagtcgtaaaaacagagaaaggcttagggttttgtctagcattgtaaaataaaatccaaagggctggggggaaccaactttttattctagcgacttttctgcttttttagtgtttcatatcacataataaatacatgcaggttatggtataggttacattctttgattatactagcttaattttaagtgtttgattaagcatctgtgatgtcgttaagattttgttcttaattctcacctgaaatgagaatgctgatggtgtgcacacttagcagtttagtgttaatggctacctctgaggaccatacctttttaattgaatactgtatgtagcgcgaccttcatgttgctgcagtt

SEQ ID NO: 132431 - DNA, 773 bp, Homo sapiens
gttcatcgattgtaacacatgtaccactctggtaggggatggtgataatgagggaggccatgtatgtgtgggggcacaagggatatatgggaaacttctgtaccttcctttcaattttgctgtcaacctaaagctgttaaaatatctttttaaaaaagtttaaattaaaaaaacacgacagtgaatgccaggcttttacccagcagattcacaataattcctataggaatccatttaagaaagggttgagaatgtgaaatgatggatatgttaatttgtttcactgtaagaaccattttactatatactaatatcatattttataccttaaatatacacaataaaatttatttttttaataaaggggtgagaaaaggttatcagaaatgcagaataaaagttctctcctgtaatgacttgaagtgaaaggtagaaatgtccacctcccagccccttttcaacacacagttttgtttagtacccacatggaactctttatttcactgctggagcatatgaaatctgttctttagacgttagtttccatcattttggggactttggtgttattagtagtgattatggtatatttacttttagttaccaaactttatgtgctagtcattacctttgtgttgttgttattgtccaactttgacacttgtcctgcagctaaaataaaaaataatcatttttgaaaaatatttttgaaatatgaaactgtaggccgggcacggtggctcacgcctgtaatcccagcactttgggaggcc

SEQ ID NO: 132432 - DNA, 321 bp, Homo sapiens
gccttttgtcttattaagtatttatgtctgtggaagatttttaaaaattgatatgggaagtattatctcatgtttactaactcattattgcagtttaatagcttttaaacttagttatgattagctcctggacaatcagagaaagagcgggttttatgcatgtgtaccgtctgccactcacttgtcttcttaaagaaggcagaccctctaagagcaaactcatgaatttgtaataaggaccaattactgattaagcttctactcctatggagtagacacatattatgaatgactctaaaactgccagtacaccacaattat

SEQ ID NO: 132433 - DNA, 316 bp, Homo sapiens
gttcttctctattcctgctgtctcagccactccccctctacaccccccacagccccccaaaaaaagggattgagagaaagacaaatgatgagagaaggccagtcttgtcaggtgaacacccagttcctgtctcatttaaggttgcactccacttctttcaaataggaaattgccaaaatggatgtcatgggctgctaattagatgtattttaactgcaggatcattttaccagctaatactgttattatgtgcttcaatgtgaacccatggtggagctgttaaaatatgagcgtgcagtcttagcagacagctctt

SEQ ID NO: 132434 - DNA, 376 bp, Homo sapiens
ttcatcttccacagtgggaggtcaatagatactgctgaaacaggaaaaccaacaagtagcaataaagaatgatacttagtgatgagcagagcaataccaaaagaagaagttaaaagagatgaaatgggtgcctcagggaacaggaaatagtgccacatgggtaaggtgggactactgtttttcacacatagtagcttgaatctttttcgtaatttttatagaattatcaactcttgtgactaaatatttgatttttgaaaaacaaaattaagtatatacatatttttaaaagtcacccagattatgccattgacttcaaggagatttttcactaagtaagcccatttcttctattttgccttgacatgctctgtaa

SEQ ID NO: 132435 - DNA, 421 bp, Homo sapiens
cacttagcacagggaagagcacattgttttcatagctggttggctcttaatacttccccaggaggctccaggttcaaagagagggtgtctgagaaatttgggaagatgccagcaaagtgaaggttttcaatgacacactccaggatgtcagtcaggcagggagaatgacccaggtcattcataacagaatttttgtacaaaagaggagaaaaagaagagccagtggaaaaaattatgtatgcagagatttcttctttagtggcaggtaaacatttagttatgtaagtaactctcacttaatcaggactaattttgtcccctgggggtatttggcaaagcctggagatattttaagttgttaacaactgagttgggaaaagatggggaagctgctattaggaccaagtaagtaaaggtcagg

SEQ ID NO: 132436 - DNA, 223 bp, Homo sapiens
gctctagaggatccgcaactggtctgtctggttgggtgggctggcagagtgcgcggctggccgggtgcggagcccgggctccatcattactctggggacaggggtgagggcggatcccaggaactgcggagagcagctttcgctagcaggcttagacttcccgggcaatcggtctcgcggctttgcagtaaagtggggttcgtctggagcccggccagaagcg

SEQ ID NO: 132437 - DNA, 460 bp, Homo sapiens
acaaacaagcaaacaacaacaacaaaacacttaacatgcatcaaactcatttaatcctcgtaacactatgagggcgattattattattactctaattttacacatggaggaaacaaggcccagaatgtcacttttttaaaaaggttacttgaattcagtttaaaaacatttttaaaaaatctgtcagtgtgcagttatttgcatttacttttagaaaagaacacttttctaattaaaacatgttcagaggattgttattagtcaacttacatttcccccaccttattaataagttgccatagttccctgtctctttatttagtaaaaacacttttctaattaatatgtattttcagaaagtactgctgttactccacttacatttttccccatcttattgaataaattcccatactctgcctcctttctctccatataaagcgatactcctctcctccca

SEQ ID NO: 132438 - DNA, 438 bp, Homo sapiens
aacatgtttcccccttagctccaccctagatgctatcaggtttgctaaccagaaggttctgcagctgaccagctcatgcgcacactcacacacacacactctctctcacacacacacacacctccctaagaaaacaaattttcacaagagtaattacatacaaattctaaatctctaacctgtacttttaagctcatcatcttcacaattcagcacaaataaatttaaagcatgggatgaaaataaatcaaaattagccattttcatgacttcaaataggtaagtattttaaacttttaactgataatgtcactaaaatactaactagcctgtcaattgactgaaagtttctaaaccattcctaactactgttcctagatagaccccggactctcttcatcttctgccctgatgacccttcaactctgaactactctg

SEQ ID NO: 132439 - DNA, 616 bp, Homo sapiens
tcgtacttccaccctgcatgctggtgaattccactttgccctccagcccaagcatcatattttccagacagtcatttgccatgctgcccaccaaacaggctgtcccttgttctcatgccactgctgaacattgtttattccttgtgctaggcagggctctgtcagttgtaacaactgaaactccacttagacatgtttcagctgaagggtgacttattgatttttataactgcaaagaccatggtatgcctgaatttggaggttcaagtaagttattttctctctctctctctctctcctcttcctctttcattcttttctacctggccctggtctatcccaacataaaggcaataattcattacctcattaacggatctgtccttttttttttaaacagttccttatgttagccatgaaatctagctggggctgtgtggtttctgattccccctggcttattctttactttttcctacttttccaggctcagcagggagctgctggatgagaaagagcctgaagtcttgcaggactcactggatagatgttattcgactccttcaggttatcttgaactgcctgacttaggccagccctacagcagtgctgttta

SEQ ID NO: 132440 - DNA, 317 bp, Homo sapiens
cctaaggcagccttcaaagtggcaaatgtgttggtacaggacagacgcagatgggcgaggctgtggagggcagcagtaaagtgctcctgctcagggtgacacagacgaggccgcctcaggcaaatgacttcgtttctcagggcctcagtctccttgtctgtacatggggttcaatcataatacctgcctcaccacaggggctgagcagatgaaagaatggtgaggtggcccatgcctgtaaccccagtactttggtagtctgaggcgggaggatagcttgaggccaggagtttaagaccagcctgggcaacatgaca

SEQ ID NO: 132441 - DNA, 677 bp, Homo sapiens
tgcctattaatgatcattaactctatgtagtagtctaataggtatttacaacttaacatattcaaaaccaaggtcttgatctttctattgctccttgataccaaacatatttctgtactcatcttccttctttcagttactggtacttctttccttacatttgttcaggatacaacccttgatagttattcttgattttgctttttctctcacaccctagttaattcattaacaaatcaataccagctcttccattatgttaaatatagaatcttaacagttcttcaactcttctactactactacactagtctaagccataagccactcttatttcactattacaataaccatttaatctccctactttgcctgtgtcccccttcagtttgtcagcaaatgagcagctagggtagttcttttaaaggacatgtcagctcatgtcactcctctcctcaaaaccttccatgggcttcccattttacccacaatgaaaaccaaatccttacaatgacttacagagcccttcttccagatgatctctctaatttcatttcttatatgttttgctcattggctgagtcactactggactccttgctgttcttcaaacatagcaggcacattcctacctcagagtcttttgcatttgctgttttcactgcctggaatgcttt

SEQ ID NO: 132442 - DNA, 362 bp, Homo sapiens
caaaagagcacataacaatctacctccaggtgatcgagacaatgtatatggaattgtcaaatcagctgtttacaaaataatatttctaaccataaaattcactttggttactaagatttgtcatttttcaatttctgtcacttctgtagtttccattcttagtaattcctaacaagagagtatagtatgtttgaggaactaaaagaagggtagcagtacagagagtggagaacggtacaaaacagaggtggagaatagggcatgcagtgtgatttagagattcggggtgggacacatgtggcacacagccccactcagctccatcacttactagctgtccaaggaaataagtaaatagtgat

SEQ ID NO: 132443 - DNA, 918 bp, Homo sapiens
ttaactgaatcaactggattccttaattctcacaatattatccttcctaatttgtaaatagggaaatggaggcttagtcacacaaaatatcttgttcgaagttactaatcaattaagtaacttaataatttattgacatctgaggcatttctctctttctacagcctcagaccagaaatgatgggatttcagccttcttttcttagagattggtgagccaagacctggagagagaactctggttgtcttaagtcacccagatgaactattaatagaaaaataattctactcagtcagtacttaaaagcttgacatgtttgtgtggagacctgtgtgtgactgagttcagatcactctaatttcctgggcctcacttgacccatctgtgaaatggggcaatgagctcttttcggcatgaaggcaaggaactgtccagaagacctctggagaattcttcttaccctgagatcaagggttctgtgagtagtacaactcacacccaaagtcttagttgcagggcactttagtgggaaaaaaaaaaaaacgctgaggctatttttagagccttcatctggttatagactagttggtaggagagcaatacctttgaaaagttaagaaatagttttatacactgtgttaaggatgttgtcaaaactaatacttgtgtatgcaaagactttaacatttattaataattttttctatagattggtgaaattggtttgtaatttttgtcatttcacttttgtggaaattgagcaaaagtgagagataaaatgatgtgatcaggctgggtgcgttggctcatgcctgtaatcccagcattttgggaggccaaggtgggcgcctgaggtctggagttcaagaccagcctggtcaacatggtgaaaccctgtttctactaaaaatacaaaa

SEQ ID NO: 132444 - DNA, 936 bp, Homo sapiens
ggagagatgaggggaaaaagcaaattattgttcctaatgatatgaacctgttttgtggattgctgtttatttttaaagataaatgtctctggtatcctaatagaagaataataggaataatactttacatttataaagcaaatttctcatctgttatcttaataacattgtcacaacagtaacagcaagtattatctttgtttggctaaatgaaaactaagggtcttaagaggatgggtatcttcacaattactagagtcagggacagatctgggactctattccaagtctcctgcatgttaccaggccacatttctgctcctatataaaacaacagacacttctcaaaagaagacatttatgcagccaacaaacatgaaaaaaagctcatcatcactgatcattagagaaatgcaaacctaaaccacaatgagataccatctcacaccagtcagaatggctgttttaaaaaagtcaggaaacaacagatgctggagaggctatgaagaaataggaacgcttttacactgttggtgggaatgcaaattagttcagccattgtggaagacagtgtggtgattcctcaaggatctagaaccagaaataccatttgacccagcaatcccattactgggtatatacccaaaggaatataaatcattctactgtaaagacacgtgcacaggagcagcactatttacaatagcaaagacatggaaccaacccaaatgcccatcagtgttagactggataaagaaaatgtgatatacacacaccatggaatactatgcagccataaaaaagaatgagattggccaggcgcggtggctcacacctataatcccagcactttgggaggccaaggcaggtggatgacaaggtcaggagttcaagaccaggccaagatagtgaaaccttgtctcaaaaaaaaaaaaa

SEQ ID NO: 132445 - DNA, 114 bp, Homo sapiens
actgagtgttgaggctggcttgtcatactccaaagttgatttttccactgtaccctcaaaaccattcttcactcctccagttctgcctacccttgacaggtttgattactctaa

SEQ ID NO: 132446 - DNA, 421 bp, Homo sapiens
gattccattaaaataaaaatcatcattaaccacttaactttttctgtagtcacttagtatccccctctggcagcacaacgtctacaggcataacacaaacaatgcagcctaaaaaccaatgcctgaggctttttcctatgatgtaagtaggttttccacaaaatacagaccagaagctgccttcatatgctaagatcacctgtgcagttagtcagtcatcaaaatgacagtacataccttgtacctaaaatagctaagaacaacacataaccatcaaccttcttgggaacttaagaaagagtgcttgacagctggataataggcatcagtaaaggagaaaagtggaaaaggccatatgggaaggtcagtttcaaggagcaacagatgaggatggcagccaagtgtgtatttcctgaccttt

SEQ ID NO: 132447 - DNA, 788 bp, Homo sapiens
ggtaaaagcaagtgatagccttccttctcagataaaaaagaggtcactgacctgcttatggtgagatcctgtctgaactgggcctgggaccccatctcctgacagtgcagctagcctagttctctgtttcctgctgcctcagtaactgaatgtagtaatttcatttggagcagaggtcagcttgtctttggaaaagcctctattcagcagaaaaagcatcagcagtatatttaaaagctgccatgtaatgactatagggactccattgagcagatccttttcttatctccagatcttttccctcaacttccagagcatgtccttacacctgagatgtaggtacccccagctctgtcccatatccagtggcatagtaaccaggtggcttagtggaggaggacgcaggaccctctgttgtggtttgtgcctgtgggggctgccagagagagggctcaccccatgattgccttcaccccaatctctcacatgcttcaaaagaggggtctggtgggaggggctgtgtttaagggtgggatctggcagcctgtcaaatcctggtcagttgggattcaacggacccatgaccacaagcctcatggcctttcctgttgaccagcagtggcagtgggaacaactcaccttttgaaaatacataggaaggccgggtgcggtggctcacacctgtaatcccagcactttgggaggccgaggcgggtagatcacgaggtcaggagttcaagaccagcctggccaacatgtgaaaccccgtctctactaaaaatacaaaa

SEQ ID NO: 132448 - DNA, 514 bp, Homo sapiens
catgaatttaagttggagacatggttaatatttttatggtataatatgattcttttacaaaagtgaaaaatttagataattaaaaaatgaagttacctttctatttgtctgtttacattagtcctaaggagtaatttatgtgttgttaagaaccaatagattttgtttgggttctatgactaaacaatgtcaactagttcttatcactattcagtcatccctgcccttctttattgtggattcttgaacattgagcacttcgaatttataccacctaaaaaatacatctttagttttgtttgggtttttctgtacaaagttcagttggaaacactgcccttactaatgctgggaggcatcattctttaggcatcccaagttcttgcttcaacttttacatataaagatccaaaatgtgccaggcgtagtggctgatgcctataatcccagcattttgggaagccgaggtgggcagatcacttgagctcaagagtttgagatcagcctggccaac

SEQ ID NO: 132449 - DNA, 332 bp, Homo sapiens
taacagcctagccttccttatactttctcagaatacttagattagcctacagttgggcaaaatcatctaacacaaagcctatttttatctcatgtaagagtattttactgcatattgctagcccaggaaaatctcaaaatttaaaatttgaagtacattttctactaaatatttatcactttcacactatactcaaggcaaaaaattgtaagtcaaggactgtctgtctatatttgaaggccagacattcttctggccatcatactcccattagtgttcattcttctcatctttgaacacctggattagcatttaaaatctgcagagaggcc

SEQ ID NO: 132450 - DNA, 668 bp, Homo sapiens
tctctatatacaaaatgtctactttctctaccagattttaagattttctttttatcactgattttgagcaatttgattatgatgtggcttggtgtagtttccttcatgattcttgtgcttgcagctcattgtgctttttagatctgtggattttttgtttacgtcaaatttgtaaaaattctggccagtatttcttctagtaatttttctgttctccccatccctaccttagggactgcagttacacatacatgtaatatctgggattgcgtagttatcccagaaccgctgatactcttttaatggcaacagttttttctctctctctgtggcttctttgggatcatttctcttgctatggcttcaagctcacttattttttctcctgcattgttgagtgtgcttttaacccagcccgtgtatttttcatctcagatattacagctttcatcttcagaagtttgagttccatgtttctagttttttgttgttgatgttgtttgtttgtttgtttttaagaggttctgctttgttgcccaggctggagtgcggtagtgtaattatagctcaccataaccttaaactcctgggctcaagtgatcttctggccttggcctcctgaatagctaggaataaaggtgtatgccaccatgtctggctcatttttt

SEQ ID NO: 132451 - DNA, 631 bp, Homo sapiens
actctgggaggccaagtgggggcagatcacttgaggccaggagttcaagaccagcctggccaacatggcaaaaccctgtctctattaaaaatagaaaaattagccaggcatggtggtgcacacttttaatcccagctactcgagaggctgaggcatgagaatggcttgaacccagaaggcggaggttgcagtgagccgagatcacgccactgcactccaccctgggcaacagagcaagacactgactccagaaaaaaagaaaagaaaaattttgagatttgtgatctcactagccatttcaattaacaacatttctgattaatcagtcttttcactgcttttgttcaacaagtgtccactgagcactttcaatgtacaaggcaaattctaagaaattaggatacagtggtgaataatgcagatacaggggccctgaattcgcggggtcaaaatccagcaaaggaacttccgaaacaaggaatttcaacaatgcactttacacactatttttcaaagacatatataataggatcctgcagtaacatggagcaggggtaccctactttggtacctaacttaagttcccaaaggaaaagtaagacttagccagaaaagtggacatgggatggga

SEQ ID NO: 132452 - DNA, 364 bp, Homo sapiens
catcacccacagccctagtacactttgtctcgggttagtatcatccacactcccaggacatttcgggcccacaggagggttagaagccttgaatgttgtacctagaaaggcctcagaggtattcggagagactcaggctcggccaggcgagagggcagtcaggagaccagcctgtctgtagtatgtggactctttgtctgctcccatcactaccaccaccatattttacagatggggaacttccctagcaggggaaggcacttgcccaagctctcgtggccggcttggcatgctgtgatacggaaatatgctgaaaagggcaggctttggagttagggagacctggggcaatccagattcttcc

SEQ ID NO: 132453 - DNA, 719 bp, Homo sapiens
gagaaccctattgttacaaattttgtttgcaaaactgataccaattctggggagtctaggaagagaaaacagaaattgcaaaggtgcagaggcaggaaatcatatgagactttcaagaatctgaaaatagaaacttggaataaaaacctgaggaggacagggaaatagtagaagatgaggcttcagttgatcataaaccacctcttccagttgcagatccataaaatgtggttaccataggtaggttaattttatccatgctttactatctgcttcctttatcagcaaaccgtcattggttcatgaagactgctcctctgcagatctagccttatgatggctttctatcctcttggcaggaaaggaaaagtgacgtgtgtgtttgtgtgtgtgtatgtgtgtgtatttagtatagtacatttttagaaataacttcctattttctctaaatagaaatgactgaaaataaaatattgtttaataatatttgtaagtggattattagtttttataaatttttgtatgtttttactaattataaaataactttctcatttaaattaaaacattttaggaaaaaccagtcttaaatattattggtaaaatacaaatatcttcaagatgtaaaaatatggtctaaattacacaggtcatgtactacatttactaaatgttttaaggttgtaaactactttttttggccttttaaaaactgtcaa

SEQ ID NO: 132454 - DNA, 533 bp, Homo sapiens
gaggaatgggcaggtcaaatacagaatgaggtttgacaggctagatgtcaggaaaagccttaagggaggaggtgaccttaagctgcagtttgaaagataagttggccctgacagataatgaggataggctacacggcaggtgggagtgagaactgcaagatcttctaaggtgatcaactgaaggtactatgcagtattttcagttgatttcagaggtatttcctagtaccagcaagcaagcagtttgctaaggctgaattttggggtagggaggtacagcaacagccagggctatgtatgctatgctaagaaacatggctttatccacaaacagttcttaatagtttctgaacatataccctatttagaatttaaaagtgactaaaacaaacaaacccaacagctaaggtgcactgattacttattatgagtcaggtactttacgtacacttctgatttagttatatatccacaaaagcccttaaacaggaaccatttctatgagaaaatggtggctatgaacctggtacttt

SEQ ID NO: 132455 - DNA, 178 bp, Homo sapiens
gggtgtgcacacctctcttctttcatccctttgggtctatgcctatttttaatttctcgaggagccaccgtactgggttccacagtggccaccccatttcacattcccaccagtgacgcacaagagttccagtttctccacatcgtcgtccacactcattttgtttacttttttgatg

SEQ ID NO: 132456 - DNA, 420 bp, Homo sapiens
tgctgtgtcagagaatggggtgtggagggtcaaagatggaagtagagaaaccaactaggaggctatgttataatagtaatagatggataataatatttaggaaagttcaggtttgggtggggagaccaggacttcattttggagcatgttaagtctcagatataaagtatacaatgggaaacatgcagtcacaggagaggtctgagctaaagatgtaaactttggatttataccgatgacatgcaaagccacgaacctagatggaatcacctagagaacacaagtaaacagaagaaaagagagttgaggaacgagccctgggatagcctaacattaagaaactggggagatgaacaaaagcaagtcaagaaatagtgtccattgagctaaaagaaccaaaagaaactggtatcttaaaag

SEQ ID NO: 132457 - DNA, 410 bp, Homo sapiens
agtttgagagtctcagtgttttaaaaactgagtcaaaacaactaaattggtggaggttactgatagatttggactaattccaaatattctttggttttgtttatttttgaaaaactgctttattaagatacaatttacatataataaactgtacatatttaaaatgtacaacttggtgttttaaaataggtgtacacctatggaaatcatgatcacaatcaaaatagtgaacatatctatcaccccttttcctcatacccttacatgttccttctctcaacctcctcccttccccctcccccaaaacaactactgatctgctttctgtcattaaagcttgggttgccttttctagaatcttagataaatggcatcctttatttgtactctttatgtggcttctttcagca

SEQ ID NO: 132458 - DNA, 239 bp, Homo sapiens
tctctgcttcagccctggattcatctctcttagaagcctaatttcctttattggaaaatggtacttatagaacaagatatagaacaaaatggtacttatagaaaaggggataggtatacctttactaccggagtgccattatttctaggccatctcagcaaatagagctaggaaatatatacacgtacatgcacatacacatacatgaacacacatctatctctatttctatatctgtt

SEQ ID NO: 132459 - DNA, 607 bp, Homo sapiens
atctagtaaccaaatgagcctcataggatctcaggactaaaagagccacctaattcaaaactttccaagcctggcttcacagactgctcaacctaaactctcaaggtggaggctgagaatctgtgtatttaaatgcccccggatgactgtgacactcgagacagataatcactagtgtaactgagcccatgtgaatcatgtgaacgccctttacaatgaccctgtccagaaatgatccagccttatgcattagggcctccaacgatgggacacagcctatcacaactgcaagcacctggaccagcaaagtcctttctaatgtttactcaaatatctgtatttactctactcattggttctgtcctgtgaggcctgagaagacaaaaggtaacctctcctccttccacttgatggacttttgactcctgcgacaaaggatgatgcccctctgagttttctccaggctaaacacccttgatgaactatgcattaatcattaagtgctaggctctttaagtgcgcaacacaatacaacaacatgtcagagaagggagaaatcagggtgtgttatggtaaccagcaagacatcaatgaagaaggtgggtct

SEQ ID NO: 132460 - DNA, 936 bp, Homo sapiens
ttacttctttatttcctcatctgcaaaatagcaccaacctcctagggggtgcttattcttagcataatgcctggtgctttgttagcatgcaaccctggcttgttataatcagctctaattttccggtctgtgacatctacgtattaaacctaattccaggtgtgtcccatgaaaacaaaataagaaggccgggcacagtggctcacgcctgtaatcccaacactttgggaggccgaggcgggcagatcacctgaggtcggcagttcaagaccagcctgaccaacgtggagaaacctcgtctctactaaaaatacaaaatcagccgggcgtggtggcacatgcctgtaatcccagctactcaaggctgaggcaggagaattgcttgaacccaggaagtgaaggttgcagtgagccgagatcgtgccattgcgctccagcctgggcaacaagagcaaaactccgtctaaaaaaaaaaagtaaaaagaaaattttaaactttttggggggcctgggcccttggaaaagtttttaaaccattcgttgggggccggggcccattggtttgttgcaccttggcaatggggttcccaaggaaatccgggggcggacataggggttggtttctcacccaattaaaaaaagccgcggggggacacccgaaggttttctgggaacaatcccccgaaaggggtttgcggagggcccaacccgggttctcacccacacggctgccagggagatcggatacaaatcagccgcccgccggggtgggaatgcatagatgtgaggaaacgagacaaacaacaacgagaactagcacgagcacgacacgatgagagaaaggagaacaactagagagagcaaatacagagagcaaaactacaacaaccaacatacagaaaagaacgaaaactatagcaaagaatacgacaatag

SEQ ID NO: 132461 - DNA, 400 bp, Homo sapiens
cacagaactgatcacacagaaaggaacaaggtcatggtgtgtgtggctctgcagcaaacccttccttctgctacagagcagagtaccagaaaatccgcaatgcttcagtggaatctgaaggttagatacagcaatgtatcaatgctacattcctgattgtgttggttacaccgtggttatgtagaatatccctgtctgcaggaaatacatgctaaagcagtggtcccaacctttttggcaccaggggccactttcatggaagacaatttttccacagacccgtaggggggtggaggaggtgaggtgatggttttgggatgaaactgtcccaccctggatcatcaggcactggactctcataagcagcatgcaacatagatccctcaaatacacagttcac

SEQ ID NO: 132462 - DNA, 375 bp, Homo sapiens
ctgggcctgctccacaactattctctcagagtctttgaggacggggtctggcatctattttaacaaggcctcccagtaattcttacactaaagtttgtgaactctgttattaccaacttacctgtttatttactcaaccaatatccgatgagtacccattacccgccaggctgcactggtccaggtgcctgataggaaggagtgagtgaagctgaccacgcagagttaagcctgccccctgtactggagtattcaggcttaactcacaaaacatatgtaccattcactcctataatcccagcactttcggaggctgaggcgggaggattgcttgagcttaggagttcgagaccagtctggccaacatggcgaaaa

SEQ ID NO: 132463 - DNA, 276 bp, Homo sapiens
tggctccatgatgtcctctttccaacccattctgaatcccccacgggctgcctaaggtcctgctatgggtcagccactatgctatgtgcttgacctacatgttcatcctcagactaacctcatgagacaggctaacctcattaataactcctgtctggcagaggaggaaacaggtttggaaaagggaaatctaagaagacctagtgaatagaagattgggttggaattcatatctaggtagtctgactccaaaacccgtgcaactaataaacacaa

SEQ ID NO: 132464 - DNA, 483 bp, Homo sapiens
ttgagtgttctttcttatgtgtgatcgtggcacctagcattttggcctgtagtgggtgttcagtgaacccaaaatagtgcagtaatttaatggacattttttgggtgggacttcaagtagaccttggtgggtattgtgtccttgtttttctgttcctttgcttaccttgcacagtgccagacacactggcgcttagcctttgagtgaatgactgtcttcatgcgcccttagcacagggaattgaaataatggttgaatctagtaaagcattaagtttgtattttccttctactgctgctgatttttccaacagccattttatatgctaataaaaactttactctgggtaaagttaagtaaacaaaccttttgtttgagaactgtcagcctaaaatatatttgctaatttctcatttgcatagtttatacatgttagtgcacctctctaatacccataaatgtgtgtaaggattggatgaggag

SEQ ID NO: 132465 - DNA, 1442 bp, Homo sapiens
tcgggggctccaccaccgcgcgctcccaccctcaaggtctgcaggacacaccaaagaactcctccaagtcacacaagggagaaaattaacttcattggcttctatcaggaaagctatttttttttttcctcttctttcctgcaagtttcccaaaccccatgactctgatttccaggtcagagactaaggttttatttttcttactctgtatactttatatgtggagagtccctgaaggaacactgtgatgggctgattactgtgagccagttgtgggccagacctggcctcaggtgctgcaaagggaattcagtcacccctgtgcagtgatctgtgagccccaagtcagatccaactttttcctgatagacagcaccctcctcctccctaccaagaaatagcagggttggaggtagtgacccaatattcaagaggtttgaaattctacatgagatatttctgagttaactcctaaatagcagtttccttaatcatgtggaaaataagaacacttactaaagagaccattggtttaagagaaatggaaacttatgtccacgtaaaaacctgtaaatgaatgttcacagcagccttttcataatagccaaaaagggaaagcaatccacacgtccatcaaccaatgaatggataaacttaacgtgggatatacgtgtaatggaatgctatttggtgaagaaagaaatgaaatattaatacatgcgttaacaaggatggaccttaaaatatcatgctaagtaagagaagcctgtcacaaaagaatatgtattgtaccattctacttatatgaaattcctagaataggcaattctatagggacagaaactagactagtgattggctagagcttggggagagtttggggagcctggaggatgacagcaaagtggtgcagagtttctttttaggttgattaaatgttgtaaaattaattgtagtgatggttgtgcaactttgtgattttgttaaaaaccattgcattttgccctttaaatggatgaattgcacaatgtgtgaattagacataagtttatttacataattaatatctatttattgatatataactcatatatcaataaatatatactatataaaataattttatatttatataaaatgtgaattatatataaatacataaataaaactgctaaaaactaaaaaatatatactttaaaaaaaggctgttcgtttctttcacattttctgagcacaatcactttgggataaatgtgtccaggcttaaaaagccagattttatgggctaactaaaatggaaatgtgaaaaactgtgtttttttccataggaggagagagtctgatttgcaggtacgtgcatacccacagcagtcatacttgtaattcttggaaactttgctgaaagttttttcctagcctgaaatcattaaaatatgttgaaa

SEQ ID NO: 132466 - DNA, 1667 bp, Homo sapiens
ccagaaccagccgttgtcccctggcaaaaagaggcccagggctgagccctgggcaagtgtctcccgacatcgctacccctcctccctttattagtttccctttcccaacagaaaccatttccttctgccaccaaaactaggttgcatccaaaagtttttcacaagcttaaaaaagaaaaacgaaaaattgacaagtattacacagaagagcccacaaaagcttcagcaacaccaagggcgaagaagcagcgtcagatccaggtctgcaggacacaccaaagaactcctccaagtcacacaagggagaaaattaacttcattggcttctatcaggaaagctatttttttttttcctcttctttcctgcaagtttcccaaaccccatgactctgatttccaggtcagagactaaggttttatttttcttactctgtatactttatatgtggagagtccctgaaggaacactgtgatgggctgattactgtgagccagttgtgggccagacctggcctcaggtgctgcaaagggaattcagtcacccctgtgcagtgatctgtgagccccaagtcagatccaactttttcctgatagacagcaccctcctcctccctaccaagaaatagcagggttggaggtagtgacccaatattcaagaggtttgaaattctacatgagatatttctgagttaactcctaaatagcagtttccttaatcatgtggaaaataagaacacttactaaagagaccattggtttaagagaaatggaaacttatgtccacgtaaaaacctgtaaatgaatgttcacagcagccttttcataatagccaaaaagggaaagcaatccacacgtccatcaaccaatgaatggataaacttaacgtgggatatacgtgtaatggaatgctatttggtgaagaaagaaatgaaatattaatacatgcgttaacaaggatggaccttaaaatatcatgctaagtaagagaagcctgtcacaaaagaatatgtattgtaccattctacttatatgaaattcctagaataggcaattctatagggacagaaactagactagtgattggctagagcttggggagagtttggggagcctggaggatgacagcaaagtggtgcagagtttctttttaggttgattaaatgttgtaaaattaattgtagtgatggttgtgcaactttgtgattttgttaaaaaccattgcattttgccctttaaatggatgaattgcacaatgtgtgaattagacataagtttatttacataattaatatctatttattgatatataactcatatatcaataaatatatactatataaaataattttatatttatataaaatgtgaattatatataaatacataaataaaactgctaaaaactaaaaaatatatactttaaaaaaaggctgttcgtttctttcacattttctgagcacaatcactttgggataaatgtgtccaggcttaaaaagccagattttatgggctaactaaaatggaaatgtgaaaaactgtgtttttttccataggaggagagagtctgatttgcaggtacgtgcatacccacagcagtcatacttgtaattcttggaaactttgctgaaagttttttcctagcctgaaatcattaaaatatgttgaaa

SEQ ID NO: 132467 - DNA, 659 bp, Homo sapiens
ggtcccattctatttgaaaaccatattcatacctgtagtttccagctgggacctacagatggagcctcacagttcgagtgttctgtgtgaagaacttttaaaatgttttgattttttttttttaatttaaatacattctggatctggaagacccagtactgacatgggatttaagggcccacttgggttcttgtattgacacttgtattggccccaaatgatcttctacagccttggcattttacttccaaagtcagcatcttaacttgggatcttggaatcccagttttgcagattatcaagtttgagaaacacggctctgtccagggcctctccccatagagtgcaggttcttcatagcacaagtgtgctgtgcatggccaccttgacaaattcatgcaaagtctctccctgttcaccgtggcttctactcttggggctgtgtttgcccagagagattcttttgtctaattctcacaaaagtattgtatgggttaacattagccttgggcatacactgttcccagattaactgttctaaaatgtaaccctattcataattctgtttgattgttccttgttcacatccgaattaagaacagacttctcattctaagcatgttgctctgaccttacctccagctccatccctactcgta

SEQ ID NO: 132468 - DNA, 261 bp, Homo sapiens
cccccactccatgcctgagccatgcatcagcctcagcactaatcagcgtgcccagcacagggacatcttatctccccagcaaagacacatatcctctgcccttaagctcagaggaccacatcttacactgtgcgtactccgcagagcctggcagtgcacaacacacactaaagatgctcaaagtgggtcattcaatctcacccagttgccatgactccttaagaaaagggacaagtgaccaggcacggtggctcacgcctg

SEQ ID NO: 132469 - DNA, 173 bp, Homo sapiens
aaattgtctaggggccttggctgtgcaaagagcctttccgtcaaaaccctctgcatgagccacagtcagcacgtagtttgcacatgcccacctccaaggtggcacacagctgctctcttttgagtaacaggttagcccagtttgctgcagaccagagtctacttacaatgagg

SEQ ID NO: 132470 - DNA, 502 bp, Homo sapiens
gatgcagaataaataagcataatatatctaataggagacaaaggtgggattgatctgtcttgaattgaaagtcagttttgctatgttacgctattttcttgatcaatgaaagtataccttctaacccttaacaaaatcaatacaattgattggaaaagatagaacaaagcatgagaatgcagaatacacttgaaccttcattattcagaaatatttaaatgatgtttataatgcttagaagcattttccactaactccatgtaatggaagcttctttaaccaagattgaagacctgagtaatagagtttgagaatatgctatagtggcatccttcatagaataacatggtttttgttttttttttttaagttaaactcatctcacattacttatacttctaaaagtgagagcaatttctattactgagcatagagatagcaaagtgaaattcaatcttgaaaataaagtatataaattaatatgaaaaacttagaaaagaaa

SEQ ID NO: 132471 - DNA, 1224 bp, Homo sapiens
gatcactttgactccttttctctgaatgctctgcctttcacttttctgaagctaccagggagggtatatcttgacatctttgttgaagtagctttcactccctgagctaccctgcttcatttggtgaatcttagtaaacaatttttctttaggaattttcctttaaccatcttaaacgtcaaggtattcttgccccctcctcacttcatatcacctcttcaaagtagaattgccttctctgctgtgcccactgctttgtacttatgtcacagcacttattttattttattcccatatatgttgttatgtgtaactatatataaatttataccagttttatatttattctcaactccttgagaatgaaagctgagttgtttgatatttacattaaaattaataaaaactgcctttgtaaaaggtaaatcactctttaattcatagacagactttgaaggtgccatgaacttattaatattttattgactgcatttttcatgtttttagagaaaatcattttgtgattttaatatctgagtctgagatattaatatctgtgttttaatatctgagtctgaaaacacagataaaatgtacatggaggcatgtatccagtgatttgaaggagtaatgtttctactttgtttatctcaatgatcaagtcttgtaaaacttgaggtaaatttaggttgttctaggggctgatattcactgtgaaacttcaaaaaatttttatattagttgttaatataagagatctaatgttttcgtggctcctacaatgtacttgaagtatattgtatatgtgataattttatgataaatttgatttctcatgtgtttttgcttaggagcttagactcaaactatctccctgcattctttctttgctttctatttaacattcattttttaatctgttataatatttttattgttttggttggactatacattaccataaccattaaaaatatgaaattcaaattgagtgtgtttataattgtacacaccagaatttgaagactaaacaaattaatgtaaaatatctcattagtacgttttaattagattacatgttaaaataatattttgcatatatattttatgtaaacatttattaagccacaatgctgctactcagcatacctgtaattaagcaaaaatatgcacacacacaaaacatacacacaaagggcctgaatttccaggaatttatagtct

SEQ ID NO: 132472 - DNA, 456 bp, Homo sapiens
ttattgttagtgataagcactggggtgtgaccttgagagtgacaagtgggattaggtggaatgaagggagccagggaagtgagacgcaaggctcagagaaggatcgtctctacgtgtgatcaccaagaaagatcgtctctgcagaaatcaccaagaaggatcggtctctatggagatcaccaagaactgagacagggcagtgttgcagaaagagtgctcagcatttaaatatcttcagggaacggtagaggggagtgactagggctctctagatgactgcaacaaggactatcaaagaggtgtggtctgatggcacaacttcaaagccacagtttcgggggggatgcgcaggaataaatgatctgaaagaggcaacaaggagcagggaggacacctaccccacctacctgtggttcaggggctgcgggaatatgaacaaccaccacttgagaggga

SEQ ID NO: 132473 - DNA, 274 bp, Homo sapiens
aataaataaaatcaattaaatgttttaatctgaatttgaaatattgtgaaaaagtataatgtcaaatttaaaaatcacatatgtatcttttattttcacactgtagcttttttattgtacctgaaaatctttaagagtatgattttattttgtatttatattaaacagatttacatctgctaaatatataagagctttctaagatccgtgctcatttctgttttccaagaaaaataattttaaagtgccctgtccactgtccctacccctatag

SEQ ID NO: 132474 - DNA, 345 bp, Homo sapiens
ctccgaccccagtccgatcgactgagcctttcagatgaaaggccagtttggtgctggtaaacatcacagttcttgagacccatctaggcaagggtagttgcccaagtcctgtgagtctggtcagccagggctgggctggcccctcagcagctgctgctcagcacgtttggagagaaccctggtcctggccctggcaccgcgtgcctgcctgctaccatcccctggtgggccactccacccagaatcccgttcttcccttttcctgtccctgcctccaggagggtcaggcagcggcaggggcctgtggccagtgcacccttcccatcacagagaagattggctcct

SEQ ID NO: 132475 - DNA, 180 bp, Homo sapiens
taggcgacagagcaaggtaccctgtctcaaaaaataataataataaaatcctgtttccaggttactgaggatactaaatctgccaaagaaaatccttctttgcctacctagcatggagaagggctatttctttctttgacatggctcctcagaatgcatggagatttggagctgtgttgt

SEQ ID NO: 132476 - DNA, 370 bp, Homo sapiens
atcccagccgaggcatgagaattgcgtgaacccaggagacggagagtgtagtgagccgagatggcaccgctgcactccaggctggacaacagagtgagactctgcctccaaaaatataataatacattcataaaagggcgtttctactttccaaactatactactatagtttgttaaatattatattgatggcaaaacgtgttccttgactaatggagacaacagagtaacagaaccacaaaaaactctacatgtaaaaaagcactgtcttcaggaaacttcacctccttgggaagtaggaaaaggagtattagcctcaacctctgaaagtgcacctcacagtagttcatatcctaacctccacacgtca

SEQ ID NO: 132477 - DNA, 160 bp, Homo sapiens
attcttgtcttggttctcccatgttctttaggatcagcttatcaaattccgcagaaagctctattgggattctgactggacttgctttgaatctatagattcatttggggagagaattgacaggcagcaggtataggaaggtgatggccaggtccttttc

SEQ ID NO: 132478 - DNA, 445 bp, Homo sapiens
tactatataatcttattttcccttttcccacatccttacttagataaaaaacacaattataccatgcctcacattgtttttgagatgtacaataataaaaataaattgtattaaacagcagaggaaaaaagccaatataacatatttcttcggttttgttggggaggggcatgagcattgttcagccataagcaaacagcatatctgtagacattgacataggctgtgcatcaccccaagcttccccttatgaagtaaacttctcaacaggcatgggatatacatcttcaagctcttctgttgaattgcagccagttaggcagctgtaagttaaataaaactttttgagaacttggcctattttagtagacgctcatatggtttcttcactgaagtctttattgaagctcagttatttggacacagaaagacaaactattttttt

SEQ ID NO: 132479 - DNA, 730 bp, Homo sapiens
gaatagtgataaaactaaaagctagtcctttgagaagattagtaaaattgatgaacgtcttcccagacttatcagaaaaagactgaaattactaatatgaagagagaggtgatatcaccacagaatattcagatattagaaggataatgaatgttatgaataactttatacaaattttattttatttttagagacagggtctcactctgtcacctgctggaatacagtagtgtgatcatagctcactgtagccttgctcctggcacaagcagtcctcctgcctcagcctcccggaatttggtaacttagataaaatggacaaatttccttaaagatacgaactacctaatctcattcatgaagatataaagaacctgcatagtaccatatcttttaagaattgaatttctcatttaaataaccattcctcaaagaaaactccaggcctagatggcttttctggtgaattataccaaacttttaagaagaaaatgttaccaattctatacaacccactgaaaaagttgaaattgaagaatatttctaaactcattatttgaggccagcattaccctgattctaaaatgagacagaaacattacaggaaaagaaaactgcagaccaatatcattcatgatcatagatttaaaaattctaagcacaattttaacaaagcaaatttaacaatatataagaattcatgatcaagtgggatttatcccaggactga

SEQ ID NO: 132480 - DNA, 632 bp, Homo sapiens
tcccagactgggcggccgggcagaggggctcctcgcatcccagacgatgggcggccaggcagagacgctcctcacttcccagacggggtggccgccgggcagaggctgcaatctcggcactttgggaggccaaagcaggcggctgggaggtggaggttgtagcgagccgagatcaccccactgcactccagcctgggcaacattgagcactgagtgagcgagactccgtctgcaatcccggcacctccggaggccaaggctggcagatcactcgcggttaggagctggagaccagccaggccaacacagcgaaaccccatctccaccaaaaaaatacgaaaaccagtcaggcgtggcggcgcacacttgcaatcccaggcactcagcaggctgaggcaggagaatcaggcagggaggttgcagtgagccaagatggcggcagtacagtccagcttcggctcggcatcagagggagaccgtggagagggagggagagggagagggagagctagcgtggatttttaaaaataatctcttgcacatcatacttaggacttgatagtttttgtggaatttgtgttatttacttataactagagtttgaatgtttattgggaaaacttaatcatgat

SEQ ID NO: 132481 - DNA, 562 bp, Homo sapiens
caaacaaaaaaaaaaactcccatgataaaagtttacctacataacaaacctgcagttgtaccactgaacttaaaataaaagttaaaaaataataataataatttttttttgtagagatggggtgttgctatggtgcccaggctggtctctcaaattcctgggctcaagcaatcctccgacctcagcctccaaaagtgctgggattacaggcatgagctacctcgtccagcctagatacattcttgaatatgtaactttgggaagatttattaattgattaaggactaggaggtccagctaaaatgcaattggatttataaggtacttaaatccagatttaaggtatgaaatcaagaatggcgaagaaatcaatgaactgaggtcttaaagaatcaattcattttattgactagctgaatacaagggatgattgacacaagatgaaaattgagtgttaagaaagaataacaatgggcaagtatgaatgattaggacataaaagggagcaaaagaagaatgtaagaaaaaatgtaaatagcatatttatcaaacctttttatat

SEQ ID NO: 132482 - DNA, 616 bp, Homo sapiens
tccgtattaactacggaaaccacaattactaattttaaaagacctcaacgtttgattttgtatttttacaaaatgaaaatgagatatgaacagcgaaatatgtagtatttattgaattttaactatgttccaggaactgttccaagcactttacacatttaactctcaaaccacctttaaaggtagttactagtattatttctttctaaccaacagacaatagtataacgtttaagagactggattcgggggccaatgcgcataggttcaaaaatctcactctggcaaatgttatacctcctaacttaatctatatgtctattttttttttcatgtataaagaagagtgataatagtagtacctacctgattggattgccttaaaaattaaatgagttaattgtacaaatgacttaagacagagtctggcacacagtaagtactacaggatgataggtcttattatttatattttatatgaagaaatcgaagcagagagaggctgtgtaacctgtcctgggtaaaagagctggtagttatgggtaggattctgatttctatcacatgttctttaatagtaagtgccttaactttcagtaaattctatatagaaatg

SEQ ID NO: 132483 - DNA, 677 bp, Homo sapiens
ggttcaagcaattctcttgcctcagcctcctgagtagctgggattacaagcacgcgccaccactcttggcttttatctgtacatttgagtgcacttttcgagtatagagtgtggatagttaagggaatcaatttctagatttttgaattcccgatgtagtttttcctaacattgctctgccagagaatgtgtttggaatggaggtgtgtgctctgctttcccaccttcacttgcgtcgttatcctttctcacttttagaaaggaaaggcacactgctaatccattttagatattacaaaggtccattgccctggatgtaaaaactaccaggacaccaaacaaagggcaattgaaaatttggtgtctgtgttaagatagtgaatgtcgagaaatactgtctcagggaatgactagataacagttttttgcaatattagtttccaatattttgctgtcaacagaactgaaagaaggcctgatagagttgtctgctaagtaactaatagatcagtaagtatatttttgatggtaggttactgttatttttgtcacataactcaaaagatttccaagaattgagagataattgctacaacaagacttccatttttatcttttcatttatgtgaaaaaagtttctcaccacttaaagttataaaaacaaaaaatagggataa

SEQ ID NO: 132484 - DNA, 540 bp, Homo sapiens
tcagcttcctcagagaaacaagaaaaatttcaactcagatattgctccataataaggtaagataatccttcagagatatagagcatactttttctggagccaaaatctatggacgtcttctcccatgaaaatgcctctgtgcataggcacataaaactttccatgaaatttcagggggagttgctgaaggccatccagggacgagtccagggggccaggagaccagctttagggagctgccatatggatctggagacagagccaggaccagtgctgcactagcatgaccctgagtgggtgcctcctcaaagtctctgccctaagcccttcctttgcttcactctagtcccagtcctgctgaagatggaaggttatgggtacatctgaaagtaataaatatccagtcacagatgtcatttcatattccatcataacctgattgacatcatatataaaagttggatgcttgtacattaaaaccttccctccaagtccctggtcataagggttaacatggtcccagcagcattgaattgggac

SEQ ID NO: 132485 - DNA, 749 bp, Homo sapiens
tgccttccttgctacctccttcaccatgattgtgaggcctccccagccatgtggaattgttaatgtttgatcaaaatcttcagctcgaaggaggagaaggtaaagggaatcctggcaatttggccatcactattaaaagaagacaagagcctgactatattgaaggaaaagaaggggttggttagaaagactgaatgatcccaacctggctcttcaaatgttccagttaatcacttggcttcaccccttctgccttctagcatgagcactcccagaactgaatgatcagagtcttgcctgctttagaaaggacatgactactcatgcaggccaactccctacttctcaaaacaaacacacactaccacacacacaaacaacacaccttcaccaccacccacccagaccccccccacacacaccctcactcaacacacacagccaccggagcggggcgcagcagcggcccccgaagcggacacccaccccgacccacgcgcacacaccacgcagcccctcgacaggacaaccccaggggcaacgacccaatcgcgccagcggaaacaaaccccccaaccacacaacaagcgcccacagatagggacaacacgcccgacaccgatgccaaaacacaagcacaccccaccgaacagcaaacaaccgcaaccgccaccacaacagtgggaaccgtacacacaacgaacgaaaacaaccgcgagaaccgcggacgataccacaatacaacgcgc

SEQ ID NO: 132486 - DNA, 202 bp, Homo sapiens
accgcgcctgcctagtcctagatcttaaaatgttccaagaatccaggccgggcacagtggcacttgcctgtaatcccagcacattgggaggttgaagtgggagttttgcttgagcccaggagtttgagtctgtggtgagatatgattatgccattgcactccatactccagtctgggtgacagaggaagatcctgtctcaag

SEQ ID NO: 132487 - DNA, 198 bp, Homo sapiens
ccccagttgagaaacatctcaagaatcaaataaatggcatgactaccctcatcaataccatacttttgaaagtttccaaacaaaagtgttcatccaagaattcaatggtatactggaatgtctctattcacttctctagtgtacaacacccactgcatagattttcatcactaaaacttatctttcccataactaact

SEQ ID NO: 132488 - DNA, 625 bp, Homo sapiens
atcatttaatgtttaatgaaatttattttcagtatattttatatgggtttttttacctcctctaaagaggaataatgtttattgattaaaagtgaaaaataatggtttagacaccaattctttttcaagatctttgactatattacgcattgtacaatggattttattcttcatgaaattttttagtttccctactggtaagatagagataatgacttagagagagttctacaggatactcagactttaaaatacttagattgatcgataaaagaaagtaaagcaaaagataaggagtgggagaatttcaacagaaaattagaagctataaaaaatcagtgggaccaggcacagtggctcatgcctgtaatctcagcactttgggaggccgaggcaggtggatcacaaggtcaggagtttgagatcagcctgaccaacgtggtgaaaccccatttctactaaaaatacaaaaattagccaggcatggtggtgcgctcctgtaatccaagctactcaggaggctgaggcaggagaatcgcttgaacccaggaagtggaggttgcagtgaaccgagatcatgccactgtactccagcctgggtgagagagtgagactctgtctcaaa

SEQ ID NO: 132489 - DNA, 582 bp, Homo sapiens
aatttttttttctggagaggacattttgatcttcaaaatatttggctacagttttacttttatacagttgaacagttacaccaaagttgcagactaagaacacagatgataaaggtttcgacaatgaaatgttcttatatcattaagtcttgacttattaaaagccctctttacaaataaatggaggagggaaatttctcagatttcttaacttggaacacagactttttgcaaaggcaaaaagacaaagggagaagtccttacttctccacccgccttgcaaggacagagaaatcttacactggagctgtgaacacccagctaactcaatagccactagagataggatgctaaaggcagagcgtcatagcagcaatacaaaaaatggcaattttttgtaatggaaacactatagtttgtccatactttaagcatgtcatggattaattaggctcttatccaatcaccttggacaccaagaagtgaaacagtctttctaaacgaaaatatcttctgagttccgaataatcattccacaaataaacttatggatgttttttataaacttatgattatttgatg

SEQ ID NO: 132490 - DNA, 323 bp, Homo sapiens
ggaggtaatgtggaaaacaggcagaacccagctcttcatgggcaggcctatttgggggtcaggggtgggctgtgacacaaaggcaggatcacacagctcctctgaagtctcagtaagatgttcttagagaccttcaccctgtgcacacaaagccaaatgatgtaatcatcatcacttcagtaaacttatttccattgcttaaaaagtaacccatattcactgtatgggatttacaaaacccaacaaactttctaaaagcaaaaaagaaggaagaaaaagacgagaaagagaaagaaaaaaaaggagctacgggagagaagaag

SEQ ID NO: 132491 - DNA, 320 bp, Homo sapiens
tttggccgctctcaggccagctgtcagctgcctctcccaggggtgtgagctgacgagagcttcaggtgggagcctctcccggcagtgaatctgagggttgggagggatttccggacccagagggaagatattttggggccgagggcctttccagaacccatgaaatcacacaccctgctgcgaccagactgaccctccctagttgatggttcttttttggacatcctaggcctgcttgggattctggccccatgatttagggtttctttggagcccatctgagcctggggggccctgtggtggtggaagaggtccagcct

SEQ ID NO: 132492 - DNA, 266 bp, Homo sapiens
tctgtggccaattccaattcaaccatagctggtgctccgtgctgcctgctctgagatgcattttccaggtaatgcccgggcttgtccaggagaagcaaaatatccgattaataatgtctgatgtgagcaagatgctcgttgtgtagcaacttgcagaatattttatattcccgaaatgtcatttcttagctatcagggtgaactaagtgaaaaatgacaggtccaagagaccagcctatgtcaaaaaataattaagacaaaaggaa

SEQ ID NO: 132493 - DNA, 437 bp, Homo sapiens
atttgttcaaagcctctgagtgaatgatggagccaggatttgaactctggatgtcagactccaaatcccgcatgttttcctcctgcaatgctgcaccttgttgatgagtggggttgattgccccttgtcgtctcaccatgcacaagggcagtgctggcttaaaggatttcattttaaatcccttaaaattaaaggattttatttcaaagaaattaaactttcctccatttctttgaataaattaggactacccatgctgggtcagcagtccacccatcgggcatggatggtgggtggggtgggatgtttcctccagggctgtctttgaaggtcagaagcgtccagtgcccctgtttcctgtcatggcccttgtgtctctctccctggtgagtttatcaaagtcctctggatcttagccatgtttttatcctgtgcca

SEQ ID NO: 132494 - DNA, 677 bp, Homo sapiens
gggatgtgctatttaaatattgtcaaaaatattagcaggtctgagaatataattgatgtctctgtttaactctgccacattgtgtattgttctaacgccagctaaaaggatgcatgctattaaacctgaataatctctaatagctctggttcatttcctattgcatgattcctgtttaagtgaagagaaaaaaaaagaactgtgactgtgtgtcaatgatctgtcaaatgcaaattctcaagtagtgtcctcactgtcacctagtcatcactgctaatcactacagggcttaatgcgtattcatgacaaaaatccagctattgtgggggaaataaacacgttagcagtttaataatagaaacttgtcagccttgaggatattggatttgcatatttattctatgaagtttctccagtccagtataggtggatgctactctcttgattaattaattgcgttgccttaagaattgaccagtggcactaaattaatctttttaccctgaattatctgtaggaaaactgagaattaaaatgattaatttcaatagaaatttaggaccaatacttaaaaatcgacattgctaagattatttttaaagctatggcaacagagaccaattccaagattggagaaataatgtagatgactcaggctgcaaaagctgcttagatgg

SEQ ID NO: 132495 - DNA, 626 bp, Homo sapiens
ggtcacacatgtggatctatgtcttcatgggtaatatgcttcgtggcataggggaaacccccatagtaccattggggatttcttacattgatgattttgcaaaagaaggacattcttccttgtatttaggtactgtgaatgtaatgggaatgactggtctagtttttgcctttatgctgggatctctgtttgctaaaatgtatgtggatatcggatatgtggatctgagcactatcaggataactcctaaggactctcgttgggttggagcttggtggcttggtttccttgtgtctggaatagtatccattatttcttctataccattctttttcttgcctctaaatccaaataaaccacagaaagaaaggaaagtttcactatttttgcatgtgctaaaaactaatgataaaaggaatcaaatagctaatttgaccaaccgaagaaaatatattaccaaaaatgtgactggctttttccagtctttgaaaagcatccttaccaatcccctgtatgttatatttgtaatttttacattgttacacatgagcagctacattgcttctcttacttatatcattaaaatggtggagcaacagtatggttggtctgcatctaagactaac

SEQ ID NO: 132496 - DNA, 653 bp, Homo sapiens
ttatgagtttcttcataattattactaagatactgagatgtttgccatccctaattctacaacttaattgtctatgtcattaatttgtgttttaaactcccttgtttttagactccatataaaaatgtgaagctgctagagggaaactcccttatatctgttgccagttttctgcagcaatggccacttcataatttaacagggtatttaatgtcaacttgttggttaatttatctactgatatatcactgaataaatgccgtacacctaaggaatatgactttgtaacagtactaaatggaacttaatatttttatgtaaatttttactaatatcctcacgtcaactttatttttaacagtagtaaatgaaatgtactaattggtgacagcaactttaaaatatccaagattttacttctttcaattttagctaaatctgttctaccctacagatgcatattgaactgaatgacaccaccagattatccagtcaattttgtgtcaggaacatgctaatcctcacatagttctgatcatgttttattattacccccattttgcagataatgataacattggaaatcaaaggcaatatggaaagtactcaaatgtggatagctactgtgaaagattagaatactattcagcaaa

SEQ ID NO: 132497 - DNA, 395 bp, Homo sapiens
taagagaatttgaaatagcatgttagacagtcctccctccaggggatgaggcttagttcagctgctaccatcctctttctgggtaggctagacacttccaaataacagagtatggaaacggaaaaagagtaactagtagagaaacctggtagatactacctttaacccagtgatgaaggtgagcatcaccagtgtggatgtaatgcaccctctaataggttgtgataagaagggtgctcctcctctgtagtgtgcttccccccaacctgtaaccccagtctaatcgtgagaaaaacatgagacagacttagactgggggacattctacaggatgcctgaccagtactcctcaaaactgttgaggtcattaaaattaaggaaaaactcaaaaactg

SEQ ID NO: 132498 - DNA, 112 bp, Homo sapiens
tgtggctctccaaatccctcagagtccttcattgtctgagcaggcacactcatcttctgtagtttaaaaggtggcagtggctgggcgcagtggctcacgcctgtaatcccag

SEQ ID NO: 132499 - DNA, 181 bp, Homo sapiens
tctcttttccattcaagcctgcactacctcctgtgttttctgtcttgactaatgctgtggcttcatgtgcaggctcctgagagagaccaacattgaccccttctttcactgtgtctccaccagatcctgttcattcacctcagacatgcatttccaaaagtctactttttaccacctctgc

SEQ ID NO: 132500 - DNA, 397 bp, Homo sapiens
tgtgctggctttaggtctgacccagtgtagtttcagtggtggggtggccacaggggtgcttgtgtaacctctcccctagctccaggtagctcagcatagacggacaaattccagttgtttgggagagagtaagaggagagaacaagagtctctccctggtaatccagagaattattctggattttacctaaaaccaccaaggtggtacctctatgagtctgcaagagccacagttttactacacttggggtgccacctaatgtagatacaaatgcagtgacaagagacctggatcacaacactcaagtccctttgaatactcggaaagccttcgcaagaaagatgggtaaaaacaagcccagactgtaaagactataataaatacctaactctccaa

SEQ ID NO: 132501 - DNA, 379 bp, Homo sapiens
tcctgcacattgcttgtagcctatggaaggaagacatgacttgagaagcaatttaataaagaatggtaggggctgtcgggggaattacacgtgccgtagaagtacatagaaggagcatccagctttgtctggtgtatggtggggggctcaggaaagcttgtctgaataatagtatataagccaagacttgaggaatgaactggtaaaggggagaaggagtttttcaggcagagggagcagcatgtaccaaggcctgaggcaagagaaagcaagacagggagggcagagaactgaaagaacacatttcagcatggctgggtcacgccacaatgaggccagtcacagatgagctagagagccagccaggggtcagggccga

SEQ ID NO: 132502 - DNA, 740 bp, Homo sapiens
gtcatgggaatagtgcaggagtaagatccaaaacccatagtcaagagtaaatagttacatttttaaacaagtgcttctcaataaacatagacttacaactttacgacttttgaggagaggagaaagttgctaatttcacctcatgtgtgggtaaggcttcaccagggaactatgcttgagcctggaaaatgaagaggagtttgcaaggtgggtaggaggggtgggggcctaccaggcagaaaagaatgcctatatcggaacacacaactccattctactttgcctactatccaaacaacctggacagaagtctgtctgtcacttatatttctaaaaatctccaaaacaggaaatacagcttgacccttgttatctgaagaacttagcagtggtgaaatttccaatcatggtattcaaactgccaaataaaattttgcagtcagcatttctcttaatccaacaaccttttcaccttcaagtgacttcccagcctcaaagagcctctcatcttttgtgggtctctggtgctccagaatttgcacagataatagttttttgctgtctttggaagacaagcttttggaccaggtagccagttttgggccctatttggggacataactggcaactctgggccccgagagaaagtcagaggtgctccactgcaaaattcacctggtgagaagaggggagggaatccagttttctttttctccactgcctttgttctttcccagtgt

SEQ ID NO: 132503 - DNA, 442 bp, Homo sapiens
caagctgaggtcagaaagcttctcaaacatacttatttctgggcatagccagtggctgtccctgaagcactaaaaagaacaagacccttagcaacataccagactgctgataagaggggctggagcgcagtgctgtgatcatagctcctgcaatctttaactcctgagctcaagcaatcctctcgcttcagcctcgtagtagctgcgactacaggtgtgtgctgccatcccccattaattaaaaaatattttttgtagagatggggtcttgttatgtttctcagcctggtcttgaactcctggcccttcccatttcagcctccccatgacgtggggaggtttacagacatgacccaggcccattcttctgattttgttttcctcttcatctaaaagaactcctttcaagattttatgagacagaagtaaacatcagcatctc

SEQ ID NO: 132504 - DNA, 253 bp, Homo sapiens
tctcacatggcatgcctgtgtcctgtgctttctttggaagccctgagctccactacctcccttgctaatcctcatcttcccttgaagctctgtctaacacatgtgttcttccctgggagcctgtcttcctctgagcaggtctcaggcttttctgctcagctctttcacagacccgtaattcacttttctgtttcccctacagactttgatctcttgagacctctacatctcgggagtctgacacacacatata

SEQ ID NO: 132505 - DNA, 348 bp, Homo sapiens
ttctcaaatcctgactcctttgcaaactacagacatgaagttgttcccatttttaaaacagggaggctgagtgtgaagctggaagaggcaggaatatccgctaagtcctccgtgggtgaggtgtcagggaggtgttcacattaaaacttcttctgtgcctttctttcactttggaaatgactcactgtgattctagtctcttgggggggctgacgggggctccccagggacccctgatgacagctgacccttcctaggtctctccattggtgcagtgtctgtgggtctttgttcaatggttttttttgagctatccaaatcccagtccttgcctgctgcctgcctagc

SEQ ID NO: 132506 - DNA, 425 bp, Homo sapiens
cggaagcaatccagttgctcccatctgaactcccagggctttcctccacttcctctgaattgctctactctctgtgctcatcacatttctgccctctccccctccacctctctaaatcttgcactagtttctcggtgacctattttctgattcctcaagtctacaccagtctctcagaatgtttataacagttatatttacttggtgcttattgtaaattaccatttgcctttttatgtgtgtgttcctccacctccattttgatagtagatttttttggagggcagtcactatctcctgtgggatttttttattctttaaacaccaacttactactttacccaaagcagaatttggatataaatttgtaattaaccattgtaattcccaactattgctgcataaacaggcacagctgacagctc

SEQ ID NO: 132507 - DNA, 376 bp, Homo sapiens
tgaaataccctggacattatatataaaataaacatttaaaaattctgaccagcctggccaacatggcgaaaccccgtctctactaaaaatacaaaaattagccgggcgtggtggcacacacctgtaatcccagctactcaggaggctgaggcacgagaatcgcttgaatccgggagggagaggttacagtgagctgagattgtgtcactgcactccaacctaggtgacagagtgagaccctgtctcaaaaataaaaataaaaattctgaaaggtggagaaggaagaagactggctagggaccttggggtctgaggaatgacacagctgtgagtctgctgagtttgttttttcttatttgtttgtttgtttgtctca

SEQ ID NO: 132508 - DNA, 470 bp, Homo sapiens
tatctcccagattctaaggagaagacagttgtgtcttcaaaagaaaaagattccagacactcctccctaatggaattcttctgatcccatagttcaaatcaaatgaaatctctctaacagcatcagagatgaaacataaatgtttggtagaaagagagtcaggcagggcattatggctcaagcctgcaatcccagcactttgagagactgaggcagaaggatcgaatgtgcttagagaccagcctgggtaacaaagtgagaccttgtctctatttaataagaaatattttttaggccaggcacagtggctgacgcctataatcccagcactttgggaggccgaggcggacggatctcttgaagtcaggagtttgagaccagcctggccaacatggtggaacccccatctctactaaaattataaaaaaaattagccaggcacggtggcgggtgcttataatcccagctat

SEQ ID NO: 132509 - DNA, 380 bp, Homo sapiens
tatctcccagattctaaggagaagacagttgtgtcttcaaaagaaaaagattccagacactcctccctaatggaattcttctgatcccatagttcaaatcaaatgaaatctctctaacagcatcagagatgaaacataaatgtttggtagaaagagagtcaggcagggcattatggctcaagcctgcaatcccagcactttgagagactgaggcagaaggatcgaatgtgcttagagaccagcctgggtaacaaagtgagaccttgtctctatttaataagaaatattttttaggccaggcacagtggctgactaattttttttataattttagtagagatgggggttccaccatgttggccaggctggtctcaaactcc

SEQ ID NO: 132510 - DNA, 269 bp, Homo sapiens
atagaaacattaaaagtaactagctattgaacatggcaacaaaaatagttaagaaccactttatctcataaaacataaatttcagcctccagtggcatgtctgctattatttcataattctgggtcccactccctattaagtccaaggctgtgtcaggatgatttaggaagataaagcaatgttacaccacatattttcaacccaggtacctttaggcatacatccaaatgtgaatatcagatctgtacaaatgtaaatggagttgtca

SEQ ID NO: 132511 - DNA, 496 bp, Homo sapiens
ttacaagattttaatcagctattttaaacgtgttcaatgaactacagaaagtcacatttaatgaactaaagaaaactatgagaacgctatctcaccaaatagagactaatatacaggactttaaagaaattaatccaaaaagaattctggagttgaaaaatataactgcaatgaaaaagtatccagaggagctcaacagcaaatatgagtaggcagaagaaagaaccagtgaacttgaagaaaaaatcaacaaacatgaagacaggtcaattgactctcgtctaaggaacagaagaaaaaataaaatggagaccacaaggtctcagagacctgtgggacaccattaaaaagactcctatggcaggcacggtggctcacacctataatgccagcactttgggaggtggaggtgggtggatcacctgaggtcaggagtttaaggcagctcacgcttataaccccagtactttgggaggcagaggtgggtggatcacct

SEQ ID NO: 132512 - DNA, 175 bp, Homo sapiens
cgcatctattcgaggcaaataaataatgtttactagcaatgtcaagaataggagaagggttgggaggtgtttctatgttttagaagcaagatttttttcctacctctagattgccaaagttttattttgtttttatctctgtactatgactcatgttatgaccttatatgaagaa

SEQ ID NO: 132513 - DNA, 502 bp, Homo sapiens
gaggaatccaaggatgttgtggaactaccacttgctaaagagattaccatgactaaatggaagccaggcgctaatagtcaagactatgggtaaaaggcccaatcacaggcccagagacctaagaagacagaatggttttgggagccaggcccaggttctgctgtcctgtgctgtctcaggatgttccttcctacatccccaccacttcggctccagctgtggctcaaagggccccaggtactgctcaagctactgctccagaggacgcaagctgtaagccttggtggcatgcatatggtgttatatccacaggtgctcagaatgcaataggggttggagtccccacaactggtgcctactagggcagtgcttaccaccctccagactccagaattattagagcccctgggaagtgttgcgactgcagcctcgttaaaactgttaagcttgggactgcaacccatgaggagcagccacgttgggtgcacctagcagaaccatg

SEQ ID NO: 132514 - DNA, 438 bp, Homo sapiens
tcctttcatctttagggggtctcaagtcccctttcctgtgtgtagcagattctgccagccttggctgtgtgtcagggagaagaggggagctacagagtcttccctgtccttctctctcccaggtgacctctacagggctctggggccacttgcttaagggagacccgacttctgcacccggtcatatcctccccagggcatgaccacttcccctaccagacgtagtaggccagtttcagccttagtaatctaagaaatatgtgagcaatttgatgcggatctcagagagcctcgtggaagtaatggcgctgagagatggcgcctggggaagaaagaggagacaaggatagtattctggccccagaagaaactatgaggtgggatataatctttttaggtgtatgggagattgcttcatatagggtggggaagaactag

SEQ ID NO: 132515 - DNA, 116 bp, Homo sapiens
ctaatggataggtgtttttcaaattccaggactctgtttagaacgaggagatagaatcacaaccagggtaagtcttcctgtgttctgagcagtggagaagagatgtatgtacacag

SEQ ID NO: 132516 - DNA, 183 bp, Homo sapiens
ggaagcctgagagccctgttttctcaaagagcccagagttcaaattgagtgatataagctgagtacaaatagctgttgtattgtatgacatagagtgggtgagagttgcacagtccaatatggtagttcctagcaacatgtgcctacttaaatttaaatcagtcaaagttaaataaaactcaa

SEQ ID NO: 132517 - DNA, 293 bp, Homo sapiens
catacctggaccttctactgataattcccttaacccgagcgctaccaggcatacctggaccttctagttatggcttcagcacttctgtccttgattagcttatagccttcatcttgctaatataaccattttcttgagaccattggattttgagtgagttgcctgttacttgacatacttctacgactattgattctatatgttactgttaaattttggtaacttcatattagaaaatattgttttctataagaaatattgtattccatatttctgatagtcaatttaatatc

SEQ ID NO: 132518 - DNA, 384 bp, Homo sapiens
cctgctgctccctcttcatctgtgactgtacatccgttcattcctcaccaaagatcactgggcacctgctgtatgccaggcactgtgccctggacactgggcatggggacagagcaggggaacagcccccaccctcctggagctgacattcctccagtcctggggacaaacaggacaaaagatgaaatgaaatatcagcagggggctggggctcaagcctgtaatcccaacattttgggaggctgaggcgggaggattccttgaggtcaggagttcgagaccatcctggccaacatggtgaaacccccgtctctactaaaaatacaaaaaaaattagctgggcatggtggcaggtgcctgtaatcccaactaatcaggaggctg

SEQ ID NO: 132519 - DNA, 562 bp, Homo sapiens
cacctgcagcgggagcttatcatcatcactcaccgaccaaaaaaaaaaaagaaaaaaaggtgggggggtggggcggaggggaagaaggtcgaatcagatcacccctagaggtctctctgccctcgcaatcactctcaagtcctagagtaccaaacttaactgcagagggagcacgaaatggtgggtattttgaagcgctaatttttagggatcccctcccatccaaaacagggatgaatagttgaggaacaccggagcggggccctggcccttctcggaacgttgagcagacctaacatgacgctggtccgttcaaacgtcgcagttgtggcccacacagagcccagtctgttcccaggggcgcgccctgcacccctctgcctgcccgaggtcttccctcccctccgctccccagaaacgcacccactgagacatgtgcggggagggggcacgcttactcccacatcccgcccgagacccgcggagcagccaagacccggccaaaaaggggagggcgtggcaggcaagggccgggggcgggagcgcgggcggccgcggactc

SEQ ID NO: 132520 - DNA, 199 bp, Homo sapiens
gccagaaagatataaagcaggtgatggtttctaaaagactgctgtaaacagattatagatcattcctgaattatgcacaagcataattccttatttttgcctcctttcctcccctcctctctcctgattaattcagcacatatttattgagcacctactgtgtgctaggaactgtgttgggtgttgatacacagaattg

SEQ ID NO: 132521 - DNA, 358 bp, Homo sapiens
tctgattttttttgaaactgttagcttttgagtaaagatataagtctcccagtgagcctctgccgatactcgtgaaaccacatggcttatgtgctgcagcagctgtagcgccccattcattctgctgttagccatagtagacaatgaaggtgtcaggttatatgctccctataggctgaaaccatgtctcattcacctttattcctcagtgcctcctgagcccagcacatagtaattgcatggtagacaggttgtgtggctcaacacctgtaatcccagtgctgtgggaggattgtttgaggccaggactttgcaaccagcctgtgcaataaagccatatcccatctcttaaaaaaaa

SEQ ID NO: 132522 - DNA, 440 bp, Homo sapiens
cctcccaggttcaagccattctcctgcctcagccttccgggtagctgggactacaggcgcgtgccaacatgcccggctagttttttgtgttttcagtagagatggggtttcaccaagctggcgaggctggtctcgaactcctgacctcaagtgatcctcccaccttggcctcccaaggtgctgggattacaggcgtgattcaccgcgcccggccagttgtacgctagatctcctgaaggtaatcctcctgtctagttgatattttgtaactttcagcaacatctttccagcccctggtaaccaccattttcctcttcgattcaagtttcttggcaatgaatagtcttgaacagatatttggaattaccttttgaaggaagtacgattcttggctcagtgtaacttactcaagtatccgaaagggctgatttataagggag

SEQ ID NO: 132523 - DNA, 487 bp, Homo sapiens
tgatctagaggatcccgagaagagacagaagggcactgtagagatagagctttcttggtgatgaaagacatagagtgttctctataagcacctcctagagggggcctaagtgcagctcatggtacctgtcttagtctgttttgtgctgctgtagcagaatgcctgagagtgggtaatgtatacagaacaaaaatgtatttggttcacagttttgaaggctaagtccaagatcagggtgccagcgtcttacaagggccttcttgctgcaccactccatggtggaaggcgagagggcaagagagagcagagcacaagaggggactagattcattttttcctaaggaacccactcccttgagaacgacattaatccacgcgtgagggcacagcccccatgacccaaacacctcccaagaggccccacctcccaacactgctgcattaagatcaagtttccaacacaggaactttgggggacacatttaaa

SEQ ID NO: 132524 - DNA, 443 bp, Homo sapiens
tggcggtcccccgctctcgggaggtcagcatattgatgccgaacttagtgcggacacccgatcggcatagcgcactacaacccagaacccttaggattcaagaaaaacatgcatggaaagaacctgctttgggcaagatctcccatcccccaccaactaccagccagtaccctgaaggcaaaatggaggataatgccccttatactgcagtccccagacaagggagaatactttttgtgtcctaaatcagaaaaatccctaaggtccatttagttcaaaactcctgtaagtctccctggtattaagggctcttaaagtaggaaaagctataacttagtggcaaaccagatagatcaaggctagaaatctggctgtgtcatttaccagctagaccttagacaaaggaccaagcatatccaagctttaggttcctcatctgcaaa

SEQ ID NO: 132525 - DNA, 341 bp, Homo sapiens
tataaataattaaattggaaataagaaaaaaggtgtttagctgtcataaatattcaagttttgatgtttcaaattcatattagcattaagaaggtggatttacagttcttgcttatgtcttctttttaaaaaaatattaatttaagaaaagtttcagggcaggtctagtggctcacatctgtaatcccagcattttggaaggctgaggcagttggattgcctgagcacaggagttcaagtccagcctgggaaacatgccaaaaccctgtctctaccaaaaacagaaaaaattagcagggcgtggtggtgcacgcctgttgtcctagctactctggaagctg

SEQ ID NO: 132526 - DNA, 148 bp, Homo sapiens
cagcctcccaaagtgctgtgattagaggcatgacccaccatgcctggccactgaaaatatttcaaatttgactaaaactgtatttacaaagatctagagatttcaactataagtaagaggagaaaaatgaaggaaatggcatcaagac

SEQ ID NO: 132527 - DNA, 434 bp, Homo sapiens
tgaggtgtgaggtgaatgcaagtgtaccatcccacagtcagggatatccagcataacaacaggcctcccaggaagcaagagccccccaggattggagtgtgggcagggatcccaatgccccatgcccgcctgcttgcatgggaggggcccatgggccatatagctctctgccccctgcatgaggactgctgcagccaaccctggcagaggccttgaggcaggaggaagactgcgaccgccaaggatgcctctagtcaccacccacccaacctggtcattctgtccccaattcctcatttctatgccaaatattttcttcctctcatccttttcctcatcaggacctcagaggaaagcccactaaatgcgttctctctgaagatagtttataataaagcaagatcggggtggctttccaatggtggaatttcagg

SEQ ID NO: 132528 - DNA, 471 bp, Homo sapiens
tggagattaggatggaaggtattcatgggacagtatatgtgataaagaagctctttcaattaaataaaaagaagacagcactagcttgcttgaaaaaacacaattatatttgaattcttcacatgtcaatatgttagtctttggcaacctacagaaaaccatcatcatactttttttataccaatagtgatgactccactttgaccaaaaggcgaatcaatgtagaaaaaagtccattgtcttcactgtggaaagtacatcgaatctggagtcagatggattagcattcaggcctcttggtagttttctgatattggacaatttacttactctgtatttgtttcagttaaaaaatggggaatttgtcttaacatttttgtgagtattaaaataagagattttaaaggtgcctggcacagtgcctgggacagagtatgtgctcaattatattagtcacgttcctgccttgtc

SEQ ID NO: 132529 - DNA, 550 bp, Homo sapiens
aattaataaatctttatcgcgtgtttctttataaagactatagttctcaatgttaaatgtttgggaaataagcagagtaaaggtctcccactgtgtaaagactggctcccacttcttgggaaggctagacagaccctgagtgtattcaatgcagtataaaagtcaagggcaggaactttggagccaggtgagctgggtgtaaatcgctgctctctgactttgaaggtcaatgaccaggagcaaattacttcccatctctgtggctaggtgatgttcattccaatggtttcctactcctgccttctgcattatagcttatgtgaaataagcaagaaggagcaggagcaagccttggccgcggcgcttgctggcatcctgtgggctgcaggagcagctcagaaggccaccatctgtcttgtcactgaggacatttacgttgcgtcgactccggactactctgtggacaatttcactgagcgagtaagtgcagttctccctgtcctggcagatgaaaggccagtgaagcctgagcatgtaatagacttaccat

SEQ ID NO: 132530 - DNA, 819 bp, Homo sapiens
  misc_feature (819)..(819): n is a, c, g, or t
ctacaggcagttggttaatgtttggattagcggtatctgttaccagtttagataatttggcattgctctgttggagtgtttaatgagttaactcattaaagttaacagggaaagaaacactttggagatcctgcatcacaggctacttaggttgcaagcaaatgtcttagaaataagagcaggaaggataaaatcctagaatattactaaggtgaccggtaaagaagtttctccttcagaatgaaaggactatttttgacctggaaaaaaagttttttgataggggagggaggtgatcaacaaaaagcttttgatagggtacatcctaggattttgccaatagtttgaatttcttttatgacaagtttccccaaccaaacaatcattctatgtcgaagagcagaggactcagttaaaaagaggtatgaaataggatgttaataatggcacaacatggcagagtggatccagtagagcaacagtttacaaatgaatagctctctcacatgtcagttaagacattctccttgatttagaggagattccagttttggaaattatagtaaaagttttttaaaaaaaatttaagtaaaattgctatccttggcagatacctgatgtgatcacaaaaagaaaaaataaaaaaaaaaaactttttgggggcccgcgaccggaaaatttagaccaatctgtggggcgcggccaaggtattgatcggtcacttctcaggaaccggccagacggcgggtccccaaaaaacccgggcccggcgttgacaaccaggtgcggctaggctcacaggcagctacccccgcgcan

SEQ ID NO: 132531 - DNA, 553 bp, Homo sapiens
gggctgaggcttgaatgaagaaccagccacacaaagatctagggtcagagtgttccagagagagggaacagcaagtacaaaacccctaaaatgggatgaatttggcagaatgaacctcaagggctcaaggaacagaaagaaataaaatgtggctgataaagagggaggggagaagagtaagagaagaggtaaagaggcaagagtgggagctaatttatgatgaggagtctggattttattacaagtacaatgaaatcccccctcgggtttttaagctggagaataacatgatctgacttacatttttaaaagatccctctgcttgcctatgtgggaaatcaactgtaggaagcaagaattgaatcagagaaacaaggacagtgaagatggaagccaagcagcagttgagtaactcaagcttccctctgccatttaacattatctcagcccagagcaactggcttgtttcctttttgcttcttttcctgagtttacttgtcctgctgatggagtcacttgctctaggttacagtaagacccagagaagagctga

SEQ ID NO: 132532 - DNA, 693 bp, Homo sapiens
taacttgttactgtcaccccttggtccaacaactggtagaatcattccaaaggagcctttaaagaacaattgacagagctgagacccagcgtagagtagcgcaggccaggtgttgtggctcacgcctgtaatcccaacactttggaaggcttagcctggaggattgcttgaggccaagagtttgataccagcctgagcaacatagcaagaccccacctctacaaaaaataatggtggcacatgtctgtagtcccaactgctagggagcctgaggcaggtgaatcgcttgagcacagaaggttgaggctgcagtgagctgcaatcatgtcacttcactccagcctgggtgacaaactgagaccctatatctaaaaaaaagaaaattaaaaaaaaaaaaaaattttgggggggcttgggcccgaaaaaatttttaaacccttcgttgggggccggcggggcgcccagatgtggatacggcaacactggggcataaagcttgtgtcccccagaaggaagacccgggggccaacagaatctacgggggctgtgggtttcctcccccaattaaaaaaaaccgcgccggggggggccgacgcgcgttttctggacaaattcccaaggggagtgtcccgaaggggcctaagcggggtctttcaagcagggggttcccaagaggagacttccgaattatca

SEQ ID NO: 132533 - DNA, 364 bp, Homo sapiens
cggacgcgtgggtcgacccacgcgtctctttaatgtgatcactttcaaatttaaaagatccaggtggaaatatttttactatagtaataattctacaaaatacctgaattcttaacactgttatatttcagtataagtggtggctttttcttttcatgtctttgatctggttttattcctgtaattcagccacctgattttgtgaggggggggaataatatgtggtttttgtacaaacatgtttctcagtgtgttgttattttggaaaaaatgaggggagggagtttggcaagaatggagaaaatgaatgaagaaggcctaatctctctctttttcagtgaataaatggaacaccatttctgga

SEQ ID NO: 132534 - DNA, 385 bp, Homo sapiens
acatatttgtttttgtaagctcctttatagcacagagcgtgtctcagacatctataaatttcccataacgtaagtacttagtaggtactaggaagtaagccaacattttctcctgcaaaaattgtactagtttttgaatgcctgtctttatcttgcagtatgttcatgcggatgctcctaccaataaaacactggctgggctggtggtgcagcttcttcagttccaggaagatgcctttgggaagcatgtcaccaacccggccttcaccaaactccctgtaagtacatcagcttactgttatttgggcatcctcagttgctgtatacttttaggtgtagcatccagcttttttcctttgctgctgctagcgtgtagaatttaaaa

SEQ ID NO: 132535 - DNA, 875 bp, Homo sapiens
  misc_feature (601)..(601): n is a, c, g, or t
  misc_feature (804)..(804): n is a, c, g, or t
  misc_feature (806)..(806): n is a, c, g, or t
  misc_feature (833)..(833): n is a, c, g, or t
  misc_feature (850)..(850): n is a, c, g, or t
  misc_feature (866)..(866): n is a, c, g, or t
aaacaggtcttgctctgttacccaggctgcagtgcagtggcatgaaaacagctcaagggatcctccaacctcagcctccctgggggctggcactacgggcacgtgccacccatagctatgatacttgggtccatagtaatgatgttgatgctgaaattgaagatccaccaattccagaaaaaccatggaaggttcatgtgaaatggattttggacactgatattttcaatgaatggatgaatgaggaggattatgaggtggatgaaaataggaagcctgtgagttttcgtcagcggatttcaaccaagaatgaagagccagtcagaagtccagaaagaagagatagaaaagcatcagctaatgctcgaaagaggaaacattcgccttcgcctccccctccgacaccaacagaatcacggaagaagagtgggaagaaaggccaagctagcctttatgggaagcgcagaagtcagaaagaggaagatgagcaagaagatctaaccaaggatatggaagacccaacacctgtacccaatatagaagaagtagtacttcccaaaaatgtgaacctaaagaaagatagtgaaaatacacctgttanaggaggaactgtagcggatctagatgagcaggatgaagaaacagtcacagcaggaggaaaggaagatgaagatcctgccaaaggtgatcagagtcgatcagttgaccttggggaagataatgtgacagaccaaaccaatcacatttatttattcccaagttatgcatccaagggtttgattaaaaactgtattcaatgtgaantngaaaggggcgttgcctccttccctgangttccctccaatggggnaaaaaaaccaaaattncaaaggact

SEQ ID NO: 132536 - DNA, 338 bp, Homo sapiens
cttttggggtctttgctcttttggggtctttgcgcttttggggtctttgctgggagggtagaatgccattccagaggacaagccacaaaaatgccttaatttgagctcgtatttacccctgctgataagtgacttgagagttcccggttttttcctcttgtccttccctcccttctgtccttccatgtgtggggaaagggtgttttggtagagcttggtttccaaagcgcctggctttctcacttcacattctcaagtggcagtttcattatttagaatgcaaggtggacatcttttggatatctttttcagtgaataaatggaacaccatttctgga

SEQ ID NO: 132537 - DNA, 541 bp, Homo sapiens
gctgggcggggccgggaagcggcagtggcggctacgcgcgcgggggtgcgcgcgggaacgaccgggaaacaccgcgagggccggggtgggccaggctgtggggacgacgggctgcgacgatggccgcagcggcgggcggcggcgggccggggacagcggtaggcgccacgggctcggggattgcggcggcagccgcaggcctagctgtttatcgacggaaggatgggggcccggccaccaagttttgggagagcccggagacggtgtcccagctggattcggtgcgggtctggctgggcaagcactacaagaagtatgttcatgcggatgctcctaccaataaaacactggctgggctggtggtgcagcttcttcagttccaggaagatgcctttgggaagcatgtcaccaacccggccttcaccaaactccctgtaagtacatcagcttactgttatttgggcatcctcagttgctgtatacttttaggtgtagcatccagcttttttcctttgctgctgctagcgtgtagaatttaaaa

SEQ ID NO: 132538 - DNA, 278 bp, Homo sapiens
tcttcagcatttaaaaatgagcaaataatttctgatttgtttccttagagtaagggtgctagtgctggaagagaatggactgaacgaggagacccttctactcctggaggtaagcagattaatgcatatgggatgtgtgctaagattctttgactagcattttattttgtttggttttatttagaggcagggtctcgctgtgtcacccaggctggagtgcagtggcctgatggtagctcagtgcagcctctacctcccaggctcagtcgaacggactg

SEQ ID NO: 132539 - DNA, 6346 bp, Homo sapiens
gctgggcggggccgggaagcggcagtggcggctacgcgcgcgggggtgcgcgcgggaacgaccgggaaacaccgcgagggccggggtgggccaggctgtggggacgacgggctgcgacgatggccgcagcggcgggcggcggcgggccggggacagcggtaggcgccacgggctcggggattgcggcggcagccgcaggcctagctgtttatcgacggaaggatgggggcccggccaccaagttttgggagagcccggagacggtgtcccagctggattcggtgcgggtctggctgggcaagcactacaagaagtatgttcatgcggatgctcctaccaataaaacactggctgggctggtggtgcagcttcttcagttccaggaagatgcctttgggaagcatgtcaccaacccggccttcaccaaactccctgcaaagtgtttcatggatttcaaagctggaggcgccttatgtcacattcttggggctgcttacaagtataaaaatgaacagggatggcggaggtttgacctacagaacccatctcgaatggatcgtaatgtggaaatgtttatgaacattgaaaaaacattggtgcagaacaattgtttgaccagacccaacatctacctcattccagacattgatctgaagttggctaacaaattgaaagatatcatcaaacgacatcagggaacatttacggatgagaagtcaaaagcttcccaccacatttacccatattcttcctcacaagacgatgaagaatggttgagaccggtgatgagaaaagagaagcaagtgttagtgcattggggcttttacccagacagctatgatacttgggtccatagtaatgatgttgatgctgaaattgaagatccaccaattccagaaaaaccatggaaggttcatgtgaaatggattttggacactgatattttcaatgaatggatgaatgaggaggattatgaggtggatgaaaataggaagcctgtgagttttcgtcagcggatttcaaccaagaatgaagagccagtcagaagtccagaaagaagagatagaaaagcatcagctaatgctcgaaagaggaaacattcgccttcgcctccccctccgacaccaacagaatcacggaagaagagtgggaagaaaggccaagctagcctttatgggaagcgcagaagtcagaaagaggaagatgagcaagaagatctaaccaaggatatggaagacccaacacctgtacccaatatagaagaagtagtacttcccaaaaatgtgaacctaaagaaagatagtgaaaatacacctgttaaaggaggaactgtagcggatctagatgagcaggatgaagaaacagtcacagcaggaggaaaggaagatgaagatcctgccaaaggtgatcagagtcgatcagttgaccttggggaagataatgtgacagagcagaccaatcacattattattcctagttatgcatcatggtttgattataactgtattcatgtgattgaacggcgtgctcttcctgagttcttcaatggaaaaaacaaatccaagactccagaaatatacttggcatatcgaaattttatgattgacacgtatcgtctaaacccccaagagtatttaactagcactgcttgtcggaggaacttgactggagatgtgtgtgctgtgatgagggtccatgcctttttagagcagtggggactcgttaattaccaagttgacccggaaagtagacccatggcaatgggacctcctcctactcctcattttaatgtattagctgataccccctctgggcttgtgcctctgcatcttcgatcacctcaggttcctgctgctcaacagatgctaaattttcctgagaaaaacaaggaaaaaccagttgatttgcagaactttggtctccgtactgacatttactccaagaaaacattagcaaagagtaaaggtgctagtgctggaagagaatggactgaacaggagacccttctactcctggaggccctggagatgtacaaggatgattggaacaaagtgtcggaacatgttggaagtcgtactcaggatgaatgcatcctccactttttgagacttcccattgaggacccataccttgagaattcagatgcttcccttgggcctttggcctaccagcctgtccccttcagtcagtcaggaaatccagttatgagtactgttgcttttttggcatctgtggtggaccctcgcgtggcatctgctgcagcaaaagcggctttggaggagttttctcgggtccgggaggaggtaccactggaattggttgaagctcatgtcaagaaagtacaagaagcagcacgagcctctgggaaagtggatcccacctacggtctggagagcagctgcattgcaggcacagggcccgatgagccagagaagcttgaaggagctgaagaggaaaaaatggaagccgaccctgatggtcagcagcctgaaaaggcagaaaataaagtggaaaatgaaacggatgaaggtgataaagcacaagatggagaaaatgaaaaaaatagtgaaaaggaacaggatagtgaagtgagtgaggataccaaatcagaagaaaaggagactgaagagaacaaagaactcactgatacatgtaaagaaagagaaagtgatactgggaagaagaaagtagaacatgaaatttccgaaggaaatgttgccacagccgcagcagctgctcttgcctcagcggctaccaaagccaagcacctggctgcagtggaagaaagaaagatcaagtccctggtagctctcttggttgagacacaaatgaagaaactagagatcaaacttcgacattttgaagagctggaaactatcatggacagagagaaagaagctctagaacaacagaggcagcagttgcttactgaacgccaaaacttccacatggaacagctgaagtatgctgaattacgagcacgacagcaaatggaacagcagcagcatggccagaaccctcaacaggcacaccagcactcaggaggacctggcctggccccacttggagcagcagggcaccctggcatgatgcctcatcaacagccccctccctaccctctgatgcaccaccagatgccaccacctcatccaccccagccaggtcagataccaggcccaggttccatgatgcccgggcagcacatgccaggccgcatgattcccactgttgcagccaacatccacccctctgggagtggccctacccctcctggcatgccaccaatgccaggaaacatcttaggaccccgggtacccctgacagcacctaacggcatgtatccccctccaccacagcagcagccaccgccaccaccacctgcagatggggtccctccgcctcctgctcctggcccgccagcctcagctgctccttagcctggaagatgcagggaacctccacgcccaccaccatgagctggagtggggatgacaagacttgtgttcctcaactttcttgggtttctttcaggatttttcttctcacagctccaagcacgtgtcccgtgcctccccactcctcttaccacccctctctctgacactttttgtgttgggtcctcagccaacactcaaggggaaacctgtagtgacagtgtgccctggtcatccttaaaataacctgcatctcccctgtcctggtgtgggagtaagctgacagtttctctgcaggtcctgtcaactttagcatgctatgtctttaccatttttgctctcttgcagttttttgctttgtcttatgcttctatggataatgctatataatcattatctttttatctttctgttattattgttttaaaggagagcatcctaagttaataggaaccaaaaaataatgatgggcagaagggggggaatagccacaggggacaaaccttaaggcattataagtgaccttatttctgcttttctgagctaagaatggtgctgatggtaaagtttgagacttttgccacacacaaatttgtgaaaattaaacgagatgtggaaggagaacctcagtgattttattccctagtgaggcctctgagggcctccacactgcctggcagaacataccactgaactagtatgtgctagaggagggcacaaacatccgctccttccctaggcctgctggctctggttttctatgcagatgattcattggattgggggtgagtgttttgtttttctgggggcagtgtgagctttgagggttggaatattgggaggcattccttagtttcctcaactagcctggaaagttaggagtctagggtaattaccccccaatgagtctagcctactattcactgctttgtgtgcatttttttctccctctttaaaaaaccctttaaaagaaaaaaaaaagtagatagtgctaaatattttagctcatgaaacttggttaggatggctgggggtacaagtccccaaactacctcttgttacagtagccagggagtggaatttcgtcaaccggtacttttaaggttaggatgggacgggaaaagtgaagcaggatattagctccttataccttctcccttccatttctgagatctcacattccatctatcacagggttttcaaagagatgctgagggtaacaaggaactcacttggcagtcagagcatcatgctttgaggtttggggtgctcaggctgggagggtagaatgccattccagaggacaagccacaaaaatgccttaatttgagctcgtatttacccctgctgataagtgacttgagagttcccggttttttcctcttgtccttccctcccttctgtccttccatgtgtggggaaagggtgttttggtagagcttggtttccaaagcgcctggctttctcacttcacattctcaagtggcagtttcattatttagaatgcaaggtggacatcttttggatatctttttctatatattttctaaagctttacatatgagagggtatagggaggtgtttataaaacacttgagaacttttttccttaatatcagaaagcaaaaaaataaaaccacaattgagatttgcctttcaaaccctcaggtttgcctctaaccaggtgtccctggtcaccatcagagtactggaatacgggaaccgaggagaccttggtccttttgtttttgttctggactcttgggagtggaaatgagaatgagtttattcctactggagcttagttccaatgcatttggctccagaaagaccccagtgccttttgacaatggccagggttttacctacttcctgccagtctttcccaaaggaaactcattccaaatacttcttttttcccctggagtccgagaaggaaaatggaattctggttcatactgtggtcccttgtaacctcaggtctttaatgtgatcactttcaaatttaaaagatccaggtggaaatatttttactatagtaataattctacaaaatacctgaattcttaacactgttatatttcagtataagtggtggctttttcttttcatgtctttgatctggttttattcctgtaattcagccacctgattttgtgaggggggggaataatatgtggtttttgtacaaacatgtttctcagtgtgttgttattttggaaaaaatgaggggagggagtttggcaagaatggagaaaatgaatgaagaaggcctaatctctctctttttcagtgaataaatggaacaccatttctggaaaaaaaaaaaaaaaaaaaaaaaaaacaactaaaaacaagaaagaagcaaagaaaaataaagaaaaccacaaaaataaagaaaaagaaagataaagacaacagaaaaaaaaaactaatgataataacccacagaatcaggaggggggggcggcactaaaatttatataaactgcaggaggaatttagttgactcacacatcttatagttgtaaaagaggagtcaactatttattgaatttgatttaatatcaaggaggtgcgtcggcgtcttaaaaacaatgaaggaatcagagaaacaagcgcaggtcataacattgatggaagcaaccccaatgtgggggggggagaaaaagagaaaacaaccaagaaagaaagagccgaggaaaaaaaaaaatgtgaggtgttggaaatcacaacccatcatcatcgcggaaagaggttaggtcgtattttaaaataacgcaggcccagatcaaaagagaggacgatagcgaagaagcagaggatagagaccgacgcgcaatacaatcgtccgacgaccgtggaacaagcacggacggacaacaaccaacgacgagccaatcggtgagaaa

SEQ ID NO: 132540 - DNA, 5559 bp, Homo sapiens
gctgggcggggccgggaagcggcagtggcggctacgcgcgcgggggtgcgcgcgggaacgaccgggaaacaccgcgagggccggggtgggccaggctgtggggacgacgggctgcgacgatggccgcagcggcgggcggcggcgggccggggacagcggtaggcgccacgggctcggggattgcggcggcagccgcaggcctagctgtttatcgacggaaggatgggggcccggccaccaagttttgggagagcccggagacggtgtcccagctggattcggtgcgggtctggctgggcaagcactacaagaagtatgttcatgcggatgctcctaccaataaaacactggctgggctggtggtgcagcttcttcagttccaggaagatgcctttgggaagcatgtcaccaacccggccttcaccaaactccctgcaaagtgtttcatggatttcaaagctggaggcgccttatgtcacattcttggggctgcttacaagtataaaaatgaacagggatggcggaggtttgacctacagaacccatctcgaatggatcgtaatgtggaaatgtttatgaacattgaaaaaacattggtgcagaacaattgtttgaccagacccaacatctacctcattccagacattgatctgaagttggctaacaaattgaaagatatcatcaaacgacatcagggaacatttacggatgagaagtcaaaagcttcccaccacatttacccatattcttcctcacaagacgatgaagaatggttgagaccggtgatgagaaaagagaagcaagtgttagtgcattggggcttttacccagacagctatgatacttgggtccatagtaatgatgttgatgctgaaattgaagatccaccaattccagaaaaaccatggaaggttcatgtgaaatggattttggacactgatattttcaatgaatggatgaatgaggaggattatgaggtggatgaaaataggaagcctgtgagttttcgtcagcggatttcaaccaagaatgaagagccagtcagaagtccagaaagaagagatagaaaagcatcagctaatgctcgaaagaggaaacattcgccttcgcctccccctccgacaccaacagaatcacggaagaagagtgggaagaaaggccaagctagcctttatgggaagcgcagaagtcagaaagaggaagatgagcaagaagatctaaccaaggatatggaagacccaacacctgtacccaatatagaagaagtagtacttcccaaaaatgtgaacctaaagaaagatagtgaaaatacacctgttaaaggaggaactgtagcggatctagatgagcaggatgaagaaacagtcacagcaggaggaaaggaagatgaagatcctgccaaaggtgatcagagtcgatcagttgaccttggggaagataatgtgacagagcagaccaatcacattattattcctagttatgcatcatggtttgattataactgtattcatgtgattgaacggcgtgctcttcctgagttcttcaatggaaaaaacaaatccaagactccagaaatatacttggcatatcgaaattttatgattgacacgtatcgtctaaacccccaagagtatttaactagcactgcttgtcggaggaacttgactggagatgtgtgtgctgtgatgagggtccatgcctttttagagcagtggggactcgttaattaccaagttgacccggaaagtagacccatggcaatgggacctcctcctactcctcattttaatgtattagctgataccccctctgggcttgtgcctctgcatcttcgatcacctcaggttcctgctgctcaacagatgctaaattttcctgagaaaaacaaggaaaaaccagttgatttgcagaactttggtctccgtactgacatttactccaagaaaacattagcaaagagtaaaggtgctagtgctggaagagaatggactgaacaggagacccttctactcctggaggccctggagatgtacaaggatgattggaacaaagtgtcggaacatgttggaagtcgtactcaggatgaatgcatcctccactttttgagacttcccattgaggacccataccttgagaattcagatgcttcccttgggcctttggcctaccagcctgtccccttcagtcagtcaggaaatccagttatgagtactgttgcttttttggcatctgtggtggaccctcgcgtggcatctgctgcagcaaaagcggctttggaggagttttctcgggtccgggaggaggtaccactggaattggttgaagctcatgtcaagaaagtacaagaagcagcacgagcctctgggaaagtggatcccacctacggtctggagagcagctgcattgcaggcacagggcccgatgagccagagaagcttgaaggagctgaagaggaaaaaatggaagccgaccctgatggtcagcagcctgaaaaggcagaaaataaagtggaaaatgaaacggatgaaggtgataaagcacaagatggagaaaatgaaaaaaatagtgaaaaggaacaggatagtgaagtgagtgaggataccaaatcagaagaaaaggagactgaagagaacaaagaactcactgatacatgtaaagaaagagaaagtgatactgggaagaagaaagtagaacatgaaatttccgaaggaaatgttgccacagccgcagcagctgctcttgcctcagcggctaccaaagccaagcacctggctgcagtggaagaaagaaagatcaagtccctggtagctctcttggttgagacacaaatgaagaaactagagatcaaacttcgacattttgaagagctggaaactatcatggacagagagaaagaagctctagaacaacagaggcagcagttgcttactgaacgccaaaacttccacatggaacagctgaagtatgctgaattacgagcacgacagcaaatggaacagcagcagcatggccagaaccctcaacaggcacaccagcactcaggaggacctggcctggccccacttggagcagcagggcaccctggcatgatgcctcatcaacagccccctccctaccctctgatgcaccaccagatgccaccacctcatccaccccagccaggtcagataccaggcccaggttccatgatgcccgggcagcacatgccaggccgcatgattcccactgttgcagccaacatccacccctctgggagtggccctacccctcctggcatgccaccaatgccaggaaacatcttaggaccccgggtacccctgacagcacctaacggcatgtatccccctccaccacagcagcagccaccgccaccaccacctgcagatggggtccctccgcctcctgctcctggcccgccagcctcagctgctccttagcctggaagatgcagggaacctccacgcccaccaccatgagctggagtggggatgacaagacttgtgttcctcaactttcttgggtttctttcaggatttttcttctcacagctccaagcacgtgtcccgtgcctccccactcctcttaccacccctctctctgacactttttgtgttgggtcctcagccaacactcaaggggaaacctgtagtgacagtgtgccctggtcatccttaaaataacctgcatctcccctgtcctggtgtgggagtaagctgacagtttctctgcaggtcctgtcaactttagcatgctatgtctttaccatttttgctctcttgcagttttttgctttgtcttatgcttctatggataatgctatataatcattatctttttatctttctgttattattgttttaaaggagagcatcctaagttaataggaaccaaaaaataatgatgggcagaagggggggaatagccacaggggacaaaccttaaggcattataagtgaccttatttctgcttttctgagctaagaatggtgctgatggtaaagtttgagacttttgccacacacaaatttgtgaaaattaaacgagatgtggaaggagaacctcagtgattttattccctagtgaggcctctgagggcctccacactgcctggcagaacataccactgaactagtatgtgctagaggagggcacaaacatccgctccttccctaggcctgctggctctggttttctatgcagatgattcattggattgggggtgagtgttttgtttttctgggggcagtgtgagctttgagggttggaatattgggaggcattccttagtttcctcaactagcctggaaagttaggagtctagggtaattaccccccaatgagtctagcctactattcactgctttgtgtgcatttttttctccctctttaaaaaaccctttaaaagaaaaaaaaaagtagatagtgctaaatattttagctcatgaaacttggttaggatggctgggggtacaagtccccaaactacctcttgttacagtagccagggagtggaatttcgtcaaccggtacttttaaggttaggatgggacgggaaaagtgaagcaggatattagctccttataccttctcccttccatttctgagatctcacattccatctatcacagggttttcaaagagatgctgagggtaacaaggaactcacttggcagtcagagcatcatgctttgaggtttggggtgctcaggctgggagggtagaatgccattccagaggacaagccacaaaaatgccttaatttgagctcgtatttacccctgctgataagtgacttgagagttcccggttttttcctcttgtccttccctcccttctgtccttccatgtgtggggaaagggtgttttggtagagcttggtttccaaagcgcctggctttctcacttcacattctcaagtggcagtttcattatttagaatgcaaggtggacatcttttggatatctttttctatatattttctaaagctttacatatgagagggtatagggaggtgtttataaaacacttgagaacttttttccttaatatcagaaagcaaaaaaataaaaccacaattgagatttgcctttcaaaccctcaggtttgcctctaaccaggtgtccctggtcaccatcagagtactggaatacgggaaccgaggagaccttggtccttttgtttttgttctggactcttgggagtggaaatgagaatgagtttattcctactggagcttagttccaatgcatttggctccagaaagaccccagtgccttttgacaatggccagggttttacctacttcctgccagtctttcccaaaggaaactcattccaaatacttcttttttcccctggagtccgagaaggaaaatggaattctggttcatactgtggtcccttgtaacctcaggtctttaatgtgatcactttcaaatttaaaagatccaggtggaaatatttttactatagtaataattctacaaaatacctgaattcttaacactgttatatttcagtataagtgttcctgtcgggatcctcagagctaccctcag

SEQ ID NO: 132541 - DNA, 5719 bp, Homo sapiens
gctgggcggggccgggaagcggcagtggcggctacgcgcgcgggggtgcgcgcgggaacgaccgggaaacaccgcgagggccggggtgggccaggctgtggggacgacgggctgcgacgatggccgcagcggcgggcggcggcgggccggggacagcggtaggcgccacgggctcggggattgcggcggcagccgcaggcctagctgtttatcgacggaaggatgggggcccggccaccaagttttgggagagcccggagacggtgtcccagctggattcggtgcgggtctggctgggcaagcactacaagaagtatgttcatgcggatgctcctaccaataaaacactggctgggctggtggtgcagcttcttcagttccaggaagatgcctttgggaagcatgtcaccaacccggccttcaccaaactccctgcaaagtgtttcatggatttcaaagctggaggcgccttatgtcacattcttggggctgcttacaagtataaaaatgaacagggatggcggaggtttgacctacagaacccatctcgaatggatcgtaatgtggaaatgtttatgaacattgaaaaaacattggtgcagaacaattgtttgaccagacccaacatctacctcattccagacattgatctgaagttggctaacaaattgaaagatatcatcaaacgacatcagggaacatttacggatgagaagtcaaaagcttcccaccacatttacccatattcttcctcacaagacgatgaagaatggttgagaccggtgatgagaaaagagaagcaagtgttagtgcattggggcttttacccagacagctatgatacttgggtccatagtaatgatgttgatgctgaaattgaagatccaccaattccagaaaaaccatggaaggttcatgtgaaatggattttggacactgatattttcaatgaatggatgaatgaggaggattatgaggtggatgaaaataggaagcctgtgagttttcgtcagcggatttcaaccaagaatgaagagccagtcagaagtccagaaagaagagatagaaaagcatcagctaatgctcgaaagaggaaacattcgccttcgcctccccctccgacaccaacagaatcacggaagaagagtgggaagaaaggccaagctagcctttatgggaagcgcagaagtcagaaagaggaagatgagcaagaagatctaaccaaggatatggaagacccaacacctgtacccaatatagaagaagtagtacttcccaaaaatgtgaacctaaagaaagatagtgaaaatacacctgttaaaggaggaactgtagcggatctagatgagcaggatgaagaaacagtcacagcaggaggaaaggaagatgaagatcctgccaaaggtgatcagagtcgatcagttgaccttggggaagataatgtgacagagcagaccaatcacattattattcctagttatgcatcatggtttgattataactgtattcatgtgattgaacggcgtgctcttcctgagttcttcaatggaaaaaacaaatccaagactccagaaatatacttggcatatcgaaattttatgattgacacgtatcgtctaaacccccaagagtatttaactagcactgcttgtcggaggaacttgactggagatgtgtgtgctgtgatgagggtccatgcctttttagagcagtggggactcgttaattaccaagttgacccggaaagtagacccatggcaatgggacctcctcctactcctcattttaatgtattagctgataccccctctgggcttgtgcctctgcatcttcgatcacctcaggttcctgctgctcaacagatgctaaattttcctgagaaaaacaaggaaaaaccagttgatttgcagaactttggtctccgtactgacatttactccaagaaaacattagcaaagagtaaaggtgctagtgctggaagagaatggactgaacaggagacccttctactcctggaggccctggagatgtacaaggatgattggaacaaagtgtcggaacatgttggaagtcgtactcaggatgaatgcatcctccactttttgagacttcccattgaggacccataccttgagaattcagatgcttcccttgggcctttggcctaccagcctgtccccttcagtcagtcaggaaatccagttatgagtactgttgcttttttggcatctgtggtggaccctcgcgtggcatctgctgcagcaaaagcggctttggaggagttttctcgggtccgggaggaggtaccactggaattggttgaagctcatgtcaagaaagtacaagaagcagcacgagcctctgggaaagtggatcccacctacggtctggagagcagctgcattgcaggcacagggcccgatgagccagagaagcttgaaggagctgaagaggaaaaaatggaagccgaccctgatggtcagcagcctgaaaaggcagaaaataaagtggaaaatgaaacggatgaaggtgataaagcacaagatggagaaaatgaaaaaaatagtgaaaaggaacaggatagtgaagtgagtgaggataccaaatcagaagaaaaggagactgaagagaacaaagaactcactgatacatgtaaagaaagagaaagtgatactgggaagaagaaagtagaacatgaaatttccgaaggaaatgttgccacagccgcagcagctgctcttgcctcagcggctaccaaagccaagcacctggctgcagtggaagaaagaaagatcaagtccctggtagctctcttggttgagacacaaatgaagaaactagagatcaaacttcgacattttgaagagctggaaactatcatggacagagagaaagaagctgccaaaacttccacatggaacagctgaagtatgctgaattacgagcacgacagcaaatggaacagcagcagcatggccagaaccctcaacaggcacaccagcactcaggaggacctggcctggccccacttggagcagcagggcaccctggcatgatgcctcatcaacagccccctccctaccctctgatgcaccaccagatgccaccacctcatccaccccagccaggtcagataccaggcccaggttccatgatgcccgggcagcacatgccaggccgcatgattcccactgttgcagccaacatccacccctctgggagtggccctacccctcctggcatgccaccaatgccaggaaacatcttaggaccccgggtacccctgacagcacctaacggcatgtatccccctccaccacagcagcagccaccgccaccaccacctgcagatggggtccctccgcctcctgctcctggcccgccagcctcagctgctccttagcctggaagatgcagggaacctccacgcccaccaccatgagctggagtggggatgacaagacttgtgttcctcaactttcttgggtttctttcaggatttttcttctcacagctccaagcacgtgtcccgtgcctccccactcctcttaccacccctctctctgacactttttgtgttgggtcctcagccaacactcaaggggaaacctgtagtgacagtgtgccctggtcatccttaaaataacctgcatctcccctgtcctggtgtgggagtaagctgacagtttctctgcaggtcctgtcaactttagcatgctatgtctttaccatttttgctctcttgcagttttttgctttgtcttatgcttctatggataatgctatataatcattatctttttatctttctgttattattgttttaaaggagagcatcctaagttaataggaaccaaaaaataatgatgggcagaagggggggaatagccacaggggacaaaccttaaggcattataagtgaccttatttctgcttttctgagctaagaatggtgctgatggtaaagtttgagacttttgccacacacaaatttgtgaaaattaaacgagatgtggaaggagaacctcagtgattttattccctagtgaggcctctgagggcctccacactgcctggcagaacataccactgaactagtatgtgctagaggagggcacaaacatccgctccttccctaggcctgctggctctggttttctatgcagatgattcattggattgggggtgagtgttttgtttttctgggggcagtgtgagctttgagggttggaatattgggaggcattccttagtttcctcaactagcctggaaagttaggagtctagggtaattaccccccaatgagtctagcctactattcactgctttgtgtgcatttttttctccctctttaaaaaaccctttaaaagaaaaaaaaaagtagatagtgctaaatattttagctcatgaaacttggttaggatggctgggggtacaagtccccaaactacctcttgttacagtagccagggagtggaatttcgtcaaccggtacttttaaggttaggatgggacgggaaaagtgaagcaggatattagctccttataccttctcccttccatttctgagatctcacattccatctatcacagggttttcaaagagatgctgagggtaacaaggaactcacttggcagtcagagcatcatgctttgaggtttggggtgctcaggctgggagggtagaatgccattccagaggacaagccacaaaaatgccttaatttgagctcgtatttacccctgctgataagtgacttgagagttcccggttttttcctcttgtccttccctcccttctgtccttccatgtgtggggaaagggtgttttggtagagcttggtttccaaagcgcctggctttctcacttcacattctcaagtggcagtttcattatttagaatgcaaggtggacatcttttggatatctttttctatatattttctaaagctttacatatgagagggtatagggaggtgtttataaaacacttgagaacttttttccttaatatcagaaagcaaaaaaataaaaccacaattgagatttgcctttcaaaccctcaggtttgcctctaaccaggtgtccctggtcaccatcagagtactggaatacgggaaccgaggagaccttggtccttttgtttttgttctggactcttgggagtggaaatgagaatgagtttattcctactggagcttagttccaatgcatttggctccagaaagaccccagtgccttttgacaatggccagggttttacctacttcctgccagtctttcccaaaggaaactcattccaaatacttcttttttcccctggagtccgagaaggaaaatggaattctggttcatactgtggtcccttgtaacctcaggtctttaatgtgatcactttcaaatttaaaagatccaggtggaaatatttttactatagtaataattctacaaaatacctgaattcttaacactgttatatttcagtataagtggtggctttttcttttcatgtctttgatctggttttattcctgtaattcagccacctgattttgtgaggggggggaataatatgtggtttttgtacaaacatgtttctcagtgtgttgttattttggaaaaaatgaggggagggagtttggcaagaatggagaaaatgaatgaagaaggcctaatctctctctttttcagtgaataaatggaacaccatttctgga

SEQ ID NO: 132542 - DNA, 4014 bp, Homo sapiens
cgaatttgcgtcaggaccgctacggacctccatcctactcctcattttaatgtattagctgataccccctctgggcttgtgcctctgcatcttcgatcacctcaggttcctgctgtctcaacagatgctaaatttcctgagaaaacaaaggaaaaaccagttgatttgcagaactttggtctccgtactgacatttactccaagaaaacattagccaaagagtaaggtgctagtgctggaagagaatggactgaacaggagacccttctactcctggaggccctggagatgtcaaaggatgattggaacaaagtgtcggaacatgttggaagtcgtactcaggatgaatgcatcctccactttttgagacttcccattgaggacccataccttgagaattcagatgcttcccttgggcctttggcctaccagcctgtccccttcagtcagtcaggaaatccagttatgagtactgttgcttttttggcatctgtggtggaccctcgcgtggcatctgctgcagcaaaagcggctttggaggagttttctcgggtccgggaggaggtaccactggaattggttgaagctcatgtcaagaaagtacaagaagcagcacgagcctctgggaaagtggatcccacctacggtctggagagcagctgcattgcaggcacagggcccgatgagccagagaagcttgaaggagctgaagaggaaaaaatggaagccgaccctgatggtcagcagcctgaaaaggcagaaaataaagtggaaaatgaaacggatgaaggtgataaagcacaagatggagaaaatgaaaaaaatagtgaaaaggaacaggatagtgaagtgagtgaggataccaaatcagaagaaaaggagactgaagagaacaaagaactcactgatacatgtaaagaaagagaaagtgatactgggaagaagaaagtagaacatgaaatttccgaaggaaatgttgccacagccgcagcagctgctcttgcctcagcggctaccaaagccaagcacctggctgcagtggaagaaagaaagatcaagtccctggtagctctcttggttgagacacaaatgaagaaactagagatcaaacttcgacattttgaagagctggaaactatcatggacagagagaaagaagctctagaacaacagaggcagcagttgcttactgaacgccaaaacttccacatggaacagctgaagtatgctgaattacgagcacgacagcaaatggaacagcagcagcatggccagaaccctcaacaggcacaccagcactcaggaggacctggcctggccccacttggagcagcagggcaccctggcatgatgcctcatcaacagccccctccctaccctctgatgcaccaccagatgccaccacctcatccaccccagccaggtcagataccaggcccaggttccatgatgcccgggcagcacatgccaggccgcatgattcccactgttgcagccaacatccacccctctgggagtggccctacccctcctggcatgccaccaatgccaggaaacatcttaggaccccgggtacccctgacagcacctaacggcatgtatccccctccaccacagcagcagccaccgccaccaccacctgcagatggggtccctccgcctcctgctcctggcccgccagcctcagctgctccttagcctggaagatgcagggaacctccacgcccaccaccatgagctggagtggggatgacaagacttgtgttcctcaactttcttgggtttctttcaggatttttcttctcacagctccaagcacgtgtcccgtgcctccccactcctcttaccacccctctctctgacactttttgtgttgggtcctcagccaacactcaaggggaaacctgtagtgacagtgtgccctggtcatccttaaaataacctgcatctcccctgtcctggtgtgggagtaagctgacagtttctctgcaggtcctgtcaactttagcatgctatgtctttaccatttttgctctcttgcagttttttgctttgtcttatgcttctatggataatgctatataatcattatctttttatctttctgttattattgttttaaaggagagcatcctaagttaataggaaccaaaaaataatgatgggcagaagggggggaatagccacaggggacaaaccttaaggcattataagtgaccttatttctgcttttctgagctaagaatggtgctgatggtaaagtttgagacttttgccacacacaaatttgtgaaaattaaacgagatgtggaaggagaacctcagtgattttattccctagtgaggcctctgagggcctccacactgcctggcagaacataccactgaactagtatgtgctagaggagggcacaaacatccgctccttccctaggcctgctggctctggttttctatgcagatgattcattggattgggggtgagtgttttgtttttctgggggcagtgtgagctttgagggttggaatattgggaggcattccttagtttcctcaactagcctggaaagttaggagtctagggtaattaccccccaatgagtctagcctactattcactgctttgtgtgcatttttttctccctctttaaaaaaccctttaaaagaaaaaaaaaagtagatagtgctaaatattttagctcatgaaacttggttaggatggctgggggtacaagtccccaaactacctcttgttacagtagccagggagtggaatttcgtcaaccggtacttttaaggttaggatgggacgggaaaagtgaagcaggatattagctccttataccttctcccttccatttctgagatctcacattccatctatcacagggttttcaaagagatgctgagggtaacaaggaactcacttggcagtcagagcatcatgctttgaggtttggggtgctcaggctgggagggtagaatgccattccagaggacaagccacaaaaatgccttaatttgagctcgtatttacccctgctgataagtgacttgagagttcccggttttttcctcttgtccttccctcccttctgtccttccatgtgtggggaaagggtgttttggtagagcttggtttccaaagcgcctggctttctcacttcacattctcaagtggcagtttcattatttagaatgcaaggtggacatcttttggatatctttttctatatattttctaaagctttacatatgagagggtatagggaggtgtttataaaacacttgagaacttttttccttaatatcagaaagcaaaaaaataaaaccacaattgagatttgcctttcaaaccctcaggtttgcctctaaccaggtgtccctggtcaccatcagagtactggaatacgggaaccgaggagaccttggtccttttgtttttgttctggactcttgggagtggaaatgagaatgagtttattcctactggagcttagttccaatgcatttggctccagaaagaccccagtgccttttgacaatggccagggttttacctacttcctgccagtctttcccaaaggaaactcattccaaatacttcttttttcccctggagtccgagaaggaaaatggaattctggttcatactgtggtcccttgtaacctcaggtctttaatgtgatcactttcaaatttaaaagatccaggtggaaatatttttactatagtaataattctacaaaatacctgaattcttaacactgttatatttcagtataagtggtggctttttcttttcatgtctttgatctggttttattcctgtaattcagccacctgattttgtgaggggggggaataatatgtggtttttgtacaaacatgtttctcagtgtgttgttattttggaaaaaatgaggggagggagtttggcaagaatggagaaaatgaatgaagaaggcctaatctctctctttttcagtgaataaatggaacaccatttctgga

SEQ ID NO: 132543 - DNA, 3729 bp, Homo sapiens
ctgtctagaggatccgctcggatgcaagtgtcggaacatgttggaagtcgtactcaggatgaatgcatcctccactttttgagacttcccattgaggacccataccttgagaattcagatgcttcccttgggcctttggcctaccagcctgtccccttcagtcagtcaggaaatccagttatgagtactgttgcttttttggcatctgtggtggaccctcgcgtggcatctgctgcagcaaaagcggctttggaggagttttctcgggtccgggaggaggtaccactggaattggttgaagctcatgtcaagaaagtacaagaagcagcacgagcctctgggaaagtggatcccacctacggtctggagagcagctgcattgcaggcacagggcccgatgagccagagaagcttgaaggagctgaagaggaaaaaatggaagccgaccctgatggtcagcagcctgaaaaggcagaaaataaagtggaaaatgaaacggatgaaggtgataaagcacaagatggagaaaatgaaaaaaatagtgaaaaggaacaggatagtgaagtgagtgaggataccaaatcagaagaaaaggagactgaagagaacaaagaactcactgatacatgtaaagaaagagaaagtgatactgggaagaagaaagtagaacatgaaatttccgaaggaaatgttgccacagccgcagcagctgctcttgcctcagcggctaccaaagccaagcacctggctgcagtggaagaaagaaagatcaagtccctggtagctctcttggttgagacacaaatgaagaaactagagatcaaacttcgacattttgaagagctggaaactatcatggacagagagaaagaagctctagaacaacagaggcagcagttgcttactgaacgccaaaacttccacatggaacagctgaagtatgctgaattacgagcacgacagcaaatggaacagcagcagcatggccagaaccctcaacaggcacaccagcactcaggaggacctggcctggccccacttggagcagcagggcaccctggcatgatgcctcatcaacagccccctccctaccctctgatgcaccaccagatgccaccacctcatccaccccagccaggtcagataccaggcccaggttccatgatgcccgggcagcacatgccaggccgcatgattcccactgttgcagccaacatccacccctctgggagtggccctacccctcctggcatgccaccaatgccaggaaacatcttaggaccccgggtacccctgacagcacctaacggcatgtatccccctccaccacagcagcagccaccgccaccaccacctgcagatggggtccctccgcctcctgctcctggcccgccagcctcagctgctccttagcctggaagatgcagggaacctccacgcccaccaccatgagctggagtggggatgacaagacttgtgttcctcaactttcttgggtttctttcaggatttttcttctcacagctccaagcacgtgtcccgtgcctccccactcctcttaccacccctctctctgacactttttgtgttgggtcctcagccaacactcaaggggaaacctgtagtgacagtgtgccctggtcatccttaaaataacctgcatctcccctgtcctggtgtgggagtaagctgacagtttctctgcaggtcctgtcaactttagcatgctatgtctttaccatttttgctctcttgcagttttttgctttgtcttatgcttctatggataatgctatataatcattatctttttatctttctgttattattgttttaaaggagagcatcctaagttaataggaaccaaaaaataatgatgggcagaagggggggaatagccacaggggacaaaccttaaggcattataagtgaccttatttctgcttttctgagctaagaatggtgctgatggtaaagtttgagacttttgccacacacaaatttgtgaaaattaaacgagatgtggaaggagaacctcagtgattttattccctagtgaggcctctgagggcctccacactgcctggcagaacataccactgaactagtatgtgctagaggagggcacaaacatccgctccttccctaggcctgctggctctggttttctatgcagatgattcattggattgggggtgagtgttttgtttttctgggggcagtgtgagctttgagggttggaatattgggaggcattccttagtttcctcaactagcctggaaagttaggagtctagggtaattaccccccaatgagtctagcctactattcactgctttgtgtgcatttttttctccctctttaaaaaaccctttaaaagaaaaaaaaaagtagatagtgctaaatattttagctcatgaaacttggttaggatggctgggggtacaagtccccaaactacctcttgttacagtagccagggagtggaatttcgtcaaccggtacttttaaggttaggatgggacgggaaaagtgaagcaggatattagctccttataccttctcccttccatttctgagatctcacattccatctatcacagggttttcaaagagatgctgagggtaacaaggaactcacttggcagtcagagcatcatgctttgaggtttggggtgctcaggctgggagggtagaatgccattccagaggacaagccacaaaaatgccttaatttgagctcgtatttacccctgctgataagtgacttgagagttcccggttttttcctcttgtccttccctcccttctgtccttccatgtgtggggaaagggtgttttggtagagcttggtttccaaagcgcctggctttctcacttcacattctcaagtggcagtttcattatttagaatgcaaggtggacatcttttggatatctttttctatatattttctaaagctttacatatgagagggtatagggaggtgtttataaaacacttgagaacttttttccttaatatcagaaagcaaaaaaataaaaccacaattgagatttgcctttcaaaccctcaggtttgcctctaaccaggtgtccctggtcaccatcagagtactggaatacgggaaccgaggagaccttggtccttttgtttttgttctggactcttgggagtggaaatgagaatgagtttattcctactggagcttagttccaatgcatttggctccagaaagaccccagtgccttttgacaatggccagggttttacctacttcctgccagtctttcccaaaggaaactcattccaaatacttcttttttcccctggagtccgagaaggaaaatggaattctggttcatactgtggtcccttgtaacctcaggtctttaatgtgatcactttcaaatttaaaagatccaggtggaaatatttttactatagtaataattctacaaaatacctgaattcttaacactgttatatttcagtataagtggtggctttttcttttcatgtctttgatctggttttattcctgtaattcagccacctgattttgtgaggggggggaataatatgtggtttttgtacaaacatgtttctcagtgtgttgttattttggaaaaaatgaggggagggagtttggcaagaatggagaaaatgaatgaagaaggcctaatctctctctttttcagtgaataaatggaacaccatttctgga

SEQ ID NO: 132544 - DNA, 3232 bp, Homo sapiens
  misc_feature (21)..(21): n is a, c, g, or t
gggctaggtacgaggctgggntgttagagaaaatgaaaaaaatagtgaaaaggaacaggatagtgaagtgagtgaggataccaaatcagaagaaaaggagactgaagagaacaaagaactcactgatacatgtaaagaaagagaaagtgatactgggaagaagaaagtagaacatgaaatttccgaaggaaatgttgccacagccgcagcagctgctcttgcctcagcggctaccaaagccaagcacctggctgcagtggaagaaagaaagatcaagtccctggtagctctcttggttgagacacaaatgaagaaactagagatcaaacttcgacattttgaagagctggaaactatcatggacagagagaaagaagctctagaacaacagaggcagcagttgcttactgaacgccaaaacttccacatggaacagctgaagtatgctgaattacgagcacgacagcaaatggaacagcagcagcatggccagaaccctcaacaggcacaccagcactcaggaggacctggcctggccccacttggagcagcagggcaccctggcatgatgcctcatcaacagccccctccctaccctctgatgcaccaccagatgccaccacctcatccaccccagccaggtcagataccaggcccaggttccatgatgcccgggcagcacatgccaggccgcatgattcccactgttgcagccaacatccacccctctgggagtggccctacccctcctggcatgccaccaatgccaggaaacatcttaggaccccgggtacccctgacagcacctaacggcatgtatccccctccaccacagcagcagccaccgccaccaccacctgcagatggggtccctccgcctcctgctcctggcccgccagcctcagctgctccttagcctggaagatgcagggaacctccacgcccaccaccatgagctggagtggggatgacaagacttgtgttcctcaactttcttgggtttctttcaggatttttcttctcacagctccaagcacgtgtcccgtgcctccccactcctcttaccacccctctctctgacactttttgtgttgggtcctcagccaacactcaaggggaaacctgtagtgacagtgtgccctggtcatccttaaaataacctgcatctcccctgtcctggtgtgggagtaagctgacagtttctctgcaggtcctgtcaactttagcatgctatgtctttaccatttttgctctcttgcagttttttgctttgtcttatgcttctatggataatgctatataatcattatctttttatctttctgttattattgttttaaaggagagcatcctaagttaataggaaccaaaaaataatgatgggcagaagggggggaatagccacaggggacaaaccttaaggcattataagtgaccttatttctgcttttctgagctaagaatggtgctgatggtaaagtttgagacttttgccacacacaaatttgtgaaaattaaacgagatgtggaaggagaacctcagtgattttattccctagtgaggcctctgagggcctccacactgcctggcagaacataccactgaactagtatgtgctagaggagggcacaaacatccgctccttccctaggcctgctggctctggttttctatgcagatgattcattggattgggggtgagtgttttgtttttctgggggcagtgtgagctttgagggttggaatattgggaggcattccttagtttcctcaactagcctggaaagttaggagtctagggtaattaccccccaatgagtctagcctactattcactgctttgtgtgcatttttttctccctctttaaaaaaccctttaaaagaaaaaaaaaagtagatagtgctaaatattttagctcatgaaacttggttaggatggctgggggtacaagtccccaaactacctcttgttacagtagccagggagtggaatttcgtcaaccggtacttttaaggttaggatgggacgggaaaagtgaagcaggatattagctccttataccttctcccttccatttctgagatctcacattccatctatcacagggttttcaaagagatgctgagggtaacaaggaactcacttggcagtcagagcatcatgctttgaggtttggggtgctcaggctgggagggtagaatgccattccagaggacaagccacaaaaatgccttaatttgagctcgtatttacccctgctgataagtgacttgagagttcccggttttttcctcttgtccttccctcccttctgtccttccatgtgtggggaaagggtgttttggtagagcttggtttccaaagcgcctggctttctcacttcacattctcaagtggcagtttcattatttagaatgcaaggtggacatcttttggatatctttttctatatattttctaaagctttacatatgagagggtatagggaggtgtttataaaacacttgagaacttttttccttaatatcagaaagcaaaaaaataaaaccacaattgagatttgcctttcaaaccctcaggtttgcctctaaccaggtgtccctggtcaccatcagagtactggaatacgggaaccgaggagaccttggtccttttgtttttgttctggactcttgggagtggaaatgagaatgagtttattcctactggagcttagttccaatgcatttggctccagaaagaccccagtgccttttgacaatggccagggttttacctacttcctgccagtctttcccaaaggaaactcattccaaatacttcttttttcccctggagtccgagaaggaaaatggaattctggttcatactgtggtcccttgtaacctcaggtctttaatgtgatcactttcaaatttaaaagatccaggtggaaatatttttactatagtaataattctacaaaatacctgaattcttaacactgttatatttcagtataagtggtggctttttcttttcatgtctttgatctggttttattcctgtaattcagccacctgattttgtgaggggggggaataatatgtggtttttgtacaaacatgtttctcagtgtgttgttattttggaaaaaatgaggggagggagtttggcaagaatggagaaaatgaatgaagaaggcctaatctctctctttttcagtgaataaatggaacaccatttctgga

SEQ ID NO: 132545 - DNA, 3041 bp, Homo sapiens
cgggtgcctctacctctccggtgcctcttgcctcagcggctacccaacccaagcacctggctgcagtggaagaaagaaagatcaagtccctggtagctctcttggttgagacacaaatgaagaaactagagatcaaacttcgacattttgaagagctggaaactatcatggacagagagaaagaagctctagaacaacagaggcagcagttgcttactgaacgccaaaacttccacatggaacagctgaagtatgctgaattacgagcacgacagcaaatggaacagcagcagcatggccagaaccctcaacaggcacaccagcactcaggaggacctggcctggccccacttggagcagcagggcaccctggcatgatgcctcatcaacagccccctccctaccctctgatgcaccaccagatgccaccacctcatccaccccagccaggtcagataccaggcccaggttccatgatgcccgggcagcacatgccaggccgcatgattcccactgttgcagccaacatccacccctctgggagtggccctacccctcctggcatgccaccaatgccaggaaacatcttaggaccccgggtacccctgacagcacctaacggcatgtatccccctccaccacagcagcagccaccgccaccaccacctgcagatggggtccctccgcctcctgctcctggcccgccagcctcagctgctccttagcctggaagatgcagggaacctccacgcccaccaccatgagctggagtggggatgacaagacttgtgttcctcaactttcttgggtttctttcaggatttttcttctcacagctccaagcacgtgtcccgtgcctccccactcctcttaccacccctctctctgacactttttgtgttgggtcctcagccaacactcaaggggaaacctgtagtgacagtgtgccctggtcatccttaaaataacctgcatctcccctgtcctggtgtgggagtaagctgacagtttctctgcaggtcctgtcaactttagcatgctatgtctttaccatttttgctctcttgcagttttttgctttgtcttatgcttctatggataatgctatataatcattatctttttatctttctgttattattgttttaaaggagagcatcctaagttaataggaaccaaaaaataatgatgggcagaagggggggaatagccacaggggacaaaccttaaggcattataagtgaccttatttctgcttttctgagctaagaatggtgctgatggtaaagtttgagacttttgccacacacaaatttgtgaaaattaaacgagatgtggaaggagaacctcagtgattttattccctagtgaggcctctgagggcctccacactgcctggcagaacataccactgaactagtatgtgctagaggagggcacaaacatccgctccttccctaggcctgctggctctggttttctatgcagatgattcattggattgggggtgagtgttttgtttttctgggggcagtgtgagctttgagggttggaatattgggaggcattccttagtttcctcaactagcctggaaagttaggagtctagggtaattaccccccaatgagtctagcctactattcactgctttgtgtgcatttttttctccctctttaaaaaaccctttaaaagaaaaaaaaaagtagatagtgctaaatattttagctcatgaaacttggttaggatggctgggggtacaagtccccaaactacctcttgttacagtagccagggagtggaatttcgtcaaccggtacttttaaggttaggatgggacgggaaaagtgaagcaggatattagctccttataccttctcccttccatttctgagatctcacattccatctatcacagggttttcaaagagatgctgagggtaacaaggaactcacttggcagtcagagcatcatgctttgaggtttggggtgctcaggctgggagggtagaatgccattccagaggacaagccacaaaaatgccttaatttgagctcgtatttacccctgctgataagtgacttgagagttcccggttttttcctcttgtccttccctcccttctgtccttccatgtgtggggaaagggtgttttggtagagcttggtttccaaagcgcctggctttctcacttcacattctcaagtggcagtttcattatttagaatgcaaggtggacatcttttggatatctttttctatatattttctaaagctttacatatgagagggtatagggaggtgtttataaaacacttgagaacttttttccttaatatcagaaagcaaaaaaataaaaccacaattgagatttgcctttcaaaccctcaggtttgcctctaaccaggtgtccctggtcaccatcagagtactggaatacgggaaccgaggagaccttggtccttttgtttttgttctggactcttgggagtggaaatgagaatgagtttattcctactggagcttagttccaatgcatttggctccagaaagaccccagtgccttttgacaatggccagggttttacctacttcctgccagtctttcccaaaggaaactcattccaaatacttcttttttcccctggagtccgagaaggaaaatggaattctggttcatactgtggtcccttgtaacctcaggtctttaatgtgatcactttcaaatttaaaagatccaggtggaaatatttttactatagtaataattctacaaaatacctgaattcttaacactgttatatttcagtataagtggtggctttttcttttcatgtctttgatctggttttattcctgtaattcagccacctgattttgtgaggggggggaataatatgtggtttttgtacaaacatgtttctcagtgtgttgttattttggaaaaaatgaggggagggagtttggcaagaatggagaaaatgaatgaagaaggcctaatctctctctttttcagtgaataaatggaacaccatttctgga

SEQ ID NO: 132546 - DNA, 2967 bp, Homo sapiens
tagaatcgagctcggtaccatggtagtcttcagctcagcacgggtttctccaagtcttcctgtaccatctgggcattctctctccactcccgggagtggagagagaaagaagctctagaacaacagaggcagcagttgcttactgaacgccaaaacttccacatggaacagctgaagtatgctgaattacgagcacgacagcaaatggaacagcagcagcatggccagaaccctcaacaggcacaccagcactcaggaggacctggcctggccccacttggagcagcagggcaccctggcatgatgcctcatcaacagccccctccctaccctctgatgcaccaccagatgccaccacctcatccaccccagccaggtcagataccaggcccaggttccatgatgcccgggcagcacatgccaggccgcatgattcccactgttgcagccaacatccacccctctgggagtggccctacccctcctggcatgccaccaatgccaggaaacatcttaggaccccgggtacccctgacagcacctaacggcatgtatccccctccaccacagcagcagccaccgccaccaccacctgcagatggggtccctccgcctcctgctcctggcccgccagcctcagctgctccttagcctggaagatgcagggaacctccacgcccaccaccatgagctggagtggggatgacaagacttgtgttcctcaactttcttgggtttctttcaggatttttcttctcacagctccaagcacgtgtcccgtgcctccccactcctcttaccacccctctctctgacactttttgtgttgggtcctcagccaacactcaaggggaaacctgtagtgacagtgtgccctggtcatccttaaaataacctgcatctcccctgtcctggtgtgggagtaagctgacagtttctctgcaggtcctgtcaactttagcatgctatgtctttaccatttttgctctcttgcagttttttgctttgtcttatgcttctatggataatgctatataatcattatctttttatctttctgttattattgttttaaaggagagcatcctaagttaataggaaccaaaaaataatgatgggcagaagggggggaatagccacaggggacaaaccttaaggcattataagtgaccttatttctgcttttctgagctaagaatggtgctgatggtaaagtttgagacttttgccacacacaaatttgtgaaaattaaacgagatgtggaaggagaacctcagtgattttattccctagtgaggcctctgagggcctccacactgcctggcagaacataccactgaactagtatgtgctagaggagggcacaaacatccgctccttccctaggcctgctggctctggttttctatgcagatgattcattggattgggggtgagtgttttgtttttctgggggcagtgtgagctttgagggttggaatattgggaggcattccttagtttcctcaactagcctggaaagttaggagtctagggtaattaccccccaatgagtctagcctactattcactgctttgtgtgcatttttttctccctctttaaaaaaccctttaaaagaaaaaaaaaagtagatagtgctaaatattttagctcatgaaacttggttaggatggctgggggtacaagtccccaaactacctcttgttacagtagccagggagtggaatttcgtcaaccggtacttttaaggttaggatgggacgggaaaagtgaagcaggatattagctccttataccttctcccttccatttctgagatctcacattccatctatcacagggttttcaaagagatgctgagggtaacaaggaactcacttggcagtcagagcatcatgctttgaggtttggggtgctcaggctgggagggtagaatgccattccagaggacaagccacaaaaatgccttaatttgagctcgtatttacccctgctgataagtgacttgagagttcccggttttttcctcttgtccttccctcccttctgtccttccatgtgtggggaaagggtgttttggtagagcttggtttccaaagcgcctggctttctcacttcacattctcaagtggcagtttcattatttagaatgcaaggtggacatcttttggatatctttttctatatattttctaaagctttacatatgagagggtatagggaggtgtttataaaacacttgagaacttttttccttaatatcagaaagcaaaaaaataaaaccacaattgagatttgcctttcaaaccctcaggtttgcctctaaccaggtgtccctggtcaccatcagagtactggaatacgggaaccgaggagaccttggtccttttgtttttgttctggactcttgggagtggaaatgagaatgagtttattcctactggagcttagttccaatgcatttggctccagaaagaccccagtgccttttgacaatggccagggttttacctacttcctgccagtctttcccaaaggaaactcattccaaatacttcttttttcccctggagtccgagaaggaaaatggaattctggttcatactgtggtcccttgtaacctcaggtctttaatgtgatcactttcaaatttaaaagatccaggtggaaatatttttactatagtaataattctacaaaatacctgaattcttaacactgttatatttcagtataagtggtggctttttcttttcatgtctttgatctggttttattcctgtaattcagccacctgattttgtgaggggggggaataatatgtggtttttgtacaaacatgtttctcagtgtgttgttattttggaaaaaatgaggggagggagtttggcaagaatggagaaaatgaatgaagaaggcctaatctctctctttttcagtgaataaatggaacaccatttctgga

SEQ ID NO: 132547 - DNA, 2749 bp, Homo sapiens
cgacttaaagcaagtaacgaaggcacaccagcactcaggaggacctggcctggccccacttggagcagcagggcaccctggcatgatgcctcatcaacagccccctccctaccctctgatgcaccaccagatgccaccacctcatccaccccagccaggtcagataccaggcccaggttccatgatgcccgggcagcacatgccaggccgcatgattcccactgttgcagccaacatccacccctctgggagtggccctacccctcctggcatgccaccaatgccaggaaacatcttaggaccccgggtacccctgacagcacctaacggcatgtatccccctccaccacagcagcagccaccgccaccaccacctgcagatggggtccctccgcctcctgctcctggcccgccagcctcagctgctccttagcctggaagatgcagggaacctccacgcccaccaccatgagctggagtggggatgacaagacttgtgttcctcaactttcttgggtttctttcaggatttttcttctcacagctccaagcacgtgtcccgtgcctccccactcctcttaccacccctctctctgacactttttgtgttgggtcctcagccaacactcaaggggaaacctgtagtgacagtgtgccctggtcatccttaaaataacctgcatctcccctgtcctggtgtgggagtaagctgacagtttctctgcaggtcctgtcaactttagcatgctatgtctttaccatttttgctctcttgcagttttttgctttgtcttatgcttctatggataatgctatataatcattatctttttatctttctgttattattgttttaaaggagagcatcctaagttaataggaaccaaaaaataatgatgggcagaagggggggaatagccacaggggacaaaccttaaggcattataagtgaccttatttctgcttttctgagctaagaatggtgctgatggtaaagtttgagacttttgccacacacaaatttgtgaaaattaaacgagatgtggaaggagaacctcagtgattttattccctagtgaggcctctgagggcctccacactgcctggcagaacataccactgaactagtatgtgctagaggagggcacaaacatccgctccttccctaggcctgctggctctggttttctatgcagatgattcattggattgggggtgagtgttttgtttttctgggggcagtgtgagctttgagggttggaatattgggaggcattccttagtttcctcaactagcctggaaagttaggagtctagggtaattaccccccaatgagtctagcctactattcactgctttgtgtgcatttttttctccctctttaaaaaaccctttaaaagaaaaaaaaaagtagatagtgctaaatattttagctcatgaaacttggttaggatggctgggggtacaagtccccaaactacctcttgttacagtagccagggagtggaatttcgtcaaccggtacttttaaggttaggatgggacgggaaaagtgaagcaggatattagctccttataccttctcccttccatttctgagatctcacattccatctatcacagggttttcaaagagatgctgagggtaacaaggaactcacttggcagtcagagcatcatgctttgaggtttggggtgctcaggctgggagggtagaatgccattccagaggacaagccacaaaaatgccttaatttgagctcgtatttacccctgctgataagtgacttgagagttcccggttttttcctcttgtccttccctcccttctgtccttccatgtgtggggaaagggtgttttggtagagcttggtttccaaagcgcctggctttctcacttcacattctcaagtggcagtttcattatttagaatgcaaggtggacatcttttggatatctttttctatatattttctaaagctttacatatgagagggtatagggaggtgtttataaaacacttgagaacttttttccttaatatcagaaagcaaaaaaataaaaccacaattgagatttgcctttcaaaccctcaggtttgcctctaaccaggtgtccctggtcaccatcagagtactggaatacgggaaccgaggagaccttggtccttttgtttttgttctggactcttgggagtggaaatgagaatgagtttattcctactggagcttagttccaatgcatttggctccagaaagaccccagtgccttttgacaatggccagggttttacctacttcctgccagtctttcccaaaggaaactcattccaaatacttcttttttcccctggagtccgagaaggaaaatggaattctggttcatactgtggtcccttgtaacctcaggtctttaatgtgatcactttcaaatttaaaagatccaggtggaaatatttttactatagtaataattctacaaaatacctgaattcttaacactgttatatttcagtataagtggtggctttttcttttcatgtctttgatctggttttattcctgtaattcagccacctgattttgtgaggggggggaataatatgtggtttttgtacaaacatgtttctcagtgtgttgttattttggaaaaaatgaggggagggagtttggcaagaatggagaaaatgaatgaagaaggcctaatctctctctttttcagtgaataaatggaacaccatttctgga

SEQ ID NO: 132548 - DNA, 4998 bp, Homo sapiens
gctgggcggggccgggaagcggcagtggcggctacgcgcgcgggggtgcgcgcgggaacgaccgggaaacaccgcgagggccggggtgggccaggctgtggggacgacgggctgcgacgatggccgcagcggcgggcggcggcgggccggggacagcggtaggcgccacgggctcggggattgcggcggcagccgcaggcctagctgtttatcgacggaaggatgggggcccggccaccaagttttgggagagcccggagacggtgtcccagctggattcggtgcgggtctggctgggcaagcactacaagaagtatgttcatgcggatgctcctaccaataaaacactggctgggctggtggtgcagcttcttcagttccaggaagatgcctttgggaagcatgtcaccaacccggccttcaccaaactccctgcaaagtgtttcatggatttcaaagctggaggcgccttatgtcacattcttggggctgcttacaagtataaaaatgaacagggatggcggaggtttgacctacagaacccatctcgaatggatcgtaatgtggaaatgtttatgaacattgaaaaaacattggtgcagaacaattgtttgaccagacccaacatctacctcattccagacattgatctgaagttggctaacaaattgaaagatatcatcaaacgacatcagggaacatttacggatgagaagtcaaaagcttcccaccacatttacccatattcttcctcacaagacgatgaagaatggttgagaccggtgatgagaaaagagaagcaagtgttagtgcattggggcttttacccagacagctatgatacttgggtccatagtaatgatgttgatgctgaaattgaagatccaccaattccagaaaaaccatggaaggttcatgtgaaatggattttggacactgatattttcaatgaatggatgaatgaggaggattatgaggtggatgaaaataggaagcctgtgagttttcgtcagcggatttcaaccaagaatgaagagccagtcagaagtccagaaagaagagatagaaaagcatcagctaatgctcgaaagaggaaacattcgccttcgcctccccctccgacaccaacagaatcacggaagaagagtgggaagaaaggccaagctagcctttatgggaagcgcagaagtcagaaagaggaagatgagcaagaagatctaaccaaggatatggaagacccaacacctgtacccaatatagaagaagtagtacttcccaaaaatgtgaacctaaagaaagatagtgaaaatacacctgttaaaggaggaactgtagcggatctagatgagcaggatgaagaaacagtcacagcaggaggaaaggaagatgaagatcctgccaaaggtgatcagagtcgatcagttgaccttggggaagataatgtgacagagcagaccaatcacattattattcctagttatgcatcatggtttgattataactgtattcatgtgattgaacggcgtgctcttcctgagttcttcaatggaaaaaacaaatccaagactccagaaatatacttggcatatcgaaattttatgattgacacgtatcgtctaaacccccaagagtatttaactagcactgcttgtcggaggaacttgactggagatgtgtgtgctgtgatgagggtccatgcctttttagagcagtggggactcgttaattaccaagttgacccggaaagtagacccatggcaatgggacctcctcctactcctcattttaatgtattagctgataccccctctgggcttgtgcctctgcatcttcgatcacctcaggttcctgctgctcaacagatgctaaattttcctgagaaaaacaaggaaaaaccagttgatttgcagaactttggtctccgtactgacatttactccaagaaaacattagcaaagagtaaaggtgctagtgctggaagagaatggactgaacaggagacccttctactcctggaggccctggagatgtacaaggatgattggaacaaagtgtcggaacatgttggaagtcgtactcaggatgaatgcatcctccactttttgagacttcccattgaggacccataccttgagaattcagatgcttcccttgggcctttggcctaccagcctgtccccttcagtcagtcaggaaatccagttatgagtactgttgcttttttggcatctgtggtggaccctcgcgtggcatctgctgcagcaaaagcggctttggaggagttttctcgggtccgggaggaggtaccactggaattggttgaagctcatgtcaagaaagtacaagaagcagcacgagcctctgggaaagtggatcccacctacggtctggagagcagctgcattgcaggcacagggcccgatgagccagagaagcttgaaggagctgaagaggaaaaaatggaagccgaccctgatggtcagcagcctgaaaaggcagaaaataaagtggaaaatgaaacggatgaaggtgataaagcacaagatggagaaaatgaaaaaaatagtgaaaaggaacaggatagtgaagtgagtgaggataccaaatcagaagaaaaggagactgaagagaacaaagaactcactgatacatgtaaagaaagagaaagtgatactgggaagaagaaagtagaacatgaaatttccgaaggaaatgttgccacagccgcagcagctgctcttgcctcagcggctaccaaagccaagcacctggctgcagtggaagaaagaaagatcaagtccctggtagctctcttggttgagacacaaatgaagaaactagagatcaaacttcgacattttgaagagctggaaactatcatggacagagagaaagaagctctagaacaacagaggcagcagttgcttactgaacgccaaaacttccacatggaacagctgaagtatgctgaattacgagcacgacagcaaatggaacagcagcagcatggccagaaccctcaacaggcacaccagcactcaggaggacctggcctggccccacttggagcagcagggcaccctggcatgatgcctcatcaacagccccctccctaccctctgatgcaccaccagatgccaccacctcatccaccccagccaggtcagataccaggcccaggttccatgatgcccgggcagcacatgccaggccgcatgattcccactgttgcagccaacatccacccctctgggagtggccctacccctcctggcatgccaccaatgccaggaaacatcttaggaccccgggtacccctgacagcacctaacggcatgtatccccctccaccacagcagcagccaccgccaccaccacctgcagatggggtccctccgcctcctgctcctggcccgccagcctcagctgctccttagcctggaagatgcagggaacctccacgcccaccaccatgagctggagtggggatgacaagacttgtgttcctcaactttcttgggtttctttcaggatttttcttctcacagctccaagcacgtgtcccgtgcctccccactcctcttaccacccctctctctgacactttttgtgttgggtcctcagccaacactcaaggggaaacctgtagtgacagtgtgccctggtcatccttaaaataacctgcatctcccctgtcctggtgtgggagtaagctgacagtttctctgcaggtcctgtcaactttagcatgctatgtctttaccatttttgctctcttgcagttttttgctttgtcttatgcttctatggataatgctatataatcattatctttttatctttctgttattattgttttaaaggagagcatcctaagttaataggaaccaaaaaataatgatgggcagaagggggggaatagccacaggggacaaaccttaaggcattataagtgaccttatttctgcttttctgagctaagaatggtgctgatggtaaagtttgagacttttgccacacacaaatttgtgaaaattaaacgagatgtggaaggagaacctcagtgattttattccctagtgaggcctctgagggcctccacactgcctggcagaacataccactgaactagtatgtgctagaggagggcacaaacatccgctccttccctaggcctgctggctctggttttctatgcagatgattcattggattgggggtgagtgttttgtttttctgggggcagtgtgagctttgagggttggaatattgggaggcattccttagtttcctcaactagcctggaaagttaggagtctagggtaattaccccccaatgagtctagcctactattcactgctttgtgtgcatttttttctccctctttaaaaaaccctttaaaagaaaaaaaaaagtagatagtgctaaatattttagctcatgaaacttggttaggatggctgggggtacaagtccccaaactacctcttgttacagtagccagggagtggaatttcgtcaaccggtacttttaaggttaggatgggacgggaaaagtgaagcaggatattagctccttataccttctcccttccatttctgagatctcacattccatctatcacagggttttcaaagagatgctgagggtaacaaggaactcacttggcagtcagagcatcatgctttgaggtttggggtgctcaggctgggagggtagaatgccattccagaggacaagccacaaaaatgccttaatttgagctcgtatttacccctgctgataagtgacttgagagttcccggttttttcctcttgtccttccctcccttctgtccttccatgtgtggggaaagggtgttttggtagagcttggtttccaaagcgcctggctttctcacttcacattctcaagtggcagtttcattatttagaatgcaaggtggacatcttttggatatctttttcagtgaataaatggaacaccatttctgga

SEQ ID NO: 132549 - DNA, 1815 bp, Homo sapiens
cccccccctcctctccctctgccacccctatttcacctaattccatactttaatcagcactccctctagtgcaaatctgccctcgagccccagacttctgcacgagatgtggaaggagaacctcagtgattttattccctagtgaggcctctgagggcctccacactgcctggcagaacataccactgaactagtatgtgctagaggagggcacaaacatccgctccttccctaggcctgctggctctggttttctatgcagatgattcattggattgggggtgagtgttttgtttttctgggggcagtgtgagctttgagggttggaatattgggaggcattccttagtttcctcaactagcctggaaagttaggagtctagggtaattaccccccaatgagtctagcctactattcactgctttgtgtgcatttttttctccctctttaaaaaaccctttaaaagaaaaaaaaaagtagatagtgctaaatattttagctcatgaaacttggttaggatggctgggggtacaagtccccaaactacctcttgttacagtagccagggagtggaatttcgtcaaccggtacttttaaggttaggatgggacgggaaaagtgaagcaggatattagctccttataccttctcccttccatttctgagatctcacattccatctatcacagggttttcaaagagatgctgagggtaacaaggaactcacttggcagtcagagcatcatgctttgaggtttggggtgctcaggctgggagggtagaatgccattccagaggacaagccacaaaaatgccttaatttgagctcgtatttacccctgctgataagtgacttgagagttcccggttttttcctcttgtccttccctcccttctgtccttccatgtgtggggaaagggtgttttggtagagcttggtttccaaagcgcctggctttctcacttcacattctcaagtggcagtttcattatttagaatgcaaggtggacatcttttggatatctttttctatatattttctaaagctttacatatgagagggtatagggaggtgtttataaaacacttgagaacttttttccttaatatcagaaagcaaaaaaataaaaccacaattgagatttgcctttcaaaccctcaggtttgcctctaaccaggtgtccctggtcaccatcagagtactggaatacgggaaccgaggagaccttggtccttttgtttttgttctggactcttgggagtggaaatgagaatgagtttattcctactggagcttagttccaatgcatttggctccagaaagaccccagtgccttttgacaatggccagggttttacctacttcctgccagtctttcccaaaggaaactcattccaaatacttcttttttcccctggagtccgagaaggaaaatggaattctggttcatactgtggtcccttgtaacctcaggtctttaatgtgatcactttcaaatttaaaagatccaggtggaaatatttttactatagtaataattctacaaaatacctgaattcttaacactgttatatttcagtataagtggtggctttttcttttcatgtctttgatctggttttattcctgtaattcagccacctgattttgtgaggggggggaataatatgtggtttttgtacaaacatgtttctcagtgtgttgttattttggaaaaaatgaggggagggagtttggcaagaatggagaaaatgaatgaagaaggcctaatctctctctttttcagtgaataaatggaacaccatttctgga

SEQ ID NO: 132550 - DNA, 612 bp, Homo sapiens
ccttccaacatctcatttctactcccttggtccttttgtttttgttctggactcttgggagtggaaatgagaatgagtttattcctactggagcttagttccaatgcatttggctccagaaagaccccagtgccttttgacaatggccagggttttacctacttcctgccagtctttcccaaaggaaactcattccaaatacttcttttttcccctggagtccgagaaggaaaatggaattctggttcatactgtggtcccttgtaacctcaggtctttaatgtgatcactttcaaatttaaaagatccaggtggaaatatttttactatagtaataattctacaaaatacctgaattcttaacactgttatatttcagtataagtggtggctttttcttttcatgtctttgatctggttttattcctgtaattcagccacctgattttgtgaggggggggaataatatgtggtttttgtacaaacatgtttctcagtgtgttgttattttggaaaaaatgaggggagggagtttggcaagaatggagaaaatgaatgaagaaggcctaatctctctctttttcagtgaataaatggaacaccatttctgga

SEQ ID NO: 132551 - DNA, 1860 bp, Homo sapiens
gctgggcggggccgggaagcggcagtggcggctacgcgcgcgggggtgcgcgcgggaacgaccgggaaacaccgcgagggccggggtgggccaggctgtggggacgacgggctgcgacgatggccgcagcggcgggcggcggcgggccggggacagcggtaggcgccacgggctcggggattgcggcggcagccgcaggcctagctgtttatcgacggaaggatgggggcccggccaccaagttttgggagagcccggagacggtgtcccagctggattcggtgcgggtctggctgggcaagcactacaagaagtatgttcatgcggatgctcctaccaataaaacactggctgggctggtggtgcagcttcttcagttccaggaagatgcctttgggaagcatgtcaccaacccggccttcaccaaactccctgcaaagtgtttcatggatttcaaagctggaggcgccttatgtcacattcttggggctgcttacaagtataaaaatgaacagggatggcggaggtttgacctacagaacccatctcgaatggatcgtaatgtggaaatgtttatgaacattgaaaaaacattggtgcagaacaattgtttgaccagacccaacatctacctcattccagacattgatctgaagttggctaacaaattgaaagatatcatcaaacgacatcagggaacatttacggatgagaagtcaaaagcttcccaccacatttacccatattcttcctcacaagacgatgaagaatggttgagaccggtgatgagaaaagagaagcaagtgttagtgcattggggcttttacccagacagctatgatacttgggtccatagtaatgatgttgatgctgaaattgaagatccaccaattccagaaaaaccatggaaggttcatgtgaaatggattttggacactgatattttcaatgaatggatgaatgaggaggattatgaggtggatgaaaataggaagcctgtgagttttcgtcagcggatttcaaccaagaatgaagagccagtcagaagtccagaaagaagagatagaaaagcatcagctaatgctcgaaagaggaaacattcgccttcgcctccccctccgacaccaacagaatcacggaagaagagtgggaagaaaggccaagctagcctttatgggaagcgcagaagtcagaaagaggaagatgagcaagaagatctaaccaaggatatggaagacccaacacctgtacccaatatagaagaagtagtacttcccaaaaatgtgaacctaaagaaagatagtgaaaatacacctgttaaaggaggaactgtagcggatctagatgagcaggatgaagaaacagtcacagcaggaggaaaggaagatgaagatcctgccaaaggtgatcagagtcgatcagttgaccttggggaagataatgtgacagagcagaccaatcacattattattcctagttatgcatcatggtttgattataactgtattcatgtgattgaacggcgtgctcttcctgagttcttcaatggaaaaaacaaatccaagactccagaaatatacttggcatatcgaaattttatgattgacacgtatcgtctaaacccccaagagtatttaactagcactgcttgtcggaggaacttgactggagatgtgtgtgctgtgatgagggtccatgcctttttagagcagtggggactcgttaattaccaagttgacccggaaagtagacccatggcaatgggacctcctcctactcctcattttaatgtattaagccagcagaagcagggttccctttggggagcaggaggccaataaaaagttcagagttcaaaaa

SEQ ID NO: 132552 - DNA, 1790 bp, Homo sapiens
gctgggcggggccgggaagcggcagtggcggctacgcgcgcgggggtgcgcgcgggaacgaccgggaaacaccgcgagggccggggtgggccaggctgtggggacgacgggctgcgacgatggccgcagcggcgggcggcggcgggccggggacagcggtaggcgccacgggctcggggattgcggcggcagccgcaggcctagctgtttatcgacggaaggatgggggcccggccaccaagttttgggagagcccggagacggtgtcccagctggattcggtgcgggtctggctgggcaagcactacaagaagtatgttcatgcggatgctcctaccaataaaacactggctgggctggtggtgcagcttcttcagttccaggaagatgcctttgggaagcatgtcaccaacccggccttcaccaaactccctgcaaagtgtttcatggatttcaaagctggaggcgccttatgtcacattcttggggctgcttacaagtataaaaatgaacagggatggcggaggtttgacctacagaacccatctcgaatggatcgtaatgtggaaatgtttatgaacattgaaaaaacattggtgcagaacaattgtttgaccagacccaacatctacctcattccagacattgatctgaagttggctaacaaattgaaagatatcatcaaacgacatcagggaacatttacggatgagaagtcaaaagcttcccaccacatttacccatattcttcctcacaagacgatgaagaatggttgagaccggtgatgagaaaagagaagcaagtgttagtgcattggggcttttacccagacagctatgatacttgggtccatagtaatgatgttgatgctgaaattgaagatccaccaattccagaaaaaccatggaaggttcatgtgaaatggattttggacactgatattttcaatgaatggatgaatgaggaggattatgaggtggatgaaaataggaagcctgtgagttttcgtcagcggatttcaaccaagaatgaagagccagtcagaagtccagaaagaagagatagaaaagcatcagctaatgctcgaaagaggaaacattcgccttcgcctccccctccgacaccaacagaatcacggaagaagagtgggaagaaaggccaagctagcctttatgggaagcgcagaagtcagaaagaggaagatgagcaagaagatctaaccaaggatatggaagacccaacacctgtacccaatatagaagaagtagtacttcccaaaaatgtgaacctaaagaaagatagtgaaaatacacctgttaaaggaggaactgtagcggatctagatgagcaggatgaagaaacagtcacagcaggaggaaaggaagatgaagatcctgccaaaggtgatcagagtcgatcagttgaccttggggaagataatgtgacagagcagaccaatcacattattattcctagttatgcatcatggtttgattataactgtattcatgtgattgaacggcgtgctcttcctgagttcttcaatggaaaaaacaaatccaagactccagaaatgtgaggccagtgttttagaaaacttgtttatttgcctgtgtgcggtaggggctcttcaagcatccacctgagttccttattgctgattcttggaagtttgcaaatactcctttcagaacagtgttcatatctcatttgcatagcattccatggtacacaggaaattgtatctagtttcgttttttgttttggggggttttttttggtgtttgtt

SEQ ID NO: 132553 - DNA, 1269 bp, Homo sapiens
gatcgaagatttatcccagcaagcacaactagcagctgctgagaaattcaaagttcaaggtgaagctgtctcaaacattcaagaaaacacacagactccaactgtacaagaggagagtgaagaggaagagttcgatgaaacaggtgtagaagttaaggacatagaattggtcatgtcacagcaaatgtgtcgagaggaaaggtaacaattcagttaagcctggtgtgagagagcttctctaagggtcctgtgtaccgaacagtagaagcactgaattggacataacccaatttttggactatgaagcccttctggtttttgaatttttttttgtttttagtttttcccctaaggaaaacaaatacaatataagaaccatttctggaaggtgtttttgttagttttttcttttgagacaggctgttggttctcactgtaaccttgacctcctgggctcaggtgatccccctcccacctcagcctcccgagtagctgagactacttgtgtgcaccactacacccaactgatttttttattttttgtagagatggagttttttatgttgcccaggctggttgcgaactcctgggctcaagcaatctgtctgcctcagcctcccaaagtgatggcattacaggtgtcagccactgcgctcggcaaaatacttgactttcttggaccccaagattttacttagaggaaatttttgtcctccctgctagtgtccctcatgtgctgtaatttctagtttcatactcccctggttgcaaggtaatattcagtgccgaccacagtatttcagatgttatccgacagtgcagatgagcaggggccatgtgttgtcttgatttttctcactgccatttctattgatgcagtgtagactttgaatcatactttgacctttcttgagccttattgcgagctacttcctgctttatgaattctgctgtagcgatacctcaatcattatgcttttggaacatgttagatttaaggtaggatttaattttttaaaaataaacggcgtcttgtttactcaggctatcatgtttgactgtgtgattaacccccaatcttcttgaaataatttccttaacttgctgaatatagattttttttttcatttgcaaagaaattccctaagatgatccttatcattgttgtatacattcaaggatgaacatatgcatgacaggatttccggaaaagtatttcaagaaactcttttcttatgactcttcacctgtattgttcttatgattaaa

SEQ ID NO: 132554 - DNA, 1595 bp, Homo sapiens
  misc_feature (1321)..(1321): n is a, c, g, or t
  misc_feature (1524)..(1524): n is a, c, g, or t
  misc_feature (1526)..(1526): n is a, c, g, or t
  misc_feature (1553)..(1553): n is a, c, g, or t
  misc_feature (1570)..(1570): n is a, c, g, or t
  misc_feature (1586)..(1586): n is a, c, g, or t
gctgggcggggccgggaagcggcagtggcggctacgcgcgcgggggtgcgcgcgggaacgaccgggaaacaccgcgagggccggggtgggccaggctgtggggacgacgggctgcgacgatggccgcagcggcgggcggcggcgggccggggacagcggtaggcgccacgggctcggggattgcggcggcagccgcaggcctagctgtttatcgacggaaggatgggggcccggccaccaagttttgggagagcccggagacggtgtcccagctggattcggtgcgggtctggctgggcaagcactacaagaagtatgttcatgcggatgctcctaccaataaaacactggctgggctggtggtgcagcttcttcagttccaggaagatgcctttgggaagcatgtcaccaacccggccttcaccaaactccctgcaaagtgtttcatggatttcaaagctggaggcgccttatgtcacattcttggggctgcttacaagtataaaaatgaacagggatggcggaggtttgacctacagaacccatctcgaatggatcgtaatgtggaaatgtttatgaacattgaaaaaacattggtgcagaacaattgtttgaccagacccaacatctacctcattccagacattgatctgaagttggctaacaaattgaaagatatcatcaaacgacatcagggaacatttacggatgagaagtcaaaagcttcccaccacatttacccatattcttcctcacaagacgatgaagaatggttgagaccggtgatgagaaaagagaagcaagtgttagtgcattggggcttttacccagacagctatgatacttgggtccatagtaatgatgttgatgctgaaattgaagatccaccaattccagaaaaaccatggaaggttcatgtgaaatggattttggacactgatattttcaatgaatggatgaatgaggaggattatgaggtggatgaaaataggaagcctgtgagttttcgtcagcggatttcaaccaagaatgaagagccagtcagaagtccagaaagaagagatagaaaagcatcagctaatgctcgaaagaggaaacattcgccttcgcctccccctccgacaccaacagaatcacggaagaagagtgggaagaaaggccaagctagcctttatgggaagcgcagaagtcagaaagaggaagatgagcaagaagatctaaccaaggatatggaagacccaacacctgtacccaatatagaagaagtagtacttcccaaaaatgtgaacctaaagaaagatagtgaaaatacacctgttanaggaggaactgtagcggatctagatgagcaggatgaagaaacagtcacagcaggaggaaaggaagatgaagatcctgccaaaggtgatcagagtcgatcagttgaccttggggaagataatgtgacagaccaaaccaatcacatttatttattcccaagttatgcatccaagggtttgattaaaaactgtattcaatgtgaantngaaaggggcgttgcctccttccctgangttccctccaatggggnaaaaaaaccaaaattncaaaggact

SEQ ID NO: 132555 - DNA, 1020 bp, Homo sapiens
  misc_feature (975)..(976): n is a, c, g, or t
gatcgaagatttatcccagcaagcacaactagcagctgctgagaaattcaaagttcaaggtgaagctgtctcaaacattcaagaaaacacacagactccaactgtacaagaggagagtgaagaggaagagttcgatgaaacaggtgtagaagttaaggacatagaattggtcatgtcacagcaaatgtgtcgagaggaaaggtaacaattcagttaagcctggtgtgagagagcttctctaagggtcctgtgtaccgaacagtagaagcactgaattggacataacccaatttttggactatgaagcccttctggtttttgaatttttttttgtttttagtttttcccctaaggaaaacaaatacaatataagaaccatttctggaaggtgtttttgttagttttttcttttgagacaggctgttggttctcactgtaaccttgacctcctgggctcaggtgatccccctcccacctcagcctcccgagtagctgagactacttgtgtgcaccactacacccaactgatttttttattttttgtagagatggagttttttatgttgcccaggctggttgcgaactcctgggctcaagcaatctgtctgcctcagcctcccaaagtgatggcattacaggtgtcagccactgcgctcggcaaaatacttgactttcttggaccccaagattttacttagaggaaatttttgtcctccctgctagtgtccctcatgtgctgtaatttctagtttcatactcccctggttgcaaggtaatattcagtgccgaccacagtatttcagatgttatccgacagtgcagatgagcaggggccatgtgttgtcttgatttttctcactgccatttctattgatgcagtgtagactttgaatcatactttgacctttcttgagccttattgcgagctacttcctgctttatgaattctgctgtagcgatacctcaatcattatnnctattgaacttctaaaactaggggtatcagctcggtcgtatcat

SEQ ID NO: 132556 - DNA, 932 bp, Homo sapiens
  misc_feature (658)..(658): n is a, c, g, or t
  misc_feature (861)..(861): n is a, c, g, or t
  misc_feature (863)..(863): n is a, c, g, or t
  misc_feature (890)..(890): n is a, c, g, or t
  misc_feature (907)..(907): n is a, c, g, or t
  misc_feature (923)..(923): n is a, c, g, or t
cgttctagaggatccctgctgaaagacatcagggaacatttacggatgagaagtcaaaagcttcccaccacatttacccatattcttcctcacaagacgatgaagaatggttgagaccggtgatgagaaaagagaagcaagtgttagtgcattggggcttttacccagacagctatgatacttgggtccatagtaatgatgttgatgctgaaattgaagatccaccaattccagaaaaaccatggaaggttcatgtgaaatggattttggacactgatattttcaatgaatggatgaatgaggaggattatgaggtggatgaaaataggaagcctgtgagttttcgtcagcggatttcaaccaagaatgaagagccagtcagaagtccagaaagaagagatagaaaagcatcagctaatgctcgaaagaggaaacattcgccttcgcctccccctccgacaccaacagaatcacggaagaagagtgggaagaaaggccaagctagcctttatgggaagcgcagaagtcagaaagaggaagatgagcaagaagatctaaccaaggatatggaagacccaacacctgtacccaatatagaagaagtagtacttcccaaaaatgtgaacctaaagaaagatagtgaaaatacacctgttanaggaggaactgtagcggatctagatgagcaggatgaagaaacagtcacagcaggaggaaaggaagatgaagatcctgccaaaggtgatcagagtcgatcagttgaccttggggaagataatgtgacagaccaaaccaatcacatttatttattcccaagttatgcatccaagggtttgattaaaaactgtattcaatgtgaantngaaaggggcgttgcctccttccctgangttccctccaatggggnaaaaaaaccaaaattncaaaggact

SEQ ID NO: 132557 - DNA, 689 bp, Homo sapiens
gtatcgctcgctaaattcataaagcaggaagtagcctcccaaagtgatggcattacaggtgtcagccactgcgctcggcaaaatacttgactttcttggaccccaagattttacttagaggaaatttttgtcctccctgctagtgtccctcatgtgctgtaatttctagtttcatactcccctggttgcaaggtaatattcagtgccgaccacagtatttcagatgttatccgacagtgcagatgagcaggggccatgtgttgtcttgatttttctcactgccatttctattgatgcagtgtagactttgaatcatactttgacctttcttgagccttattgcgagctacttcctgctttatgaattctgctgtagcgatacctcaatcattatgcttttggaacatgttagatttaaggtaggatttaattttttaaaaataaacggcgtcttgtttactcaggctatcatgtttgactgtgtgattaacccccaatcttcttgaaataatttccttaacttgctgaatatagattttttttttcatttgcaaagaaattccctaagatgatccttatcattgttgtatacattcaaggatgaacatatgcatgacaggatttccggaaaagtatttcaagaaactcttttcttatgactcttcacctgtattgttcttatgattaaa

SEQ ID NO: 132558 - DNA, 997 bp, Homo sapiens
gatcgaagatttatcccagcaagcacaactagcagctgctgagaaattcaaagttcaaggtgaagctgtctcaaacattcaagaaaacacacagactccaactgtacaagaggagagtgaagaggaagagttcgatgaaacaggtgtagaagttaaggacatagaattggtcatgtcacagcaaatgtgtcgagaggaaaggtaacaattcagttaagcctggtgtgagagagcttctctaagggtcctgtgtaccgaacagtagaagcactgaattggacataacccaatttttggactatgaagcccttctggtttttgaatttttttttgtttttagtttttcccctaaggaaaacaaatacaatataagaaccatttctggaaggtgtttttgttagttttttcttttgagacaggctgttggttctcactgtaaccttgacctcctgggctcaggtgatccccctcccacctcagcctcccgagtagctgagactacttgtgtgcaccactacacccaactgatttttttattttttgtagagatggagttttttatgttgcccaggctggttgcgaactcctgggctcaagcaatctgtctgcctcagcctcccaaagtgatggcattacaggtgtcagccactgcgctcggcaaaatacttgactttcttggaccccaagattttacttagaggaaatttttgtcctccctgctagtgtccctcatgtgctgtaatttctagtttcatactcccctggttgcaaggtaatattcagtgccgaccacagtatttcagatgttatccgacagtgcagatgagcaggggccatgtgttgtcttgatttttctcactgccatttctattgatgcagtgtagactttgaatcatactttgacctttcttgattcgtacttcctcttttgcttattacagcattttcttctctactcccttttctcttcattgctcttgaaacttctctaactagg

SEQ ID NO: 132559 - DNA, 597 bp, Homo sapiens
gagcacgacagcaaatggaacagcagcagcatggccagaaccctcaacaggcacaccagcactcaggaggacctggcctggccccacttggagcagcagggcaccctggcatgatgcctcatcaacagccccctccctaccctctgatgcaccaccagatgccaccacctcatccaccccagccaggtaagaggaaggccctgctcttggaaaaagcttatggtcactacagaggcacagagcatcattggggccaaccacacagttggtgttttctgatgaagactgctcaaaattttcattgtcatctagaaaattgtaggcatgtgagatttagggttatcgccacatgaagccttccatgttctttttctcttggtatgatgcctttttgttgagtaggtcagcctctgattggacagtaatatctcagagttcattcagaatttatcttggattattgataccgtaaaaaaaattatagacattttcaaagataaatacacacaacacagcaaactcccatgacctggtttcaacaaccatcatctttctgccacttttactttttgttacggaaatcttcaaacacagata

SEQ ID NO: 132560 - DNA, 1118 bp, Homo sapiens
cctggatacctgcgtcctggtgtattacctgtggatatctgtcagaaccactgctgtctgcgcgagggccggggtgggccaggctgtggggacgacgggctgcgacgatggccgcagcggcgggcggcggcgggccggggacagcggtaggcgccacgggctcggggattgcggcggcagccgcaggcctagctgtttatcgacggaaggatgggggcccggccaccaagttttgggagagcccggagacggtgtcccagctggattcggtgcgggtctggctgggcaagcactacaagaagtatgttcatgcggatgctcctaccaataaaacactggctgggctggtggtgcagcttcttcagttccaggaagatgcctttgggaagcatgtcaccaacccggacttcaccaaacatccctgcaaagtgtatcatggatttcaaagctggaggcgccttatgtcacattcttggggctgcttacaagtcataacacaatgagcagggatggcggacgggtcagacctacagaacccatctcgacattgcgactcgtaatgtggcaactgtccctgcacatcgcacaacaccatcgggtcgcacgaaacgaaaagaagtgaccagaccccaacaatctaccattcaattcccaggacccagcatctgaacgttggctaaacacattgtacacgcctattcaacacaacgcacctcagggcaccccatttacgcgaattaccaaagttcacaagcaattcccaacaccactttaaccccaaaaatatcttacacacacaaccacaccatccacaccacacatacagcacaccgtacatcccaaccaaccaaaacgcaccattctatacacacactatagcgggaatggcacccagcaacacgaacctaacagcacctacatcggggctccaaataacaaatgacaaatacaagaacaaaaaaacccacagaaacacacacaccatacgacaacaaacacataatgaagtacccatagcgaacacaggcactagcgcaaccacataccacaccaacctaagaggcaaaacggcgagcatctccctcccttccctcccctctcacgaatcacgctgctcg

SEQ ID NO: 132561 - DNA, 5753 bp, Homo sapiens
gctgggcggggccgggaagcggcagtggcggctacgcgcgcgggggtgcgcgcgggaacgaccgggaaacaccgcgagggccggggtgggccaggctgtggggacgacgggctgcgacgatggccgcagcggcgggcggcggcgggccggggacagcggtaggcgccacgggctcggggattgcggcggcagccgcaggcctagctgtttatcgacggaaggatgggggcccggccaccaagttttgggagagcccggagacggtgtcccagctggattcggtgcgggtctggctgggcaagcactacaagaagtatgttcatgcggatgctcctaccaataaaacactggctgggctggtggtgcagcttcttcagttccaggaagatgcctttgggaagcatgtcaccaacccggccttcaccaaactccctgcaaagtgtttcatggatttcaaagctggaggcgccttatgtcacattcttggggctgcttacaagtataaaaatgaacagggatggcggaggtttgacctacagaacccatctcgaatggatcgtaatgtggaaatgtttatgaacattgaaaaaacattggtgcagaacaattgtttgaccagacccaacatctacctcattccagacattgatctgaagttggctaacaaattgaaagatatcatcaaacgacatcagggaacatttacggatgagaagtcaaaagcttcccaccacatttacccatattcttcctcacaagacgatgaagaatggttgagaccggtgatgagaaaagagaagcaagtgttagtgcattggggcttttacccagacagctatgatacttgggtccatagtaatgatgttgatgctgaaattgaagatccaccaattccagaaaaaccatggaaggttcatgtgaaatggattttggacactgatattttcaatgaatggatgaatgaggaggattatgaggtggatgaaaataggaagcctgtgagttttcgtcagcggatttcaaccaagaatgaagagccagtcagaagtccagaaagaagagatagaaaagcatcagctaatgctcgaaagaggaaacattcgccttcgcctccccctccgacaccaacagaatcacggaagaagagtgggaagaaaggccaagctagcctttatgggaagcgcagaagtcagaaagaggaagatgagcaagaagatctaaccaaggatatggaagacccaacacctgtacccaatatagaagaagtagtacttcccaaaaatgtgaacctaaagaaagatagtgaaaatacacctgttaaaggaggaactgtagcggatctagatgagcaggatgaagaaacagtcacagcaggaggaaaggaagatgaagatcctgccaaaggtgatcagagtcgatcagttgaccttggggaagataatgtgacagagcagaccaatcacattattattcctagttatgcatcatggtttgattataactgtattcatgtgattgaacggcgtgctcttcctgagttcttcaatggaaaaaacaaatccaagactccagaaatatacttggcatatcgaaattttatgattgacacgtatcgtctaaacccccaagagtatttaactagcactgcttgtcggaggaacttgactggagatgtgtgtgctgtgatgagggtccatgcctttttagagcagtggggactcgttaattaccaagttgacccggaaagtagacccatggcaatgggacctcctcctactcctcattttaatgtattagctgataccccctctgggcttgtgcctctgcatcttcgatcacctcaggttcctgctgctcaacagatgctaaattttcctgagaaaaacaaggaaaaaccagttgatttgcagaactttggtctccgtactgacatttactccaagaaaacattagcaaagagtaaaggtgctagtgctggaagagaatggactgaacaggagacccttctactcctggaggccctggagatgtacaaggatgattggaacaaagtgtcggaacatgttggaagtcgtactcaggatgaatgcatcctccactttttgagacttcccattgaggacccataccttgagaattcagatgcttcccttgggcctttggcctaccagcctgtccccttcagtcagtcaggaaatccagttatgagtactgttgcttttttggcatctgtggtggaccctcgcgtggcatctgctgcagcaaaagcggctttggaggagttttctcgggtccgggaggaggtaccactggaattggttgaagctcatgtcaagaaagtacaagaagcagcacgagcctctgggaaagtggatcccacctacggtctggagagcagctgcattgcaggcacagggcccgatgagccagagaagcttgaaggagctgaagaggaaaaaatggaagccgaccctgatggtcagcagcctgaaaaggcagaaaataaagtggaaaatgaaacggatgaaggtgataaagcacaagatggagaaaatgaaaaaaatagtgaaaaggaacaggatagtgaagtgagtgaggataccaaatcagaagaaaaggagactgaagagaacaaagaactcactgatacatgtaaagaaagagaaagtgatactgggaagaagaaagtagaacatgaaatttccgaaggaaatgttgccacagccgcagcagctgctcttgcctcagcggctaccaaagccaagcacctggctgcagtggaagaaagaaagatcaagtccctggtagctctcttggttgagacacaaatgaagaaactagagatcaaacttcgacattttgaagagctggaaactatcatggacagagagaaagaagctctagaacaacagaggcagcagttgcttactgaacgccaaaacttccacatggaacagctgaagtatgctgaattacgagcacgacagcaaatggaacagcagcagcatggccagaaccctcaacaggcacaccagcactcaggaggacctggcctggccccacttggagcagcagggcaccctggcatgatgcctcatcaacagccccctccctaccctctgatgcaccaccagatgccaccacctcatccaccccagccaggtcagataccaggcccaggttccatgatgcccgggcagcacatgccaggccgcatgattcccactgttgcagccaacatccacccctctgggagtggccctacccctcctggcatgccaccaatgccaggaaacatcttaggaccccgggtacccctgacagcacctaacggcatgtatccccctccaccacagcagcagccaccgccaccaccacctgcagatggggtccctccgcctcctgctcctggcccgccagcctcagctgctccttagcctggaagatgcagggaacctccacgcccaccaccatgagctggagtggggatgacaagacttgtgttcctcaactttcttgggtttctttcaggatttttcttctcacagctccaagcacgtgtcccgtgcctccccactcctcttaccacccctctctctgacactttttgtgttgggtcctcagccaacactcaaggggaaacctgtagtgacagtgtgccctggtcatccttaaaataacctgcatctcccctgtcctggtgtgggagtaagctgacagtttctctgcaggtcctgtcaactttagcatgctatgtctttaccatttttgctctcttgcagttttttgctttgtcttatgcttctatggataatgctatataatcattatctttttatctttctgttattattgttttaaaggagagcatcctaagttaataggaaccaaaaaataatgatgggcagaagggggggaatagccacaggggacaaaccttaaggcattataagtgaccttatttctgcttttctgagctaagaatggtgctgatggtaaagtttgagacttttgccacacacaaatttgtgaaaattaaacgagatgtggaaggagaacctcagtgattttattccctagtgaggcctctgagggcctccacactgcctggcagaacataccactgaactagtatgtgctagaggagggcacaaacatccgctccttccctaggcctgctggctctggttttctatgcagatgattcattggattgggggtgagtgttttgtttttctgggggcagtgtgagctttgagggttggaatattgggaggcattccttagtttcctcaactagcctggaaagttaggagtctagggtaattaccccccaatgagtctagcctactattcactgctttgtgtgcatttttttctccctctttaaaaaaccctttaaaagaaaaaaaaaagtagatagtgctaaatattttagctcatgaaacttggttaggatggctgggggtacaagtccccaaactacctcttgttacagtagccagggagtggaatttcgtcaaccggtacttttaaggttaggatgggacgggaaaagtgaagcaggatattagctccttataccttctcccttccatttctgagatctcacattccatctatcacagggttttcaaagagatgctgagggtaacaaggaactcacttggcagtcagagcatcatgctttgaggtttggggtgctcaggctgggagggtagaatgccattccagaggacaagccacaaaaatgccttaatttgagctcgtatttacccctgctgataagtgacttgagagttcccggttttttcctcttgtccttccctcccttctgtccttccatgtgtggggaaagggtgttttggtagagcttggtttccaaagcgcctggctttctcacttcacattctcaagtggcagtttcattatttagaatgcaaggtggacatcttttggatatctttttctatatattttctaaagctttacatatgagagggtatagggaggtgtttataaaacacttgagaacttttttccttaatatcagaaagcaaaaaaataaaaccacaattgagatttgcctttcaaaccctcaggtttgcctctaaccaggtgtccctggtcaccatcagagtactggaatacgggaaccgaggagaccttggtccttttgtttttgttctggactcttgggagtggaaatgagaatgagtttattcctactggagcttagttccaatgcatttggctccagaaagaccccagtgccttttgacaatggccagggttttacctacttcctgccagtctttcccaaaggaaactcattccaaatacttcttttttcccctggagtccgagaaggaaaatggaattctggttcatactgtggtcccttgtaacctcaggtctttaatgtgatcactttcaaatttaaaagatccaggtggaaatatttttactatagtaataattctacaaaatacctgaattcttaacactgttatatttcagtataagtggtggctttttcttttcatgtctttgatctggttttattcctgtaattcagccacctgattttgtgaggggggggaataatatgtggtttttgtacaaacatgtttctcagtgtgttgttattttggaaaaaatgaggggagggagtttggcaagaatggagaaaatgaatgaagaaggcctaatctctctctttttcagtgaataaatggaacaccatttctgga

SEQ ID NO: 132562 - DNA, 5813 bp, Homo sapiens
gctgggcggggccgggaagcggcagtggcggctacgcgcgcgggggtgcgcgcgggaacgaccgggaaacaccgcgagggccggggtgggccaggctgtggggacgacgggctgcgacgatggccgcagcggcgggcggcggcgggccggggacagcggtaggcgccacgggctcggggattgcggcggcagccgcaggcctagctgtttatcgacggaaggatgggggcccggccaccaagttttgggagagcccggagacggtgtcccagctggattcggtgcgggtctggctgggcaagcactacaagaagtatgttcatgcggatgctcctaccaataaaacactggctgggctggtggtgcagcttcttcagttccaggaagatgcctttgggaagcatgtcaccaacccggccttcaccaaactccctgcaaagtgtttcatggatttcaaagctggaggcgccttatgtcacattcttggggctgcttacaagtataaaaatgaacagggatggcggaggtttgacctacagaacccatctcgaatggatcgtaatgtggaaatgtttatgaacattgaaaaaacattggtgcagaacaattgtttgaccagacccaacatctacctcattccagacattgatctgaagttggctaacaaattgaaagatatcatcaaacgacatcagggaacatttacggatgagaagtcaaaagcttcccaccacatttacccatattcttcctcacaagacgatgaagaatggttgagaccggtgatgagaaaagagaagcaagtgttagtgcattggggcttttacccagacagctatgatacttgggtccatagtaatgatgttgatgctgaaattgaagatccaccaattccagaaaaaccatggaaggttcatgtgaaatggattttggacactgatattttcaatgaatggatgaatgaggaggattatgaggtggatgaaaataggaagcctgtgagttttcgtcagcggatttcaaccaagaatgaagagccagtcagaagtccagaaagaagagatagaaaagcatcagctaatgctcgaaagaggaaacattcgccttcgcctccccctccgacaccaacagaatcacggaagaagagtgggaagaaaggccaagctagcctttatgggaagcgcagaagtcagaaagaggaagatgagcaagaagatctaaccaaggatatggaagacccaacacctgtacccaatatagaagaagtagtacttcccaaaaatgtgaacctaaagaaagatagtgaaaatacacctgttaaaggaggaactgtagcggatctagatgagcaggatgaagaaacagtcacagcaggaggaaaggaagatgaagatcctgccaaaggtgatcagagtcgatcagttgaccttggggaagataatgtgacagagcagaccaatcacattattattcctagttatgcatcatggtttgattataactgtattcatgtgattgaacggcgtgctcttcctgagttcttcaatggaaaaaacaaatccaagactccagaaatatacttggcatatcgaaattttatgattgacacgtatcgtctaaacccccaagagtatttaactagcactgcttgtcggaggaacttgactggagatgtgtgtgctgtgatgagggtccatgcctttttagagcagtggggactcgttaattaccaagttgacccggaaagtagacccatggcaatgggacctcctcctactcctcattttaatgtattagctgataccccctctgggcttgtgcctctgcatcttcgatcacctcaggttcctgctgctcaacagatgctaaattttcctgagaaaaacaaggaaaaaccagttgatttgcagaactttggtctccgtactgacatttactccaagaaaacattagcaaagagtaaaggtgctagtgctggaagagaatggactgaacaggagacccttctactcctggaggccctggagatgtacaaggatgattggaacaaagtgtcggaacatgttggaagtcgtactcaggatgaatgcatcctccactttttgagacttcccattgaggacccataccttgagaattcagatgcttcccttgggcctttggcctaccagcctgtccccttcagtcagtcaggaaatccagttatgagtactgttgcttttttggcatctgtggtggaccctcgcgtggcatctgctgcagcaaaagcggctttggaggagttttctcgggtccgggaggaggtaccactggaattggttgaagctcatgtcaagaaagtacaagaagcagcacgagcctctgggaaagtggatcccacctacggtctggagagcagctgcattgcaggcacagggcccgatgagccagagaagcttgaaggagctgaagaggaaaaaatggaagccgaccctgatggtcagcagcctgaaaaggcagaaaataaagtggaaaatgaaacggatgaaggtgataaagcacaagatggagaaaatgaaaaaaatagtgaaaaggaacaggatagtgaagtgagtgaggataccaaatcagaagaaaaggagactgaagagaacaaagaactcactgatacatgtaaagaaagagaaagtgatactgggaagaagaaagtagaacatgaaatttccgaaggaaatgttgccacagccgcagcagctgctcttgcctcagcggctaccaaagccaagcacctggctgcagtggaagaaagaaagatcaagtccctggtagctctcttggttgagacacaaatgaagaaactagagatcaaacttcgacattttgaagagctggaaactatcatggacagagagaaagaagctctagaacaacagaggcagcagttgcttactgaacgccaaaacttccacatggaacagctgaagtatgctgaattacgagcacgacagcaaatggaacagcagcagcatggccagaaccctcaacaggcacaccagcactcaggaggacctggcctggccccacttggagcagcagggcaccctggcatgatgcctcatcaacagccccctccctaccctctgatgcaccaccagatgccaccacctcatccaccccagccaggtcagataccaggcccaggttccatgatgcccgggcagcacatgccaggccgcatgattcccactgttgcagccaacatccacccctctgggagtggccctacccctcctggcatgccaccaatgccaggaaacatcttaggaccccgggtacccctgacagcacctaacggcatgtatccccctccaccacagcagcagccaccgccaccaccacctgcagatggggtccctccgcctcctgctcctggcccgccagcctcagctgctccttagcctggaagatgcagggaacctccacgcccaccaccatgagctggagtggggatgacaagacttgtgttcctcaactttcttgggtttctttcaggatttttcttctcacagctccaagcacgtgtcccgtgcctccccactcctcttaccacccctctctctgacactttttgtgttgggtcctcagccaacactcaaggggaaacctgtagtgacagtgtgccctggtcatccttaaaataacctgcatctcccctgtcctggtgtgggagtaagctgacagtttctctgcaggtcctgtcaactttagcatgctatgtctttaccatttttgctctcttgcagttttttgctttgtcttatgcttctatggataatgctatataatcattatctttttatctttctgttattattgttttaaaggagagcatcctaagttaataggaaccaaaaaataatgatgggcagaagggggggaatagccacaggggacaaaccttaaggcattataagtgaccttatttctgcttttctgagctaagaatggtgctgatggtaaagtttgagacttttgccacacacaaatttgtgaaaattaaacgagatgtggaaggagaacctcagtgattttattccctagtgaggcctctgagggcctccacactgcctggcagaacataccactgaactagtatgtgctagaggagggcacaaacatccgctccttccctaggcctgctggctctggttttctatgcagatgattcattggattgggggtgagtgttttgtttttctgggggcagtgtgagctttgagggttggaatattgggaggcattccttagtttcctcaactagcctggaaagttaggagtctagggtaattaccccccaatgagtctagcctactattcactgctttgtgtgcatttttttctccctctttaaaaaaccctttaaaagaaaaaaaaaagtagatagtgctaaatattttagctcatgaaacttggttaggatggctgggggtacaagtccccaaactacctcttgttacagtagccagggagtggaatttcgtcaaccggtacttttaaggttaggatgggacgggaaaagtgaagcaggatattagctccttataccttctcccttccatttctgagatctcacattccatctatcacagggttttcaaagagatgctgagggtaacaaggaactcacttggcagtcagagcatcatgctttgaggtttggggtgctcaggctgggagggtagaatgccattccagaggacaagccacaaaaatgccttaatttgagctcgtatttacccctgctgataagtgacttgagagttcccggttttttcctcttgtccttccctcccttctgtccttccatgtgtggggaaagggtgttttggtagagcttggtttccaaagcgcctggctttctcacttcacattctcaagtggcagtttcattatttagaatgcaaggtggacatcttttggatatctttttctatatattttctaaagctttacatatgagagggtatagggaggtgtttataaaacacttgagaacttttttccttaatatcagaaagcaaaaaaataaaaccacaattgagatttgcctttcaaaccctcaggtttgcctctaaccaggtgtccctggtcaccatcagagtactggaatacgggaaccgaggagaccttggtccttttgtttttgttctggactcttgggagtggaaatgagaatgagtttattcctactggagcttagttccaatgcatttggctccagaaagaccccagtgccttttgacaatggccagggttttacctacttcctgccagtctttcccaaaggaaactcattccaaatacttcttttttcccctggagtccgagaaggaaaatggaattctggttcatactgtggtcccttgtaacctcaggtctttaatgtgatcactttcaaatttaaaagatccaggtggaaatatttttactatagtaataattctacaaaatacctgaattcttaacactgttatatttcagtataagtggtggctttttcttttcatgtctttgatctggttttattcctgtaattcagccacctgattttgtgaggggggggaataatatgtggtttttgtacaaacatgtttctcagtgtgttgttattttggaaaaaatgaggggagggagtttggcaagaatggagaaaatgaatgaagaaggcctaatctctctctttttcagtgaataaatggaacaccatttctggattctagtcccattctctgcattcatacaccagtttcttcatatatcctatgaagaaccta

SEQ ID NO: 132563 - DNA, 5542 bp, Homo sapiens
  misc_feature (5426)..(5426): n is a, c, g, or t
  misc_feature (5434)..(5434): n is a, c, g, or t
gctgggcggggccgggaagcggcagtggcggctacgcgcgcgggggtgcgcgcgggaacgaccgggaaacaccgcgagggccggggtgggccaggctgtggggacgacgggctgcgacgatggccgcagcggcgggcggcggcgggccggggacagcggtaggcgccacgggctcggggattgcggcggcagccgcaggcctagctgtttatcgacggaaggatgggggcccggccaccaagttttgggagagcccggagacggtgtcccagctggattcggtgcgggtctggctgggcaagcactacaagaagtatgttcatgcggatgctcctaccaataaaacactggctgggctggtggtgcagcttcttcagttccaggaagatgcctttgggaagcatgtcaccaacccggccttcaccaaactccctgcaaagtgtttcatggatttcaaagctggaggcgccttatgtcacattcttggggctgcttacaagtataaaaatgaacagggatggcggaggtttgacctacagaacccatctcgaatggatcgtaatgtggaaatgtttatgaacattgaaaaaacattggtgcagaacaattgtttgaccagacccaacatctacctcattccagacattgatctgaagttggctaacaaattgaaagatatcatcaaacgacatcagggaacatttacggatgagaagtcaaaagcttcccaccacatttacccatattcttcctcacaagacgatgaagaatggttgagaccggtgatgagaaaagagaagcaagtgttagtgcattggggcttttacccagacagctatgatacttgggtccatagtaatgatgttgatgctgaaattgaagatccaccaattccagaaaaaccatggaaggttcatgtgaaatggattttggacactgatattttcaatgaatggatgaatgaggaggattatgaggtggatgaaaataggaagcctgtgagttttcgtcagcggatttcaaccaagaatgaagagccagtcagaagtccagaaagaagagatagaaaagcatcagctaatgctcgaaagaggaaacattcgccttcgcctccccctccgacaccaacagaatcacggaagaagagtgggaagaaaggccaagctagcctttatgggaagcgcagaagtcagaaagaggaagatgagcaagaagatctaaccaaggatatggaagacccaacacctgtacccaatatagaagaagtagtacttcccaaaaatgtgaacctaaagaaagatagtgaaaatacacctgttaaaggaggaactgtagcggatctagatgagcaggatgaagaaacagtcacagcaggaggaaaggaagatgaagatcctgccaaaggtgatcagagtcgatcagttgaccttggggaagataatgtgacagagcagaccaatcacattattattcctagttatgcatcatggtttgattataactgtattcatgtgattgaacggcgtgctcttcctgagttcttcaatggaaaaaacaaatccaagactccagaaatatacttggcatatcgaaattttatgattgacacgtatcgtctaaacccccaagagtatttaactagcactgcttgtcggaggaacttgactggagatgtgtgtgctgtgatgagggtccatgcctttttagagcagtggggactcgttaattaccaagttgacccggaaagtagacccatggcaatgggacctcctcctactcctcattttaatgtattagctgataccccctctgggcttgtgcctctgcatcttcgatcacctcaggttcctgctgctcaacagatgctaaattttcctgagaaaaacaaggaaaaaccagttgatttgcagaactttggtctccgtactgacatttactccaagaaaacattagcaaagagtaaaggtgctagtgctggaagagaatggactgaacaggagacccttctactcctggaggccctggagatgtacaaggatgattggaacaaagtgtcggaacatgttggaagtcgtactcaggatgaatgcatcctccactttttgagacttcccattgaggacccataccttgagaattcagatgcttcccttgggcctttggcctaccagcctgtccccttcagtcagtcaggaaatccagttatgagtactgttgcttttttggcatctgtggtggaccctcgcgtggcatctgctgcagcaaaagcggctttggaggagttttctcgggtccgggaggaggtaccactggaattggttgaagctcatgtcaagaaagtacaagaagcagcacgagcctctgggaaagtggatcccacctacggtctggagagcagctgcattgcaggcacagggcccgatgagccagagaagcttgaaggagctgaagaggaaaaaatggaagccgaccctgatggtcagcagcctgaaaaggcagaaaataaagtggaaaatgaaacggatgaaggtgataaagcacaagatggagaaaatgaaaaaaatagtgaaaaggaacaggatagtgaagtgagtgaggataccaaatcagaagaaaaggagactgaagagaacaaagaactcactgatacatgtaaagaaagagaaagtgatactgggaagaagaaagtagaacatgaaatttccgaaggaaatgttgccacagccgcagcagctgctcttgcctcagcggctaccaaagccaagcacctggctgcagtggaagaaagaaagatcaagtccctggtagctctcttggttgagacacaaatgaagaaactagagatcaaacttcgacattttgaagagctggaaactatcatggacagagagaaagaagctctagaacaacagaggcagcagttgcttactgaacgccaaaacttccacatggaacagctgaagtatgctgaattacgagcacgacagcaaatggaacagcagcagcatggccagaaccctcaacaggcacaccagcactcaggaggacctggcctggccccacttggagcagcagggcaccctggcatgatgcctcatcaacagccccctccctaccctctgatgcaccaccagatgccaccacctcatccaccccagccaggtcagataccaggcccaggttccatgatgcccgggcagcacatgccaggccgcatgattcccactgttgcagccaacatccacccctctgggagtggccctacccctcctggcatgccaccaatgccaggaaacatcttaggaccccgggtacccctgacagcacctaacggcatgtatccccctccaccacagcagcagccaccgccaccaccacctgcagatggggtccctccgcctcctgctcctggcccgccagcctcagctgctccttagcctggaagatgcagggaacctccacgcccaccaccatgagctggagtggggatgacaagacttgtgttcctcaactttcttgggtttctttcaggatttttcttctcacagctccaagcacgtgtcccgtgcctccccactcctcttaccacccctctctctgacactttttgtgttgggtcctcagccaacactcaaggggaaacctgtagtgacagtgtgccctggtcatccttaaaataacctgcatctcccctgtcctggtgtgggagtaagctgacagtttctctgcaggtcctgtcaactttagcatgctatgtctttaccatttttgctctcttgcagttttttgctttgtcttatgcttctatggataatgctatataatcattatctttttatctttctgttattattgttttaaaggagagcatcctaagttaataggaaccaaaaaataatgatgggcagaagggggggaatagccacaggggacaaaccttaaggcattataagtgaccttatttctgcttttctgagctaagaatggtgctgatggtaaagtttgagacttttgccacacacaaatttgtgaaaattaaacgagatgtggaaggagaacctcagtgattttattccctagtgaggcctctgagggcctccacactgcctggcagaacataccactgaactagtatgtgctagaggagggcacaaacatccgctccttccctaggcctgctggctctggttttctatgcagatgattcattggattgggggtgagtgttttgtttttctgggggcagtgtgagctttgagggttggaatattgggaggcattccttagtttcctcaactagcctggaaagttaggagtctagggtaattaccccccaatgagtctagcctactattcactgctttgtgtgcatttttttctccctctttaaaaaaccctttaaaagaaaaaaaaaagtagatagtgctaaatattttagctcatgaaacttggttaggatggctgggggtacaagtccccaaactacctcttgttacagtagccagggagtggaatttcgtcaaccggtacttttaaggttaggatgggacgggaaaagtgaagcaggatattagctccttataccttctcccttccatttctgagatctcacattccatctatcacagggttttcaaagagatgctgagggtaacaaggaactcacttggcagtcagagcatcatgctttgaggtttggggtgctcaggctgggagggtagaatgccattccagaggacaagccacaaaaatgccttaatttgagctcgtatttacccctgctgataagtgacttgagagttcccggttttttcctcttgtccttccctcccttctgtccttccatgtgtggggaaagggtgttttggtagagcttggtttccaaagcgcctggctttctcacttcacattctcaagtggcagtttcattatttagaatgcaaggtggacatcttttggatatctttttctatatattttctaaagctttacatatgagagggtatagggaggtgtttataaaacacttgagaacttttttccttaatatcagaaagcaaaaaaataaaaccacaattgagatttgcctttcaaaccctcaggtttgcctctaaccaggtgtccctggtcaccatcagagtactggaatacgggaaccgaggagaccttggtccttttgtttttgttctggactcttgggagtggaaatgagaatgagtttattcctactggagcttagttccaatgcatttggctccagaaagaccccagtgccttttgacaatggccagggttttacctacttcctgccagtctttcccaaaggaaactcattccaaatacttcttttttcccctggagtccgagaaggaaaatggaattctggttcatactgtggtcccttgtaacctcaggtgtaactcggnttaggganccttcaattaaggaccgtggaattttctagtatactccaaacggatttacgtatagacaggggctagctgggggcgataccctggggggggttggtaaaaaaaagggg

SEQ ID NO: 132564 - DNA, 5612 bp, Homo sapiens
gctgggcggggccgggaagcggcagtggcggctacgcgcgcgggggtgcgcgcgggaacgaccgggaaacaccgcgagggccggggtgggccaggctgtggggacgacgggctgcgacgatggccgcagcggcgggcggcggcgggccggggacagcggtaggcgccacgggctcggggattgcggcggcagccgcaggcctagctgtttatcgacggaaggatgggggcccggccaccaagttttgggagagcccggagacggtgtcccagctggattcggtgcgggtctggctgggcaagcactacaagaagtatgttcatgcggatgctcctaccaataaaacactggctgggctggtggtgcagcttcttcagttccaggaagatgcctttgggaagcatgtcaccaacccggccttcaccaaactccctgcaaagtgtttcatggatttcaaagctggaggcgccttatgtcacattcttggggctgcttacaagtataaaaatgaacagggatggcggaggtttgacctacagaacccatctcgaatggatcgtaatgtggaaatgtttatgaacattgaaaaaacattggtgcagaacaattgtttgaccagacccaacatctacctcattccagacattgatctgaagttggctaacaaattgaaagatatcatcaaacgacatcagggaacatttacggatgagaagtcaaaagcttcccaccacatttacccatattcttcctcacaagacgatgaagaatggttgagaccggtgatgagaaaagagaagcaagtgttagtgcattggggcttttacccagacagctatgatacttgggtccatagtaatgatgttgatgctgaaattgaagatccaccaattccagaaaaaccatggaaggttcatgtgaaatggattttggacactgatattttcaatgaatggatgaatgaggaggattatgaggtggatgaaaataggaagcctgtgagttttcgtcagcggatttcaaccaagaatgaagagccagtcagaagtccagaaagaagagatagaaaagcatcagctaatgctcgaaagaggaaacattcgccttcgcctccccctccgacaccaacagaatcacggaagaagagtgggaagaaaggccaagctagcctttatgggaagcgcagaagtcagaaagaggaagatgagcaagaagatctaaccaaggatatggaagacccaacacctgtacccaatatagaagaagtagtacttcccaaaaatgtgaacctaaagaaagatagtgaaaatacacctgttaaaggaggaactgtagcggatctagatgagcaggatgaagaaacagtcacagcaggaggaaaggaagatgaagatcctgccaaaggtgatcagagtcgatcagttgaccttggggaagataatgtgacagagcagaccaatcacattattattcctagttatgcatcatggtttgattataactgtattcatgtgattgaacggcgtgctcttcctgagttcttcaatggaaaaaacaaatccaagactccagaaatatacttggcatatcgaaattttatgattgacacgtatcgtctaaacccccaagagtatttaactagcactgcttgtcggaggaacttgactggagatgtgtgtgctgtgatgagggtccatgcctttttagagcagtggggactcgttaattaccaagttgacccggaaagtagacccatggcaatgggacctcctcctactcctcattttaatgtattagctgataccccctctgggcttgtgcctctgcatcttcgatcacctcaggttcctgctgctcaacagatgctaaattttcctgagaaaaacaaggaaaaaccagttgatttgcagaactttggtctccgtactgacatttactccaagaaaacattagcaaagagtaaaggtgctagtgctggaagagaatggactgaacaggagacccttctactcctggaggccctggagatgtacaaggatgattggaacaaagtgtcggaacatgttggaagtcgtactcaggatgaatgcatcctccactttttgagacttcccattgaggacccataccttgagaattcagatgcttcccttgggcctttggcctaccagcctgtccccttcagtcagtcaggaaatccagttatgagtactgttgcttttttggcatctgtggtggaccctcgcgtggcatctgctgcagcaaaagcggctttggaggagttttctcgggtccgggaggaggtaccactggaattggttgaagctcatgtcaagaaagtacaagaagcagcacgagcctctgggaaagtggatcccacctacggtctggagagcagctgcattgcaggcacagggcccgatgagccagagaagcttgaaggagctgaagaggaaaaaatggaagccgaccctgatggtcagcagcctgaaaaggcagaaaataaagtggaaaatgaaacggatgaaggtgataaagcacaagatggagaaaatgaaaaaaatagtgaaaaggaacaggatagtgaagtgagtgaggataccaaatcagaagaaaaggagactgaagagaacaaagaactcactgatacatgtaaagaaagagaaagtgatactgggaagaagaaagtagaacatgaaatttccgaaggaaatgttgccacagccgcagcagctgctcttgcctcagcggctaccaaagccaagcacctggctgcagtggaagaaagaaagatcaagtccctggtagctctcttggttgagacacaaatgaagaaactagagatcaaacttcgacattttgaagagctggaaactatcatggacagagagaaagaagctctagaacaacagaggcagcagttgcttactgaacgccaaaacttccacatggaacagctgaagtatgctgaattacgagcacgacagcaaatggaacagcagcagcatggccagaaccctcaacaggcacaccagcactcaggaggacctggcctggccccacttggagcagcagggcaccctggcatgatgcctcatcaacagccccctccctaccctctgatgcaccaccagatgccaccacctcatccaccccagccaggtcagataccaggcccaggttccatgatgcccgggcagcacatgccaggccgcatgattcccactgttgcagccaacatccacccctctgggagtggccctacccctcctggcatgccaccaatgccaggaaacatcttaggaccccgggtacccctgacagcacctaacggcatgtatccccctccaccacagcagcagccaccgccaccaccacctgcagatggggtccctccgcctcctgctcctggcccgccagcctcagctgctccttagcctggaagatgcagggaacctccacgcccaccaccatgagctggagtggggatgacaagacttgtgttcctcaactttcttgggtttctttcaggatttttcttctcacagctccaagcacgtgtcccgtgcctccccactcctcttaccacccctctctctgacactttttgtgttgggtcctcagccaacactcaaggggaaacctgtagtgacagtgtgccctggtcatccttaaaataacctgcatctcccctgtcctggtgtgggagtaagctgacagtttctctgcaggtcctgtcaactttagcatgctatgtctttaccatttttgctctcttgcagttttttgctttgtcttatgcttctatggataatgctatataatcattatctttttatctttctgttattattgttttaaaggagagcatcctaagttaataggaaccaaaaaataatgatgggcagaagggggggaatagccacaggggacaaaccttaaggcattataagtgaccttatttctgcttttctgagctaagaatggtgctgatggtaaagtttgagacttttgccacacacaaatttgtgaaaattaaacgagatgtggaaggagaacctcagtgattttattccctagtgaggcctctgagggcctccacactgcctggcagaacataccactgaactagtatgtgctagaggagggcacaaacatccgctccttccctaggcctgctggctctggttttctatgcagatgattcattggattgggggtgagtgttttgtttttctgggggcagtgtgagctttgagggttggaatattgggaggcattccttagtttcctcaactagcctggaaagttaggagtctagggtaattaccccccaatgagtctagcctactattcactgctttgtgtgcatttttttctccctctttaaaaaaccctttaaaagaaaaaaaaaagtagatagtgctaaatattttagctcatgaaacttggttaggatggctgggggtacaagtccccaaactacctcttgttacagtagccagggagtggaatttcgtcaaccggtacttttaaggttaggatgggacgggaaaagtgaagcaggatattagctccttataccttctcccttccatttctgagatctcacattccatctatcacagggttttcaaagagatgctgagggtaacaaggaactcacttggcagtcagagcatcatgctttgaggtttggggtgctcaggctgggagggtagaatgccattccagaggacaagccacaaaaatgccttaatttgagctcgtatttacccctgctgataagtgacttgagagttcccggttttttcctcttgtccttccctcccttctgtccttccatgtgtggggaaagggtgttttggtagagcttggtttccaaagcgcctggctttctcacttcacattctcaagtggcagtttcattatttagaatgcaaggtggacatcttttggatatctttttctatatattttctaaagctttacatatgagagggtatagggaggtgtttataaaacacttgagaacttttttccttaatatcagaaagcaaaaaaataaaaccacaattgagatttgcctttcaaaccctcaggtttgcctctaaccaggtgtccctggtcaccatcagagtactggaatacgggaaccgaggagaccttggtccttttgtttttgttctggactcttgggagtggaaatgagaatgagtttattcctactggagcttagttccaatgcatttggctccagaaagaccccagtgctctttaatgtgatcactttcaaatttaaaagatccaggtggaaatatttttactatagtaataattctacaaaatacctgaattcttaacactgttatatttcagtataagtggtggctttttcttttcatgtctttgatctggttttattcctgtaattcagccacctgattttgtgaggggggggaataatatgtggtttttgtacaaacatgtttctcagtgtgttgttattttggaaaaaatgaggggagggagtttggcaagaatggagaaaatgaatgaagaaggcctaatctctctctttttcagtgaataaatggaacaccatttctgga

SEQ ID NO: 132565 - DNA, 5700 bp, Homo sapiens
gctgggcggggccgggaagcggcagtggcggctacgcgcgcgggggtgcgcgcgggaacgaccgggaaacaccgcgagggccggggtgggccaggctgtggggacgacgggctgcgacgatggccgcagcggcgggcggcggcgggccggggacagcggtaggcgccacgggctcggggattgcggcggcagccgcaggcctagctgtttatcgacggaaggatgggggcccggccaccaagttttgggagagcccggagacggtgtcccagctggattcggtgcgggtctggctgggcaagcactacaagaagtatgttcatgcggatgctcctaccaataaaacactggctgggctggtggtgcagcttcttcagttccaggaagatgcctttgggaagcatgtcaccaacccggccttcaccaaactccctgcaaagtgtttcatggatttcaaagctggaggcgccttatgtcacattcttggggctgcttacaagtataaaaatgaacagggatggcggaggtttgacctacagaacccatctcgaatggatcgtaatgtggaaatgtttatgaacattgaaaaaacattggtgcagaacaattgtttgaccagacccaacatctacctcattccagacattgatctgaagttggctaacaaattgaaagatatcatcaaacgacatcagggaacatttacggatgagaagtcaaaagcttcccaccacatttacccatattcttcctcacaagacgatgaagaatggttgagaccggtgatgagaaaagagaagcaagtgttagtgcattggggcttttacccagacagctatgatacttgggtccatagtaatgatgttgatgctgaaattgaagatccaccaattccagaaaaaccatggaaggttcatgtgaaatggattttggacactgatattttcaatgaatggatgaatgaggaggattatgaggtggatgaaaataggaagcctgtgagttttcgtcagcggatttcaaccaagaatgaagagccagtcagaagtccagaaagaagagatagaaaagcatcagctaatgctcgaaagaggaaacattcgccttcgcctccccctccgacaccaacagaatcacggaagaagagtgggaagaaaggccaagctagcctttatgggaagcgcagaagtcagaaagaggaagatgagcaagaagatctaaccaaggatatggaagacccaacacctgtacccaatatagaagaagtagtacttcccaaaaatgtgaacctaaagaaagatagtgaaaatacacctgttaaaggaggaactgtagcggatctagatgagcaggatgaagaaacagtcacagcaggaggaaaggaagatgaagatcctgccaaaggtgatcagagtcgatcagttgaccttggggaagataatgtgacagagcagaccaatcacattattattcctagttatgcatcatggtttgattataactgtattcatgtgattgaacggcgtgctcttcctgagttcttcaatggaaaaaacaaatccaagactccagaaatatacttggcatatcgaaattttatgattgacacgtatcgtctaaacccccaagagtatttaactagcactgcttgtcggaggaacttgactggagatgtgtgtgctgtgatgagggtccatgcctttttagagcagtggggactcgttaattaccaagttgacccggaaagtagacccatggcaatgggacctcctcctactcctcattttaatgtattagctgataccccctctgggcttgtgcctctgcatcttcgatcacctcaggttcctgctgctcaacagatgctaaattttcctgagaaaaacaaggaaaaaccagttgatttgcagaactttggtctccgtactgacatttactccaagaaaacattagcaaagagtaaaggtgctagtgctggaagagaatggactgaacaggagacccttctactcctggaggccctggagatgtacaaggatgattggaacaaagtgtcggaacatgttggaagtcgtactcaggatgaatgcatcctccactttttgagacttcccattgaggacccataccttgagaattcagatgcttcccttgggcctttggcctaccagcctgtccccttcagtcagtcaggaaatccagttatgagtactgttgcttttttggcatctgtggtggaccctcgcgtggcatctgctgcagcaaaagcggctttggaggagttttctcgggtccgggaggaggtaccactggaattggttgaagctcatgtcaagaaagtacaagaagcagcacgagcctctgggaaagtggatcccacctacggtctggagagcagctgcattgcaggcacagggcccgatgagccagagaagcttgaaggagctgaagaggaaaaaatggaagccgaccctgatggtcagcagcctgaaaaggcagaaaataaagtggaaaatgaaacggatgaaggtgataaagcacaagatggagaaaatgaaaaaaatagtgaaaaggaacaggatagtgaagtgagtgaggataccaaatcagaagaaaaggagactgaagagaacaaagaactcactgatacatgtaaagaaagagaaagtgatactgggaagaagaaagtagaacatgaaatttccgaaggaaatgttgccacagccgcagcagctgctcttgcctcagcggctaccaaagccaagcacctggctgcagtggaagaaagaaagatcaagtccctggtagctctcttggttgagacacaaatgaagaaactagagatcaaacttcgacattttgaagagctggaaactatcatggacagagagaaagaagctctagaacaacagaggcagcagttgcttactgaacgccaaaacttccacatggaacagctgaagtatgctgaattacgagcacgacagcaaatggaacagcagcagcatggccagaaccctcaacaggcacaccagcactcaggaggacctggcctggccccacttggagcagcagggcaccctggcatgatgcctcatcaacagccccctccctaccctctgatgcaccaccagatgccaccacctcatccaccccagccaggtcagataccaggcccaggttccatgatgcccgggcagcacatgccaggccgcatgattcccactgttgcagccaacatccacccctctgggagtggccctacccctcctggcatgccaccaatgccaggaaacatcttaggaccccgggtacccctgacagcacctaacggcatgtatccccctccaccacagcagcagccaccgccaccaccacctgcagatggggtccctccgcctcctgctcctggcccgccagcctcagctgctccttagcctggaagatgcagggaacctccacgcccaccaccatgagctggagtggggatgacaagacttgtgttcctcaactttcttgggtttctttcaggatttttcttctcacagctccaagcacgtgtcccgtgcctccccactcctcttaccacccctctctctgacactttttgtgttgggtcctcagccaacactcaaggggaaacctgtagtgacagtgtgccctggtcatccttaaaataacctgcatctcccctgtcctggtgtgggagtaagctgacagtttctctgcaggtcctgtcaactttagcatgctatgtctttaccatttttgctctcttgcagttttttgctttgtcttatgcttctatggataatgctatataatcattatctttttatctttctgttattattgttttaaaggagagcatcctaagttaataggaaccaaaaaataatgatgggcagaagggggggaatagccacaggggacaaaccttaaggcattataagtgaccttatttctgcttttctgagctaagaatggtgctgatggtaaagtttgagacttttgccacacacaaatttgtgaaaattaaacgagatgtggaaggagaacctcagtgattttattccctagtgaggcctctgagggcctccacactgcctggcagaacataccactgaactagtatgtgctagaggagggcacaaacatccgctccttccctaggcctgctggctctggttttctatgcagatgattcattggattgggggtgagtgttttgtttttctgggggcagtgtgagctttgagggttggaatattgggaggcattccttagtttcctcaactagcctggaaagttaggagtctagggtaattaccccccaatgagtctagcctactattcactgctttgtgtgcatttttttctccctctttaaaaaaccctttaaaagaaaaaaaaaagtagatagtgctaaatattttagctcatgaaacttggttaggatggctgggggtacaagtccccaaactacctcttgttacagtagccagggagtggaatttcgtcaaccggtacttttaaggttaggatgggacgggaaaagtgaagcaggatattagctccttataccttctcccttccatttctgagatctcacattccatctatcacagggttttcaaagagatgctgagggtaacaaggaactcacttggcagtcagagcatcatgctttgaggtttggggtgctcaggctgggagggtagaatgccattccagaggacaagccacattcccggttttttcctcttgtccttccctcccttctgtccttccatgtgtggggaaagggtgttttggtagagcttggtttccaaagcgcctggctttctcacttcacattctcaagtggcagtttcattatttagaatgcaaggtggacatcttttggatatctttttctatatattttctaaagctttacatatgagagggtatagggaggtgtttataaaacacttgagaacttttttccttaatatcagaaagcaaaaaaataaaaccacaattgagatttgcctttcaaaccctcaggtttgcctctaaccaggtgtccctggtcaccatcagagtactggaatacgggaaccgaggagaccttggtccttttgtttttgttctggactcttgggagtggaaatgagaatgagtttattcctactggagcttagttccaatgcatttggctccagaaagaccccagtgccttttgacaatggccagggttttacctacttcctgccagtctttcccaaaggaaactcattccaaatacttcttttttcccctggagtccgagaaggaaaatggaattctggttcatactgtggtcccttgtaacctcaggtctttaatgtgatcactttcaaatttaaaagatccaggtggaaatatttttactatagtaataattctacaaaatacctgaattcttaacactgttatatttcagtataagtggtggctttttcttttcatgtctttgatctggttttattcctgtaattcagccacctgattttgtgaggggggggaataatatgtggtttttgtacaaacatgtttctcagtgtgttgttattttggaaaaaatgaggggagggagtttggcaagaatggagaaaatgaatgaagaaggcctaatctctctctttttcagtgaataaatggaacaccatttctgga

SEQ ID NO: 132566 - DNA, 3417 bp, Homo sapiens
gttatcggccgagggtacacagatgatgacaggcctcccagacgaattgccgatgaagacaggtgaaactggcgtcatgcggatgatgacagaccacctagacaaggagctgaagaggaaaaaatggaagccgaccctgatggtcagcagcctgaaaaggcagaaaataaagtggaaaatgaaacggatgaaggtgataaagcacaagatggagaaaatgaaaaaaatagtgaaaaggaacaggatagtgaagtgagtgaggataccaaatcagaagaaaaggagactgaagagaacaaagaactcactgatacatgtaaagaaagagaaagtgatactgggaagaagaaagtagaacatgaaatttccgaaggaaatgttgccacagccgcagcagctgctcttgcctcagcggctaccaaagccaagcacctggctgcagtggaagaaagaaagatcaagtccctggtagctctcttggttgagacacaaatgaagaaactagagatcaaacttcgacattttgaagagctggaaactatcatggacagagagaaagaagctctagaacaacagaggcagcagttgcttactgaacgccaaaacttccacatggaacagctgaagtatgctgaattacgagcacgacagcaaatggaacagcagcagcatggccagaaccctcaacaggcacaccagcactcaggaggacctggcctggccccacttggagcagcagggcaccctggcatgatgcctcatcaacagccccctccctaccctctgatgcaccaccagatgccaccacctcatccaccccagccaggtcagataccaggcccaggttccatgatgcccgggcagcacatgccaggccgcatgattcccactgttgcagccaacatccacccctctgggagtggccctacccctcctggcatgccaccaatgccaggaaacatcttaggaccccgggtacccctgacagcacctaacggcatgtatccccctccaccacagcagcagccaccgccaccaccacctgcagatggggtccctccgcctcctgctcctggcccgccagcctcagctgctccttagcctggaagatgcagggaacctccacgcccaccaccatgagctggagtggggatgacaagacttgtgttcctcaactttcttgggtttctttcaggatttttcttctcacagctccaagcacgtgtcccgtgcctccccactcctcttaccacccctctctctgacactttttgtgttgggtcctcagccaacactcaaggggaaacctgtagtgacagtgtgccctggtcatccttaaaataacctgcatctcccctgtcctggtgtgggagtaagctgacagtttctctgcaggtcctgtcaactttagcatgctatgtctttaccatttttgctctcttgcagttttttgctttgtcttatgcttctatggataatgctatataatcattatctttttatctttctgttattattgttttaaaggagagcatcctaagttaataggaaccaaaaaataatgatgggcagaagggggggaatagccacaggggacaaaccttaaggcattataagtgaccttatttctgcttttctgagctaagaatggtgctgatggtaaagtttgagacttttgccacacacaaatttgtgaaaattaaacgagatgtggaaggagaacctcagtgattttattccctagtgaggcctctgagggcctccacactgcctggcagaacataccactgaactagtatgtgctagaggagggcacaaacatccgctccttccctaggcctgctggctctggttttctatgcagatgattcattggattgggggtgagtgttttgtttttctgggggcagtgtgagctttgagggttggaatattgggaggcattccttagtttcctcaactagcctggaaagttaggagtctagggtaattaccccccaatgagtctagcctactattcactgctttgtgtgcatttttttctccctctttaaaaaaccctttaaaagaaaaaaaaaagtagatagtgctaaatattttagctcatgaaacttggttaggatggctgggggtacaagtccccaaactacctcttgttacagtagccagggagtggaatttcgtcaaccggtacttttaaggttaggatgggacgggaaaagtgaagcaggatattagctccttataccttctcccttccatttctgagatctcacattccatctatcacagggttttcaaagagatgctgagggtaacaaggaactcacttggcagtcagagcatcatgctttgaggtttggggtgctcaggctgggagggtagaatgccattccagaggacaagccacaaaaatgccttaatttgagctcgtatttacccctgctgataagtgacttgagagttcccggttttttcctcttgtccttccctcccttctgtccttccatgtgtggggaaagggtgttttggtagagcttggtttccaaagcgcctggctttctcacttcacattctcaagtggcagtttcattatttagaatgcaaggtggacatcttttggatatctttttctatatattttctaaagctttacatatgagagggtatagggaggtgtttataaaacacttgagaacttttttccttaatatcagaaagcaaaaaaataaaaccacaattgagatttgcctttcaaaccctcaggtttgcctctaaccaggtgtccctggtcaccatcagagtactggaatacgggaaccgaggagaccttggtccttttgtttttgttctggactcttgggagtggaaatgagaatgagtttattcctactggagcttagttccaatgcatttggctccagaaagaccccagtgccttttgacaatggccagggttttacctacttcctgccagtctttcccaaaggaaactcattccaaatacttcttttttcccctggagtccgagaaggaaaatggaattctggttcatactgtggtcccttgtaacctcaggtctttaatgtgatcactttcaaatttaaaagatccaggtggaaatatttttactatagtaataattctacaaaatacctgaattcttaacactgttatatttcagtataagtggtggctttttcttttcatgtctttgatctggttttattcctgtaattcagccacctgattttgtgaggggggggaataatatgtggtttttgtacaaacatgtttctcagtgtgttgttattttggaaaaaatgaggggagggagtttggcaagaatggagaaaatgaatgaagaaggcctaatctctctctttttcagtgaataaatggaacaccatttctgga

SEQ ID NO: 132567 - DNA, 1619 bp, Homo sapiens
agcgggcgggcgcgcgcccaacggctttgcgaggctcactcggtctgagaggtcggaggctgcgagtgtcgctgctgaaggctgtggtggactgggctggatcgcggattttggattagataatagatttgggatcgcggattgggggttggatcgcggatttggggttggatcggggatttggggttggataggggatttggggctgggtcggcgggggcgtggggggaggtgaaaaggtaacagggagctgccccctctcaagagccggtagttgggagtctgagaagtcaccaccatgaagttgttcggcttcaggagccgcaggggccagacggtcctgggctccatagaccacctctacacgggttccgggtaccgaatccggtactcggaactgcagaagatccacaaggcagctgtcaagggcgacgctgcggagatggagcgctgtctggcgcgcaggagcggagaccttgacgccctggacaagcagcacaggctgtccattgccaggaagaggcttgtgccgttattctgctggaacatggtgccaatccaaaccttaaggatatctacggcaacactgctctccattatgctgtgtatagtgagagcacctcactggcagaaaaactgcttttccatggtgaaaatattgaagcactggacaagtgacccatttggagcaggagtgcctgacattgacatctgggatcctgacaccattgatagaagtgaatcaagcaagtttgtgccacccagaagaaacctccacctgcattgggaagctctggcaactgtacccctaaaactcttaattcctcaaatgttaatgtttgccacaaatagtattgtcaaatggggattaggtacaattcaagagatttcttgattattggacataacatacagttttataatacttctcaaatgcagatggtcatggagtccttctcttggggtataatacttctggtaaagcaaatattctttggaatatagtttaagaaacactgctttagtgagaataatttagatcattaatttatgtaaaaaacttaaaatgtttgctactatgtcttagggttttgggggtatagagacaaaagatacagaccttgcctcaagaagctcttggtttcagtgggacacagtgaaatgattacaatgtaccatgctaagtgctgtgatcaaagcaaggattcttgggactggtaaatgtctaaagtgagttttggcaatgaccacagttaatccggggagacagaggaggattgtttgcaaggcaaagagcagcacatcagaaagcacagagtgagaaggaagggactgcttttcttttacttcctttctatattgtatgttgaagttcaaagcaccttagagaagattttcagttcagttgagaaatatgtaattttctgaattactaattttttctgctgttttataggacagtaataccccacttttattcgctataatttgcaagaaagagaaaatggtggaatttttattgaaaaacaaagcaagtacacatgccgttgataggctgagatggtacagtagttctttttttttttaaataaaaactgtgtattctagagtggtaacag

SEQ ID NO: 132568 - DNA, 588 bp, Homo sapiens
agcgggcgggcgcgcgcccaacggctttgcgaggctcactcggtctgagaggtcggaggctgcgagtgtcgctgctgaaggctgtggtggactgggctggatcgcggattttggattagataatagatttgggatcgcggattgggggttggatcgcggatttggggttggatcggggatttggggttggataggggatttggggctgggtcggcgggggcgtggggggaggtgaaaaggtaacagggagctgccccctctcaagagccggtagttgggagtctgagaagtcaccaccatgaagttgttcggcttcaggagccgcaggggccagacggtcctgggctccatagaccacctctacacgggttccgggtaccgaatccggtactcggaactgcagaagatccacaaggcagctgtcaagggcgacgctgcggagatggagcgctgtctggcgcgcaggagcggagaccttgacgccctggacaagcagcacagaactgctctacatttggcctgtgccagtggccatgtgaaagtggtcactctcctggttaacagaaaatgccagattgatatctatga

SEQ ID NO: 132569 - DNA, 793 bp, Homo sapiens
aggtttttttgccaattttattggctattatattgtcacctttacaagctatgagtcttccagttttcccttcagcataggtattcaccacagtgaagtactcactaaactttcctgaagttactttgttacattaatatgcatatgcaaatgatctaaaatgtatggcactcttccatttattatttctgaagacagccttatgtgttaattgcatagccacccctcctataatctctaactcaccctgtttcatactgagctcatcatcttcctcaaacttcatccttcttttcccattttattgaatggcaatatttgttcaaggaaactggatcttccttgtttccctccctttttaaatttctaaatttaaattctgtttattcagccttgtcagaatctcacaaatattatcccttctgttcaatctagtgtgggctgggggttaggtgcctctttccatgtgttgtctcaacaactgatttatatctctatcatagcaatttatgtgccattattatgaatccttaattttatttaacttttttccctgttgctgatggcctcctcgagtcctggaacatttatttctcaattcacagcatttataacatttctttcatataatgcataactaaaccacaaatgaataaagttagtagtgcagagatgctgacaattaaagctatgcctgataattttgttttctgaaagtaaatgacaatgtccttaaattttcgacaaggggctaactggatttgtacctagaggtagtgaaatgatctgtgta

SEQ ID NO: 132570 - DNA, 142 bp, Homo sapiens
tttcttcataaattcactgaggtgttgacagaatgaaaactggcaatgagatgtggaaagggaatgctgtggcgatgatggtattctctctaataaatagttcttcacatactcctagggatgctgtttattttcttcatgg

SEQ ID NO: 132571 - DNA, 241 bp, Homo sapiens
gttataaaatgtatactgtgggagtatctgaaagggatatctaacacacagttgtttatctttcttcatttctgagaggtgtaagggtgtgataaaaggaagatcactgtaggtatgaataaatacaaagaaggaaatgaaaggacttttgtttttaatgggaccaagttagtgatttgaggatttctggcagatcaagaaactaaaaaatcagtgaactgtcttgttgctgcaaaagttt

SEQ ID NO: 132572 - DNA, 383 bp, Homo sapiens
gctgtggcccaatgagtggcagttttttcctagccagcttctgtggccaaatttggaggattttccaacctcgtgatatggtggcccttgggtgtaaatcactaaattccctttctacctggtctcttcttcctgaaacactcagagctgacttcttccttctatcttatccgtggacccaaaactccggcgccagtcaccgactcgggaagacagtcttcccttggtgtttaatcactgcagggatgcctgcctgattattcacccacatttcattggtgtctgatcaccatggggacacgtgccttggtcagtcacccacattcccttggtggcaagtcaactgcggggatgcctgctttggctgctcacctacattacag

SEQ ID NO: 132573 - DNA, 542 bp, Homo sapiens
aaaaacagacatgtggaccaatagaagagaatagagagcccagaaatgacacatttttggttagctgaccctcaacaaaaatgctaaggacacctagtggggagtagatagtcttatcaataaatgctgctgagaaaattggatatccacatgcaaatgaacgaaattagaccctgatctcacaccataaagaaaaatcaattcaaatggattaaagacttacacataagacctgaaactgtaaactcagaagaaacaaggaaaaagcttcttgacattggtctgggcagacattatggagaaggctggatgcatcacacttcctgatgtcaaagtacatgacaaggttcagcagtaaaaacagtatggcactgatataaaaacagacatgtggaccaatagaagagaatagagagcccagaaatgacacattttgggttagctgaccctcaacaaaaatgctaaggacacctagtggggagtagatagtcttatcaataaatgctgctgagaaaatgggatatccacatgcaaatgaacga

SEQ ID NO: 132574 - DNA, 385 bp, Homo sapiens
catagatggttacagtgattttaagactgtaaaataaatatggagatcctaaagagaaaacaactattttgcctggagatatcaaaaaaaggctcatggtgaaaataacatttttgtcaagtcttgaactacaaatagaataggaaaaattaaaacatacctgtacaactaaaatgtttgtttgcagagcattatacacaaaacagaggtctttaattaagtaaataaaacattgtccagagaaataaaacgtgaaacccccatatttcattaattcattcaatagtcttcccttattcaaaatcagaataggtataaatatggattttttatagagagtataccatattttgggtcgacgcggccgcgaatttagtagtagtag

SEQ ID NO: 132575 - DNA, 342 bp, Homo sapiens
agaccaggcagcacagcatagagataaataccatttactgaagggaagaacaggaaagtaagcactagaattttcctgggacccaattaaaaccttagactagcactaggcaggcccccatggccatagacttcaggcttgtacctgtggacagagcatcctggcctgcttcagcacaggctggatcctgtagctacaggctttcctgacagacccagttacaaggccctccacaccctgaggcatgcaacagcactccctagccatcaggctggcacttgaggacccagacttcaggcccattccaagttccagatcactttggtggatccacccagtacc

SEQ ID NO: 132576 - DNA, 393 bp, Homo sapiens
gggggtctcttcctctgctgtcagtgtgccccttgccttccgtttcttccttcccttttctcctggggatgggtctgttggcagctgggggatgaggatgtgagacactggccgggtgccgaggctcatgcctggaatcccaacactgtgggaggctgaggcgggtgattacttgaacccaggaggtcaagaccagcctgggcaacgtggcaaaaccccatctctacaaaaaatgcgagaattagccgggcatggtggcacacgcctgtagtcccagctactcgggaggctggggtgagaggattgcttaggtctgggaggtttaggctctagtgagccatgatcgcaccactgcactgcaacctgggtgacagaatgagaccctgtctcaaa

SEQ ID NO: 132577 - DNA, 679 bp, Homo sapiens
gagcaatcgcgtcatagtaatgaaaataccccagcatcttagaggggccgaggctggtctcaaactcctgacctcaggtgatccacctgcctcggcctcccaaagtgctgggattacaggcatgagccaccgtgcccggcctctgttagtcttttctccctgcccagccctgtccagggtctccctgagtttgaccagccctgtgtgggtaccagccttccttacacatgggggtgcatggataaggggggtcccagaggcagaagatgggagcattgcttcagtggtctggatgctggagatgctaacagatcaaagctgtgcccttgtgggaccgacagtctaggccgggtcggggacgggcaggaaacgaggtgaccaggactccttgaggatgtggtgtgcgaccgacctcggggatcaaacaaggggaagggaaccacgtgggactcggagagtgtgcacggtgcagaccaggtgtcactggacgctctggcccgagactgtttgctcaaggggcccaggagtggggtgggggggtgccaggaggcccagggaccagtcccagctcagttcctccctgactgtgtgactttggtggaagatttcatgcctcagtctcctcctcgaggtagtgggtgcaatgatagtccccactttcatagtagacttttttttt

SEQ ID NO: 132578 - DNA, 483 bp, Homo sapiens
actcccgccacgtgagttgcctgcttctccttcaccttcaccatgattgtaagcttcctaagtcctccccagaagccgagcagatgtcagcaccatgcttcctataaagcctccagagtcatgagccaattaaacctcttctttataaattacacagtctgatgtatttcttaatagcaatgcaagaatggtctaatacaatgtatatgtgaaaatgcatcccaaattcacaatggcttactttttgtacaactgctagtaagttggtaattgctcaaacgtgaaataatatacaaaaagtcacattttaacaatgtatgtggctgtacctatggcttctaatactctctacgcatccccatattaaataccaaagatacaggcttgatcaaaactctcccatcacttcatatcagtgttcctcctgccaacaggagcctttctttttccatctcagcaccctaattttatccacaacttttt

SEQ ID NO: 132579 - DNA, 836 bp, Homo sapiens
actctctgcatttttaagcatgtgcagcaaaaattcagcactctttttgggccactgaccttgtgtccagccccactgcttggcctgggcacacctgccagctccaccattgtaacgtcggaatggtacgcactgtttctgtaaagtgacatctttcaggtacttcatggcttttcgtatatgcatacccttgatggcctgggcagtttcacgaatattcttaaagtaaacacgaagattggaacctcttgatttgcatgatatcatgaggttctccgggttaagtgaatagtgaaccattttcacagattacctcaggccgcttagggaaagagcaaatgggcccattttaaagataagagaatgagaaattatatggattgtacagagtctcacataacttggagaattaagaccatgctgccaagacaagattgtcagattacaggcatgagtcaccacgcctggccaaaaaaagttatttacataaattcaaacaataacagaagtacataaagtaaaaagaaatagtcttttcttccttacttcttatccaatccactgttaatagtatgatgtatctttttagactttgttctttatgtatacttatatgcacgtgtgaatgtttgaatgtgtgtgtatgttttatactatatattctctgaaacttgccttttacatttaacattagattttggacatctttccaaatcagtgcatttagatttatctttatttttagaatgcagttgcatagtatttcatcaaatactgggccataggatgtatgtatgtattttaaaaaacaagatgtttttagcaaaagacaacag

SEQ ID NO: 132580 - DNA, 370 bp, Homo sapiens
cacagggaaccagcaaaacatctaataataaaaatctataatgggaagaagccgaaaggcatggagctggtgcttctccagcaaggctgctctgtttgccagtttgaggccaggcaaatctccctgcacaatggggtgcatgtgagcaaggcctggtccctccagcaaggtttcctaactctccacctgacccctgacagccccagtcaagccaaggagggaggcagctctggtggcagaggttcccttccctttcccactctgcacccccagcccagtgagcccctcctcatttccttcccactgcaggggaagggaaatgccggtagggtttggagtttccttcaaagctgtgagctctgctctggga

SEQ ID NO: 132581 - DNA, 722 bp, Homo sapiens
acaggtgtttcttactgtattagtctgttttcacgctgctttaaagaactacctgagactcagcaatttataaagaaaagaagtttaattgattcacagttccacatggctgtagaggcctcaggaaacttacaaccatgacagagggtgaaggggaagcaagtcacatcttacatgatggcaggacagagaaagagagcaaggacggaagtgccacattttaaaaccttcagatctctcactgtcatgagaacagcatggggaaaatccacctccatgatccaatcacttcccaccaggttcctcccctgacccgtggagattacaacttgagacgagatttgagtggggacatagaaccaaaccatattacttactcatgccaaatattcatcaaaggtcacctgggtcatcaaaggtcatatgccacatagctcctttctctgggacccagaagtcatggacagagcagccacagtctccaaccttgctgattgctatggcaaagggagagagaaatacagacagagagagagagagacagagaaagagagaaagagagagagaaaaactatggagaatatcacattgacagttaaatgtaccctggaagtgatgcacaacatacactgtgatacacagcacttcccctcacacacataggctggagcagtggttttcaaccaggggtgattttgcctccactaggggatatttgccaa

SEQ ID NO: 132582 - DNA, 616 bp, Homo sapiens
aggagcaaggtatgtggatgttcttgtactgttcttttagctcttccgtggctttggaatttttcaaaagaaaaaggtgaggaggaagaaaaaaaaacaactttgttccatctggaattgattttgattgcaggtcctttggttgccgtggccctcctgggttattgtcctggatttctggtttctttgtccttttacagcatgtacaatagtcagtttccctctctcttaggaacttcttttttgggtgagttattcttttttcggacttggaagtttttatgattagtgtctttctggcagacttcagtgacttttctagaagcaggtaagacctagcatgctttgtcctgtgcgttgatgccttttttggttttgttttcgttttttaacattgcattatgtgctccaaggaaatttgcaaggaagttttgttctctgggacttaaacaaagtcttaatcctcagaaatcatcttaatcatcaaattaatgtgtcgtgtaattaaccctcttccagtgacccttgagataagctttttcctctcaatggagagtttttgcaggagggcaggtcctgcttacattctttggatatgggcttgtaaagactcctg

SEQ ID NO: 132583 - DNA, 551 bp, Homo sapiens
gctcagcaggaagttcagaagtcactgcaatgagcaaacagacctgagcacaccccggcgcagcctggagtccgggaaagaatcagtcaccaagttttctgatggcctggaaatattccaccctgtcccaagaatgtctctaagccaggggtgagcaaactatggcccacaggccatatccgggcctggtttttttttttttaaagttttactatacactgccataaatactgcctatggctgctttctggctacaaagtagaactgaaaagttgagacagagacagagactcacagaccaactctgcccatagggtattgtgaggattaaacatttaccatctgaccatttagacagtttgtcaactctgcctctaacccattgggattaaatgaccaaggtcactgtgttctgcttaaattgctttaaaaacttactaggaaatacacagactctcttcctctcacttccccaaaatgaacaccatcttttccccaatgctagaagctgacagtgtctaaagattaaaacttttaaaatgaatgtatag

SEQ ID NO: 132584 - DNA, 439 bp, Homo sapiens
tggggcaaagatttgtgctggttcaggcctggaaataccagaaataccagaaactgaagtcgtctctctttgggcggccacagcataaaaccaaccaacatgatcctgctattaacctcgattaactcggagaagactctgtctcaggctgtcgaggcgccattgctccagccaagccccccagtgctgacccaaaatggccaagccagggtggagagtgggcagtggagagtgggtggtgggcactatcgccagctcaagggccgaaccaagaacagggcgtcctgagtggtcggggactgagctgcctcccaccccagtgctcagcctctactgcctctgtccacagacaggggcacagagaaggtgattgtttccatctgaccacggtgactgctccctggggcagccgagagcacaggcctggatgtcacagagg

SEQ ID NO: 132585 - DNA, 153 bp, Homo sapiens
tctggcctggctgctcatcaagcttctgtgcttggaagaccccttcgcgtatttcattaaaattttactgaaactcagtagacatattttaagctaataaattaatctatactgggattttgtgttatatccttaattggcagaagcaggaag

SEQ ID NO: 132586 - DNA, 303 bp, Homo sapiens
ttaatgaacataccaccttacctcctttcagctcaccctcagacatcccccttccctctgtcaccaagccctttaccccatgtttctatgcttcaaacaccagtgggtggaagaagtcagtaggaatacggtaaactctttccacatccccagatagcttgctcaaagccatattatgaaaattccttcctcacctctgcaaaccccttctccccaccttccatttgtttcctccctcttctcttttcagagctagtgataagtaaagagagaacaggaacaagaccagtagggggtcccgct

SEQ ID NO: 132587 - DNA, 511 bp, Homo sapiens
attaatgatgtgagtgactcggggagacacgcttgttttgcagcaccctcctccgccgatcgctgaagcagaacaaatactaattaacaggggcggcctggttggcaggttggctttctccagctgatttggcaaaatggtttattcctttccctccataaaccatccctcttagttattagacattttcatactgatgtttagttaatttctaattttcttaattaggatgcatttcatctcttgcaaaaatattataacgtttatagttaacatttttaaaaatttagaggggcctaagatttaagttttaatagttgacgcttgaatttcaaaaacatttgtttctcaaaatgtagataattcttccaatggaattattccaaagaatcgttcaccatcttttttttgtattcttacagtaacactaaccccactctggaaaaattataaaatcactcatggggtagtttaatactcttgttcttctttcttgaattatttctgcaac

SEQ ID NO: 132588 - DNA, 529 bp, Homo sapiens
agctgccctcacacaccaccacacgcgtgcgcacaggagtgcccggctcacccactcctgacacacgccatgaccccgtcactcacgctcggagcgtgcccacgtgaatcgggacttgcccacgtgccccgcagcacccgccctgcctgcaacacccacaccaggcacccgggcccgctcacgctcacctgcacacctccatggcggctccctggcacctccaccaagcaggggcccctcaccgcggcccagggcttcagtgtgcagactccaggctgagaggggacggggatcagaccccaatggcaccactctccagccgtgggaccatgagccagctctcatccactctgagcctccatttcctcatctgtaaaaaggggacccccacagggctcctgggtggaattggtgaggaacacacgtgaacaccaaggacaggcctgggtcacacggaacatgcctaataccagattctcaccgcagtgacagcccctgaccgtcccgtgctgcagctcgcagatcctcc

SEQ ID NO: 132589 - DNA, 616 bp, Homo sapiens
gaaagggggactcttgagtagggagatgatcatacttttagaagatacatgaagatagctctttcttctctgagagtgttctggcatgatgaggaatgatccagacgctgagaggcaaaactagtcaaggagttaaatacattgctcttagtcctgttggtgacatccagactctttagtccactttgattccttaatctgccttgttgggcaggctgacactggcttctcagaagtttcttgtccttatgaaagaataaaccttcataatttttgtcactctcaatgagattcttagaatgctgaggagctgccactggagctgaaataatttgagacataatatgtggggttaggaataatgccatgggaaatctttttgtgaattatgacttctagatgtgagcctagataaaaccctaatgtttgtaaacattgtcatcttaaaagcacttaactctttggactgtttggttgttgggggtgggaaaaataatattcatttacagataacagagtatataaactaccagcacatttctaagaactgaagtaattatctgggatgggaattctattctgagtttattgcatactctaattaggtcacttcata

SEQ ID NO: 132590 - DNA, 288 bp, Homo sapiens
gtgcttgccagagccagtggtggggggcggacttgaagtggaacgtttacaagccgttgtgactaagtgtcaaaagtgggcaaaatggcaagggctgtgaaatcagaggtaggtggaaactccggatcctgagcccataggtcagctgcatcgaagccataaggctaagagaagtacctggagtcaggagacccaggaattcccttccagctttgccactaacctgcaggtgtccttggtgaagttgcttcattcctctgatctcagtttatccacctgtgaattggg

SEQ ID NO: 132591 - DNA, 316 bp, Homo sapiens
atattctgaccatagcaccattgcctgccctgccttcgggacttacactcttttggagctgaaggaactggctctttcttgctccacattgctccacattccccatcagcgttccccagcaggctctttcctagcagacaatctgaactgcacccaggctgcagtcatccctgagtttgggggcttctaaggctgtgtgctgagttgtgcctgaagcaggaggagcctacaattcactgagcatctccctgtgcccacgtgctggatgcctcgcaggcatggatatatcccactgcatccccagaacaatctcaaa

SEQ ID NO: 132592 - DNA, 110 bp, Homo sapiens
aatggagcaagaccctatctctttaaaaaataatttcttaaaaagagttgatcagattgagatggagcagccagtaagtggggagaagcccaagagtgttgtccctataa

SEQ ID NO: 132593 - DNA, 447 bp, Homo sapiens
aactaacacagggtggaagtcccacagggagggacagaagaaatcacaaaagggcaagagaaaacttttgggggtggtgaatatgttcactatcttcactgtggtgatggtttcatggtgtatatcaaaacttaaactgtacactttaaatattcagtttattgtatgtcaatatatttcaataaggctgattttaaaaaatccagcagatatcaggcctcttcacaaagcctcctgtgaaagaccaagccatgcaaatggaaaggtggcttagagctgaaggacaaaaacggacacaggagaaaatccttctgggatgtgggcagctagcctggaactattgttcctgatgcactcagggaaaaaaaaaatctaactacccaataaagcagcctgtctcttcaggtgtgctagggtgcaaggggcagttctgtaagggctgatgtg

SEQ ID NO: 132594 - DNA, 434 bp, Homo sapiens
gggtcgcgagaaataaatttgtttccattacaaattgccagctgtcttggtccattttgctttgctataacagaatacctgagactcagtaatttctaaagaaaatgggaggccaggcacggtggctcatgcctgttaatcccagcattctgggaggccaaggtaggaggaacaccttcaggcctgaagttcgagatctgcctgggcaacacggccagacgctatctctacaaaacatttaaaaatcagcctggcatggcagtacatccttgagctacttgggaagctcaggtgggaggatcccacctgagttcaaggctgtagtgagccatgatcgtgccactccactctcgtcggcaacagagcatcacccggtctcttaaaaaaaattaaaataaataaatcttttaaaaagaaaaagttggtctatctgg

SEQ ID NO: 132595 - DNA, 325 bp, Homo sapiens
ttctgcatattatgaaaacctttgttagttctcataatagagctattacaaaacagtttatatggagttgttaaattaagtgcctatttttcttttttgttgttgttctgcttttggtttttgttttgttttgttttgttttttgagacagagtcttgctctgttacccaggctggagtgcagtgtcatgatctcagctcactgcaacctccgcctcccgggttcaagcgattcttgtgcctcagcctccccagtagctaggattacaggcacatgccaccacacctggctaatttttgtatttgtagtagagatggggtttcac

SEQ ID NO: 132596 - DNA, 273 bp, Homo sapiens
atttgtagatgagtgtgcagtagcaatgatcatagtttattttatgaattaatagttaatgaacatcagatattggtgatacagcaataaacgagataaatatatttccttttggagttcatagttaaggtttgttacatgggttgggtatattaggttgggtatattgggtggtgctaaagtttgggcttctactaatcccatcacccaaatagtaaacatagtacccaataggtggtttttcaacccgtgccctcttccctccctgctttt

SEQ ID NO: 132597 - DNA, 318 bp, Homo sapiens
ttgctgagggtaggatgacttatagctgtagctggatatagagattcaaacaaatttcttttaggatctggttttatcctctccatctctcacctctacttttcaagggctgacttctttctcagacaacttttctttcagagtgcaaacttgtttcctccagccaatcagcgtgaggggtattgggattggatgggatgatgggcagaaggtaaaacagctggtggtgagtggccggatcaacttagaggcttttgttttcctttctttttcttcttttacttttaaaattctttttggcttttcaccacaggggca

SEQ ID NO: 132598 - DNA, 450 bp, Homo sapiens
gatgggagtcagaggacctggatgaagcccaaacactgggacagggtcccggcatcaggacgagtccttggggctgtgtcaggtctgggctcacgatgaatccaagaatcatatggggcctgaaggccgagacagcgtgagcatgcgagtgaccccctaagcctgatttgcctgggacttttccagttttagcactgaaagccctcgtcctaggaaactgctcagtcccggacaaaccaggatggttggtcactgtggtaaggaggactctggggtccaaggatcatgacatttccaagtaccttgacgaggtctcgggattacagcaggaacttaagatcatcctagctctttgggtcatgatataacacccctaggctcatgccagcactgacacaagttcaagctgaggaatgagaagctgtccagggacaaagtctaagcaggtta

SEQ ID NO: 132599 - DNA, 551 bp, Homo sapiens
aattccccaaagaatttctaacggaacaagttgcaacatgatcatctaatcctccagtcactagaggatggaggtacttcttccctcagggagagggaagtatctcttcagggagacaccaggtcatttgttgaacacatctactgtgaaaaaccagaaagctttctagattcatcaaataaatgtctgcagtctggaaatcagaacatccgggttctagtcctaggatgaccttagacaagccacggctgctctgggccctgctttccttgtgtataaaacaaagctgcagggatatatgatttctagggtctctttctagactgaaagttccataacagaaataaatgatctgagaatttaattgattttcgtgctttctttcttcctttccccccgacctttggttgttgttgtttatttggttagtaggctaaaatagaactatttttcttgaaaaatagtgcataattctctgggatgagaggcatttcttctctgtggtattttcccacagtgtaaccttccttctcttttcatttgccactagg

SEQ ID NO: 132600 - DNA, 1012 bp, Homo sapiens
gccagaaataaaccttctccagatcagaggactgtggagaaggctgtctttgcaacaaattcaacaagggagatgtggaaggatttattcaccatggatggccttctcatggattgtataccttggccttgcattactcagatggtccagggaacctcaaaaacttggtttgaaatggtcctgaactggtagtactcctaggaacctgtcagaagccaacctaaatctctctggagaaaggcatcttttatcacagtcttcaatgaatttccaaaaataatttttcaaagacaatgagtaatatacagtcaaaaatactaagtactggaggatccaggataccatgagtagaccagtaaaaacagcagatatcagaaatagacatgtaaagacttcagatattaaaattatcagacctaatcataaacatattactaaatttcatgaacatattagtaaattattaagaaataaaagcaaagcttgaatatgtccatctgcagggaagagtaaactattaaaaaatgatggaagactggacacagtggctcacatttgcaatcccagcactttgggaggccaaggtgggtggatcacctgagctcgggagtttgagaccagactgaccaacatggagaaaccctgtctctattaaaaatacaaaattagctgggtgtggtagcgcatgcctgtaatcccagctactcgggaggctgaggcaggagaatcacttgaacccggaaggtggaggttgcggtgagccgagatgtgccactgcattccaggctgggcaacaagagcgaaactccatctcgggaaaaaaaaaaaaaaaaagatgaaatatatttggaaaaagaaccaaatagaacatctagaagtgaaaaatactgtagctaaaattaaaaactcaatggacccacttaaccgtagattagacacagatgagaaaagaataaatgaactgaatgatagctcaagaagaattattcagaacgcagcagaaagagacaca

SEQ ID NO: 132601 - DNA, 899 bp, Homo sapiens
  misc_feature (898)..(898): n is a, c, g, or t
cgcagtggcttacacctgtaatcccagaactttgggaggctgaggcgggtggaccacctgaggtcaggagttcgagaccagcctagccaacatggtgaaaccccatctgtactaaaagtacaaaaaaattggccgggcacagtggctcacacctgtaatcccagcactatgggaagccgaggcaggcagatcacctgaggtcaggagttcgagaccagcctgaccaacatggagaaaccccatctctagtaaaaatacaaaattccaggcgtggtggcacatgcctgtaatcccagcactttgggaggctgagacaggtggattgcttgagctcaggagttcaagaccagtctgggcaacactggaagaccccatctctacaaaattagccaggtgtggtggcgcacacctgcagtctcagttactccagaggttgaggtgggaggatctcttgagccctggaggtggagtctgcagtgagccatgatcgcaccactgcattccagcctaggccacagagcaagaccctgtctcaaaataaataaataaaagtaaaaacatggataaacctggaagacattatgctaagtaaaccagacacaaagaaaataccacatgggccaggagtagtggctcacacctgtaatcccagcacttgggaggctagtgggaggtactggagccagagtcagaccagctagacacttgcggaccattctacggagacaaacaaaaaaaaattggggcggcgccgagaatttacttttggcggccaggatagaaggccaggcaaaccgcaacagtgggccccaaacccggcggttgaccgaggtggtcgtacgcgaacacgcgcggggggaataaggggaaagttagttccttgttctgtcctcttttna

SEQ ID NO: 132602 - DNA, 436 bp, Homo sapiens
acaagaaaaaaggaaatatctcttaaactataacattaatgtcaacagagactaaaaggactataaggcttataaggattaaattttataaaagatatgtaagactttagataaaatttgaaaactttattgaaagatataggtaatctgaaattaatctggacatctaccatattgtggatagaaagactcagtgtcataatgatgtcattttacctcagattgatctatatagttaatactaccttagtcaaatctcaactggttagttcatgtaacttgacaagttgctgccaaaactgcatggggaaccaatgagtgaagggccaagaacagttaagacactcatgaagaagaacaccatgttggtgggacttgtcctgtacagatttattataagaccatattaattaagacagtatggaaatggcacagg

SEQ ID NO: 132603 - DNA, 938 bp, Homo sapiens
gaagagtcctaagacacatcccatcctgagtgcacagccagagctgtgtaatatgtcaccagtcagcccagcttcttaagttccaagcccatcatgtctcaactctataggtgcattaaacttgaagcgtgtcaggggctgactggaaatgtcacctgaaagctgtaggaaagacacctggaactgtcacctaccagttttccttggcattgtgtcttattagctgtgtaacctggcagggcacttctcagggctcagtctccctgttttaatattacatggataaagtaaaaacaatttcaaatgtgaattataaagattataagagataatcatgtgttcttggcatatagtaacaaatcaataactgtgagcaatgattattagatttagatgtttttgttgttttcctgaaaatgttgtctattagtgagatacgttggcaggtgttcatttatcaaacccagtgtttccaagattttctccttataggaatcactgaggatatttatgagacctagagatccctgtgcccttttttagaattgtagaggatccaaaacagcccaggaactggtcttaacaagttttccaggtaattcttagggctagtaaaatgtggaaaatactggaaaagtgagtttgatttatgggaatgaagagaaaaagagggtacatttctatcatagagcgttcccggcatgagcatgttggaaatatcaatatttaggggggttccttgtttcatgtttgtttcctgacataatgagtatttgtgcaagaattccattgttgtatttttccttgacatcttctttaattatctaattcaattaggtgattgatttagtctgcctcttacttgaatttttgttattgctgcataccccattgataagtataaaaatgatacgggaatattaaaaaggacatttata

SEQ ID NO: 132604 - DNA, 201 bp, Homo sapiens
ggctctagaggctccccgcatccaggcgcacttctggggaactataggaaggccccctaaactggaactgagggattgcaaaaggattctaaacagagatatagagattaaatgggagttaggttagcaaagagaatgaagagggctggcagacccaggaaagggaagatgccagtatggatggaggagagcacaaaggag

SEQ ID NO: 132605 - DNA, 268 bp, Homo sapiens
gtttctttctgggtgttcattcacctaacgtgttttattaacatgttttattgtgcatctcttttccatgggaactgtgtgatgaaatctgtctggcagactggggaactataggaaggccccctaaactggaactgagggattgcaaaaggattctaaacagagatatagagattaaatgggagttaggttagcaaagagaatgaagagggctggcagacccaggaaagggaagatgccagtatggatggaggagagcacaaaggag

SEQ ID NO: 132606 - DNA, 147 bp, Homo sapiens
ccgagatcgcaccactgtcctccagcctgggcaacagagcgagactccatctccaaaaaaaaaaaaaaaaaaggaaaagaaaatttcctctcgcttctctggccttgtgaggttgtggacaactggaagattttgactcaggaatcc

SEQ ID NO: 132607 - DNA, 547 bp, Homo sapiens
aggatcaagtaaaaccttatttagcctcaaggtagttattaccatctcattttgacagatggggaaactgaggcccagagagattgcatcatgctcaaggagacatagcgactgacaggaaagatctaattccaaagcctataatcttcctgtgtcagaagattatgaacagtctattcatgttcactttcataagagagacagaaataagacaggggtaatttaatcagtttctctttgcttttattccctccaccttttcccctacaatctgtaaatgtattgatattaatctaattatatggttcgttatacaggggagacacacagtgcctacattatcagattcctcagaacccacttcttgttaatgcagtgacatcagtaagcatcttagagaatcattctagcatctctgaccttacttcagtattagtactggtaggttaatagagataacaggagtcagaatgagggagacagaagaccagaggaattcaaggaccaaaaagcaatgggaaactggaagtaacttagaattttttgt

SEQ ID NO: 132608 - DNA, 604 bp, Homo sapiens
ggatccccaagagggtcctcagctatccccgtgggcagaaggcccacccattgcatcttccccttgctgtggttcagccctgtattaaactgaccagtggacatgctgccctttcagactgggctgaaattccttccctgctcccatctgcctgcctcatcctaacctctctttaagcacccagccctggtgcttccttcttcatggagcttttacgtgctattccaacccacattgatgtctcccatccttgaattcacttcagaccatcagtctccctttcctagtttagtcctatttcgagtaatatattctttttattattagatgctaccattttcaagatgtgccttcatagtaacagtatattttcagggagaagaatgacacacttctgcattattagctaatggaaaacacatgctcaaatatagtgatgttaaagaaaccaagtgagcaaaagcaaggttatgtttttaataagagaatgccttaattgtggataaaccatcccagaaactcttttatttcggtattttaaaaacacttggagaactctttcttatatccggaaagcaccacaaaaatctgtcagatgaaaagt

SEQ ID NO: 132609 - DNA, 368 bp, Homo sapiens
gccaggccacttggaaaaactatggaattctttttgaatgagtctgcttgtaatgtcactctgctacttccttggtgagctatttgaactctctgcctttaacctcccctttgttcatagggctcgtcctccagtcactactgtagaggcaggaggggagctcttatatccatagctgcttgattccccctgtattttgtctttctgttaatgcacataagcacatcatagactacataacagcagtgtgaggagttcaatacatgcatgtagacatacatctcaaccaaacttagtgtcagaaaaagcaacttcaaaattcctaattcagtgaaaacaagaagaacatggttggtccaaatgccacg

SEQ ID NO: 132610 - DNA, 175 bp, Homo sapiens
agggcaagggcaagggcaggggcagggccaggttcatctaagaaccagggacaaagccaggcccagagatgggccaggacaggtacctggcagggctagggtctgggccagggccacggcagggccagggccacaaccaggtctgtgctatagccaggtccaacacagtgcccag

SEQ ID NO: 132611 - DNA, 839 bp, Homo sapiens
aacacagacgtcgttgtgagacaggcctgaatgggcccttctgaccacctgagcctggccttggctctgctctgaggatctgaaggttcagagctcacagggaccaagggaaaaagcaagtgctgggggatgtgccactctctcattgttgcaggttgctttcccagacactcactggaaggaagaacgggaattgttagtttaagctcatcactaaagtcgcatcaaatgcacggaccttctcccaggaaggcggccttttgcattatgaaccccactggaagagctccaagtcttcacttgctgtggtcaagaactgtaaccacaggagagacgggatttcactatgttggccaggctggtcttgaactcctaacctcgtgatctgcctgcctcggcctcccaaactgctgggattacaggcgtgagccaccccacccggactacaccagacctatgattcagatctgtcagcacttttggggatgtgggtcttgccctggccttcagttcctctccagattaagaacctgcatgctttgcccacagacagatggctacaacaaaactgcacaacttggtagatcccgactgccagtggtcattctatgcagccagggccctgtcactaaaatctgtaggctgttcagtgtgaacgatgaggagtgactgacagtccaacgtcagggcaaggatgacttagggatcttcacccagaggaatactatgtacaactgttaaaatgtttacagggtgtgtaggaaccacagaaaatgcttctgtttcaatgtcacaagacaaaaagcaggaatgcaaagttgcgttcacagtgtgaaaaa

SEQ ID NO: 132612 - DNA, 461 bp, Homo sapiens
gttgtgaatgacatgtccataatactgttatactatctgcataatataaaatgttagatctgctttgttttcagacctatgattcagatctgtcagcacttttggggatgtgggtcttgccctggccttcagttcctctccagattaagaacctgcatgctttgcccacagacagatggctacaacaaaactgcacaacttggtagatcccgactgccagtggtcattctatgcagccagggccctgtcactaaaatctgtaggctgttcagtgtgaacgatgaggagtgactgacagtccaacgtcagggcaaggatgacttagggatcttcacccagaggaatactatgtacaactgttaaaatgtttacagggtgtgtaggaaccacagaaaatgcttctgtttcaatgtcacaagacaaaaagcaggaatgcaaagttgcgttcacagtgtgaaaaa

SEQ ID NO: 132613 - DNA, 175 bp, Homo sapiens
tgcatctccaaagttcatatgttgaaaatgtaatcaccaatataagggcattaggtgagacatttgggagatgattagaccatgaaggcagagacctcataaattgaattagtgcccttataaaagaggccccagagagttgccttgcccccttttcttccatgtgaggttagag

SEQ ID NO: 132614 - DNA, 664 bp, Homo sapiens
tcccagctacttaggaggctgaggtgggaggatcatttggtctctggaggtcaaggctgcagtgagccatggttgtgccactgcactccagcctgggtgacagagcaagaccctgtctcaaaaagtgtctttggacattccatctcaaccttatgcacagctacttggcagattcccacataaacgtgttctgctcgccttatgcaaagaacttcatgcataagttggcctgtcatccatcctctgctcaccactttgaggaagcccttccatgtctgtgagcctcccctgcccccctggatagcccttattctgttataaacattctcacctgggaaactcacacagggaactttagtgtgtgcacaggaagtacctcaacatcgagcaagtgtagtagcttatatagtccccccagcacaatacaagaaaaccctgcagtacattcaggctgataagttcacatcaaacgtacgctcagaccaggttgaatcacatttagcatgttgacttagttgtgttggtgactttcattaaacatgggatggttcactatgaatacttggaacatttctaaccgagtagtatagtcatactgatctgagcaatgttattgttaattttcttctttttttctgttaccctgtttcctgaatctgtttgt

SEQ ID NO: 132615 - DNA, 237 bp, Homo sapiens
cgtcccatctctgcctctggagtagctgggatgcaggtgtgtgccactacacccagctaatttttaaaaattttgtagagatggagtctcactatgttgctcaggcttgtcttgaaatcctgaactcaagtgatccttccacttgggcaggcatgagccaccgtgcccagcccttgattacattttgaaataatattttaaatctactgggctaaataaactatatcatgaaaatta

SEQ ID NO: 132616 - DNA, 433 bp, Homo sapiens
tcccattgctcaaacctgtcagactggtttctgcctcagaaccatcctcacatttattattcccactgcctggaatgctcttcacccagatctctccatggctctgtcatcctcatccttgcggctcaaatgtcacacccttagagaagccttccctgatcactgtatttaaagtagttgaaccctcaatcacatgtatatcccattatcctattggagtatcttcatagtacatatcattatccgaaatgaataagtattattgtctagaccaggggttattttgtgccattggccccgttagcaatctagtgaggcctatgggctcattctcaaaataatgtttttaaatgcctaaaatataccaagtatactaaaaatacagttactaaaatatttaaaaattgtgacttagcaatccatgtgcttctct

SEQ ID NO: 132617 - DNA, 322 bp, Homo sapiens
ataaaggaggccagagaactaaaaactgtctactatattccaattaagacaacgataacagaggtgaaaagaaggaacagatttgcgatttgcatcacaatctgatgatcagtttgatctgaatcaacaagaaaatattcatttatagatcttgagattcagattcgggaggaaaaaaacaaagggatatcacagagaatatggaggtgtcactgacacaacttactgaataaaatgaacaagggagaaggatcctgatagcaacaaagtttcaaatacctggaagggaccactggatgccatctcagaaacaggtacacaa

SEQ ID NO: 132618 - DNA, 1011 bp, Homo sapiens
cagaatcaaatgagaaaagaatgacaggcataacataatgtaagttacaggcagaacaaagcgacacctcaaatttaatttggccaataagggcacctgaaggccaggagaagtggggcagctcactgggggccagggcatgaatgggctgggggggatcagacctctttcctttgattcaggtagatgactttacaacagatgacacgccaacattcccagaaagctgaatttatttatttaccattataagccaatttttttcttgtgaacttaggactagaactcaatagatttaatactcaacctaaaggtttattgaataaataccttgactatgttctcaactttattttataactcagcgaagtacatcccttgacagaaacaaaaaacttttattttaagaaatctattaagtatttgatcaataaataattgtcaatcaataactggctagtttaacaaatttttttgtagagatggggtcttgctatctagagatggggtcttgctttttgtagagatggggtgttgcacaggcaggtagtttcaaactcttggcctcaagtgatcctcccacctgggcctcccaaagtgttgagataacaggcatgagccactgcacctggccaccctaggaaatttagagcagcccaagaaaactgcagagtgggtcagggccagaggcagctggacaggtcttggtgtacaaagtgcccccatcctgaaggggagagcaatgttttataagacagcagagggaaggtattaatagattacagcggtattagtccaatttcacactgttataaagatactacccaagactgggtaatttataaacaaaggaggtttaattggctcacagttctgcattgctggagaggcctcaggaaacttacaatcatggcggaaagggaagcaggcactttcttcacaaggcagcaggagagacagagaagagcccaggggaactgccatttataaaaccatcagatctcgtgagaa

SEQ ID NO: 132619 - DNA, 253 bp, Homo sapiens
actttccgtggttctcaaatgtaggtcatactgtcccctcagagggccactgcaaatctggaagagtgagttgaattgatatgttgcatgggaattagtactggcatttagaggatgtaaacagggatattaaaaatcctgcaaatcagcaaggcatggtggcgcacgcctgtagtcccagctagtccagaggctgaggcaggagagttgcttgagcccagaagttgaaggctttagtgcactatgaatgtgc

SEQ ID NO: 132620 - DNA, 782 bp, Homo sapiens
cactggtatgaggcatccatgtggcagacgtgtaccagtgattgctgagcatgtggattccaggtcctggccctaatgcccatcatgttgctactctaggaagatgctgccctttccaaatcatgcatcctaagttagagatgcctcctataaggtgaggaaaatcatgcctctacatcttctcatgcttcctaagcaggcttaaggtttcgttttgtgccctttgtgttggtgacagtgtgttcatttggcgtgtcggtaagctttgcagacattgtgtgttctatataaagtttcttttatgctcaatagaaggcccttaccttgtcataaaagtgtacagcataaatcagaatatctctttgccaactgttgaaagggcccatttaacactggaacaagtataactggctgtgattcatctactatgtcgacatatttgaagtgcatttaccctcactttttcctttctggaacttatatttctttcacgtggtatatttcttttgcaggtttggcttcttcgtggcatttgtagaaaactagcaaaatatgagctttgcattcccccggatccagaagccaaatgggcagactagactttgttggcactctggccctcccagcacacctctctgggcccactctccgctgggtagtggcacaatgctttctcctgcctctcccttccttctgcctttctcggttctcttcctcaaaatctacctctgcagtcacttccccagggtttacaataaacgatgggaatggccagtggggaa

SEQ ID NO: 132621 - DNA, 535 bp, Homo sapiens
ggatctactgagtcacagtgcctggtagcagttggatgttgtaagagtgaagtctgagtgggagaaaagggttgaggaatctcagctgagtgtccctgagcaagctgcataacatctccaagccttggttttcacatctgacaaatggcatgagacctgctctttagggttgtattagagattaaatagtcacataaggagtactgagactgtagtatgtgctcagtaaatattctcttttctctctccctctttttgggtatgaaggtagttgtagttgtaaaattttcttccacacttaggaacagatatttctctaaatgtaagccccctgggcttattctagtttgttcgtacatcttaaaaatggaaacctcagactaaatatagtattcaagtataaatcccactactgcctagataatggtaaagacattacttcatagtctttgcgtgccttgttcccattaatacatatcatgtcatgttagctgttttataagacagttcattgctgattcatctcaccaattca

SEQ ID NO: 132622 - DNA, 293 bp, Homo sapiens
ccttcctcccattgctctagcgattctcctgtctcagcctcccgagtagctggaactacaggcattagctactgtgcccagccttggtttttcttttgacgcagagttttgctctgtcacccaggctggagtgcagtggtgcagtcatagctcactgcagcctcaaagtcctgagttcaagcaatcctcttgcctcagcctcccaacgtgctgggatctcaggcgggagccacagcgcctggcccaaaaccaagctttcttatcccaagcaccgacctttatcaagtctacct

SEQ ID NO: 132623 - DNA, 414 bp, Homo sapiens
ggcttgaattgtgcccctccaaaaagacatgctgaagtcctaaccctgtgaatgtggccttattggaaatagggtctttgcagctgtaaccaagttaggaggtcacaaggttgggccccaatccaacatgactgtgtccttatgagaagaggaagacgccacgtgaagacagacacgcagggaggggaccgtgcgacggtggaggcagacattggagtgatgcatccacaagccaaggagccccaagtgtcgatggccgccaccagaagccagggaggggcaaggaaggactcttctcagagcgtcagaggaggcgtggccctgctgagcttaactttggactcctcgtctctaaaactgcgagaggatacatttctgtggttttaagccactcagtttgtgatactttgttac

SEQ ID NO: 132624 - DNA, 654 bp, Homo sapiens
gcctgggcaacaggacaggaccctgtctcaaaaaaaagacgaaaagcaaatcccatttctaactcaaaaatccccttgcaggaaggaagcaacacttgctaccagatttccaggcatccttccagagagactgtataaataaacatatagaggataaggaatgctggacagttgcttcttttctccttttctgtaccatgtttgtttccacttgctggtataccttgtagatcctcccatatcaggacacaaaaaccatctcatcgtttttaacagctacagaatattccactgtatggaattcctaccattaatttagccaaccccctatctggacatgtgattgctacattctgttgttatcttacaaacagccattaattgaaaatccataggtgcaagaacatctgtaggataaaatcctacatataaagttcaggggtcattttttctatatacattttccaacaactatttgatgatgggctataatctataatctgcttttgctagttcatgacttttattagattaaaatcagctggtcttgaactcctgacctcagttgatgctcccaccttggtcttccaaagtgctgggactgcaggcctgagccacgcacctggccttcacaggatttagataatttactag

SEQ ID NO: 132625 - DNA, 288 bp, Homo sapiens
  misc_feature (16)..(16): n is a, c, g, or t
ctgtgtgttcacacanttccccacccagctgtggtctttctaatccaaaaataagagtattcaccttcaaaaacaacttcccgtggctgtaaacttcaattataacaacaacaaaaaaatcaaccacctttctgtgattgtcattcctccctctgtgaccccatctcacaccacttcctcctgctgcctgttctttcaccacaagcccttcagtttatccacctgtctaaaggccttgtatgctcccttctctgtggctggaaggcctttagacaaggtagagccgag

SEQ ID NO: 132626 - DNA, 434 bp, Homo sapiens
gtaaagtggacgtacatgcggggttagagagcaacccagaagcaggaagcatgagccagagtccagggtgctttggaaagatttagatagggggtagggcccatccttctctgtcataggaagcaggatgtaaatggagtttctctggttggctggaggttgaggaagtttgcttcctatggcttctattctcatctactgaaatgtgagaagaggcagtgggaatggaaaagctaccatgggagtgagaggagaaactcaagataaatgaaggaatttctgcaagcagtgtggaaagctgaactgaggctggagccatgcatttggggtgacatcagatcttcagcggagtgctttttttttttccagcttcacttaataatgtgaataaagatgattttggtataggaatttgcaggatggctaatagtgga

SEQ ID NO: 132627 - DNA, 278 bp, Homo sapiens
agaagggctggaacttcaggcatcacttaggacttggtcagccaagtatgagttgtaatcaagaaacagagatcacacgagggcaaacagaagagcctgtcagtgaagaaagacatgaaagaaacagcaaaagaaaaaaaatctttcagattatttgcagcatcaccgtatctcctgtggacctggtgggcagctagctggacctgggcagatcaccatggcaggaagccttgcccttgaggagagccaaagagtttgtagtgctcttgagactttta

SEQ ID NO: 132628 - DNA, 555 bp, Homo sapiens
cagtgctcaagtcacacatcttatgaaaattaaataaagcaaaaccatgtcctccatcctgtgtttatccagttatttcctagtcctcctatctatcagtaaacttcttgaaaggatattatttttacttatatcaaacagacaaaagtcttctgtctggcttctttaatggcttcaagaaagttgttcttgcttaagtttctaatggccttttaaataccaaatacagtaattacttctcaaaatttacattacttagtctctttgtgacaactgaggttcatagtcattaattccttttactggctgtgcctggtttttgaatgtcattctttggaattaactccttgattactttcatttcttagtctagacattttccttgggtgattttgtccactcacatggattctactaacacctttgattttgcttctaaatttcaattttcctctcagatctactaatgcctaactcagttgcttcccggacacatctgtctcaaatgtccttcaaacttaatatgaccaaaactgaacttgctatctttcctcc

SEQ ID NO: 132629 - DNA, 698 bp, Homo sapiens
gctcacaaggattaactcactgattcaggttagagcttgcgactcaaccacagtcaggattgactgagattcacacagatgggcagaaaacatagtgagtctcctgcacaaacactgaaaggccttttccaccaggcttatttaccaaaaaagcagtggcctgctaaagaagatatttatcctagaagcagtctttaaaagatcaaattcaaaagatcgttctctcacaaatcttattattgctaggcacaaaaaaatgtatttgcataagtaaatatagtcagcactgaagcagtatgaaaatgtaagcttttactggcaagtagtcaacaaaacaaaaagcaaatgaaagctaaacctctgttgctcaggtgcaaacaagaatactagaataaaaggtcaatagaacttttgttactgcccgtgtaaactaaggcttcctaccaaaatgttaggcttacagagccgtctactatactgaaagcatcgtatcatgttgatttgagtgcattttctcaaaggtaagcaagtgaaaagtatagtcctgagggtcagctgaatggagctgtgacaaatatcctgctggaaggtaatcttcaatagctgctgttatcagttcagtatatccaaaagtgttcccacagattaaaaggcaaagacatatatgtgttattttagactcaattactcctacttaa

SEQ ID NO: 132630 - DNA, 490 bp, Homo sapiens
taagctagattcattatgccatccaatcagatggatagggattgttaataaataaaacataaagacaaggcggtcttttcatggaagaatctgattttttttaaagaaaatttccagaaatagcactggacttccatttcagttaagctgcactcaattcacccaaaacaaccccacattgattgagcatcagtattgtatgccaggtactatgtgacatggacacaaacacaatgtgagatgtgtttgtgagatggacaaacaaaaatgtgagacacaaaaatgtgagatggacacgaacacaagtaagaagtaatgttgccattaaaccacaggctctttgagggcaggggattttttcttattcgccattgttttcccagaacccattcctgcctggcacatagtaggtgctcagttaataagggacaactgatgaaatgaccagctcaagcagttcgtggtctcctgctagttaaaattaagtgac

SEQ ID NO: 132631 - DNA, 239 bp, Homo sapiens
gaacaataatagctaatgtgaacaaatcctcccattaattccaaagaattttacaaagaatttccaaaatatttgataaacaagatttctttctccaatgtttttaaactgttagaaccagccagaggtccaagaagcctacttcattaggtatttcctctccaagtcatttgtaacaaaagtacataagacagatggatgaaggccaggtgcggtggatcaagcctgtaatcccagca

SEQ ID NO: 132632 - DNA, 574 bp, Homo sapiens
cactattaaaatctttccacatgctccagcacaattggataaaatccagatttcttcatagaatataaaagaccctttattatcatacctaccttagtaacctctgttcctgtcagtacttcctagtctttcagccaagctgaatttactggtaattccctgaacacatcatggtttctacatgatttctacatgctattcttcctaactgtaatactcttttacttcccacctatccctctaattgtacgtcatttttaaatcaccttatgtcaccacctacaaaattttatattagaatttgttatcatacttgtattgtattatagtcattttgcttatatgtcattttttcctattgtgagctgtttgaggtcaggaactgtgtctttctttgtattcccagtacttatcaagggtgaggcatacagtagtcatttaataaatgtttgagtgtttaaatgaactccataaaaactgaaaatacaaattaattccatggtatttcattttcttttccaatatagttctcagagttgctaattaataataaaaaaggccacagatgagaaga

SEQ ID NO: 132633 - DNA, 668 bp, Homo sapiens
gatgtagccacttgagtgcgccactgggaggaaaatccttagcaggattaagtttattttaggatttggctgtgtgtatgtgtctgagtgggtatatcatgtgggatctcattttccagaataagagctaggcctaggccatttccgcatcttttacatacctaggtttttacccattttttgaaattgggctgatattaagtcccatttagcttttacaaaaataaatatgttgacttggtgtgcaatataaacagaatggcccatttaaaacagcaccatagtttcctaggtcttgatatctgctatttttactttattagatatgaattactgactcagaatccatttaatattttataccgttattactcagaaaacctaatttgcattcttgtctctcatgttttaaatttttctctggtggtaactggcatgtattaatattttaagcatcaccgactggctgcaagccgaaatgaccccaaacattctggaactacctgttctgcctaatttgccagtgagggataacttaagcccagagagggctgcatataggacagattttttccttaagcacccataactttcttttttaacttttattttaagttcagggtacaaatgcaggtttgttacataggtaaatgtgtgtcatgggggtt

SEQ ID NO: 132634 - DNA, 496 bp, Homo sapiens
gctggtctcgaactcctgacctcaggtaatccacccacctcggcctcccacagtgctgggattataggcatgagccaccgcacccggccgagggtttatttttctcacctaaaaagaagttgggaggcaggtggctgcagggttgatttattagctcagtgaaggccaaggaccatgctcagccgtcctcttgctcttgctctactggcctccgtctatcagtaatgtctcccctcctggccacaagatggctgccctggatccaggcatcacatcctcacacagaaaaacatgctagacaggctctccttcccttttacagagaggaaaatctcttctagaagtgcccccgaaagaccaactttatgactcttgagccagaacttggtcacatgtccatccctccagcacatttcctgaacgtctccacttccttactgcctaagtttcctcaaaccactgtaaactagaatcagtacctccctcccaagaattg

SEQ ID NO: 132635 - DNA, 738 bp, Homo sapiens
atttatcagctgtgttaagatataatttgcataccataactttcacccattttatgaatacagttcaatgattgtttagaatatttacagagttgtgcagggtcaccacaatctaattttaaaatattctcatccttgcagaaagaaacattgtacctattagcagtctaggactttctttgtggccacattctcacacttaggatttgactttcatcttcttaagtgaatttctttttccttttctttcctccatatttatgcagtactgaggagctctttgtgtattattttgtgaagccccagaagcttcttctttcctcaagttgctttttttttcctaagtagcataagtaggaaagagcagatggagctccaaaaattttggaagtaataagtgcaatccagtgctgaggtatttgctttcatatgaaattgctgcactgaatctatatcaagaagaaaaagcattcctgacctttgccctgccactaactctgatgcgctgagtgacagtatatatctttcctcatatatctgctattgcaaaaattaaaatgtaaatgctaggattctgtaagattatgcagatttggaacaatctctagacaatgctaggtcaataaaaaacatttttgacagcttgtgacagatataatctgactactgtgtgttttagactctttaaaggtgacctataattattttccagcaaactaaatatatttttatcagcta

SEQ ID NO: 132636 - DNA, 686 bp, Homo sapiens
cctgcctcagcctccagagtagctggattataggtgtaccccaccacaccgggtcaatttttaggttatttttttataggtcttgctatgttgcctaggctggtctcaaactcctagcttcaagcgatcctctcaccttgacctcccaaagtgttggcattataggcatgagccactgcttctggcctaaaatgcttttaaatttgtttctcctcgaatcagtgaaaaatcctttgccacagagttttgaaaaaagtatcagaagcagtgtgtatgcacacactgttttgatttcctctgtgggatggttcttggctaatccctttgaaaggaagtatcagaacctgtctgtccattgcatgcaaggctgggaaggaaagcagtagccacacaataggttacaattagaacactgaataagaaacaaggaagaattccttccatgcctaagagagatgcataaccttagggtgaccatatgtctacttgcctaggaaagtcctggtctaaatgttgtccctcccataggattgcaatacactaatgcttttttctgagtgtttctccctcacataggattccagaacaatcctgctgtggtctgattgtttgtccctcacatagggttccagacactgctgctagttctgagtgtttgtccatcacagagcattccagacaccggc

SEQ ID NO: 132637 - DNA, 778 bp, Homo sapiens
gctcactcttgggtgctgaccctgcgattgcacaacactaaaagtcagtacctcaaaccaggcagcgattcagggcagacctccttatgctgcttcagtggaagaagtggccaaagaacctaagtcaaaatctgggggatcgaagtcctctgctatgtcttcagacaggtccctggctgaaaatggagcgatggccgaggagaagccaactccccagatgaacgggaccccaggtgatgacagggctcccagccactctgaaagtgccttgaataatgactctaaaatgtgcaatacaaatcctcattgaaatgcactaagtacagacagcccttgccacacagaagctgctctggaggcagctgtcttaaataaagaagagtaaacttactttttatagagagtgaaggatgctggaagggtaaggtatttaggaatatctggagagaaagaacctgcagttatgtacattttgtcctttctgtaagagaaaaatgaggactttggaaattcagatccctctttgatatcagagatttaaatgatacatttttaattttaaccagttatagtcaaaatgctacaataaaacaaaaaagagaaagaaaatgaagagcatttgactcccactcttaaaatgaagtacacataagctttaaactggttatgacaaaagcctatagttgtgtttcttgaagtataaagaaaacaaattttggcagtctttaagtatatatagcttaaaatataatttgtagcatttggcaccatatgtatg

SEQ ID NO: 132638 - DNA, 205 bp, Homo sapiens
gccctttacacaaaagggaacctcctcggccgctgtgaacaaaggctccgctctccgaaatgtttgatttgtttactcgggagcgtgagcctggtcaggcacatgtctgatactggggctatttctctgcggccatatgtagagctgtccaggtctctgcaatttaaccctgcgcttcatgccagaatcccatttcctaacttcc

SEQ ID NO: 132639 - DNA, 604 bp, Homo sapiens
caaaaacaaacaaacaaacaaaaaaattatctggacatgatggcatgcacctgtgtagtcccagttacttgggaggctgaggcaggaagatcattgagcccaggaggtcaaggctgcagtgtaccatgatcacaccactgcactccagcctggtctgggcaacagagtgagaccctgcctcaaataaacaacaacaacaacaacagaattggagtattagtgactaagatatgcatgcatctgacaatctttgattgactctctaggcctggcttccttataaatttctttgtttcttttagttttctatggaaactggatcagatcaaatctctctcctgagatccaaaggggtctacagggtgtgtcagtgacagggtgacatttcaccagacttcttggtaatccagtagctgaataagttggattgaactagatatctatctgcctttgctgaaatataaatgaaggcaaggaaattcggagtttggtcttccgattcatacccctagcagctgatgtaatatttggacttggatctcaaattcatgaggatagaccctaagaataagattcttctagctgtgggaagaaacaaagagtg

SEQ ID NO: 132640 - DNA, 646 bp, Homo sapiens
gtcacatatatgatacctctctggatcattttatattctcttcatttttgttttctcattttgccttccctactagccccttttattctttttcaatttttattattattattatttttgctattcagtttcttgtaatttattgttgggctttaaaaatgttttctttctaccaggaaaatgaaggcagaggaaaggtatgataggaccagttgattgtgttactttttaaagaacctctggagctttagtttttatgaaccagattccttttcagcacaccatcccaccgtcaagtttggtaacaaatgagaaaacaaatatcttcagtagtggttctacttggctcagtcttgctccagtttatatttagtttgtcctgggttttagtttttcagaaacaaaagcttttagccaaataatgaaatttctcttgtttgggctataggggtgtgagataagtcttaggagctataattttatgtgaaattggcccagaatctagcataaggggcaagcttttaaaaaaagcaacagtccttactaatctatcagcagtgaacacaaatgccacacaaagactacattcatttattgtgtcctggagaacaattactttacaaagtcgtgtggctcaaagtggtat

SEQ ID NO: 132641 - DNA, 445 bp, Homo sapiens
ctgggtttgggatggatcaattctgagactggaaaatggccaaatctttgcaaatgagaaatatttttcttataagttcttattgtaggcaaataattacatagattattcatcagagaatttttaaatgctcataatctcaactctttcatttacaacttgtatttccaatagtttatgggtcatctctgcatagatgtcagaagtcacctcaagtttagtgtgtccaaaatctaactcacaggtctgtttctgacctcccaacttgctttccttgtgtttttcctatgctaatgatccaccataatcaaaataattaacatttatccagtgcctactatgtactattccctgtcctgttttacatttactcatttaaagtccataagaaacattaaatctcatctgccttctgaagaagatacaaccatgctctcttttacaa

SEQ ID NO: 132642 - DNA, 245 bp, Homo sapiens
aggaactttttgtttgtttctttgtgggttgtctgtttatcttaaggaaattgattaactctttgagtcaccatgggatggtgaatcgggtttgaaattcagcttccaggagccatccccaaaatcacaccgcagaactgaactgatgagggaaccattgggagtgaccctgagctctggacacttcaattggcccctccactttaacacaaggaacttcacccaccctgccactactactgctg

SEQ ID NO: 132643 - DNA, 395 bp, Homo sapiens
agtgttgcagagaagtcagacaactgatagttattataaagaaaaatgttctgagagtgaggtaaccgcttaagggaaggaagcctccttctgtcttattcactaatttacaagaagataattgtgttacacttccttaggagtcattcatttgtatatttgacacttttgctttatgaacatgtgaagattattcaaaagtaagctgttggtgatttttttcttccaagaaagcatgccacagggcaacttctagggttggttctcatctagtcctgtgctccacactatctgcatctgcacttaagtttcaatattagataactcacatgtttaaactatgaagaaagagttaaaacatcctgagaatgctagtaagtatgtatttttgaaag

SEQ ID NO: 132644 - DNA, 297 bp, Homo sapiens
tctcatcagctggagttgacaagccctgggccaaagaactaaaggttctacttaggtggagatgtaacggtgtgccaatcattggaacgtgcaaatctgttagcacagatgtctcaacatgcatcaatgcaacacacacatgatgtcatctttaagatgtgaggaggaacgggaagaagaatacgagaggaggagtggggcctgcagtcaaggagaggctaattcggtttgggtgggtggaaagcggggctcgtgcttgcaccaagcctccatctccctggactgggagtcagcaag

SEQ ID NO: 132645 - DNA, 420 bp, Homo sapiens
ccttattcagagcagtgttcctgttttcagctttagagacttgatttatgtaccccccagcctgcttagagccaaggggttgcagcagcctgctcccatctgcagcccccaccatcctcccacagtgggctctggctctaggtgggtccagggctgggcatcgcgggtctgcagcacatcctcctcagtattccagtgcagctgtctgaagttttttctgctgcgcctgaactgatgtcatttcccccttggcagacagcttcggctttgctgcgtctgagatatgtcacgagaaggtgggggtgggccagagccaggcagggggagtagcgaggagagcaggagacagtgtgcctgctcggtcccaggactctgtttactttgtctgctttgctaaagaaggccggtgaaccaggacca

SEQ ID NO: 132646 - DNA, 568 bp, Homo sapiens
tgagtccatgtctcacatccaggtcacgctgatgcaagatgtggtctcccatggcctttggcacctatgtactgttacttgatggcaccttcagaaattgacatcaagcttagtctttgatttgctttgactaatgggatagtaacaaaattgaagcaagcagaggcctgaaaaaaaaaaaaaaaaaaaaaaaaaaaaaaaaaactgtggtggggcgcgcgccccgcggccccccggaaaagagctttttgtaagaacccaatgtgcgctgtggggccgcgcgcgggcccccagaagaggtgtagaggggcacagtgtggcgccatgaggcgggttcccaagggaagaaaccgggggtcctaggaactaaggggcgggggattttctctcccccaataaaaaaaaacgcgcccggggggaaacccagagagggggtttttgggaaacaaatcccagaaaggggaggttctaggaggggcacaataacaggggatctctttctaaaagggggagtccacaaagggggagctccgagattttcagaatttacgccccgggttgtgtgtga

SEQ ID NO: 132647 - DNA, 256 bp, Homo sapiens
attcaatttatagactcatcacactttgtcaccaaatcgggtagtacctacagctgagaaggaacattacaaagtctttgtattacggtgcttctttaccttctatttacaaagaaaagtgttggagtaagactttaactttattatggatatcaattcctgaaaaagctctgtgagttagtctctagtgcaaaattcaaagctcaaaaaatttacaagttttttgtttttgtttttaccatgataattttgatca

SEQ ID NO: 132648 - DNA, 608 bp, Homo sapiens
gaaatgtaactagaaccctgaggcctttttgttatctgatcccttagctcccacccaccttcacatctgtgactttctctcattctttctctccagccctgagactgttgttcctctgatgaaggccccacactctccgggcagccacatctctagccattttctctgcctgaaatgattggtcaattatttttccttctaataaatgcttttgcacccttaatctgcccatttaatggcctcgcttccctgctcttcagatccccccgtatgtgcctttgctgtgtggttgtgttgttccatagctccgttctgtgtgctcccctggagagggaggggccgtgtctctcctgtatgtcctgtagttaacacagggcctgtcacttggtagacactgactcaataactaactgtacattttcttttgtttaaaacaaatgaatgcttctcttagtattagacaagagcaaatattggtaaattgatattgtaggtctataggataaatacatttttaagccctttctagaacagttttacctttggtaagtatcattcagccattgctaagaggcttgcacaataaccctggctactttctttatagt

SEQ ID NO: 132649 - DNA, 225 bp, Homo sapiens
cttccttccttctttttttttaaattatcgtcttttaaatttagatggataattaagaatgcttccaatttaaggttctaagcacaaactccagatacgtcatgttatggacttgcttcctgaagatgaaatcagcagttgatggaaagaatccacaacacgcctacagaacagcaaatcacaaatggctgtgtctccacgaagccaggagctttgcatttgaag

SEQ ID NO: 132650 - DNA, 411 bp, Homo sapiens
tttgtatttttagtagagatggggtttcaccacgttggccaggctgattttaaacttctgacctcaggtaatccacctgcttcagcttcccaaagtgctgggattataggcgtgagccaccgcgcccaaccagtggcaccttttttttgtcttcctcaagggatctcagggttgtcagaagtcccatctagacccctttaagggttatcaaaggtggcaaaaggaagaagtagaaatacatggaacaaccagttttggagaagccaatttggagagattttaagcttccccaaaaggctaatgaaattttacattttcaaggcagggtgcagtagttcatgcctatagtcccagcactttgggaggctgagggaaaatgtaccacttgagcccaggagttcaagatcagcc

SEQ ID NO: 132651 - DNA, 112 bp, Homo sapiens
ctaaacaataaagggaaaaatcaaagaaagaatagtcttctaggggtgacagttggtgttttagcacctgcctttatacctgggaggcagagatcacaggtggttacatctc

SEQ ID NO: 132652 - DNA, 338 bp, Homo sapiens
aaaataaaattttgattaagcctactcataactgagattggtcttccctctaaggcatcaaatttggggaatttttattataagttatatataagaaaatgacatctttcagtgggaagtaaatgagcactttgatatctgtggaataggagtgtctccttcttaaatatttgagtgtgcacataacaacactcaatatctcttccctatattggaaccttgaggtccaatgaccagaatgtatgaacaaacagaaatcaccagattccatcccggcaataagaagggttctcataagactttcagtgcttctatcctcacatgctgtgtgagctagg

SEQ ID NO: 132653 - DNA, 224 bp, Homo sapiens
atcagaattatatggtttattaaaattttaatatggatataataatagcaaaataataactgaaattattgaggtctgaattaattgttgagacctaaggtctggcctaatcgactcaaataatttaaattgaacatcattaggcagtaaatgtgaaatcactattgttgttttattattgatagaatcactctttcttcccaaactttggagttttaataatt

SEQ ID NO: 132654 - DNA, 834 bp, Homo sapiens
gacagggagagaccagcttgcgccccggccactgggatcgtgaaggaatctcttctgagggtgaagtaagctcggctgggtcggcactactcgccctccttgaagccacctggacctgacgctcttgcccagactcttcctgcctcctgtctctgttcttcccccttctctgcctcgcaaactcctcttcatcctgcaggacacaacttctgtcaaggagttattgcattatattatcatttatccattaatgccgactgcccctgggattatatgcaccttgaggttagacttaagatgtgttggcacaattattagagtcaatcgcagtgcctggcacattaggtgctgctccagatttgtttgcagaatgaatggcttgaagtaactggacgtataaatgatcacagcatcaccgtcatcagtcactgtgcaccaagcacctcacctccatcatctcatgtaatctttacaccaaccctgcaagggagggttttaaaatcactgtcttacaagaggaaaaactgagcctggaaaggttgaaggcttgctcaaggcggaagagctggtgaatgataggaccaggtccaaaagatgttttctttcactggcatcggttctgcctcccagggcagactgtgtggcactcatctatgtacacccctcctcccaggacccagcataatatgtgcacaaaatcaaatgactgaatgagcgaatgaataaatgaatatgtaaccactgtcattttcacatcaaccacgactgagctaaattccagggccaccgtgccaagccatattggaacccaagcaaaaggaaaaatgtgcgcct

SEQ ID NO: 132655 - DNA, 688 bp, Homo sapiens
ggaagctgtatcagacttggcaaaaatcagcagttcaaactcatccatagagaaccaaattcaaaaggagcctactgcttctgtttgttttcttttgttcatcttctctggccttctctgtggagatggcaccttcacaaatggccttagaatgccgttctgaagttcaacagaatgagacaaccatcaaatgaatatcagaggtatttattattgtcacagcttacctaatattttaaagaaaaaactagtaactaatgtttacaagtccaagtagacatccagcccatgtagaatatgtaacttacacaagggtttgcatctttcttttgtaacgagtgcggtacgcagccctgtatatattttacaatgtctttacagaaaaaaaatcatttaatgtggtgttgtacaataatgcatttttctaatttttttccattaaaatctctatggcacgtttacaaatgtatcttggtctttcttcactgagaaaggttggacaagacctgctttgatgcctcgtcttcctgcctgtaaaccacattctgaaagcagagtgcaaggtggacagtcctggctgtataccctgtttgctcttggtcttcctcattgtagacaggcctactcggaggcctttcccctaacaacctcggtcaagtaaggaatttgccttaaaatacaaaactat

SEQ ID NO: 132656 - DNA, 881 bp, Homo sapiens
ggtttctctgtcgttcgtctgtctgctgtggttttcgttcttgctgtttccgatctgtcgtctctcggctgtcggtgtgcccctggttgtcgatcgtctccagtgctgctcttcgcgttgctggggtcgcccgtttccccccgtgggggttttggctcctggcccctgtaagctccgatggcgccactcactgggtttttcaagccgcgcttccccggcctttttttttggggaacccaccaccttgtatgtagccccgggtttctctgggaaccgcttggcccagctgtccctaacacaatctgggccggggccccacgagagtgttttgaaatctcttccgccacccccaaaaattttttttttttttttttttttttttttagaatatcagaggtatttattattgtcacagcttacctaatattttaaagaaaaaactagtaactaatgtttacaagtccaagtagacatccagcccatgtagaatatgtaacttacacaagggtttgcatctttcttttgtaacgagtgcggtacgcagccctgtatatattttacaatgtctttacagaaaaaaaatcatttaatgtggtgttgtacaataatgcatttttctaatttttttccattaaaatctctatggcacgtttacaaatgtatcttggtctttcttcactgagaaaggttggacaagacctgctttgatgcctcgtcttcctgcctgtaaaccacattctgaaagcagagtgcaaggtggacagtcctggctgtataccctgtttgctcttggtcttcctcattgtagacaggcctactcggaggcctttcccctaacaacctcggtcaagtaaggaatttgccttaaaatacaaaactat

SEQ ID NO: 132657 - DNA, 693 bp, Homo sapiens
tgctgggattacaggagtgagccactgcacctggccaacaaaatgatcttcgacgatgcatagatgagttagataaatgggcattgggtgccggggggaaaaaaaccccaccttacttaaagacttcatgtgcattgaagacttggaattttttttttttttttttacattttcctctttttagccacatcttatgcaacatggtagcacacagcctgagaaataaagcaaaatacaagaggtcagaagttcccctgtggaatccagggcagaaatttcacaaagaaatggagcgatttaggacaaactcctcaccccaccccctaccgttactgtttgcttgccttgattttttttttaattgttgttgtttttgagacagcctcgctctgtcacccaggctggagtgctgtggcatgatctcggctcactgcaacctctgcctcccgggtttaagcaattctcttgtctcagcctcctgatttcaagcaattctcatgcctcagcctcccgagtagctgggattacaggcacctgccaccatgcctgggtgatttttgtattttttagtagagatggggtttcaccatgttggccaggctggtctttaattcctgacctcaagtgatccacctgcctcagccccccaaagtgctgggattataggcatgagccaccgcatctggcctcctg

SEQ ID NO: 132658 - DNA, 354 bp, Homo sapiens
agttcgacggagactctcgtactgagcaggattaccatggaggatcgaaacactgcaaggatagactatttgaagatgacaatgatgtgaacatggagacaaaggcagaggtttaaatgattatagaggaaatttgcttgataatttattatatgaatatagagagaaatcacaaaaatgagatgatgaatattggaaataataagcacagacgaactgattagaaaacaaatagaactgacaaaatcaaaaagctggatcttttagagagatgctgctcagtaaggtggccacaacccacgtgaaaattaaattaaaaattcattttctcagtcgcacgagccaagtttccac

SEQ ID NO: 132659 - DNA, 521 bp, Homo sapiens
ccctacaaatctactcaagagaaatacaaataaggtccatactaacacttgtagatagcaacattacctcgtttatagcaacattattcataatagccaagccctgggaacaattcaaatgttcatcaactggtgagtggataaataaaatgcagtacatttataaaactgtatgctactcagcaatacaaaggaacaaactactgatacatgctgcaacatggatgaacctcaaaaatgttgtgctaagtgagagatgcctgacacataaaactacatatcccaagattcctcttatttgaaatttcccagacaaggcaagagacagaaagaagttcaatggctatctggggctacaggtgggaactgattgtatactggcagagagaccagcctgaccaacaaaaaaattaggtgggcgtggtggtgcatgcctgtaatcccagctgcttgggaggctgaggcaggagaattacttgaacctggcaggtggaggttatggtgagcagattgcaccattg

SEQ ID NO: 132660 - DNA, 745 bp, Homo sapiens
ggacacccgtgcacatacacacggagaaatacacccggtcacctgggaacacacgtacacgccagcctttcccccaaccactccgggacacacatccacagaccccaaaccaaatcctacacccgaatgattaatgtagggaaaacaaaggcgctcccatgacttgattttggcgacctctgaagttccacctagcagaacgtgtttgctcgatgtcttacgaccactcgggtgaggaattcggaaagtaaagccaatcttagaggctgcaggcgttttgggggcattatctgattcagacgctggctaacgtttcacaatcgcgttcccttttttcttccaacttggtaagtaaaaaggcaaaatgagaaatttaagtgctgaacttaataaatagttggtggacgtattgcttttttttttttttggtaagggatgacacatctcgtgactacagttcttttgaggaataacttttctgctagtttccaaatcggcacgtgaccacaatcttttcataggattttagcgtcctgataaaaatcaatgggcagaatttgattgcttctttaaaaatgtgtttgtccttcggtctctggcaccattgtaatggaaaatccctacattgcctgtactctcagaagctgtccagtgtagcaaaactagagataaagaaacctggaacgattcagttaggaacttttaagaagccagcctttagtttttcctttagaagattatgaag

SEQ ID NO: 132661 - DNA, 368 bp, Homo sapiens
tggagacctaagaaagtcatgaattataaaacacctaactcaaatcacgcagttggcttgcaattataagtggtattagtgaaacaagactgtgttgggagacagtcgcctatggtcctgtcatgtttccgcatgtcttatgggtagaggcagtgactactttcgttctagactaccttttcataaacatctgtataggggacagccttggaggatagagctagcatctcccaccagagcaaatggcagggatgtgtaccataagttcaaagattcagattccctaagctctagggtcctctcctggaacaaaaaacactggctgtgcaggtgacacctggctcgctcgctctcaccctgtgggaatt

SEQ ID NO: 132662 - DNA, 325 bp, Homo sapiens
tgtggtggtacatgcctgtagtgccagctgcttgggaagctgaggcgggaggatcgcttgatcccaggaggtcaaggctgcagtaagctgagattggaccactgcactccagcctgggtgacagagtgagaccctgtctcaaacaaaaacaaaaacaaaactacaagagttatatatacatacatatttacacatagacacacatacatgtatacatgcatatgcacacagacgtacatgtgtatatctaaaatgatcttcaggaatgcacagcagaccattagggtagccacctcttgtgggaagaggggtggcagatcttcat

SEQ ID NO: 132663 - DNA, 344 bp, Homo sapiens
gagactctgtctcaaaaaaataaaaaataaaaacaaaaaaactagaatgggagctttaagttaactttggttaggcattgctaaatgatggggatacattctaggaaatacttcatttaggcaactttgtcattgtgtgaacatcatagagtgtgcttacacaaacctaggtggtatagcctgctacacatcagggtaggaatagcctgttgcttctagactacagacctgtatggtattttttttttaatctccactcttgagtatgtctttttaatattcaatgtgatgaaactgaagtatgtagaaagttgcataccaaagtatgatagctgtcttgagga

SEQ ID NO: 132664 - DNA, 416 bp, Homo sapiens
tctcaaactcctggcctcaggtagatttatttttaaaaagcagtttttcagcctcagatattttgttacatagactcgtctcagggcagtaattcatgagattgaaaatacagggccgggcgtggtggctaacgcctgtaatcccagcactttgggaggccaaggcaggtggatcaagaggtcaggagattgagaccatcctggccaacacagtgaaaccccgtctctactaaaaatacaaaaattagctgggcatggtagtgggcacctgtaatcccagctactcgggaggctgaggcaggagagtggcttgaacccgggaggcagaagttgcaatgagccgagatcgtgccactgcactccaacctggtgacagagcaagactctgtctcaaaaaaaaaaaaaaaaaaaaaaaa

SEQ ID NO: 132665 - DNA, 302 bp, Homo sapiens
gcctgggtgacagagcgagactctgtctccaaaaaaagaaaaaatttaaaaaagcatagagacagcacatggatgctagcactgaaagccccctcagacactagcccatgcactgtcccatctgtcagacaggaaaatgattaattcactcattcattccttcatctaactgcaccgggttctagggatatagcagagaagaaaaatacatgcaatccctgccctcaggaatagtaagtcagtcaacatacaagaagctcttattgcccaggctggagagctcttattgcccatgctgtagt

SEQ ID NO: 132666 - DNA, 485 bp, Homo sapiens
cctcccaggttcacatcattctcctgcctcagcctcccgagtagctgggattacaggtgaccaccaccatgcctagctaatttctccgtttctttaaatactattttattccttgaacatgtttataatgatagctatttttcctgaatagaattcatattgtcttgtttctttgcctatccctaattttatgttgacaaattcacattttagataacatattgtggcagctctggattggatttttttttcctgagagctataattgtttctattattttttgttgtttatttggtgtgtttataagtatttttcctggatttaatttgcagaatctatctctattgtagtatgcagttgctagcatgcctgatgatgtcatctgctgatagatacatatgtgggttgagaaacatatgcaaaatttcggcagttttcaattctgtcctaacttttactttccactgggcccttccaggttccc

SEQ ID NO: 132667 - DNA, 484 bp, Homo sapiens
agtacaaaatgcattacttgcattctttatttctataccctttctgccaacctcactgggccctcagagctgccaattaatcctctcatgtgtcatgtccctcttagtcctctcagctgtcattctcaaacattggtactcagccttcatctttccttaactacccttgtcgtatctctgccttcccgtatgtttttagttaagaaagagaatttggaccatcaggtagtaatgccttcatctacgtatactatcctacatcaaacgagggttcacctgctctcatacttcaatatttctcttttgtttcaccatctgttaaatgataatttgtacatacatctgaattctggatcctaactctccctgtcttatcaaagaccttccacttctttcctgtattggcaacctttctctttatttgttcttttcctatcaacagtaaacatacttgaagatttgttgggagagggaatcctaaaat

SEQ ID NO: 132668 - DNA, 744 bp, Homo sapiens
atgacatggcagtgagttacttgggtttccttattatctcctgtatattctggacaggatactgaagaaagccttcaacctggaaccaccaacaggtggcgtaaacaaaaaatacccctacaaaagcctgtttgtctagccaacagacaaggacaagggtcacctaagaggcaagaatggcttttcagcaatatttgccctactacagctaagcaccaatggaaaaactgttcagttcccttatagtttcagttgagtcaagcaggcagctgatattccacatcaccccctgccatcccacagaagtaagtggcatagttctgaatccctcacctggtggtggcagcagggctgagtagggagctattcttccatctttcacctggcagagcagatgtcactctgatttcctggctatgatattaaagttgaaaccaagcagaagttgatctatcaccagcccagtggaaacaagctgtgctccagttttcccagcagggtagtgtcagtggagtccagtgatgagctgagcctccatccccattcagtatcagtgagacttaacaaggcagcacaaagtagagctagttaccactatttcacctttcctttcccacgtaagtgaggcctggcagagaggtgaacctctacccccagctgtatcaacaaggctaagccaggtgaggctattcgtacttctgctcacaatatgagtcaaccatctactctccccgcaaccctcag

SEQ ID NO: 132669 - DNA, 274 bp, Homo sapiens
gccgacataaattcaagaaagaaaagtgagcttgaggacaaaagatgctcaagatttggtgtccatgcctgtagccaggactggctttcccattagctctagcaggcacggtatctagggaccactttacttttagggtctcacaaaatgttttaattttttcatcagaagaaaaaagttgggcttaggtcaaagacactgttttcatagatgatgttaatatttttgtatttataggagcacaactgtaaaatgtaatttttaattttaattt

SEQ ID NO: 132670 - DNA, 336 bp, Homo sapiens
atggacaggcccaaatttgtggccttattaactgtggtgccctaggaagggaatgaaggaatgttttcccgaacgagtctttctgatggcagaagtggggaagcaggtgctggaggcaggacccattcacttcagctccaggaacacaggtgccatgcacagcaaaaccagctgtggcttctgccctccaggcgcaaacgtggaaactgacacatacatgattataatcaacgtgggaagtagacagtgcttctctaattggtttgtgcttccccaaattccttcagggtagggaccgcatattctatcatttgcctttcctcaatgggaagcaca

SEQ ID NO: 132671 - DNA, 156 bp, Homo sapiens
ctaaccaaaattgtactctgggctttaaacctaactagatgcgctaccaaaacatactacttttaaagccaaggtaaaaatgtggagaacgagtgagtctattattatgttgatctctgaaataaatcagggatgggcacaatgtctcatgcctgt

SEQ ID NO: 132672 - DNA, 109 bp, Homo sapiens
tgacagaggcaacagatttctgttactgagtgtcagttagtgtgcattcgggctgccgcatttgtatttgtggactctatgctgtaaggacaatctagatgaggcagca

SEQ ID NO: 132673 - DNA, 669 bp, Homo sapiens
ctagaaatgagattattgggtcaagtggtaaatgaatatgaatatctgttagctattgctaaattcctctttataggtgttgtgccattttgcactcttaccattaatgtatgagagtgcctttctctccacagctggtagtactaaaagattttgagtttttaccaacctgataggtgagaaatgtatctcagtttggttttaatgtgcatttctctatgagtgaaattaaacatcttttcatatctgtaggatcattagtatatcttttagtgagtcatttattcatgtcttctgttcatttttccatcagatttttatccttttccccttaagaatcctttatgtattaggattctgtgatatattttacagatactttctctcagtttatcattcgcccaagtcttttgatcttattatggtgtgttttgctgtacataattttttaaataatttttttcacacatgcctgcatatatattacatatgtttaagataaatgggaatatattgtacttacagtttgataatctgcctttttcacatattaaactatatccattcacatccatttgaatttcattatatcactgggccataatttatttaaataatctcctgttaatactagcatttagattattttcaggtttttgctttttataa

SEQ ID NO: 132674 - DNA, 412 bp, Homo sapiens
ccccccatctctaccaaaaatacaaaaatttgccaggcacgctggtgcctgcctgtagtcccagctactcaggagattgaggcggcaagatcgcttgagcacgggaggttaaggtttcaatgagctatgattgcaccactgcactctagcctgggcaacagagcaagaccctgtctcaaaaagtctccagccacctcttaactcatatgatactactctgttccagttcacttcatttcagctgcaatgaccttgcttactgggtgttcctcaaatattccaggcctgctctagcctcagaacctttgaatttgctgtaccctctgcctaaaatcatctatccccagataatgtacaatacaaggcttgttctttcacctgcatcaggcatttttttttttttttttttgga

SEQ ID NO: 132675 - DNA, 772 bp, Homo sapiens
ggcctttactatagcctttgaaaacaaagtattaacattattttaagcctttgagtttttgccattcagccttaaattggcatactctgtcaacaacgtcagtgtggcatattaacaagactaactgctccagaaaataggctgggctactaccagttatgtagaaggtttcattgagttctaaaatttcagagcaagaaaggtgaaacttagtctcaaaaagatatggggatcatctctgcttagtcttaattaagtgaagactttggcaccctgaaagcctaaggagtgaggtctctgttggtatactgctatttcaggttcatttgaattaatctctgaggttgttaactagatagctgtaactccaaaaagacaacttaaatgtgccggctagctatttggctactccttaaacttggcttcattttaatgtttcgatggtacaagatttttttttttcctgattccggtaaggtagaaaaggattatttaatgatttattaaaaggccagtcattagactgttcaaaaacaaactccctatttgatccgtttctgcctatcccttcagatttgactgttgtgatcttctaggtcacattctactgggtgagaaggcagttttctataatagatgcactagaagtttaatctagtgtcgtagggtaattctgaatagcagatttgggaagataggagtgttgtcactttacctttaaagcaagtctttgaattgccctgtgtcacacagtaagaatatatgcaaatta

SEQ ID NO: 132676 - DNA, 1033 bp, Homo sapiens
tccttctcccctccctgtgtatcctccttgcgtctcacttcctggatcttgcaaatatttccttcggcaataacctgggagtgtctgtttctcttggagcagtcttacttggctgctgagggaagggaaaggcgagacgggttgggcttgtgtgctgttgctactgagattctagaatgccaagctattgtggtgagcttaaaaataaagtttccaaacaagaaacttcaaaagggccgaggaagaggtaggaggagatttttcagtctctgcaaatattggttttcattttcaattcctattaggccaaaaaaaaatattttaacaaaaagggaaaatccgttcttcagaagaaaaggcaacccatggaagcggaaaagagatgaacaaccctggttttggcaggcaatttacttttgtttttgagatgtagtctccttgctgatgtcaacaaagccctttctcatagtttgctttcatgcttcctctgctttcctcagtgaggcgctaaagccttcatggacgcccgaggatgaatgtagcacaagtaccttttgctgtaccccaggagtccctgcttccctgcgattatctctcagagacagacaaggcaggtctggacactgtgctttttactagctgggaaaatgatttatcctttttaagcctcaggagtctcatctgcaaactgacaataatggttgttgtgaagattaatggaaatacatacgtgaaagtgcctaacacggggcccaacacttggcaaccagagtagtcgactgggtgcggtggctcacgcctgtaatcccagaactttgggaggccaaggtggatagatcacttgaggtcaggagttcgagaccaacctggccaacatggcaaaaaccagtttctactaaaaatacaaaaattagctaggcatggtggcacacggggaggctgaggcatgagaatcacttgaacctgggaggcagaggttgcagtcggccaagattgcgccactgcactctagactgggcaagacactgtctca

SEQ ID NO: 132677 - DNA, 186 bp, Homo sapiens
acctggtccttttgttgctgcctgaggttagttagctctctcaatgggctagggcagcagcatttccagaaatagaatttgtggacctaaacagaagctggattcatttctcttgctgtgtaacaaatgaccacaaatttagtagcttaaaacaacaccctcttattatctcacagttctccaggt

SEQ ID NO: 132678 - DNA, 163 bp, Homo sapiens
ctttagagcagtgagagaacggactgatacagcatccatcataaaaatgttttaatgaacatgatgacaactcttgaaacaaatgaaaactcaaaacaatataaagaagaaacaaatggatgggtcatgcctgtaatcctagcaattttggaggccaaggtgg

SEQ ID NO: 132679 - DNA, 468 bp, Homo sapiens
gggcatcaggcagcaaaacggctgcttttttcagagagaatcaggtgtatgcataagaccgtatgaagggcgtgactttaaagaaaaggggcccattcatacgtgagacatttacaaattcgttatttgtaaacctttgccttgatttgaagatagccaaatggtgtctatggccacaaacacattctttgccaaatataaacaacttcaaaataaaaagcgatgctgattttactgttttctcctttagaccacatcagtctcatttaagaatacgttaaaagcagacgttggatttcactttttggcactgtaactggacgtgctatcataaagtcatatctaggcaatgaatggaatgtttttcctttttttcagtcacagcacgcctggaaattggaaacaaaagcagaatgtccctgaggtccccttctatttattcctcctgaggtccccttctgtttattc

SEQ ID NO: 132680 - DNA, 824 bp, Homo sapiens
ttgctcataacaccttgttcctcacctggcttaatcctgataaaaaccgggcttttaaactggaagcccccatgtactttcaagtgggagtaccctgtgcttcggcaagaattggtttcagcaccttggagagcacctgtttccgctcccccaccaaaatagagacagggtctctctctgtcacccaggctggaatgcagtggcaccatcacagctcactgcagccttgacctcctgagctcaagcagtcctcccacctcagcctcccaagtagcttggactataggtaattgttctattttttgtagagaggaggcctcactatgttgcccaggctggtctcaaactcttggcctcccaaagtgctgagattacaggcatgagccactgcacctggcccttgcctctatttcaaagctactttggtgcctctaccttctcccttctagtctcataattttctaaagaagttagacatttctccagaaatagaagttccttcttggatttctacaaagaaatccataggtcagggacactcatcccagcttggggtgccaggtttatggtgctctggtgagctgctattgagcagatttactgactctcagacatgatataagacaattaccatgcatttcgtctcttagagggaaaagaatttgcagtgggttaatagtacttttatttcattatctaatggcaaaagtgtttcattgtgtgtgcaagaggcatgtgtattagtgatgacaaatggggtctttcaacacggtgccgggcctcatcatacatatgttagattaaagagttcaccctagaaatac

SEQ ID NO: 132681 - DNA, 362 bp, Homo sapiens
aatttttgcatgagaaaatttgcaaaaaagaatttgcaatacaatccagcctgggtgacagaacaagactccctctcaataaaaaaaaaaaaaaagaaaagaaaagaaagtaagacaacttgtgctcttatttttaaaatattatatacttctagccccatacaaatattctcagattagactaaccaattacacattggaatacctggacagttttaaaatacaactaaaactgaacagaagcatccaaaggtcaaccactgttttactggacataccttttactttgctattttatgtattttatattaaagttagacctttgaggccaggtgcagtggctcacacctgtaatcccagca

SEQ ID NO: 132682 - DNA, 377 bp, Homo sapiens
gagaattgcttgaacacaggaggcggaagttgcagtgaaccaagatcgtgccactgcactccagcctgggtgacagaacaagactccctctcaataaaaaaaaaaaaaaagaaaagaaaagaaagtaagacaacttgtgctcttatttttaaaatattatatacttctagccccatacaaatattctcagattagactaaccaattacacattggaatacctggacagttttaaaatacaactaaaactgaacagaagcatccaaaggtcaaccactgttttactggacataccttttactttgctattttatgtattttatattaaagttagacctttgaggccaggtgcagtggctcacacctgtaatcccagca

SEQ ID NO: 132683 - DNA, 6404 bp, Homo sapiens
tacgcttctagcttgagggaaagaggccgaggcctgggccaagcccggagccgccgctcgccggagcctcctggagcctccgcgccggctcagcctgggggcgggctccggtccggcccgccgccgcacccaggacggaggctgcatgcccgaggaccaggccggcgcagccatggaggaggcgtctccctattccttacttgatatctgcttgaatttcttgactactcaccttgagaagttctgttcagccagacaagatggaacattgtgtctgcaggaacctggagtattcccacaggaggtggctgatcgactgcttcggaccatggcttttcatggtctattgaatgatggaactgtgggtatttttaggggcaaccagatgcgcttaaagcgagcctgcattcgcaaagcaaagatctctgctgttgctttccggaaagctttctgccaccacaagttagtggaacttgatgccacaggtgtgaatgctgatatcacgattacagacattatcagtgggcttggcagtaacaaatggatccagcagaatctccagtgcctggtgctgaattcattaactctctccctcgaggatccttacgagcgctgcttcagccggctttctggccttcgagctttaagcatcacgaatgttctcttttacaatgaagacctggctgaagttgcctcattgccaagattagagagcttggatatttctaacacctcaatcacagacatcactgctctactggcctgcaaagaccgactcaagtctctaaccatgcaccacttgaaatgtttaaaaatgacaactacccagatactggatgtagttcgggaactcaaacatctgaatcatcttgatatctcagatgataaacagtttacatcagacatagctcttcgcttactagaacaaaaagacatcctacctaaccttgtttctctggatgtttctgggagaaagcacgtgacagataaagccgttgaagcctttatacaacaacgtccaagcatgcaatttgtaggtttgctggctactgatgctggttactctgaattcctcacaggcgaaggacatttgaaggtgtctggggaagccaatgaaactcagattgcagaagcactgaagcgttacagtgaacgggcattctttgttcgggaagctctatttcatctttttagtctgactcatgtgatggaaaaaacaaagccagaaattttaaagcttgtggttactgggatgagaaaccaccctatgaatttgccagtgcaactggctgcaagcgcctgtgtatttaacttaaccaagcaggatcttgctgcaggaatgcctgtccgactcctggctgatgtgacccatttgctgctcaaagccatggaacattttcccaatcaccagcagttacagaagaattgcctcctttcactttgcagtgaccggatccttcaagatgttccatttaacaggtttgaagcagccaagcttgtcatgcagtggctttgcaaccatgaggatcaaaacatgcaaaggatggcagttgctatcatttctatcctggctgccaagctttctacagaacaaactgcacagcttggtactgagctcttcattgtcaggcaacttcttcaaatagtgaagcagaaaaccaatcaaaattcagtggacactacattgaaatttactttgagtgcactttggaacctcacagatgaatctccaaccacttgtagacactttattgaaaaccaagggttagaactcttcatgagggttctagagtctttcccaactgagtcatccattcagcagaaagttctaggacttttgaacaatatagctgaagtacaagaattacattctgaattaatgtggaaagattttatagaccacatcagtagtctcctacacagtgtggaagtggaagtcagttactttgcagctggaattattgcccatttaatatccagaggtgaacaagcttggacattgagtcgtagccagaggaattctctgctggatgatttgcattcagctattttgaaatggccaactccagagtgtgagatggtagcatacaggtcctttaatccatttttcccattacttggctgtttcacaacaccaggagttcagctatgggcagtttgggccatgcaacatgtctgcagcaagaatccttcaaggtattgcagcatgctgattgaagaaggaggattgcagcatttatacaacatcaaagatcatgaacatactgatccccatgtccaacagattgctgtggccattctggatagcttagaaaaacacattgtgcgccatgggaggccacctccctgtaaaaaacagccccaagccagactaaattgatagccataagtattggatagttgaatcacaggaatcctttttgtgattggtccatttggaatatcttaccctccctgatgttttgggggtttctatgacaagagtcataaaatcagtttgggattgataatgtgtagtactgcccatgtgaacagtctctaatttgtcttgtgattttaaacttatgagtcaagaagggtctcttcctttatcattgccttttaggaaattttccacatctttcagtgtttgaacttacttgtgcttgagattctacagttttatggtaaagtttgcacgaacccttaggccagacttttctgatctcagagtcccttccaatcaatttgcagcttcacataagctgttgacctgatttctgacactgcttcagttgtaaattttatactgcttctgtataaaatgcctttcttctctatctgtgtatattttataagatgtccttcttagtgtgaaagaagggaaatgtggatcatcttgtggaagctaatcactggcaggagcctggatggctggcggaaagatatatgagaaagaaaaattatgaaggtagaacagagtgtaggaactgggaattggtttcatggtataggttttaaaatgagacaggctacccttcgggagtccacctctcttgaggcggtgagcagaagcttgtcctccatatttatacctagaagtgtggactgctggttcctgcacagactgccggttattcactaggaatatttccccaagcaccacagtataaaatactacagcactctgtgttaaagactaactgtctacatctccatatgttgtagtgttgtgaaaatgtgattttaaaaaattatcgccagttaaaactggctattcttttcctctatttcaaagtcatttttgttcagtggaatagagacagcaacatggtgttaacctctcaattaaaatacaattgacaccagtaaattttgccataaaaagttaaaatctcttgttcaaaatatgtgtatcttcttaatgtgttcatgttagagaaagtgtccccatctcactgccaaaaatgaaagaaaataattaaactctttaaatgattaaatgtaatgattctactcgcagtgcataacagcacatatttttgacagattattttttaggcaattacctttccttaaggtatctgatacagtatagtaaagaatcacttatatcagtaatagcacttgagagatagcaagtcaccaagaaacttaattttcatttaaaattttattttgtgaataaggtcaatctacaatcccagataactacattttttttcatagatggccagtgttttcaacagagatttaaaatggaatattaaaattatagtgattattcagaagcattttaatttagaaaggagctggtttgttagttcactgatgacattttttgacaaacattttataccattatcacaataatcagacttgaattttttttggagttccttcatgtgaatgaaaactgagttaaaagaaagtaggcatttaggtctggatgcagtggctcgtgcttgtgatcccagcactttgggaagctgaagcaggaggattgcttgagcccggaagttcgagactagcctgggcaacatagtgagactcggtctctaccaaaaaaaaaaatttttttttttttaaattagctgggtgtggtggcacctgggaaacagagcgagacgctgactcaaataaatatctaaatagatatttagaatcactgaaaaccatattaaatgctgggttaatgctgacttaattggcttaaggaatttttataggcgtaagataaattttcacagactaagtttatttcagacaaaatagagaattcttttaaaagtttttttttttttttcctttttcgaatgttaatgtctaagacaaagttcagaaaacgagatggcctgtggtagtttggaaattgctagatatgttgaccgtttccaggtcttttatctagtgtagttaagggaaagcctatttaagaagtttggcttcaagtttctgttttataagacaaaagtgcatatttctttacaggctaatgctaggtttttgtctttacaaattattttcagaaatggctaaaagtgtacagaaaacagtaaatcccttctttactcagaataacttcttaatagttgaagcatccaaaatatgtaaaagcaagggtgggcgtagtggctcttgcctgtgatcccagcattctgggaggccggggcgggcagatcacttgagatcaggagttcgagaccaccctggccaacgtggtgaaaccccgtctctactaaaaatacaaaaactagctgggcatggtggcttttttgcacgcctgtggtcccagctactcgggaggctgaggcacgagaatcacttgaacccaggaagtggaggttgcagtgagctaggatcgtgccactgcactccagcctggacaacggagtgagactctggggaaaaaaaaaattaaacttcctactttttttctttttgtagagacggagtttcactctgtcgcccaagctggagtgcagtggcacaatcatacctcactgcagcctcttgggcttatgtgatcttaccccctcagcctctggagtagctggaactacaggctaaatttcctactttgtaaacatcagtagtggccagatacttctgagtcttaaaagcataataggccgggcgcggtggctcacgcctgtaatcccagcactttgggaggccgaggtgggtggatcacaaggtcaggagttcaagaccagcctggcccaaatggtgaaaccctgtctctactaaatatacaaaaattagctgggtgtggtggcgggcacctgtaatcccagctactcaggaggctgaggcaggagaatcgcttgaacctgggaggtggaggttgtggtgagccaatatcatgccactgcactccagcctgggtgacggagtgagactccgtctcaaaaaaaaaaaaagcataataatttattacatcccaaatatataaaaatttgagtgcctttgcagttgggatggttcctaaaattgcgtatagaattaaggcacagaattgtgtgtaaggtcctgaatctggctaaaatacagtggatgtatgtattggaattatgaggcataagtagccagtatctatagttagaatctacaaggcctcctttttgcacctgtagactagaatataactgttattggtgcctttgagtgttatctctcagtggctagaggtgctgtttcaagcacaatttagactagggttgaaccactcattgttcaaatcattggtgggctccaatgtaaaatatcactacatcagtccacaagcaacattaaggaaatctaaaggaaatggaatttgactttttagagtataatgatgttctagggcataatgaggaaaatttttaaaaaatagattataatgatacatattggtatcattaagacaacagatttgagcaaatacaattaaggtgtcttattttttgcatcaagtaattattgctgtggtctttctactccacaaaataattttttctttttgcagttgaaaattaactgcattattaactaattaataaaataaatcaagtggtataagggattagtttaccctcaagccgatgactccatggctactgatattagttagtttaggatttttaaaaagcatatcagacccccagtttcaggaattgagtataaatattgcttcttgtcaccctgggacagtaatgccttatagtggcactagtcaccttaagtagattacacatggttgaggtgaataaagctgcatgggaatttgctttcgtgatatatttcatttgcaaacttctacataatcaagttttatgtttaaaaccatcggttctatatatctagctttaggaagttgcccttacaggtgggaccttttgtgttaatctgttttctccccagtcatcttatttggctatgtt

SEQ ID NO: 132684 - DNA, 2218 bp, Homo sapiens
tacgcttctagcttgagggaaagaggccgaggcctgggccaagcccggagccgccgctcgccggagcctcctggagcctccgcgccggctcagcctgggggcgggctccggtccggcccgccgccgcacccaggacggaggctgcatgcccgaggaccaggccggcgcagccatggaggaggcgtctccctattccttacttgatatctgcttgaatttcttgactactcaccttgagaagttctgttcagccagacaagatggaacattgtgtctgcaggaacctggagtattcccacaggaggtggctgatcgactgcttcggaccatggcttttcatggtctattgaatgatggaactgtgggtatttttaggggcaaccagatgcgcttaaagcgagcctgcattcgcaaagcaaagatctctgctgttgctttccggaaagctttctgccaccacaagttagtggaacttgatgccacaggtgtgaatgctgatatcacgattacagacattatcagtgggcttggcagtaacaaatggatccagcagaatctccagtgcctggtgctgaattcattaactctctccctcgaggatccttacgagcgctgcttcagccggctttctggccttcgagctttaagcatcacgaatgttctcttttacaatgaagacctggctgaagttgcctcattgccaagattagagagcttggatatttctaacacctcaatcacagacatcactgctctactggcctgcaaagaccgactcaagtctctaaccatgcaccacttgaaatgtttaaaaatgacaactacccagatactggatgtagttcgggaactcaaacatctgaatcatcttgatatctcagatgataaacagtttacatcagacatagctcttcgcttactagaacaaaaagacatcctacctaaccttgtttctctggatgtttctgggagaaagcacgtgacagataaagccgttgaagcctttatacaacaacgtccaagcatgcaatttgtaggtttgctggctactgatgctggttactctgaattcctcacaggcgaaggacatttgaaggtgtctggggaagccaatgaaactcagattgcagaagcactgaagcgttacagtgaacgggcattctttgttcgggaagctctatttcatctttttagtctgactcatgtgatggaaaaaacaaagccagaaattttaaagcttgtggttactgggatgagaaaccaccctatgaatttgccagtgcaactggctgcaagcgcctgtgtatttaacttaaccaagcaggatcttgctgcaggaatgcctgtccgactcctggctgatgtgacccatttgctgctcaaagccatggaacattttcccaatcaccagcagttacagaagaattgcctcctttcactttgcagtgaccggatccttcaagatgttccatttaacaggtttgaagcagccaagcttgtcatgcagtggctttgcaaccatgaggatcaaaacatgcaaaggatggcagttgctatcatttctatcctggctgccaagctttctacagaacaaactgcacagcttggtactgagctcttcattgtcaggcaacttcttcaaatagtgaagcagaaaaccaatcaaaattcagtggacactacattgaaatttactttgagtgcactttggaacctcacagatgaatctccaaccacttgtagacactttattgaaaaccaagggttagaactcttcatgagggttctagagtctttcccaactgagtcatccattcagcagaaagttctaggacttttgaacaatatagctgaagtacaagaattacattctgaattaatgtggaaagattttatagaccacatcagtagtctcctacacagtgtggaagtggaagtcagttactttgcagctggaattattgcccatttaatatccagaggtgaacaagcttggacattgagtcgtagccagaggaattctctgctggatgatctggtaggtcattccataccacacacgacattctaggggttaactaacaaagcctctatgtaggaaataacgccggcaaatcacatattggatcccttaacacaaaaaaagggggcgcgcaaaattccccgggcccagataggtacccgtttgtgaaagggcctagggcggttaaacagcagc

SEQ ID NO: 132685 - DNA, 509 bp, Homo sapiens
caaggattggcctttcagaggtactacagggatagtagcctctggtccagggctggagccatcggtctctcctgtttcttgcagtccagtgggctctgtggcataaagcttgccactcggcggttgtgggattagaccagatgagactgactgacgagctctgcctctggccgaggactagagctgtccatctttcctgtttcctgcagtccaatgggctttgtggcgtaaagcttgccacctgggggttgtcgaacttgaccagatgagacttaccgacaagctcccaaatcagccaggagcaccaggcttcgctgtgatatgaggcaggatttttccctggtgtctccctgcctcttgatcccagtaccaggcttcatgccatagtcagtgcagatattgtgggtgatatgtttgtttcataaccgttcctaaatatagagtgcatgctaagtgatatctagaagccatgtaaaagaaaacgtttgaaatgtttgcaaagaggatga

SEQ ID NO: 132686 - DNA, 508 bp, Homo sapiens
tcattcatctgcaccctcccttattgagcatctttgaggtcagtggggtatcatgcctccgtctcagttctgggctgcaaggtaactgaacagccttgggcaaggagccccagggacacctctgctgccccagtttccctcttcagaaacggacggaggggatgtgtcaggcactgcgctggcacgaagagggtgggatggagaactgtgaattctaccttcaagggggaggcaaacccacatggacagagaagacacaggaacagggcccagcggcacaggggagacttggctgatttccagcatgggaagcagatgcccctgcagtggtagagacactggagcaagatggttacagggccccagagacagactcagccctccaagcctgtgggaggggagggccactctactggggggcccatgaccacagagggggcagggcctggctgggtgggcgctgctgggctcacatctcaggggcaggtctgaggcagtctgggagcgt

SEQ ID NO: 132687 - DNA, 483 bp, Homo sapiens
tctctcctgctccatctgcactatagaagtgtaataattagacatacttggcaaaatggctaattgatttggtaacagaagcatgagccataacaatggaagatctagttatcatgactgaacagcttaacattcaattcccttctctaagagaagctgtgaaatcctacatattatttaaagttaaccaaatcaatgtaaagggagttaggagacagtgtgtacctatgcacgtatatttatgttttgcttgtgttccagtctcggtcatttgtttccattttcaagcaatttatttgaagagccattgcactagcctgatgtatactgcaatgagcttctttgataaaatgaaacttagatttttctcgaccatttcaccgtgcctcctacttcattttttgccagaaaatctcacatccaacaaaacaaaacaaaaaccctgaattagtgggctttgaaaaggaaaaagcagggctttga

SEQ ID NO: 132688 - DNA, 258 bp, Homo sapiens
ctcctacttctgcttaaattccaccgggtatcacagtgtcctgagtcactgtctgcttgaccaccactcccccaccccagcctcttggaggccccaggagaggcactgctattaatagtaggggaccaataggtacattggaggtgggaatgggaagggcttctcaagaatagcccttcctggatgacagccacctcatggggggtacagccacaaggaaacttaggtcttgaataaggtggaggcagcaggtacagg

SEQ ID NO: 132689 - DNA, 668 bp, Homo sapiens
agagtctcacaatttggatttgtctgattgtttcttcatgatttagtttgtgtattcttttcagcaaatcatatctggaggcacataatgtcagtttatgccatgattggggatgtttgatcactcggttaaggcattgtccgccagatttatccacagaaatgcaccttttcccctttgaataataagtaatatgtgagtagtactttgagactaaatgctgttccccaacaactgtcacctaatggttttagtagctgtgatgatccttgtctgagtctactctctttatttttgagattgtgcatctttggccaagactttatatcctatatttagatgagagttttaaatatatagtaacctgctgattgaaacctgatttttatatttagtaagtagatcctttctctaccttctcctttattccctcccttacccttttcccctcctccattctctgttcttcctattgtaatatgcagtgatttggctgtgacataaagattaatggcggattgtcttcccagaatactatcatctctatgttgcctgggcacatttttccttgtttgcttctttgtgagccaaatgcttttattctttctgttctcttcccatctgtttaataatgtgattttttaaaaagagaattggcttcctgattg

SEQ ID NO: 132690 - DNA, 624 bp, Homo sapiens
tctcttctaaggacacagcatttgatatagggctcacccaagtattctaggttgattttatctcaaggcttttaatctacatctgcaaagatccttttgtccaaatcaggtcagattcatgggttcaaggatttggatgtaaacttatcttttgggggcccccatttgacccactgcacccccagaatagactggcacttctcaatttttagagcagtaatgtctaagcattaatgtgtgaatcacctagtgattttgatacaattcaagttctgactctgggtgtgagtagcgcctgaggttctgcatttctaacaagctcccaggtcacactgatgctgaggtaggtggcccacattttgagtagcaaggtgagccaaaatgtgtagctgtgtgatccccagagcagtcgcagcagcaccgcctgggagtttgttgtaataggaatgcccaggccccacctggacctgctgagtccaaatctgcactgcaacaagatcctcatgcgctctggttgcatgttaaaggctgagaagcgctgatctagtctagaaggtttttttatcttcatgctttatacccaagacccctcttgatcacattctgcaccctatcttcgtggag

SEQ ID NO: 132691 - DNA, 346 bp, Homo sapiens
caggctgagaaaatgggagtggcattgagtcaaggaagcaaaatatgaacaaaagcccagaattaaaagcagaagaaagagaaggaactggagccaggcgtggtggctcaggcctgtaatcccaacactttgggaggctgaggcgggcagatcacctgaggtcaggagttcgagaccagcatggccaacatggtgaaacctcgtctctactaaaaatacaaaaattagccaggcatggtggcacatgcctgtaatcccagctagtaggtaggctgaggcagaagaattccctgaacctgggaggcggaggttgcagtgagccaagatgttgccactgcactccagt

SEQ ID NO: 132692 - DNA, 223 bp, Homo sapiens
taaaagccaaaggaatgggtatgtttagagagaggccggaggttagcactgagatgggtcacacagctttccaggattcagggtaaacatctgcgtctggacctatttcatgatttcaaaatagttcgccctataatagttcattaagccataggtttcttttgtatagttctcctgtaactgccttttattttacaataaaaattttgaaaactatttcaga

SEQ ID NO: 132693 - DNA, 539 bp, Homo sapiens
tagggcggcgctacaacggggtctgtgctctagccgtgcctgcagggaaagggcacatctcgatctgaacagatattcctgttgggctctgaggtgtgcaggctggcaccagtcttgcccgacaggaatcgtggcccccgctgcaaccgagacagctcgcccacgcaccctggttagccctgagggagaatgctaagatccttgctaacccagatggcccagccaagccttatttatttatttatttttttgagttgagatggtctggctctgttgcccaggctggagcgcagtggagcaatctcagctcactgtaacctccgcctcctgagctgaagccatcctccatcctcagcctcctcagtagctgggactacaggcgcccgccaccacgcccgggctttatccatcttcaaacccagtaatggcccatggaatgcttctcatgcctcaaatctctttgtcttcccattctgctacctgactgtaaagttctcacatgaactgtgccacaatacacatatcaaagacttggaacc

SEQ ID NO: 132694 - DNA, 390 bp, Homo sapiens
tagccaggcatgttggctggtgcctgtaatcccagctacttgggagcctgaagcaggagaatcgcttgaatctgggaggcagaggctgcagtgagcccagatcacagcactgtactctagcctgggcgacagagtgagactctgcctcgacaacaacaacaacaatattaaaaaaacctgaactagttatttcctactcgcctcctggaatggctaataaaataaacactaaagctttgcagtccccaaaaagaccatgaagccctgagagtaatggaaaggttcctgaaattgaggtcactgtggaagcctcagccgagatgtctcaccccactctctctgatgcaacaagaagcccctggggaacgtttcagtcccactctgtacttc

SEQ ID NO: 132695 - DNA, 462 bp, Homo sapiens
tccctgcagagactctcaaagcttctctcttctccctgacatctctgcaaaccccctgctgactctcagctaaagagcttgcctcctgcttcacagagaaaatagatgtatacatggcattgctgtctaacccagagaagctcatcaaagcaaaaagctgagagtttctctcaattcctttctctccttcagccagcttcgatcatccaccaggtcctatcccattgtgctacttgggtctctctttagtgggtatgcctctctccatccctgtagctactatcttagagcaaaccactcttatttttcttctgcgtaattgtggcattctcctgaatgttcttttctgtctcgcttgctccccaatttattctctatactgcattctcaaggatattttaaaaatacaaaatgttacttccttgcttgaaactcttcagtgactccccaggtgcattatca

SEQ ID NO: 132696 - DNA, 1069 bp, Homo sapiens
  misc_feature (910)..(910): n is a, c, g, or t
aagcagatgttgagccccgcctgctcctgggggtgggggcacagctgacttcaggagcccagcttgagccacctctcacagcggccttggtgaggggggctcacctgtggggggctcacctgtggagggcatccccagacttgggagtgggtggcatatgggccagggtcagggcgttagggcttggagaaaggttagggttggggttggggttagagccacggtgatggtcagggcatatgggctagggttagggcgttggggtcagggccatgggttctggctagcactgtggagacagccgtttctatcacgaagcgatggaagattccgccgttccaaccccagattcgagggaggcaggggtgtggacggtgccacacctcaatcctcacagcctctgtctcccactgcccaggctggcgaagaagtcctggtttgggaacttcatcagcctggagaaggaggagcagatcttcgtggtcatcaaagacaaacctctgagctccatcaaggctgacatcgtgcacgccttcctgtcgattcccagtctcagccacagcgtcatctcccaaacgagcttccgggccgagtacaaggccacgggggggccagccgtgttccagaagccggtcaagttccaggttgatatcacctacacggagggtggggaggcgcagaaggagaacggcatctactccgtcaccttcaccctgctctcaggccccagccgtcgcttcaagagggtggtggagaccatccaggcccagctgctgagcacacacgacccgcctgcggcccagcacttgtcagacaccactaactgtatggaaatgatgacggggcggctttccaaatgtggtaagaatcccccacgctcacctggcacctccacctgccacttcaccgntcaccctcagcccgctgtggccgccacctgccgcccgggttgtcccggcctccctgtgtagatgtaggcacccagcagcccagatgtccccggccccatcctctaccaggagcagcccaggtcgctcccctaccacagcaagcccaggcggggttcctg

SEQ ID NO: 132697 - DNA, 2196 bp, Homo sapiens
  misc_feature (1266)..(1266): n is a, c, g, or t
  misc_feature (1279)..(1279): n is a, c, g, or t
gggcgcccctggccggcgctgggccccagagcgatgacatcgacggggaaggacggcggcgcgcagcacgcgcagtatgttgggccctaccggctggagaagacgctgggcaaggggcagacaggtctggtgaagctgggggttcactgcgtcacctgccagaaggtggccatcaagatcgtcaaccgtgagaagctcagcgagtcggtgctgatgaaggtggagcgggagatcgcgatcctgaagctcattgagcacccccacgtcctaaagctgcacgacgtttatgaaaacaaaaaatatttgtacctggtgctagaacacgtgtcaggtggtgagctcttcgactacctggtgaagaaggggaggctgacgcctaaggaggctcggaagttcttccggcagatcatctctgcgctggacttctgccacagccactccatatgccacagggatctgaaacctgaaaacctcctgctggacgagaagaacaacatccgcatcgcagactttggcatggcgtccctgcaggttggcgacagctgttggagaccagctgtgggtccccccactacgcctgccccgaggtgatccggggggagaagtatgacggccggaaggggacgtgtggagctgcggcgtcatcctgttcgccttgctggtgggggctctgcccttcgacgatgacaacttgcgacagctgctggagaaggtgaagcggggcgtgttccacatgccgcactttatcccgcccgactgccagagtctgctacggggcatgagcgaggtggacgccgcacgccgcctcacgctagagcacattcagaaacacatatggtatatagggggcaagaatgagcccgaaccagagcagcccattcctcgcaaggtgcagatccgctcgctgcccagcctggaggacatcgaccccgacgtgctggacagcatgcactcactgggctgcttccgagaccgcaacaagctgctgcaggacctgctgtccgaggaggagaaccaggagaagatgatttacttcctcctcctggaccggaaagaaaggtacccgagccaggaggatgaggacctgcccccccggaacgagatagaccctccccggaagcgtgtggactccccgatgctgaaccggcacggcaagcggcggccagaacgcaaatccatggaggtgctcagcgtgacggacggcggctccccggtgcctgcgcggcgggccattgagatggcccagcacggccagaggtctcggtncatcagcggtgcntcctcaggcctttccacagcccactcagcagcccccgggtgacccctcacccctcaccaaggggcagtcccctccccacccccaagggacacctgtccacacgccaaaggagagcccggctggcacgcccaaccccacgcccccgtccagccccagcgtcggaggggtgccctggagggcgcggctcaactccatcaagaacagctttctgggctcaccccgcttccaccgccggaaactgcaagttccgacgccggaggagatgtccaacctgacaccagagtcgtccccagagctggcgaagaagtcctggtttgggaacttcatcagcctggagaaggaggagcagatcttcgtggtcatcaaagacaaacctctgagctccatcaaggctgacatcgtgcacgccttcctgtcgattcccagtctcagccacagcgtcatctcccaaacgagcttccgggccgagtacaaggccacgggggggccagccgtgttccagaagccggtcaagttccaggttgatatcacctacacggagggtggggaggcgcagaaggagaacggcatctactccgtcaccttcaccctgctctcaggccccagccgtcgcttcaagagggtggtggagaccatccaggcccagctgctgagcacacacgacccgcctgcggcccagcacttgtcagaaccccccccaccagcgccaggactaagctggggtgctgggcttaagggccagaaggtggccaccagctacgagagtagcctctgacgctggcagacaccactaactgtatggaaatgatgacggggcggctttccaaatgtgacgagaagaacgggcaggcggcccaggcccccagcacgcccgccaagcggagtgcccacggcccactcggtgactccgcggccgc

SEQ ID NO: 132698 - DNA, 2381 bp, Homo sapiens
agctaggtacgaggctgggtttgaatcggccgaggggagagcccggctggcacgcccaaccccacgcccccgtccagccccagcgtcggaggggtgccctggagggcgcggctcaactccatcaagaacagctttctgggctcaccccgcttccaccgccggaaactgcaagttccgacgccggaggagatgtccaacctgacaccagagtcgtccccagagctggcgaagaagtcctggtttgggaacttcatcagcctggagaaggaggagcagatcttcgtggtcatcaaagacaaacctctgagctccatcaaggctgacatcgtgcacgccttcctgtcgattcccagtctcagccacagcgtcatctcccaaacgagcttccgggccgagtacaaggccacgggggggccagccgtgttccagaagccggtcaagttccaggttgatatcacctacacggagggtggggaggcgcagaaggagaacggcatctactccgtcaccttcaccctgctctcaggccccagccgtcgcttcaagagggtggtggagaccatccaggcccagctgctgagcacacacgacccgcctgcggcccagcacttgtcagacaccactaactgtatggaaatgatgacggggcggctttccaaatgtggaattatcccgaaaagttaacatgtcacctccacgaggccatcctctgtgaccgaaggcagctgctgcggacccgccctccctccgctcctgctgttgctgccgggcagtgaggcccagcccagcgccccgtccaccccgcggcagctcctcgcctcagctccgcacggcccgtgggaggaaggccaggctcgggggagcctcctccagcccggccgacccggactcccggtcacctgacccctcagcaagaacagcctgcctggtggccttctggggccaggacccccggtgggcaacgtagccacaggaacaggccccgtccaccgcctccacgccgcacctggaggcctcctcgcaggcccgtgccccgcctccctggccgcgccgcctccgtgtagtcttggcctcctcaggctgcctcccgtcctctcgtctcacccgcgcctcccttgcctcatctggggcggctgtgggctctggcgctcctctctggctgaggtggaaacagagacaccctgtggcaccagagccttcccagcaggccaggccgctgggctgggatcagtgttatttatttgccgttttaatttatggattctccgcacctctgttcagggaagggcggcggccacatcccctgccgtctgcgcgtctcaggcagtgggggggctggggccagggcgccctctgaggacagagctggtggggcgcgggggggctggcgagctactgtaaactttaaagaattcctgcaagatatttttataaacttttttttcttggtggtttttggaaaagggtgtgggggtgggggcgccgctggggcagggccaggttttgtgttttagtcccttgctcctgcttctttctacacacacatctaaagacggtgcggctcgctctgtcatgggttccgtctctctctgtggagaagcagctccacctctgggggggctcggggcagaggggcggtgtctcgtagcgggcggcagcgccagtccccctctgtcaggctggggcaatcttggttttgtgtccaaaggtgaaggggtaggaggagggccctcagctggccctccccacacacaggacggcaggggcactgtgaggcttttcttattaaaatgaaaaaattgaaaaaaaaggacaaagagtcggtggcgctcctctgcagggcgttctgtgcagagcgaggcccagggcgcactcaggagggctcaggccaccctgcccagtgcccgccgccgtgcttcaccccagctccagcttctgtgttcccttccgcccatgtgcccagccctcccaggcgggcacagcccgggtgcggcggccgtgggggacggcgggtctgatgcatgcctctgccatggagtcgtctgtctgcttcggtgcctgcccctgcctcccacccacctcgtgtatagattttaacgcttctgttaacattagacctctgccacaggctgggatttctatacataagaacaaaagcaaacacctaggacagcaaacgccaggcggtacaggcgggaaggggctctccacggagatcgaggacacgaagcaaactgcctcttgcttgccttccccttttgtgcttcggacacacgcggactccagcaggcgccacggaaatgggcaagcccctgcagtgtacccctgtcataactgtgagcagctgcagctccggaacaataaatcccttccgcaaagac

SEQ ID NO: 132699 - DNA, 3668 bp, Homo sapiens
  misc_feature (1266)..(1266): n is a, c, g, or t
  misc_feature (1279)..(1279): n is a, c, g, or t
gggcgcccctggccggcgctgggccccagagcgatgacatcgacggggaaggacggcggcgcgcagcacgcgcagtatgttgggccctaccggctggagaagacgctgggcaaggggcagacaggtctggtgaagctgggggttcactgcgtcacctgccagaaggtggccatcaagatcgtcaaccgtgagaagctcagcgagtcggtgctgatgaaggtggagcgggagatcgcgatcctgaagctcattgagcacccccacgtcctaaagctgcacgacgtttatgaaaacaaaaaatatttgtacctggtgctagaacacgtgtcaggtggtgagctcttcgactacctggtgaagaaggggaggctgacgcctaaggaggctcggaagttcttccggcagatcatctctgcgctggacttctgccacagccactccatatgccacagggatctgaaacctgaaaacctcctgctggacgagaagaacaacatccgcatcgcagactttggcatggcgtccctgcaggttggcgacagctgttggagaccagctgtgggtccccccactacgcctgccccgaggtgatccggggggagaagtatgacggccggaaggggacgtgtggagctgcggcgtcatcctgttcgccttgctggtgggggctctgcccttcgacgatgacaacttgcgacagctgctggagaaggtgaagcggggcgtgttccacatgccgcactttatcccgcccgactgccagagtctgctacggggcatgagcgaggtggacgccgcacgccgcctcacgctagagcacattcagaaacacatatggtatatagggggcaagaatgagcccgaaccagagcagcccattcctcgcaaggtgcagatccgctcgctgcccagcctggaggacatcgaccccgacgtgctggacagcatgcactcactgggctgcttccgagaccgcaacaagctgctgcaggacctgctgtccgaggaggagaaccaggagaagatgatttacttcctcctcctggaccggaaagaaaggtacccgagccaggaggatgaggacctgcccccccggaacgagatagaccctccccggaagcgtgtggactccccgatgctgaaccggcacggcaagcggcggccagaacgcaaatccatggaggtgctcagcgtgacggacggcggctccccggtgcctgcgcggcgggccattgagatggcccagcacggccagaggtctcggtncatcagcggtgcntcctcaggcctttccacagcccactcagcagcccccgggtgacccctcacccctcaccaaggggcagtcccctccccacccccaagggacacctgtccacacgccaaaggagagcccggctggcacgcccaaccccacgcccccgtccagccccagcgtcggaggggtgccctggagggcgcggctcaactccatcaagaacagctttctgggctcaccccgcttccaccgccggaaactgcaagttccgacgccggaggagatgtccaacctgacaccagagtcgtccccagagctggcgaagaagtcctggtttgggaacttcatcagcctggagaaggaggagcagatcttcgtggtcatcaaagacaaacctctgagctccatcaaggctgacatcgtgcacgccttcctgtcgattcccagtctcagccacagcgtcatctcccaaacgagcttccgggccgagtacaaggccacgggggggccagccgtgttccagaagccggtcaagttccaggttgatatcacctacacggagggtggggaggcgcagaaggagaacggcatctactccgtcaccttcaccctgctctcaggccccagccgtcgcttcaagagggtggtggagaccatccaggcccagctgctgagcacacacgacccgcctgcggcccagcacttgtcagaaccccccccaccagcgccaggactaagctggggtgctgggcttaagggccagaaggtggccaccagctacgagagtagcctctgacgctggcagacaccactaactgtatggaaatgatgacggggcggctttccaaatgtggaattatcccgaaaagttaacatgtcacctccacgaggccatcctctgtgaccgaaggcagctgctgcggacccgccctccctccgctcctgctgttgctgccgggcagtgaggcccagcccagcgccccgtccaccccgcggcagctcctcgcctcagctccgcacggcccgtgggaggaaggccaggctcgggggagcctcctccagcccggccgacccggactcccggtcacctgacccctcagcaagaacagctgcctcccgtcctctcgtctcacccgcgcctcccttgcctcatctggggcggctgtgggctctggcgctcctctctggctgaggtggaaacagagacaccctgtggcaccagagccttcccagcaggccaggccgctgggctgggatcagtgttatttatttgccgttttaatttatggattctccgcacctctgttcagggaagggcggcggccacatcccctgccgtctgcgcgtctcaggcagtgggggggctggggccagggcgccctctgaggacagagctggtggggcgcgggggggctggcgagctactgtaaactttaaagaattcctgcaagatatttttataaacttttttttcttggtggtttttggaaaagggtgtgggggtgggggcgccgctggggcagggccaggttttgtgttttagtcccttgctcctgcttctttctacacacacatctaaagacggtgcggctcgctctgtcatgggttccgtctctctctgtggagaagcagctccacctctgggggggctcggggcagaggggcggtgtctcgtagcgggcggcagcgccagtccccctctgtcaggctggggcaatcttggttttgtgtccaaaggtgaaggggtaggaggagggccctcagctggccctccccacacacaggacggcaggggcactgtgaggcttttcttattaaaatgaaaaaattgaaaaaaaaggacaaagagtcggtggcgctcctctgcagggcgttctgtgcagagcgaggcccagggcgcactcaggagggctcaggccaccctgcccagtgcccgccgccgtgcttcaccccagctccagcttctgtgttcccttccgcccatgtgcccagccctcccaggcgggcacagcccgggtgcggcggccgtgggggacggcgggtctgatgcatgcctctgccatggagtcgtctgtctgcttcggtgcctgcccctgcctcccacccacctcgtgtatagattttaacgcttctgttaacattagacctctgccacaggctgggatttctatacataagaacaaaagcaaacacctaggacagcaaacgccaggcggtacaggcgggaaggggctctccacggagatcgaggacacgaagcaaactgcctcttgcttgccttccccttttgtgcttcggacacacgcggactccagcaggcgccacggaaatgggcaagcccctgcagtgtacccctgtcataactgtgagcagctgcagctccggaacaataaatcccttccgcaaagac

SEQ ID NO: 132700 - DNA, 2418 bp, Homo sapiens
aagcagatgttgagccccgcctgctcctgggggtgggggcacagctgacttcaggagcccagcttgagccacctctcacagcggccttggtgaggggggctcacctgtggggggctcacctgtggagggcatccccagacttgggagtgggtggcatatgggccagggtcagggcgttagggcttggagaaaggttagggttggggttggggttagagccacggtgatggtcagggcatatgggctagggttagggcgttggggtcagggccatgggttctggctagcactgtggagacagccgtttctatcacgaagcgatggaagattccgccgttccaaccccagattcgagggaggcaggggtgtggacggtgccacacctcaatcctcacagcctctgtctcccactgcccaggctggcgaagaagtcctggtttgggaacttcatcagcctggagaaggaggagcagatcttcgtggtcatcaaagacaaacctctgagctccatcaaggctgacatcgtgcacgccttcctgtcgattcccagtctcagccacagcgtcatctcccaaacgagcttccgggccgagtacaaggccacgggggggccagccgtgttccagaagccggtcaagttccaggttgatatcacctacacggagggtggggaggcgcagaaggagaacggcatctactccgtcaccttcaccctgctctcaggccccagccgtcgcttcaagagggtggtggagaccatccaggcccagctgctgagcacacacgacccgcctgcggcccagcacttgtcagacaccactaactgtatggaaatgatgacggggcggctttccaaatgtggaattatcccgaaaagttaacatgtcacctccacgaggccatcctctgtgaccgaaggcagctgctgcggacccgccctccctccgctcctgctgttgctgccgggcagtgaggcccagcccagcgccccgtccaccccgcggcagctcctcgcctcagctccgcacggcccgtgggaggaaggccaggctcgggggagcctcctccagcccggccgacccggactcccggtcacctgacccctcagcaagaacagctgcctcccgtcctctcgtctcacccgcgcctcccttgcctcatctggggcggctgtgggctctggcgctcctctctggctgaggtggaaacagagacaccctgtggcaccagagccttcccagcaggccaggccgctgggctgggatcagtgttatttatttgccgttttaatttatggattctccgcacctctgttcagggaagggcggcggccacatcccctgccgtctgcgcgtctcaggcagtgggggggctggggccagggcgccctctgaggacagagctggtggggcgcgggggggctggcgagctactgtaaactttaaagaattcctgcaagatatttttataaacttttttttcttggtggtttttggaaaagggtgtgggggtgggggcgccgctggggcagggccaggttttgtgttttagtcccttgctcctgcttctttctacacacacatctaaagacggtgcggctcgctctgtcatgggttccgtctctctctgtggagaagcagctccacctctgggggggctcggggcagaggggcggtgtctcgtagcgggcggcagcgccagtccccctctgtcaggctggggcaatcttggttttgtgtccaaaggtgaaggggtaggaggagggccctcagctggccctccccacacacaggacggcaggggcactgtgaggcttttcttattaaaatgaaaaaattgaaaaaaaaggacaaagagtcggtggcgctcctctgcagggcgttctgtgcagagcgaggcccagggcgcactcaggagggctcaggccaccctgcccagtgcccgccgccgtgcttcaccccagctccagcttctgtgttcccttccgcccatgtgcccagccctcccaggcgggcacagcccgggtgcggcggccgtgggggacggcgggtctgatgcatgcctctgccatggagtcgtctgtctgcttcggtgcctgcccctgcctcccacccacctcgtgtatagattttaacgcttctgttaacattagacctctgccacaggctgggatttctatacataagaacaaaagcaaacacctaggacagcaaacgccaggcggtacaggcgggaaggggctctccacggagatcgaggacacgaagcaaactgcctcttgcttgccttccccttttgtgcttcggacacacgcggactccagcaggcgccacggaaatgggcaagcccctgcagtgtacccctgtcataactgtgagcagctgcagctccggaacaataaatcccttccgcaaagac

SEQ ID NO: 132701 - DNA, 3733 bp, Homo sapiens
  misc_feature (1266)..(1266): n is a, c, g, or t
  misc_feature (1279)..(1279): n is a, c, g, or t
gggcgcccctggccggcgctgggccccagagcgatgacatcgacggggaaggacggcggcgcgcagcacgcgcagtatgttgggccctaccggctggagaagacgctgggcaaggggcagacaggtctggtgaagctgggggttcactgcgtcacctgccagaaggtggccatcaagatcgtcaaccgtgagaagctcagcgagtcggtgctgatgaaggtggagcgggagatcgcgatcctgaagctcattgagcacccccacgtcctaaagctgcacgacgtttatgaaaacaaaaaatatttgtacctggtgctagaacacgtgtcaggtggtgagctcttcgactacctggtgaagaaggggaggctgacgcctaaggaggctcggaagttcttccggcagatcatctctgcgctggacttctgccacagccactccatatgccacagggatctgaaacctgaaaacctcctgctggacgagaagaacaacatccgcatcgcagactttggcatggcgtccctgcaggttggcgacagctgttggagaccagctgtgggtccccccactacgcctgccccgaggtgatccggggggagaagtatgacggccggaaggggacgtgtggagctgcggcgtcatcctgttcgccttgctggtgggggctctgcccttcgacgatgacaacttgcgacagctgctggagaaggtgaagcggggcgtgttccacatgccgcactttatcccgcccgactgccagagtctgctacggggcatgagcgaggtggacgccgcacgccgcctcacgctagagcacattcagaaacacatatggtatatagggggcaagaatgagcccgaaccagagcagcccattcctcgcaaggtgcagatccgctcgctgcccagcctggaggacatcgaccccgacgtgctggacagcatgcactcactgggctgcttccgagaccgcaacaagctgctgcaggacctgctgtccgaggaggagaaccaggagaagatgatttacttcctcctcctggaccggaaagaaaggtacccgagccaggaggatgaggacctgcccccccggaacgagatagaccctccccggaagcgtgtggactccccgatgctgaaccggcacggcaagcggcggccagaacgcaaatccatggaggtgctcagcgtgacggacggcggctccccggtgcctgcgcggcgggccattgagatggcccagcacggccagaggtctcggtncatcagcggtgcntcctcaggcctttccacagcccactcagcagcccccgggtgacccctcacccctcaccaaggggcagtcccctccccacccccaagggacacctgtccacacgccaaaggagagcccggctggcacgcccaaccccacgcccccgtccagccccagcgtcggaggggtgccctggagggcgcggctcaactccatcaagaacagctttctgggctcaccccgcttccaccgccggaaactgcaagttccgacgccggaggagatgtccaacctgacaccagagtcgtccccagagctggcgaagaagtcctggtttgggaacttcatcagcctggagaaggaggagcagatcttcgtggtcatcaaagacaaacctctgagctccatcaaggctgacatcgtgcacgccttcctgtcgattcccagtctcagccacagcgtcatctcccaaacgagcttccgggccgagtacaaggccacgggggggccagccgtgttccagaagccggtcaagttccaggttgatatcacctacacggagggtggggaggcgcagaaggagaacggcatctactccgtcaccttcaccctgctctcaggccccagccgtcgcttcaagagggtggtggagaccatccaggcccagctgctgagcacacacgacccgcctgcggcccagcacttgtcagacaccactaactgtatggaaatgatgacggggcggctttccaaatgtggaattatcccgaaaagttaacatgtcacctccacgaggccatcctctgtgaccgaaggcagctgctgcggacccgccctccctccgctcctgctgttgctgccgggcagtgaggcccagcccagcgccccgtccaccccgcggcagctcctcgcctcagctccgcacggcccgtgggaggaaggccaggctcgggggagcctcctccagcccggccgacccggactcccggtcacctgacccctcagcaagaacagcctgcctggtggccttctggggccaggacccccggtgggcaacgtagccacaggaacaggccccgtccaccgcctccacgccgcacctggaggcctcctcgcaggcccgtgccccgcctccctggccgcgccgcctccgtgtagtcttggcctcctcaggctgcctcccgtcctctcgtctcacccgcgcctcccttgcctcatctggggcggctgtgggctctggcgctcctctctggctgaggtggaaacagagacaccctgtggcaccagagccttcccagcaggccaggccgctgggctgggatcagtgttatttatttgccgttttaatttatggattctccgcacctctgttcagggaagggcggcggccacatcccctgccgtctgcgcgtctcaggcagtgggggggctggggccagggcgccctctgaggacagagctggtggggcgcgggggggctggcgagctactgtaaactttaaagaattcctgcaagatatttttataaacttttttttcttggtggtttttggaaaagggtgtgggggtgggggcgccgctggggcagggccaggttttgtgttttagtcccttgctcctgcttctttctacacacacatctaaagacggtgcggctcgctctgtcatgggttccgtctctctctgtggagaagcagctccacctctgggggggctcggggcagaggggcggtgtctcgtagcgggcggcagcgccagtccccctctgtcaggctggggcaatcttggttttgtgtccaaaggtgaaggggtaggaggagggccctcagctggccctccccacacacaggacggcaggggcactgtgaggcttttcttattaaaatgaaaaaattgaaaaaaaaggacaaagagtcggtggcgctcctctgcagggcgttctgtgcagagcgaggcccagggcgcactcaggagggctcaggccaccctgcccagtgcccgccgccgtgcttcaccccagctccagcttctgtgttcccttccgcccatgtgcccagccctcccaggcgggcacagcccgggtgcggcggccgtgggggacggcgggtctgatgcatgcctctgccatggagtcgtctgtctgcttcggtgcctgcccctgcctcccacccacctcgtgtatagattttaacgcttctgttaacattagacctctgccacaggctgggatttctatacataagaacaaaagcaaacacctaggacagcaaacgccaggcggtacaggcgggaaggggctctccacggagatcgaggacacgaagcaaactgcctcttgcttgccttccccttttgtgcttcggacacacgcggactccagcaggcgccacggaaatgggcaagcccctgcagtgtacccctgtcataactgtgagcagctgcagctccggaacaataaatcccttccgcaaagac

SEQ ID NO: 132702 - DNA, 2319 bp, Homo sapiens
  misc_feature (1266)..(1266): n is a, c, g, or t
  misc_feature (1279)..(1279): n is a, c, g, or t
  misc_feature (2160)..(2160): n is a, c, g, or t
gggcgcccctggccggcgctgggccccagagcgatgacatcgacggggaaggacggcggcgcgcagcacgcgcagtatgttgggccctaccggctggagaagacgctgggcaaggggcagacaggtctggtgaagctgggggttcactgcgtcacctgccagaaggtggccatcaagatcgtcaaccgtgagaagctcagcgagtcggtgctgatgaaggtggagcgggagatcgcgatcctgaagctcattgagcacccccacgtcctaaagctgcacgacgtttatgaaaacaaaaaatatttgtacctggtgctagaacacgtgtcaggtggtgagctcttcgactacctggtgaagaaggggaggctgacgcctaaggaggctcggaagttcttccggcagatcatctctgcgctggacttctgccacagccactccatatgccacagggatctgaaacctgaaaacctcctgctggacgagaagaacaacatccgcatcgcagactttggcatggcgtccctgcaggttggcgacagctgttggagaccagctgtgggtccccccactacgcctgccccgaggtgatccggggggagaagtatgacggccggaaggggacgtgtggagctgcggcgtcatcctgttcgccttgctggtgggggctctgcccttcgacgatgacaacttgcgacagctgctggagaaggtgaagcggggcgtgttccacatgccgcactttatcccgcccgactgccagagtctgctacggggcatgagcgaggtggacgccgcacgccgcctcacgctagagcacattcagaaacacatatggtatatagggggcaagaatgagcccgaaccagagcagcccattcctcgcaaggtgcagatccgctcgctgcccagcctggaggacatcgaccccgacgtgctggacagcatgcactcactgggctgcttccgagaccgcaacaagctgctgcaggacctgctgtccgaggaggagaaccaggagaagatgatttacttcctcctcctggaccggaaagaaaggtacccgagccaggaggatgaggacctgcccccccggaacgagatagaccctccccggaagcgtgtggactccccgatgctgaaccggcacggcaagcggcggccagaacgcaaatccatggaggtgctcagcgtgacggacggcggctccccggtgcctgcgcggcgggccattgagatggcccagcacggccagaggtctcggtncatcagcggtgcntcctcaggcctttccacagcccactcagcagcccccgggtgacccctcacccctcaccaaggggcagtcccctccccacccccaagggacacctgtccacacgccaaaggagagcccggctggcacgcccaaccccacgcccccgtccagccccagcgtcggaggggtgccctggagggcgcggctcaactccatcaagaacagctttctgggctcaccccgcttccaccgccggaaactgcaagttccgacgccggaggagatgtccaacctgacaccagagtcgtccccagagctggcgaagaagtcctggtttgggaacttcatcagcctggagaaggaggagcagatcttcgtggtcatcaaagacaaacctctgagctccatcaaggctgacatcgtgcacgccttcctgtcgattcccagtctcagccacagcgtcatctcccaaacgagcttccgggccgagtacaaggccacgggggggccagccgtgttccagaagccggtcaagttccaggttgatatcacctacacggagggtggggaggcgcagaaggagaacggcatctactccgtcaccttcaccctgctctcaggccccagccgtcgcttcaagagggtggtggagaccatccaggcccagctgctgagcacacacgacccgcctgcggcccagcacttgtcagaaccccccccaccagcgccaggactaagctggggtgctgggcttaagggccagaaggtggccaccagctacgagagtagcctctgacgctggcagacaccactaactgtatggaaatgatgacggggcggctttccaaatgtggtaagaatcccccacgctcacctggcacctccacctgccacttcaccgntcaccctcagcccgctgtggccgccacctgccgcccgggttgtcccggcctccctgtgtagatgtaggcacccagcagcccagatgtccccggccccatcctctaccaggagcagcccaggtcgctcccctaccacagcaagcccaggcggggttcctg

SEQ ID NO: 132703 - DNA, 3573 bp, Homo sapiens
  misc_feature (1266)..(1266): n is a, c, g, or t
  misc_feature (1279)..(1279): n is a, c, g, or t
gggcgcccctggccggcgctgggccccagagcgatgacatcgacggggaaggacggcggcgcgcagcacgcgcagtatgttgggccctaccggctggagaagacgctgggcaaggggcagacaggtctggtgaagctgggggttcactgcgtcacctgccagaaggtggccatcaagatcgtcaaccgtgagaagctcagcgagtcggtgctgatgaaggtggagcgggagatcgcgatcctgaagctcattgagcacccccacgtcctaaagctgcacgacgtttatgaaaacaaaaaatatttgtacctggtgctagaacacgtgtcaggtggtgagctcttcgactacctggtgaagaaggggaggctgacgcctaaggaggctcggaagttcttccggcagatcatctctgcgctggacttctgccacagccactccatatgccacagggatctgaaacctgaaaacctcctgctggacgagaagaacaacatccgcatcgcagactttggcatggcgtccctgcaggttggcgacagctgttggagaccagctgtgggtccccccactacgcctgccccgaggtgatccggggggagaagtatgacggccggaaggggacgtgtggagctgcggcgtcatcctgttcgccttgctggtgggggctctgcccttcgacgatgacaacttgcgacagctgctggagaaggtgaagcggggcgtgttccacatgccgcactttatcccgcccgactgccagagtctgctacggggcatgagcgaggtggacgccgcacgccgcctcacgctagagcacattcagaaacacatatggtatatagggggcaagaatgagcccgaaccagagcagcccattcctcgcaaggtgcagatccgctcgctgcccagcctggaggacatcgaccccgacgtgctggacagcatgcactcactgggctgcttccgagaccgcaacaagctgctgcaggacctgctgtccgaggaggagaaccaggagaagatgatttacttcctcctcctggaccggaaagaaaggtacccgagccaggaggatgaggacctgcccccccggaacgagatagaccctccccggaagcgtgtggactccccgatgctgaaccggcacggcaagcggcggccagaacgcaaatccatggaggtgctcagcgtgacggacggcggctccccggtgcctgcgcggcgggccattgagatggcccagcacggccagaggtctcggtncatcagcggtgcntcctcaggcctttccacagcccactcagcagcccccgggtgacccctcacccctcaccaaggggcagtcccctccccacccccaagggacacctgtccacacgccaaaggagagcccggctggcacgcccaaccccacgcccccgtccagccccagcgtcggaggggtgccctggagggcgcggctcaactccatcaagaacagctttctgggctcaccccgcttccaccgccggaaactgcaagttccgacgccggaggagatgtccaacctgacaccagagtcgtccccagagctggcgaagaagtcctggtttgggaacttcatcagcctggagaaggaggagcagatcttcgtggtcatcaaagacaaacctctgagctccatcaaggctgacatcgtgcacgccttcctgtcgattcccagtctcagccacagcgtcatctcccaaacgagcttccgggccgagtacaaggccacgggggggccagccgtgttccagaagccggtcaagttccaggttgatatcacctacacggagggtggggaggcgcagaaggagaacggcatctactccgtcaccttcaccctgctctcaggccccagccgtcgcttcaagagggtggtggagaccatccaggcccagctgctgagcacacacgacccgcctgcggcccagcacttgtcagacaccactaactgtatggaaatgatgacggggcggctttccaaatgtggaattatcccgaaaagttaacatgtcacctccacgaggccatcctctgtgaccgaaggcagctgctgcggacccgccctccctccgctcctgctgttgctgccgggcagtgaggcccagcccagcgccccgtccaccccgcggcagctcctcgcctcagctccgcacggcccgtgggaggaaggccaggctcgggggagcctcctccagcccggccgacccggactcccggtcacctgacccctcagcaagaacagctgcctcccgtcctctcgtctcacccgcgcctcccttgcctcatctggggcggctgtgggctctggcgctcctctctggctgaggtggaaacagagacaccctgtggcaccagagccttcccagcaggccaggccgctgggctgggatcagtgttatttatttgccgttttaatttatggattctccgcacctctgttcagggaagggcggcggccacatcccctgccgtctgcgcgtctcaggcagtgggggggctggggccagggcgccctctgaggacagagctggtggggcgcgggggggctggcgagctactgtaaactttaaagaattcctgcaagatatttttataaacttttttttcttggtggtttttggaaaagggtgtgggggtgggggcgccgctggggcagggccaggttttgtgttttagtcccttgctcctgcttctttctacacacacatctaaagacggtgcggctcgctctgtcatgggttccgtctctctctgtggagaagcagctccacctctgggggggctcggggcagaggggcggtgtctcgtagcgggcggcagcgccagtccccctctgtcaggctggggcaatcttggttttgtgtccaaaggtgaaggggtaggaggagggccctcagctggccctccccacacacaggacggcaggggcactgtgaggcttttcttattaaaatgaaaaaattgaaaaaaaaggacaaagagtcggtggcgctcctctgcagggcgttctgtgcagagcgaggcccagggcgcactcaggagggctcaggccaccctgcccagtgcccgccgccgtgcttcaccccagctccagcttctgtgttcccttccgcccatgtgcccagccctcccaggcgggcacagcccgggtgcggcggccgtgggggacggcgggtctgatgcatgcctctgccatggagtcgtctgtctgcttcggtgcctgcccctgcctcccacccacctcgtgtatagattttaacgcttctgttaacattagacctctgccacaggctgggatttctatacataagaacaaaagcaaacacctaggacagcaaacgccaggcggtacaggcgggaaggggctctccacggagatcgaggacacgaagcaaactgcctcttgcttgccttccccttttgtgcttcggacacacgcggactccagcaggcgccacggaaatgggcaagcccctgcagtgtacccctgtcataactgtgagcagctgcagctccggaacaataaatcccttccgcaaagac

SEQ ID NO: 132704 - DNA, 2149 bp, Homo sapiens
  misc_feature (1266)..(1266): n is a, c, g, or t
  misc_feature (1279)..(1279): n is a, c, g, or t
gggcgcccctggccggcgctgggccccagagcgatgacatcgacggggaaggacggcggcgcgcagcacgcgcagtatgttgggccctaccggctggagaagacgctgggcaaggggcagacaggtctggtgaagctgggggttcactgcgtcacctgccagaaggtggccatcaagatcgtcaaccgtgagaagctcagcgagtcggtgctgatgaaggtggagcgggagatcgcgatcctgaagctcattgagcacccccacgtcctaaagctgcacgacgtttatgaaaacaaaaaatatttgtacctggtgctagaacacgtgtcaggtggtgagctcttcgactacctggtgaagaaggggaggctgacgcctaaggaggctcggaagttcttccggcagatcatctctgcgctggacttctgccacagccactccatatgccacagggatctgaaacctgaaaacctcctgctggacgagaagaacaacatccgcatcgcagactttggcatggcgtccctgcaggttggcgacagctgttggagaccagctgtgggtccccccactacgcctgccccgaggtgatccggggggagaagtatgacggccggaaggggacgtgtggagctgcggcgtcatcctgttcgccttgctggtgggggctctgcccttcgacgatgacaacttgcgacagctgctggagaaggtgaagcggggcgtgttccacatgccgcactttatcccgcccgactgccagagtctgctacggggcatgagcgaggtggacgccgcacgccgcctcacgctagagcacattcagaaacacatatggtatatagggggcaagaatgagcccgaaccagagcagcccattcctcgcaaggtgcagatccgctcgctgcccagcctggaggacatcgaccccgacgtgctggacagcatgcactcactgggctgcttccgagaccgcaacaagctgctgcaggacctgctgtccgaggaggagaaccaggagaagatgatttacttcctcctcctggaccggaaagaaaggtacccgagccaggaggatgaggacctgcccccccggaacgagatagaccctccccggaagcgtgtggactccccgatgctgaaccggcacggcaagcggcggccagaacgcaaatccatggaggtgctcagcgtgacggacggcggctccccggtgcctgcgcggcgggccattgagatggcccagcacggccagaggtctcggtncatcagcggtgcntcctcaggcctttccacagcccactcagcagcccccgggtgacccctcacccctcaccaaggggcagtcccctccccacccccaagggacacctgtccacacgccaaaggagagcccggctggcacgcccaaccccacgcccccgtccagccccagcgtcggaggggtgccctggagggcgcggctcaactccatcaagaacagctttctgggctcaccccgcttccaccgccggaaactgcaagttccgacgccggaggagatgtccaacctgacaccagagtcgtccccagagctggcgaagaagtcctggtttgggaacttcatcagcctggagaaggaggagcagatcttcgtggtcatcaaagacaaacctctgagctccatcaaggctgacatcgtgcacgccttcctgtcgattcccagtctcagccacagcgtcatctcccaaacgagcttccgggccgagtacaaggccacgggggggccagccgtgttccagaagccggtcaagttccaggttgatatcacctacacggagggtggggaggcgcagaaggagaacggcatctactccgtcaccttcaccctgctctcaggccccagccgtcgcttcaagagggtggtggagaccatccaggcccagctgctgagcacacacgacccgcctgcggcccagcacttgtcagacaccactaactgtatggaaatgatgacggggcggctttccaaatgtggcagcccattgagtaacttctttgacgtaattaaacaacttttttcagacgagaagaacgggcaggcggcccaggcccccagcacgcccgccaagcggagtgcccacggcccactcggtgactccgcggccgc

SEQ ID NO: 132705 - DNA, 165 bp, Homo sapiens
aacgtggatgaatctcacatgtataactttgagcaaaagaaaccagacataaaagcaaatatgtcatgtcatacacaatatatgtaaccatttacattaccttccaaaaggcaagatttatagtgctataatcaagacagtggctatgttacctttgggggaaga

SEQ ID NO: 132706 - DNA, 1420 bp, Homo sapiens
agacatatttgccttgggattaacaattgcagtggctgcaggagcagagtcattgcccaccaatggtgctgcatggcaccatatccgcaagggtaactttccggacgttcctcaggagctctcagaaagcttttccagtctgctcaagaacatgatccaacctgatgccgaacagagaccttctgcagcagctctggccagaaatacagttctccggccttccctgggaaaaacagaagagctccaacagcagctgaatttggaaaagttcaagactgccacactggaaagggaactgagagaagcccagcaggcccagtcaccccagggatatacccatcatggtgacactggggtctctgggacccacacaggatcaagaagcacaaaacgcctggtgggaggaaagagtgcaaggtcttcaagctttacctcaggagagcgtgagcctctgcattaaaggaagaaaaggaaaacagcccttggtttggcctatggattacgaggttgctgttgctgattccccaccaaagatcccagggactcgttgtacatagaaaggaatagaatttagtttagagttgaagtcacagcttacagaaaatgtgcctggatttccacagcgcttcccaggttatatgatgctgttcctaagagagaattcccagcttctttgaggaagtgggtctcctaatgtataccctttctgatattgtatttattaaataaatggtttcaccattatgtgaggtgggtaaaagttagactgcatgcaacttggacatctctgagctggttgttaacttgcagaacaaaaatgctgtggggagaggcttcagggaaaacttgatgtgcctgtggttgttctccatctatttgccctgcctctcttgctgttctggttggtttgatattctgggtctcaccaatttctcttgatttttgtgagaatttggctttgtttcctgttttttaaaatcatattttatctaaatcctttttctgtacacatttttaaaggaagagaatactgtatttttaaataaaggtttttatcttgtccaaagcctaattacaggtaaaatatcctttgtaaaatgtaactaacaaagaatgagaaatttatgtcggagaacattttatgaataaaagggtaagagaattgagtgggtcagtagtaacaggtcttggtggcaagtctcagcttcacagttccaacagttaatgatggtcaggatctgctagaaaattatgttggtcataaaggtatttgataagctctgtttgtgtcatcttagtgaatgcaacctgttaatgataatggctttttcgctgcttgattttcttcttttcctcatttttaaaagctaattaagtttttttaattgaataaaccctaatactattctttgttctgctt

SEQ ID NO: 132707 - DNA, 217 bp, Homo sapiens
tagcctcactaatactattatattcattttctctctaggttaaaggaattgaatcaggtgaatgatctagtagaggtagtgggaactctgcttcagcagattcaaggaggggcgtgtgtagtaggatctggatgtgggttcatcttcttgggctaggcctgtggtaggggaaaggggaatttagagagataactgtccgctttgagtaggctgttga

SEQ ID NO: 132708 - DNA, 366 bp, Homo sapiens
atgaagcagatgttcaggtcttgagctgtggctggtggtggaggctcattttgtctgtgagtgaatgccattgccaaagcagtgacttgaatagaataaacggggattgaagaaacccttggggaacctctgtattctagctctttggaggaaaaaaagcagccatgaccatagcagttgggaatgtcaaagaggatgggattttttcctgagtctgaaagttggtcaaaatagagaggtaaaaggaggaaaaaaggtggtgggaggcaaaggtacaaaaataagaagagtaagtttaattttatttgcttgctagggtggttaaaagtctaatgaaatggctttttttttttctttgcctttgct

SEQ ID NO: 132709 - DNA, 582 bp, Homo sapiens
agcacaaacactaaacaaatgaagactctacaccttaacaccatcttctcagtttttaactttttgtgtcactatttatatatcattgtgctgtctatatcttcaaaggttgtgggaactatttttttttgtcagttcatgatttaatttttgtactttagcgaggtttacacaccacatttacagtgttatactagtctgtgtttttctgtctccttactattaccagtgagttttatagctttaggtgattacatattgctcattaatgcccttttctttctgattgaagtaatccctttaacatttcttataggacagatctggtgtttatgaaatccctcagcttttgttggtttggaaaagtctttctctttcatgtttgaagaatattttctccagtaacactattctgggctaaaagttttttccttcagcacttctaatatgtcatgccactgtctcctggcctttttccactgagaagtctgctgccagatgtagtggagctccattgtacattatttgtttcttttcttttgctgctttagaatcctttctttatccttgaccttagggaaa

SEQ ID NO: 132710 - DNA, 310 bp, Homo sapiens
cgattaaggatcccgcattctgcttctgccctcgtcaagcacctcactctattctcctggtgatcaagcagtgtggtttccccgatgagcactcctagatgattaaggttaaggaattaagacagtagtattagctgtcgcatggcctccctaagacagaggaaagaaccaagaggaagcctggcacctacactctaagggcctaagtctgtccttgatttcgcttgggatcaggatgcgtgagcctcagagttagaacagtgccccccgctcgtaccccgtccatcagctccatggcagaagcaggaag

SEQ ID NO: 132711 - DNA, 93 bp, Homo sapiens
caggagtggccccttataaggctatgccgttgggtggtcagaaaccagtggtatggctgggggaggtggctcacgcctataatcccagcacct

SEQ ID NO: 132712 - DNA, 1086 bp, Homo sapiens
gcaaggagactggtggcagggttgatctcatatttcttgtgcctcaaaatcccttctctgaagtctgccttccctggagaagcaagatggcagaatcggattctactgactttgacctgctgtggtatctagagaatctcagtgacaaggaatttcagagttttaagaagtatctggcacgcaagattcttgatttcaaactgccacagtttccactgatacagatgacaaaagaagaactggctaacgtgttgccaatctcttatgagggacagtatatatggaatatgctcttcagcatattttcaatgatgcgtaaggaagatctttgtaggaagatcattggcagacgaaaccgcaatcaggaggcatgcaaagctgtcatgaggagaaaattcatgctgcaatgggaaagtcacacttttggaaaatttcattataaattttttcgtgacgtttcgtcagatgtgttctacatacttcaattagcctatgattctaccagctattattcagcaaacaatctcaatgtgttcctgatgggagagagagcatctggaaaaactattgttataaatctggctgtgttgaggtggatcaagggtgagatgtggcagaacatgatctcgtacgtcgttcacctcacttctcacgaaataaaccagatgaccaacagcagcttggctgagctaatcgccaaggactggcctgacggccaggctcccattgcagacatcctgtctgatcccaagaaactccttttcatcctcgaggacttggacaacataagattcgagttaaatgtcaatgaaagtgctttgtgtagtaacagcacccagaaagttcccattccagttctcctggtcagtttgctgaagagaaaaatggctccaggctgctggttcctcatctcctcaaggcccacacgtgggaataatgtaaaaacgttcttgaaagaggtagattgctgcacgaccttgcagctgtcgaatgggaagagggagatatattttaactctttctttaaagaccgccagagggcgtcggcagccctccagcttgtacatgaggatgaaatactcgtgg

SEQ ID NO: 132713 - DNA, 672 bp, Homo sapiens
aactcatagcccaattttgtctcacacatatttctacttactccccattttcaagttattttgaagcaaattagagatgtcatattattttattcataagtatttttatagttacatctaaatgttaaaagaactctttttaaaaatatttttaacccacaataccgctatcacttcttttaaaaatgtcagtaatttcttattatcaaatattcagtcatgttcaaattttttgtacctttgaaacctttagttatctgcctcatgaaaagggagattaaagtgtgctcattttttgtaaactagagtatgtcctgtatagtcaaggatgtaggttggtaagctcaaataattgtgtggcataattactgacaataaggagttaatataattctatcaatttcactacattagaaaaagaaaaacaaggagtagaaatgcatattccacctcccactcacctggacttctcagggtgttccagaaggatggcattctaaccttcccctctgttgaaatcacaaacaagagctgattacaacagaggaatgtggcagtcttacatatttttgtgctcaacactcaatttcacctctttattatgtaattactgattacttaaaactaaagctaataaataaatgctaagactctcttcctcataggagtata

SEQ ID NO: 132714 - DNA, 146 bp, Homo sapiens
gtgcagttgaactcactgggaatgtggctcgggttcctacagactcactgggcagctgctcacatggggtaaggggtgggatctgctgaagcccaggagtcgtctcccacccacccagcctccacgttcacttagatgtgcatgga

SEQ ID NO: 132715 - DNA, 536 bp, Homo sapiens
gaagaggttatatttttgccatatatagtcttcccattccagaaatatggtttctatgcttattaaaattgtcttttctatttcccagtgaagttttatttttctattttaatacaattttaaatttacagaaaacttgctgaaatattaaaaatagtttttcccctgaactatgaggataagttgccaatatgacacccttttaccattgaatattttgtgtaattctgacaaataagaaccttccatgcctggtgcggtggcttatgcttgtaatcccagcattttgggaggcggaggcgggcgaatcacctgaagtcaggagtttgatactagcctggccaacgtggtgaaaccccatctctactgaaaatacaaaaattagtcgggcgtggtagcaggcacctgtaatctcagctactcaggaggctgaagcaggagaattgcttgaacccaggagatggaggctgcagtgagccgagagatcactccactgtactccagcctgggagatagagtgagactctgtctcaaaa

SEQ ID NO: 132716 - DNA, 314 bp, Homo sapiens
atttgtaaccaaaaagtttcagaatggttggtgtagaaaaggttttagctacaggtaggattaacaaatgatatatattgagcctttttccagactaaataacaaatattctaaaatttccaaagtttttgaaaaatctttgctagggtaaactctataagaaatgtgttgatgggcttcagaaatcattcaatgtgtaactatgggatgcctactcaaggcacttgtaggatacaaagattagacatgatttctactctcagagaccttactagtaggagtaagaaaacatattcaacaatgcagcatatgat

SEQ ID NO: 132717 - DNA, 573 bp, Homo sapiens
ttctggagttgtaggaatataggctttccccccactgtactacacttgaatccagccgctcgctcccattttaagagtgggaaagtgctgcatctgggccaccacagactctgttgaggtgtgaatgggagttcttttgcatatcccaacaaagaccccagttttaggaaaggagcatccctgaagttgagctgcattctagtgtggaaagagggtttttccagataaaaggggcagtggttagagtgaagatgaaggaagaaggaatgacagaaggggactgtgggaaagagagaagaccctgggaaggagggaagactgtggggaaggatagcaagattgtgggaaagtgagcaggactgtggggaagagagaggagggccctgggaaggaaggaggactgtggaaaggcgaggtggatggtgggaaagagggaggaggaccctaggaaggaggactgtgggaaggggagaaggatcatgggaaagagagaggaggaccctgggaaggaaggagtactttgggaaggtgaggaggactgtgggaaagagggaggaggaccctgggaaggaa

SEQ ID NO: 132718 - DNA, 223 bp, Homo sapiens
ggctccttcactatgattctcagattagggactgtagctttgcagggaagaccccacgacagcatgtctgcagcgagttaccttcctaaactgccccttctgcacgtgggcctcactggccagtgtggtgcactggcaaagtaacctgtgttgtggctcagcagtgttgttctcaagtagttaatcttcaggtagtagctaaaaaatgtgaccttactgctgt

SEQ ID NO: 132719 - DNA, 224 bp, Homo sapiens
tctaaatttaacaaatacgtttgtaacagtcactgtaccatgaagtagtgcctataaatctgaaaaaactacttagaaattatcaaaaatttcataaaattcaaatagagatgtggtaaatatattaacatttcaaggataagcagattgatcagatactcataggtagggaaatgtaggaagagtccaggggaagagaacaatgctgtttatctgaagctcaa

SEQ ID NO: 132720 - DNA, 1027 bp, Homo sapiens
ggtctcaaagcaatgataccctaatggcaatgagcacacctaccacccagatcttggttggtttctttctttttttcccccgccctgggctgaagtgcagtggtacaaacacggctcactgcagcctcgacctcccaggttcaagtgatcttcccgcctgagctccctaagtagctgggactacaggtgtgtgtcaccacgtctgcttaatttttgtattctttttttagtagagacagagtgtcaccatggtgcccagccagtccttaagctcctgaggcccttgagctcctgagctgaagtgatcctcccacttcagcctcccaaagtgctggattataggtgtgagccacggcacccagccagatcttgcttactaataccttcttccacaaaaggacctggggctctttggagaaatggctcattctagggatagggcaatgaatgtacaagatgagcctagatcaccttgtacatccccccttatctgcaatttcgcttcccacagtttgttaccaaaaatattgcatggaaatttctagaagtaaggaattcataagttttaaattgcccaccattcagagtagccacagtggggtgataagtgctcagttaagatggaaaaggcattaaatttgtgggcagaagacatgcacagaaacatattcctattgagggcaatcaggttgagtactgtccatggtttcaggcattctactgggggtctttgtcataaattgtgccaatatatgtgtatgtctatttctgcctgtgtattcttactaattttatataggttctatttatgctaataccagactgtgttaattatagtatcaatgtttgctatagtattagtacatggtcccactttttttcttcggtctattattggactttgcatttccatatacattttagaatcaatttattccacaaaaagctaccaacaacaaaaaagcctgttgggattttattggaattgtgtcagatctatagatcaatttgggaggactgattttta

SEQ ID NO: 132721 - DNA, 182 bp, Homo sapiens
taaagagtcactccaaatttataagctcattaaactagtatttctgaccgtttacacatttggctgtagagaaaatacacagaatgcttccagccacacctatgcctactcaagccacttagctgacaagccacttagctttttcttctaattactcgggtgcgcgtctctgttatttacaa

SEQ ID NO: 132722 - DNA, 437 bp, Homo sapiens
tcagaatctcctttttctatcttctctttgcctgataattattatcactaatttgatgatgaggaattatttctcttagtttcatttctgtaagcagccctgttctgttgggaaagactcccagcaccaaaattaggaagacatatttgagacaaatatgtgcttccttttcctctgcatctaacttcagcctgtgccctctgatcctatatttcagtctcagggctagattgaggttgagttatggttgagatctgaccatcagtttttaaaagctgagcgtagcaccttacaatctccatctcactggttccagaccactacagagagatcacggaggcttgagatgtccttagaacacagtcaaatccagctgacctcaggatactctagctctgcctttccacctggatccatttggtctctgctcctttcct

SEQ ID NO: 132723 - DNA, 303 bp, Homo sapiens
caggcatgagttgccacacttgactctaactggggaacttcactctctgtcttttttttttttgagacgaattttcgctcttgttgcctaaagctggagtgcagtggcgcgttctcagctcactgcaacctccgcctgcctaattcaagtgattctcatgcctcagcatcctgagtagcctttcaggggttacaggtgcctgccaccaacccagctaactttttttttttttttgagacggggtttttctcttgtttcccaggctggaatgcaatggcgagatatcggcttactgcagcctct

SEQ ID NO: 132724 - DNA, 381 bp, Homo sapiens
tacgtaccacatttatttgagcatatgctctttcctttttcaaattttatgttgtaaagtttacttaaaacacatctacagagtactgaatgttaagaggaatagctgtcatcatgtaaaattctagcagagaaaaaattaccagcatagtaaaacaaatttctgctacttcaagttagattcacaagactaggaacatatccacctgtcactcagaggaagtccacaaagaagagtgcattaattttctttctcttctgaaaatagtagtgattcttggaagtggagataacttttttcttcagagagtcataatacaaaaaataataaacagtctttttgttgttgttgttacatattacgaggtttctgtgttgccca

SEQ ID NO: 132725 - DNA, 198 bp, Homo sapiens
aaaaagagacaagaatccctatagacaatgaaagcatgccacaaaaacagacaaaacctgtaactgtttatttttaaatgagctaagagatgttaagatcacacatgaagaacataaatcagaaatacaaaaatctcagaaatgagatgacagaacttagggaagacttaaaaataaaagaattcttttggaaatgaa

SEQ ID NO: 132726 - DNA, 389 bp, Homo sapiens
ggggaatgactccattgagcagggctgggcaggagtgaggagctgatgggagccaggttcgggttctgaggattagggaagagaccatctaaggggacagaatgagggcaggaatggggccccacgtagggaggaggtgagaaccagtggaagggccgaaagggaagggagaacagaatttcttcttatgtctctcccttctttccctctcctgcactcccacctccaactctatctttctgttgagagtgtgactgccaaccaacaggcttagagggctatgaaaagaggagaggggttaggggatgggacgagggatgatggcagaagtatgcagggggctgatgaagtaaaacgagaataaaatcaccaacaaagagagagaatgg

SEQ ID NO: 132727 - DNA, 310 bp, Homo sapiens
ggttatgtgggcaaaatcagaactgatacagtttgagaaggcagaccttccccccattcctcgcagcgtgaatgttcttccagtcgtcaagggatctgcctgatcccccgttggctgctcgcctggcgtctgtatctggctgctgcggcactttgtgcccccagagcctcatgtccatagtctcagattttgccctctctctgggatttcattcttacatttttgggtcctccagtttttctttaattttcaaaaaggtgaaggaaaaaatgtcaggatcctgggttttgatctcccacaccttccgagt

SEQ ID NO: 132728 - DNA, 167 bp, Homo sapiens
acggacaaaagtgccttcccatcagtccctgggttgggctccggttaccatggatcgccggttccaactcagggccctctcgggcccgctaggggtaccacaaagcgggcagaaggcccctgaggggaagttaaggtgtgagggaggggtggtgaggcagctgtagc

SEQ ID NO: 132729 - DNA, 375 bp, Homo sapiens
gttggatacatggtctggtgttcagatgtgagagtcagcctggagatttgggcttcatcatgaagtttgggaattgacacccagagaatgggtgaggttgcacaccaaggcagagagaattgagggagacacgaagaggagggcctgcaacctgtggacgccagcaacatgttggagaagaagctcttacaggaaaaagaggaggctggggttgtgatcactgatcacaggctgggtgggctacaagaaggagggattggctaggtgcagtggcttgcagctataatcctggctactcaggaggctgaggtgggaggatcgcttgaggctaggaattcaaggctagcctgggcaacatagtgagacccccatctc

SEQ ID NO: 132730 - DNA, 882 bp, Homo sapiens
gtggacctatattcaactccaaaacccatgctctttaatataccatggtactttttttttaatttttatttttgttagtaagcctcgtttttcagctattcttgctctgctgaactgacttaatgttataccagtagttttaaatgaatgctagatggaataatctggaaatggttgaaatggcaaattttatgttacatttatgttacatttattttaccacaataaaaaatagaatcatctgggaagctatttaagcatacgcatgctcaggaccctgcctggggagataaagtgggtcttgtggtaaggcctgggcatgcatattttggaagagctccccaagtgatgctgatgtatactcctttggggtattactggcacatcttattcaattagcaattaactatgtactatcttgtattactagtttgctgttgccctgtattgttatttaacttgaacagttaattaactatcatcgaacagacatttattgagtactttgtgtgtcaggcactgtgctggggcatgagataataaagaagggcacaagataataaagaagtctctgctcaagaagtataattctagtaggaaaactaattttaaaaatgccatattagtgataagtgttggcaacagaccaagccatgtgatggagactgggggacttctaggggcagctctgaatgatgcattgaccgaacctgagggcggggcctgggttttggaaccgcgtttagggaaataagtacaggccggaggaaaacctggcgtagagacaacagactattgtggaggaatattggccccgcataatatgaggggggggtgctgttagacaagcaaatatcttccagaccacgcgtgtgtttttaa

SEQ ID NO: 132731 - DNA, 436 bp, Homo sapiens
atgcccctggctttttttgtttgcactaagcaccaagtacatctgagcccccgtgcctaacaggaaaagacagactgtcaagcaaggaccgaaagcctggccttaacatcatagcacattacactgggaaatggagatggagcatccaagacaacacttaacccaaccttgtaatcttctgcagcaaaagtggtgggggaattctgatacgtgctctgtcctggttaatactagaaggttctgaggcatccataattctaaataattaaaggagtcaatcaatcactagcctttgtgagtcatcacaatccggtggttttacacctgatggaggttttacacctgatggaggtttccttggtagtgattcagcttcacatctcattcttggctaatctttaatcatagcttgcttgcttgctttttgttgttgttt

SEQ ID NO: 132732 - DNA, 729 bp, Homo sapiens
agatgcaattttcagataaaataggcctattctaatggtaatgtaaaagttacacttatactttctgtcactgctcatacctgtaaatcccatggggggaaagtcatgatttcctttagacataacagtcgtagcccacaaataagccgccatgaaatagtcaagcaacaggcctccagtagctgcagctggagaaaacactggataaggtgatccaatttctgcacaagatctagtctctcctccatagtagcgtttagcctggaagtcagtcattctcatactgtcaaaagccagggtcccagaaaagggaatctttacagaagcaaatattttatggaggacttgagagagtgtctctcaatgtttaagtatctattccatagcaaattaggaacaacaatagctagagttataaatacaattcattatgtgtattttgaaattgaattttgagcgattagcataaaaatactgaatatgcattgcaaattagcatgccaaccttgctaaatgaaataacagccctgacacgtacttaagtagaaagtggaactacacaaaaatggaggaatatcagtagataacatgtaaaccaggacgatgaaaaaagaggacacaagtaagatcactgcgggtatattattcttagctacatatagctaactgagtcaccattttctaaggaggaaaaattagaaggagtgctgaaagggaataactccagac

SEQ ID NO: 132733 - DNA, 896 bp, Homo sapiens
gagctagctgaacctaggatggctctatcctccgctgtgacagggcagcagtgaattcaatgtgaagtcccccagttgctgtgttccttatccccaaagtgtacaaattgcctttctgcaccacacggtggctgctgagggatgtgggtggggtggtatcagcaactcatgactgtctctccatccttcctcaatgcctcttttggtaatacaaagttaaaaccatgcgctgtgattgctcacctgatgtttggttcttatgacagtgtttttctttgtgcagatggttgttaaaatttggtgttccagggagtgtgggggtgtgattggtgtaggcttctattctgccatcttactctgccctctgaactttaatttataccataccagaaatcagagtgaaggtaaacaacaaggttacaatgtaactctattataaattttgatttttttttggtgacaaataccagtatatttttgtctttggatctataaattatttaatttagcaaactctaaagcttataaaatttaacttctcaagaagtctagcactttatggctattaattttactatcaaaatatccaggttactgaattcattttaataattataattcttctaaacatcatttgaagaattatttgtggacactagactcaagactacactaaatccaaacagtatacctaggacctgagttttgagtttttcatctcagttatctgtccttcaagttactacttcctcttatgctttcttttactaaccaaattttcagatttttacattggaccttctcctccaaggccctatgggacaactttgtaaatatgcatttacagcctttaaacaccaacattttaaactgagactaattcctgcaaccacatt

SEQ ID NO: 132734 - DNA, 385 bp, Homo sapiens
caccagacctggcctctctcgagagaacggggctgtgcatgattgcccgggacagcaggtgagaagcaggcctggcccggctagtgggtactggctgccctggctgtggctctggtggctcgctgcctggaaagctgttgaacccgcgtgctgtgtgaaggactctgctatggtcactccagggcagatatttatggaaaggtggagctggaagggacttagacacctccttgaccaacacactcatctagggatgaggaaactgctcccagaaggggaactacctgaggtcacggctttagggaagaaagtgggctgggcgcccattgagattcctcgcaaatgggactggaacagaagcactttctccatcatggccataagg

SEQ ID NO: 132735 - DNA, 434 bp, Homo sapiens
aacaaacctgcatgtgctgaaaaagaaaaaggaagaaagaaagaaagaaggaaggaaggaaggaaacaaatcaagtaagccaatatataaaaaaaaaaagatacttggcctgagggatcacatgatccatgtctctagtgatgtggcacccaatatgtcaatcaatatgatttagatcgggatggtaagttggcagcatgtttgaaatttcataaagattgttctgcttgccttaattttatgatgtcaatgacttaaatttcataaaatgtttattaagcaagtgactggctttttaggtcttctgttatcaaggcttagaagtggacatggctgagatctagaatgtagctatgaggcaaatcgaaagtaaagcattatgtcccacactgtgaatttgtaggaattactgtaataatttttttctaattgtt

SEQ ID NO: 132736 - DNA, 268 bp, Homo sapiens
cattaagcttattgccacataattaatattgccctctaaaattccttctttacataatgtttatgtttttaatttacctattttatgtgtttaatttatacatattatgtctttatttgtcattcaaatgagtatttgttgagggcctactgtgttaagcactgctgtaaatgctgggacatggccttgctcttgtggaacctacattctgctgggtatagaaaggcaagtaaataaaaaatcagatggtggtaagtacaaagcataa

SEQ ID NO: 132737 - DNA, 389 bp, Homo sapiens
ccactctctcctgattttctttccccactgcacccagcagttgcttcccaggactcacacccatcattatttatttagggaggcaaaatgttatagattagaaagctttaagaaatcaaaagaaagagaggtatgatatgtttttactaatttaaaaataatagaagccaatttatttaattctaaaagaaatctaaatcatagctacattgaataagaaagcagtgtgaggcagtactaagtagggtggaataatataaataattacatgtctaaaacatcaaattattttttattattttgacaggctagaggttacgcatgctatagtgttaactcaatgttaattttagtgttaactgatagaaattatcaggctaacatctaac

SEQ ID NO: 132738 - DNA, 403 bp, Homo sapiens
caccagaataaggggtttgcattttattttaagagcaataggaagactttaaagggttctaaataagatcgacttgtggttttaaaaactgacactatacatttcccagttgtctctgcaacatcaatgaaatgcaagaatttcttcagttgttgatttttttaaaagttttttagagtcagggtctttccctgtcacccaggctggagtgcaatggcacaatcacagctcactgcagcctttaacttctgggttcaagcaatcctcctgcctcaaccacctgagtagatggaaccagaggtgtgcaccaccatgcctggataattttcttattttttgtagggacagagtctcactatgttgtccaggctggtttcagacttctggccttaaatgatcctcc

SEQ ID NO: 132739 - DNA, 281 bp, Homo sapiens
ttatatccttacttgctttattaattacctgaatctatcttaaaaggaagcagtaatttctctaatagctggggtgtggctgcatcttcaggtggatgttaagctctcctaggatggtatgctcacacacaggcactcacatgtgaacacgcatacaaacatgcacctgcatgcatgcatatgtgcacatacatatgtgcgggcacacacaggtacacatgcacacatgctcatatatgtgtacacaaacttaagtccatggctctgaaatatggatttgt

SEQ ID NO: 132740 - DNA, 366 bp, Homo sapiens
ccactccgagtcaaagcaaaggctgtgtgcacagcaccaagtgcagatgtgaggatacgtgtgctccactgttgacaagagcccttccttttgtcctttagaattaaaagccaggtctcttctgctttgttatccccttccggagtggcagggaggacaaaccctcatgcagggatacagaggtgcacccaccagccatgcacacagagccagccactcctccccagcaagctctgccccggccctgcctttcggaatgtcactctccaccatcctgctgctgcccagagcaaacgggtggttctctggctttctaatagggcatcgctccaatgactggtcaagcctcgaatgtctgaggtcagg

SEQ ID NO: 132741 - DNA, 488 bp, Homo sapiens
ctgtgtatgcgtatgtgtgtgtatgtgtgtatgtgtgcgtgtatgtgtgtatgtgtacgcgtgtgtgtgtgtgtgtgtgtgtgtgtgtgtgtctatacacataccaagcctgtttggttgttcaccgttgtgttagtttgctagggctgctataacaaagtactgcaaactgggtggctcgcagttctggaggccggaagtccaggatcaagatattggtaggttggttcctcctgaggcctctcttcttggcttgatggccaccttctcactgtgtcctcacatcctcacatggtcttttacctctgtgcacctccctgatgtctctttctgtgtcctaatttcttcttcttcctcttttttttttccttgagatggagttttgctcttgttttgcccaggctggagtgcaatggcatgatcttggctcactgcaacctccacctcccaagttcaagtgattttccggcctcagcctcccaagtagc

SEQ ID NO: 132742 - DNA, 615 bp, Homo sapiens
gtatgtactcttacatctgacttctttcattcagcataattattttgagattattcacactatactgtgtaacaatacattcattctgtggataaaccacaattaacaaatttacttgttgatggaaatctggtttttgttttgctttttccagtttttggctattacaaatagaactgctgtgatccttcatgtacaagtcttggtatgggctgggatttcatttctttgggataaatacttagaagtggaatggctggattatatgataggcatatgtttaaatttttaagaaactgtcaaactgttttccaaagtgttttacagtatatgagaattccagtttctccacatccttatcttggcagtcaactctatcagccattctgacagctatgttgtggtatcttattgcagtcttattttacatttccttggtgactatttatattgactatcttctcatgtttttgtttgtcatctgtatatctttatggaaaagtatctgttcagatattttggtcgtttaaaaaattgtttttttttctttttattgagatttcagttttctttatgtattttggatacaaagctttcattaaagatatgatttac

SEQ ID NO: 132743 - DNA, 443 bp, Homo sapiens
actaccatgcatggcaccctccgtgtgcctcgcggagaagttgccctcatatggtctgtgctggaagagtgacggagcaggggaatctggcacaggcggaacgtgataattcatgcacaggcctggccaaggtctttcccacccgtttctttgggttttcagctcctcatttttagcgccaagcttctgttcctcctctggagccctagtgctcctcctctgtgccaattgtttggaagattctaaaacctctgtgtgagccattgagagctcatggggcaggagacctgtttgtatgtggaaggccccggaactagctctccttccccttccgcaggccttcaggcctcattttgagtcttggggtttgagacaccgttcctggatgttgaaagtccacagaggggaggcaagacacccttccctgcacccctggcccctgc

SEQ ID NO: 132744 - DNA, 414 bp, Homo sapiens
cccaccggcaggtgtactccaccggcgggtgtactccaccggcaggtgtactccaccggcaaaagacaaagacagctcatgaaagagaaaataacaaatatgcaaatgtctaatttcattagtaaattaaagaaattcaaactaaaacaattagataaaactttctttcttttttttttttttcaagaagcagtttcgctcttgttgcccaggctggagtgcaatggtgtgatctcagctcactgcaacctctgcctcccaggtttccgccattctcctgcctcagcctcccgagtagttgggactacaggtgcccaccaccatgcccggctaattttttctatttttagtagagatggggtttcactgtgttagccaggatgatatcgatctcctgacctcgtgatccacccg

SEQ ID NO: 132745 - DNA, 442 bp, Homo sapiens
gacaggatacagtggcgatgatatcttgcccctcaactgaaagactcaaattctggggctggaatcgtatgaaagctcattgactcacatgtcttgacaacaggtgctcactgtcagtggaacactcacacatggctctccttgttgcctgggcttcctcacaacatagcggtgggttccaagggcaagcgtatcaagagacaaagatgggctaaggctgtatccttcttctgacctagtctcagaagtcatatagcatcacttctgctgagctctgtgggttggagaaatcacaagcccctatccagatttaaaaagagaaaacatagacccccatctctctgtgtaagaagttcagtaatattataagaagagcatgttggacgggatacatgtacaagtatggccatgtttaaaaaatacaatctgccacagacacaca

SEQ ID NO: 132746 - DNA, 262 bp, Homo sapiens
ttctatcagggggtgcatccctcaggcctgcttctctttgttgtgggtatcagtagcccaatgtgggcttcactttaaatatgtattaattaggctaataaaacttacccaaaccaatgttatttcattctctttatcaataataatgtttcacatacacattggtaacattacagtaagcatattttcatgctgctgtcttgtatttgcaagctcaatatttagatggaaacctgtttgctgagccattgatttaattcaa

SEQ ID NO: 132747 - DNA, 767 bp, Homo sapiens
gaaatattcacctctttaaattatttttaattaattgtgctggaagggatggttgccagggctctcagaacctctaggtaatttagtctaagcatcctttgcaattcaaatttagggcatggactgattttaaactcttgaagttttacatgtgtctgaaagaaacaacaagactaccagctcgcaaatcaactgggaagttacagctataggtagaaactgacttggaatttagaacatacatgatgtggtaggaagactgtgggctggtgtcagaaccctgtggtcctatgggtactctctctatcactcaccagccacaagatatacatcagtctcactcccaaggccctgcttcccgcatatgtacaaggagcataataacatccatccttagttaatcccacccaaggataatgctaaaagacatgagattgatctgtatgaaaatcctttggaaaccgaagcatgctatttattttaaattattattattgagttatttttacctaagggctttgctttctgaatttattcattaatagaaattttaaaacatgacttactgctatgatacttgtagtccatatcatttatttaataacctacactgaatgactattagaaacaaagcaaaaaaaagccttaaatggaggagtctggtgatttggtgggattttatcatctctccaagtgtgcagtgatctctagtgctctagtgctcagtttgaataaagaaacccttcttgtcaatgtacaggggctcc

SEQ ID NO: 132748 - DNA, 332 bp, Homo sapiens
agagcacggctctcttaactgtatctacttaccatatgcatctgaatttcagatgcgtaaaaatgtagaaacaatgcgagtcttcaaatggaggaaataatgcctgtgtgcttatataatttgaataaaagctgtgctgtttggagccctaaacttcaaatggatgacatgttaaaagcttccaaacccacttttgatcaaaaatgggtggaacctatgtggaccagatttttcagctgtgctgaaagagtaacagcaaaccagagtcattgggcgtggttgtgccaacgatcagctcttagaagaccataccaatcacattttacaggatt

SEQ ID NO: 132749 - DNA, 735 bp, Homo sapiens
atttagtgttgataaagcatattaatgagtgcactgcaccattaaaatgaacacgtaatgaagtacctaaaccactttatcttaaatgcaagatagagtcttacagatttctggttctcatggaagaccatcaggggcccacacattaaaaacagcagagtgcaagagctgggagggtaccactctaggaacattttaaaataatattaccatttgcttgattctaatttaaataatttggagttcttataacattggtaaattttgaaaagtaggatatttacacaaagagagtataaaagaaataattttttggaattttgcaatgcatttcttttaagggacatcacattcttataggccttcactgattaaagaaactttattagataaaaatgagaagcatgtgcttctggtagtattgtacctagaggattttagttaagtcaagtctgaacttttagagcatttgaaatatacttagttggatagttaacggatcctcttcaacttaaagtagatgcttgttataagagaaaaaatgtacaaaaagagttacagagtagacaaaaatatcttaaattcttttccagtgttccaattctgatgatttttaggagttatagctgaagaagtatcgttcatccctaaaattggtttcttgcataacacattattttgaatgtcaccagtcagcccttgggcttctttaaaagaccaaagaccaagattgaa

SEQ ID NO: 132750 - DNA, 442 bp, Homo sapiens
ggcttgcacctgtaatctcagcattttgagagacagaaatgggcggatagcttgagcccaggagtttggagtttaagaccagcctgggtaacaatggtgataccctgtctttacaaaaaaagaaaagaaaaaaaaaactggcatgctcctgtagtcccagctacttgggaggatgagacaggaagatcactgagatcacactattaagctccggccttggtgacagaatgagaccctgtctcaaaaaaaaaaaaaaagaaaacaataaactaaaaattagaaggatttgttttgagatcaacaaaggaagacttttatattttgtgacataattaaaaatacagtttttctaaaaaattattattgatgtataaaaggcaagcaaaatccaaggatttttaaccttgctttaggagatacaaaagttctgtgtgatcatgaa

SEQ ID NO: 132751 - DNA, 275 bp, Homo sapiens
aatgcatttacctgggggatcagaaaggaaactagaggggtgtccactggggctactgagtggtggctgtaaagagtctcagtatgtcaatatgggtcttacatggttgtggtcagtggtagcagacctggcccaactcagtgaagacaggtgcatgagaaggtcagatggtgctactggggtttattcattttgaataaataaactgaaagccggcttggcacggtggctcacagctgtaattccaactttgggaggccaagacaagaggtccg

SEQ ID NO: 132752 - DNA, 451 bp, Homo sapiens
aagagttccaacctgatgtgccattaaatgggctgtgtgtgtctagagaaaagcatattaagagaaagaaacatccagacaaaggggccagtcagtgcagggatcgagaaaaattccctgtgtagctcgttatccaacagacacctgccattgatttgcttcatgacaggcagtgcaatggggaaagccaatggaatgcaaatgttgccattaagtgtgctcaggtcagagcagcccagtggccctgcaaaggtccctcgttacttattctgctggcaaaccctgcctgctccagcgaggacagactgttattaaagccctctcttcttggtgaatttggagtgtgtgctttgtaggacaagtaacagtaacaacaaaaccaacaagtttagcattagcctgtggtttctaggcctcttattctccaaaccaaagatggatttcaagcagg

SEQ ID NO: 132753 - DNA, 1174 bp, Homo sapiens
gattttgtatagccctcagtgacagcttaccatacccttcctaggttgtacagtattgtagttacttgttcacaggcctgtatcctcctactagactgagttgatggcagttatgaccgatggtagctgaagttttatttaaatattcaaactaaaaactctttatctgcagggacctctcctagtgtagatgcatagtcgaaacttgataattgacgtgtattgctggtggtgagggaagtgctgattgtggtgcagacagcacattcctggatgaggggatagtataggcaaaggcatgaagaatgtttgggagaatctggaatgtagacagaagagaaattgtgttttgaaaatcaaagtaagaagtttggtaggcaatgaggagtattgtttttgtttttgtttttaaatagagacagcgtctcgccatgttgcccaggctggtctcaaactcctgtgctcaagcgatcctcctgccttggcctcccaaagtgttgggattataggagtgagccaccatgaccccaagggcagtttttgatcaggggatttttcatacagcttgtgcagctggtgctcaaagtgtgatgaatgaatgaaaccaacaagatgtatctgaattactttgtgagtacattatctttggaacttgtttcatgtttacagaaagtaaattggtggtttaagtgttgggagctgcctgtgtatcctttgtgtgaaagaattagaacacacagattttattcttaagtagtttctaattttgttgaggaaacaaacatttgaaagttatgggcctttgcaaaaccattatacaagtaaataatacttagattatatgaagatatagaacaaaaaaagtatctgagtagcatagggttaatcaggaaacaattcttggaggaagtaatacaaggaaatgggaggctgaggagagcatttgcctctgcagtttatggagaggattttattaaattattcaaattcatttcaatagaatattcccagtagataacattagcatttaaaacagccagagagaggggactgaaacaggctttcctttctacgatggaataaataaatggcttttgttattgttaaatagaatccatacccggctacgggcaccgacagccaggatgggtgctggtgcttattgcctgtacca

SEQ ID NO: 132754 - DNA, 356 bp, Homo sapiens
tccacagctagaaattcagtgtgcctaaagtctaataaggaacacaggcatggccaagtatggtggctcatgcctgtaatctcagcattttggagggctgaggtgggcagatcacctgagctcaggagtttgagaccggcctaggcaacatggtaaaaccccatctctacaaaaaatataaaaattagccaggcagatggtgcacgcctgcagtcccaggtactcaggaggctgaggcacgagaattacttgaacccaggaggttgaggctgccagtgagccgagatcacactactgcactccagcccagcaacagggccagaccctgtctaaaaaaaaaagaagaagaacatagg

SEQ ID NO: 132755 - DNA, 735 bp, Homo sapiens
ggttctcatcttgctaaatgacatttagaagcagcataactgcttctaatctaggattaccacacatctaggattctaacagttttcatccattcatcaaatgtttactgagcacatgctctgtgagaggccgtttactaagtacaaattcactgaagaacatgtctgtcttcaagttcattcattttagttctgtgtgtcaaagctcatatagtaaactacaaaactaaattatgttgctgttctagaattttttttttttctcttctgagacagagtcttgctctgttacccaggctggagtgcagtggtgcaatctatgctcacttcaacctctgcctcctgggttcaagcgattctcctgcctcaaccttctgagtagctgggattacaggcactcaccaccacacaggggtactttttgtatttttagtagagacaaggtttcgccatgttggccaggctggtctcaaactcatgacctcatgtgatccacccatttgggaggctgaggcaaggggattacctgaggcagggagttagcgaccagcctggccaacatggtgaaactccatctctactaaaaatacaaaaattagccaggcagggtggtatgcacctgaaatcccagctactcgggaggctgaggcaggagaatcacatgaacccaggaggtggaggttacagtgagctaagatcatgccactgcactccagcctgggcaacagagcaaga

SEQ ID NO: 132756 - DNA, 773 bp, Homo sapiens
ggaatttttttaaagaaaaagacacaaacacaccatagggaaaacaggagaggagataatagcaatgaatttttggaagctgaaaagcagacaaaagagtgatgaatgacttagacctgagaaaactgaattataactagcagtgaggaaagccaagaagcattgaaggtctaagaaacagtcagatcccaagacaccctaccccattgagtacagtgggcaactctgcctcccaactgtggcagagactggaaatctggcaagggactcgggcacagcttagggctgaagtactgcactgaaaacaggagcatgtagtgaactatactcgatgctgagcctccagccctttcccccttttcagtttccagagcgctggcagaagagccttcaccctccaagcatgaaattgaataatccttctctccagaatcctcttgaagggaagtcctaaaatatataagtattgaatgttccctatccaaatgactcactgtcagcaaggctcacttacacacttagagcttccactcagctttaaagcctccactcttaagttatggtttaagttctcctttaaactagggattaccaaacatctaaagaaaggatctgtgaaaaaaagtgatccaaactgccccccaccccactctggaatgtacctttgttttactctgaaggctgtatctccctggtaaaaaataaataaaaatgaaaaagcaaactgcctctcccaacctcatgtacacacagaagaaacaaacaggaaaaaa

SEQ ID NO: 132757 - DNA, 441 bp, Homo sapiens
tagctctgacccagcaattcccttaaattaaccttggcactggcacagtgctcaggaccttttccataaggggcttgctcctctgactcacccctcctcatcaattcttttctccagggaaatcttcctaagaactggctgcattatagaaccagactggaatccactcatctggcacagtaaaaccagatatctacaccaaggtttttgcagcagtagaaaggcatttatttgcagggtgccaagcaaggaggaccaggaagctaaatgctcaaatcctgacctccttgatgacttgcaagcaagagtttttaaagatgcggactgaattacaccgctggctttccttgttctccagcttgcaggcagcatactgtgggacttctgggcctccataattgtgaggaagtcaagaaggagatgtgacctatgtgagaccat

SEQ ID NO: 132758 - DNA, 389 bp, Homo sapiens
tacgcttaatagagaggggaggtgaggtgctggcacctgggaatgtctttgtgtcagcttttacttaaaggtatttcaaaacttcaagaaaaatgcacatttctgagaggtgtgtatatcttagccctaccaagtatagaatgtgaaactgagagggttactgaatcttagtatctcgactgaaaagccaatgtgtcatagtatattttgctaaaatcttgactcaattgaagagaagtaaggcccttaaaattttgagaactaggtgacgtgtctgaaaattttgagaaaagtgcttttcacacctgtaggacaagaaggtttctgccttttttgcttattgggttaactttctataatttaataggaaagaatgaaaaggaatagta

SEQ ID NO: 132759 - DNA, 970 bp, Homo sapiens
tgtggtcttggtctccatctcttctgttttggagaatcgctagtaactcactgttgaaggtggggaggaggggatgtggggccgtgggcagggcctggcatccttgctgccatgtctccagctgtgtccctggtgaagagtgcccctatcatgggtttcactgcccatctgtgacatgggctgacacctccctcacagagtgagtattctgcaaatgccaagagcaatgcccggcactggcagctacaatttattgagcatttactattaataaagcaacgagtagaaatgtgagtaggggcatgagcaatggcatccagaagattctgaggccttgagctgaggcaggacagagggaggaagaggggtgaagagttatggtccctgtctcagcccatcctcaagtacctccacaataggatgcttgtcttcagcagtgactttatagaagtatctatatatatacatttagtacaaccgacctttggtttcttctctcaatccccttttcaaacgtatataaaaatatccaaaggctcctcccagcccagtgtttccaggcagcctttcaaatcccctctttgccttagttggtcaaaagcctgtggatgcagcacccttccaggaagggagaggaagaaagttagggctccttcttggcagccttgggaaaccatcggggtagagccccaagcctagaggcgggagcctgccgtccttccatcttgccacacatgggcacatactttcctgttccctcttgccctggaaggctgagcctgcagtgagggaggtgagtccttttccctgcaggggtcaagagagaactcccttcgccaggcgcggtggctcacgcctgtaatcccagcactttgggaggctgaggcaggcagatcacgaggtcaggagatcgagaccattctggctaacatggtgaaaccgcgtatatactaaaaatacaaaataaatt

SEQ ID NO: 132760 - DNA, 621 bp, Homo sapiens
  misc_feature (19)..(19): n is a, c, g, or t
caggctgtacgctccggantatggggatctggacccggcgggatgagcgaggtggaggcggcagcggtggctacagcggtccccgcggcgacggtgcccgcgacggcggcaggggtggtagcggtggtggtaccggtgcccgcaggggagccgcagaaaggcggcggggcgggcggcgggggcggagccgcctcgggccccgctgctgggaccccctcggcgccgggctcccgcacccctggcaatccggcgacggcggtctcgggaacccccgcccccccggcccggagtcaggcggacaagccggtgctggacaatccaagtccgtgggcacgtgttcaaaatgggttcaacggtcccggaatgggttacggattcatcaaccagggaatgacaccaaggagaaggatgtcttttgtttcaccatgagcaggctatttaaaaaggaaaaccaaacgccgaggaaagttctcttgggcgacaggcgttttgggacgaattgggggagagctggtggaaatttggaatgtcgtgggaaagggaggaagaaaggggcggcgaaggaaggaccaactaaaaatgtaacctgggggcttggggggaaggtaccccgttgaaggg

SEQ ID NO: 132761 - DNA, 1655 bp, Homo sapiens
tgccattggcctcggctccgggcccgctgccggcgtgtgggcgaggctcggggcgcgaggaccgagcagggcggtgggttcgcgagccggggggaggggccggggcggtggcggctgtggccggtactggacccggcgggatgagcgaggtggaggcggcagcggtggctacagcggtccccgcggcgacggtgcccgcgacggcggcaggggtggtagcggtggtggtaccggtgcccgcaggggagccgcagaaaggcggcggggcgggcggcgggggcggagccgcctcgggccccgctgctgggaccccctcggcgccgggctcccgcacccctggcaatccggcgacggcggtctcgggaacccccgcccccccggcccggagtcaggcggacaagccggtgctggcaatccaagtcctgggcactgtcaaatggttcaacgtccggaatggttacggattcatcaacaggaatgacaccaaggaagatgtctttgttcaccagacagctattaaaagaaacaaccccaggaagtttctgcgcagcgttggagatggggagactgtggaatttgatgtcgtggaaggagagaagggcgcagaagccactaatgtaactgggcctgggggagtacccgtgaagggcagccgttatgcccccaaccgacgtaagtcccgccgattcatcccccggcctccctcagttgccccaccacccatggtggcagagatcccctcggcggggacaggacctggcagtaaaggggagcgggctgaagactctgggcaacggccccgacgatggtgccccccacccttcttctaccgacggcggtttgtgcgaggcccccggcctcccaaccagcagcagcctatagagggcactgacagggtagaacccaaagagacagccccattggaggggcaccaacagcagggagatgagcgagtccccccgcccagattccggcccaggtaccgaaggcctttccgccccaggccacgccagcagcctaccacagaaggtggggatggtgagaccaagcccagccaaggtcccgctgatggttcccggcctgagccccagcgcccacgaaaccgcccctacttccagcggagacggcagcaggcccctggcccccagcaggcccctggcccccggcagcccgcagcccctgagacctcagcccctgtcaacagtggggaccccaccaccaccatcctggagtgattccaactcaactcaaaggacacccagagctgccatctggtatctgccagtttttccaaatgacctgtaccctacccagtaccctgctccccctttcccataattcatgacatcaaaacaccagcttttcaccttttccttgagactcaggaggaccaaagcagcagccttttgctttttcttttttcttccctccccttatcaagggttgaaggaagggagccatccttactgttcagagacagcaactccctcccgtaactcaggctgagaaggaaccagccagctcttacctcctcctggttgcttttcttgcccccaccccaagtttatttttgttttcccccggccccctacctctgaagccattttatgatctgtcatgtgccacctgagcctccagtaaaaacaaaaacaggc

SEQ ID NO: 132762 - DNA, 2454 bp, Homo sapiens
cggaaaaccaaaggcggcctggcccgcaggcccagagcgctaactgggctgggagctgcgcaccaaagtggattcccctggtgggaaatcctgccgtaccttcctgggagagagggcggggccggcaggttcagctaaggtcttggggtggagaataaagccccagggtccggccacgcccccgggcgggacacagtgcctagttgactgggttagaactaggcaaacctctgagcctggcaagcaggtgcactggggacccttgcattgggagggctagaaaaaccctcagttatgacctgggggcggcactttgcagaccaggtgagtacccagttctaggtgaaggggctggatttgtaggatgtggggaacgtgacttagagttggaaggctttttgaaagcctgagtccctgtgtgggtgatttcatttggtggactagggtaggaataccttgaagctactagtgaaacctggttggcttgaaggtaacctgaataggtaataaggcagtaggctagatttttttttgttttggagtgtctcaaaactgagttcaactccatctcttccccccatctcactgtccccactgcatctctgcctggcagcaatccaagtcctgggcactgtcaaatggttcaacgtccggaatggttacggattcatcaacaggaatgacaccaaggaagatgtctttgttcaccaggaagcactgaggcagttttcagagggagaaggtccttgggtgcagtggttctcaaagcgtggcccctgcaccagcggcagcagcatcacctgacatccgaattctcaggtcccaccccagacctggtgaatcaatcagagctggggctggggctccacaatcggtttaacgagctctccaggtgattctgatgcacgctacagcttgagaaccactgcttggtggaaagagctctcactgggactgaggtaagaagcacagtgcattctacccactttgcgactgaaggctgtccctgccttttgctttggagttcatatttcttgcctccctttctgaaatccctgaggggtaaagcggggcgggaggggaggtgcggggagtgcatcctggggatggtggtaactgcacaatctgctgaggccctgagttcaggacttttcccctgctaaactttgaccacctccttgctccaccctccagctctagaccccaagtcaaatgttgaaagaatgaaattgggtggtggccccagcaggggtgacagagactcctgtcttgctgtctcacttttcacatggccttttccccaatcagacagctattaaaagaaacaaccccaggaagtttctgcgcagcgttggagatggggagactgtggaatttgatgtcgtggaaggagagaagggcgcagaagccactaatgtaactgggcctgggggagtacccgtgaagggcagccgttatgcccccaaccgacgtaagtcccgccgattcatcccccggcctccctcagttgccccaccacccatggtggcagagatcccctcggcggggacaggacctggcagtaaaggggagcgggctgaagactctgggcaacggccccgacgatggtgccccccacccttcttctaccgacggcggtttgtgcgaggcccccggcctcccaaccagcagcagcctatagagggcactgacagggtagaacccaaagagacagccccattggaggggcaccaacagcagggagatgagcgagtccccccgcccagattccggcccaggtaccgaaggcctttccgccccaggccacgccagcagcctaccacagaaggtggggatggtgagaccaagcccagccaaggtcccgctgatggttcccggcctgagccccagcgcccacgaaaccgcccctacttccagcggagacggcagcaggcccctggcccccagcaggcccctggcccccggcagcccgcagcccctgagacctcagcccctgtcaacagtggggaccccaccaccaccatcctggagtgattccaactcaactcaaaggacacccagagctgccatctggtatctgccagtttttccaaatgacctgtaccctacccagtaccctgctccccctttcccataattcatgacatcaaaacaccagcttttcaccttttccttgagactcaggaggaccaaagcagcagccttttgctttttcttttttcttccctccccttatcaagggttgaaggaagggagccatccttactgttcagagacagcaactccctcccgtaactcaggctgagaaggaaccagccagctcttacctcctcctggttgcttttcttgcccccaccccaagtttatttttgttttcccccggccccctacctctgaagccattttatgatctgtcatgtgccacctgagcctccagtaaaaacaaaaacaggc

SEQ ID NO: 132763 - DNA, 1291 bp, Homo sapiens
ggttccggtccccgaatttttgggataggcggacaagccggtgctggcaatccaagtcctgggcactgtcaaatggttcaacgtccggaatggttacggattcatcaacaggaatgacaccaaggaagatgtctttgttcaccagacagctattaaaagaaacaaccccaggaagtttctgcgcagcgttggagatggggagactgtggaatttgatgtcgtggaaggagagaagggcgcagaagccactaatgtaactgggcctgggggagtacccgtgaagggcagccgttatgcccccaaccgacgtaagtcccgccgattcatcccccggcctccctcagttgccccaccacccatggtggcagagatcccctcggcggggacaggacctggcagtaaaggggagcgggctgaagactctgggcaacggccccgacgatggtgccccccacccttcttctaccgacggcggtttgtgcgaggcccccggcctcccaaccagcagcagcctatagagggcactgacagggtagaacccaaagagacagccccattggaggggcaccaacagcagggagatgagcgagtccccccgcccagattccggcccaggtaccgaaggcctttccgccccaggccacgccagcagcctaccacagaaggtggggatggtgagaccaagcccagccaaggtcccgctgatggttcccggcctgagccccagcgcccacgaaaccgcccctacttccagcggagacggcagcaggcccctggcccccagcaggcccctggcccccggcagcccgcagcccctgagacctcagcccctgtcaacagtggggaccccaccaccaccatcctggagtgattccaactcaactcaaaggacacccagagctgccatctggtatctgccagtttttccaaatgacctgtaccctacccagtaccctgctccccctttcccataattcatgacatcaaaacaccagcttttcaccttttccttgagactcaggaggaccaaagcagcagccttttgctttttcttttttcttccctccccttatcaagggttgaaggaagggagccatccttactgttcagagacagcaactccctcccgtaactcaggctgagaaggaaccagccagctcttacctcctcctggttgcttttcttgcccccaccccaagtttatttttgttttcccccggccccctacctctgaagccattttatgatctgtcatgtgccacctgagcctccagtaaaaacaaaaacaggc

SEQ ID NO: 132764 - DNA, 1373 bp, Homo sapiens
tgccattggcctcggctccgggcccgctgccggcgtgtgggcgaggctcggggcgcgaggaccgagcagggcggtgggttcgcgagccggggggaggggccggggcggtggcggctgtggccggtactggacccggcgggatgagcgaggtggaggcggcagcggtggctacagcggtccccgcggcgacggtgcccgcgacggcggcaggggtggtagcggtggtggtaccggtgcccgcaggggagccgcagaaaggcggcggggcgggcggcgggggcggagccgcctcgggccccgctgctgggaccccctcggcgccgggctcccgcacccctggcaatccggcgacggcggtctcgggaacccccgcccccccggcccggagtcaggcggacaagccggtgctggcaatccaagtcctgggcactgtcaaatggttcaacgtccggaatggttacggattcatcaacaggaatgacaccaaggaagatgtctttgttcaccagacagctattaaaagaaacaaccccaggaagtttctgcgcagcgttggagatggggagactgtggaatttgatgtcgtggaaggagagaagggcgcagaagccactaatgtaactgggcctgggggagtacccgtgaagggcagccgttatgcccccaaccgacgtaagtcccgccgattcatcccccggcctccctcagttgccccaccacccatggtggcagagatcccctcggcggggacaggacctggcagtaaaggggagcgggctgaagactctgggcaacggccccgacgatggtgccccccacccttcttctaccgacggcggtttgtgcgaggcccccggcctcccaaccagcagcagcctatagagggcactgacagggtagaacccaaagagacagccccattggaggggcaccaacagcagggagatgagcgagtccccccgcccagattccggcccaggtaccgaaggcctttccgccccaggccacgccagcagcctaccacagaaggtggggatggtgagaccaagcccagccaaggtcccgctgatggttcccggcctgagccccagcgcccacgaaaccgcccctacttccagcggagacggcagcaggcccctggcccccagcaggcccctggcccccggcagcccgcagcccctgagacctcagcccctgtcaacagtggggaccccaccaccaccatcctggagtgattccaactcaactcaaaggacacccagagctgccatctggtatctgccagtttttccaaatgacctgtaccctacctctgaagccattttatgatctgtcatgtgccacctgagcctccagtaaaaacaaaaacaggc

SEQ ID NO: 132765 - DNA, 1022 bp, Homo sapiens
tgccattggcctcggctccgggcccgctgccggcgtgtgggcgaggctcggggcgcgaggaccgagcagggcggtgggttcgcgagccggggggaggggccggggcggtggcggctgtggccggtactggacccggcgggatgagcgaggtggaggcggcagcggtggctacagcggtccccgcggcgacggtgcccgcgacggcggcaggggtggtagcggtggtggtaccggtgcccgcaggggagccgcagaaaggcggcggggcgggcggcgggggcggagccgcctcgggccccgctgctgggaccccctcggcgccgggctcccgcacccctggcaatccggcgacggcggtctcgggaacccccgcccccccggcccggagtcaggcggacaagccggtgctggcaatccaagtcctgggcactgtcaaatggttcaacgtccggaatggttacggattcatcaacaggaatgacaccaaggaagatgtctttgttcaccagacagctattaaaagaaacaaccccaggaagtttctgcgcagcgttggagatggggagactgtggaatttgatgtcgtggaaggagagaagtgattccaactcaactcaaaggacacccagagctgccatctggtatctgccagtttttccaaatgacctgtaccctacccagtaccctgctccccctttcccataattcatgacatcaaaacaccagcttttcaccttttccttgagactcaggaggaccaaagcagcagccttttgctttttcttttttcttccctccccttatcaagggttgaaggaagggagccatccttactgttcagagacagcaactccctcccgtaactcaggctgagaaggaaccagccagctcttacctcctcctggttgcttttcttgcccccaccccaagtttatttttgttttcccccggccccctacctctgaagccattttatgatctgtcatgtgccacctgagcctccagtaaaaacaaaaacaggc

SEQ ID NO: 132766 - DNA, 1048 bp, Homo sapiens
tgccattggcctcggctccgggcccgctgccggcgtgtgggcgaggctcggggcgcgaggaccgagcagggcggtgggttcgcgagccggggggaggggccggggcggtggcggctgtggccggtactggacccggcgggatgagcgaggtggaggcggcagcggtggctacagcggtccccgcggcgacggtgcccgcgacggcggcaggggtggtagcggtggtggtaccggtgcccgcaggggagccgcagaaaggcggcggggcgggcggcgggggcggagccgcctcgggccccgctgctgggaccccctcggcgccgggctcccgcacccctggcaatccggcgacggcggtctcgggaacccccgcccccccggcccggagtcaggcggacaagccggtgctggcaatccaagtcctgggcactgtcaaatggttcaacgtccggaatggttacggattcatcaacaggtatccaaggaacccagggcgggggtggaatgggtgtcttcccagctggcctgtgggactggacacccgcccaacctcatcgacccctgcggaggcacatggttgcaatgtccagctgatgctggttgaaagcctttaaccgcagcacaaatgtgtgcttcgtgacaagaggaagcctcctccgcatcttcaagggtagcggaggattaatgattcaggaacttggcaaacctggctctgaccctgccagcttctcatctcaccttctggaattgcttcattacttttactctgacatgcctttggggcagaatgtattatagggttctctgtgcctcagggcccccggctggaatcctcaactgatttcctgttatggcagcactcacaactcaactcccttaaagagctgtggctcattcgagccctccacctgttgggactgaggctgacagtgggggtcaggaggaaggagccagaggctgctgctttccttcagtaggcagccccacccctcagcaccgggagaggctgtggcagtggattctgagcagagccaggtctcccccagtg

SEQ ID NO: 132767 - DNA, 1250 bp, Homo sapiens
cggaaaaccaaaggcggcctggcccgcaggcccagagcgctaactgggctgggagctgcgcaccaaagtggattcccctggtgggaaatcctgccgtaccttcctgggagagagggcggggccggcaggttcagctaaggtcttggggtggagaataaagccccagggtccggccacgcccccgggcgggacacagtgcctagttgactgggttagaactaggcaaacctctgagcctggcaagcaggtgcactggggacccttgcattgggagggctagaaaaaccctcagttatgacctgggggcggcactttgcagaccaggtgagtacccagttctaggtgaaggggctggatttgtaggatgtggggaacgtgacttagagttggaaggctttttgaaagcctgagtccctgtgtgggtgatttcatttggtggactagggtaggaataccttgaagctactagtgaaacctggttggcttgaaggtaacctgaataggtaataaggcagtaggctagatttttttttgttttggagtgtctcaaaactgagttcaactccatctcttccccccatctcactgtccccactgcatctctgcctggcagcaatccaagtcctgggcactgtcaaatggttcaacgtccggaatggttacggattcatcaacaggtatccaaggaacccagggcgggggtggaatgggtgtcttcccagctggcctgtgggactggacacccgcccaacctcatcgacccctgcggaggcacatggttgcaatgtccagctgatgctggttgaaagcctttaaccgcagcacaaatgtgtgcttcgtgacaagaggaagcctcctccgcatcttcaagggtagcggaggattaatgattcaggaacttggcaaacctggctctgaccctgccagcttctcatctcaccttctggaattgcttcattacttttactctgacatgcctttggggcagaatgtattatagggttctctgtgcctcagggcccccggctggaatcctcaactgatttcctgttatggcagcactcacaactcaactcccttaaagagctgtggctcattcgagccctccacctgttgggactgaggctgacagtgggggtcaggaggaaggagccagaggctgctgctttccttcagtaggcagccccacccctcagcaccgggagaggctgtggcagtggattctgagcagagccaggtctcccccagtg

SEQ ID NO: 132768 - DNA, 168 bp, Homo sapiens
ggcccactgagcttagactgggcatctagggggacctcagtgaggagctgagggctttgttgaagtcccttccttaacgacccatcctgttctgcaggaatgacaccaaggaagatgtctttgttcaccaggtaagagctaggttagctttctgaggggaagaaccgg

SEQ ID NO: 132769 - DNA, 2252 bp, Homo sapiens
tgccattggcctcggctccgggcccgctgccggcgtgtgggcgaggctcggggcgcgaggaccgagcagggcggtgggttcgcgagccggggggaggggccggggcggtggcggctgtggccggtactggacccggcgggatgagcgaggtggaggcggcagcggtggctacagcggtccccgcggcgacggtgcccgcgacggcggcaggggtggtagcggtggtggtaccggtgcccgcaggggagccgcagaaaggcggcggggcgggcggcgggggcggagccgcctcgggccccgctgctgggaccccctcggcgccgggctcccgcacccctggcaatccggcgacggcggtctcgggaacccccgcccccccggcccggagtcaggcggacaagccggtgctggcaatccaagtcctgggcactgtcaaatggttcaacgtccggaatggttacggattcatcaacaggaatgacaccaaggaagatgtctttgttcaccaggaagcactgaggcagttttcagagggagaaggtccttgggtgcagtggttctcaaagcgtggcccctgcaccagcggcagcagcatcacctgacatccgaattctcaggtcccaccccagacctggtgaatcaatcagagctggggctggggctccacaatcggtttaacgagctctccaggtgattctgatgcacgctacagcttgagaaccactgcttggtggaaagagctctcactgggactgaggtaagaagcacagtgcattctacccactttgcgactgaaggctgtccctgccttttgctttggagttcatatttcttgcctccctttctgaaatccctgaggggtaaagcggggcgggaggggaggtgcggggagtgcatcctggggatggtggtaactgcacaatctgctgaggccctgagttcaggacttttcccctgctaaactttgaccacctccttgctccaccctccagctctagaccccaagtcaaatgttgaaagaatgaaattgggtggtggccccagcaggggtgacagagactcctgtcttgctgtctcacttttcacatggccttttccccaatcagacagctattaaaagaaacaaccccaggaagtttctgcgcagcgttggagatggggagactgtggaatttgatgtcgtggaaggagagaagggcgcagaagccactaatgtaactgggcctgggggagtacccgtgaagggcagccgttatgcccccaaccgacgtaagtcccgccgattcatcccccggcctccctcagttgccccaccacccatggtggcagagatcccctcggcggggacaggacctggcagtaaaggggagcgggctgaagactctgggcaacggccccgacgatggtgccccccacccttcttctaccgacggcggtttgtgcgaggcccccggcctcccaaccagcagcagcctatagagggcactgacagggtagaacccaaagagacagccccattggaggggcaccaacagcagggagatgagcgagtccccccgcccagattccggcccaggtaccgaaggcctttccgccccaggccacgccagcagcctaccacagaaggtggggatggtgagaccaagcccagccaaggtcccgctgatggttcccggcctgagccccagcgcccacgaaaccgcccctacttccagcggagacggcagcaggcccctggcccccagcaggcccctggcccccggcagcccgcagcccctgagacctcagcccctgtcaacagtggggaccccaccaccaccatcctggagtgattccaactcaactcaaaggacacccagagctgccatctggtatctgccagtttttccaaatgacctgtaccctacccagtaccctgctccccctttcccataattcatgacatcaaaacaccagcttttcaccttttccttgagactcaggaggaccaaagcagcagccttttgctttttcttttttcttccctccccttatcaagggttgaaggaagggagccatccttactgttcagagacagcaactccctcccgtaactcaggctgagaaggaaccagccagctcttacctcctcctggttgcttttcttgcccccaccccaagtttatttttgttttcccccggccccctacctctgaagccattttatgatctgtcatgtgccacctgagcctccagtaaaaacaaaaacaggc

SEQ ID NO: 132770 - DNA, 1324 bp, Homo sapiens
cggaaaaccaaaggcggcctggcccgcaggcccagagcgctaactgggctgggagctgcgcaccaaagtggattcccctgcaatccaagtcctgggcactgtcaaatggttcaacgtccggaatggttacggattcatcaacaggaatgacaccaaggaagatgtctttgttcaccagacagctattaaaagaaacaaccccaggaagtttctgcgcagcgttggagatggggagactgtggaatttgatgtcgtggaaggagagaagggcgcagaagccactaatgtaactgggcctgggggagtacccgtgaagggcagccgttatgcccccaaccgacgtaagtcccgccgattcatcccccggcctccctcagttgccccaccacccatggtggcagagatcccctcggcggggacaggacctggcagtaaaggggagcgggctgaagactctgggcaacggccccgacgatggtgccccccacccttcttctaccgacggcggtttgtgcgaggcccccggcctcccaaccagcagcagcctatagagggcactgacagggtagaacccaaagagacagccccattggaggggcaccaacagcagggagatgagcgagtccccccgcccagattccggcccaggtaccgaaggcctttccgccccaggccacgccagcagcctaccacagaaggtggggatggtgagaccaagcccagccaaggtcccgctgatggttcccggcctgagccccagcgcccacgaaaccgcccctacttccagcggagacggcagcaggcccctggcccccagcaggcccctggcccccggcagcccgcagcccctgagacctcagcccctgtcaacagtggggaccccaccaccaccatcctggagtgattccaactcaactcaaaggacacccagagctgccatctggtatctgccagtttttccaaatgacctgtaccctacccagtaccctgctccccctttcccataattcatgacatcaaaacaccagcttttcaccttttccttgagactcaggaggaccaaagcagcagccttttgctttttcttttttcttccctccccttatcaagggttgaaggaagggagccatccttactgttcagagacagcaactccctcccgtaactcaggctgagaaggaaccagccagctcttacctcctcctggttgcttttcttgcccccaccccaagtttatttttgttttcccccggccccctacctctgaagccattttatgatctgtcatgtgccacctgagcctccagtaaaaacaaaaacaggc

SEQ ID NO: 132771 - DNA, 1565 bp, Homo sapiens
tgccattggcctcggctccgggcccgctgccggcgtgtgggcgaggctcggggcgcgaggaccgagcagggcgcaatccaagtcctgggcactgtcaaatggttcaacgtccggaatggttacggattcatcaacaggaatgacaccaaggaagatgtctttgttcaccaggaagcactgaggcagttttcagagggagaaggtccttgggtgcagtggttctcaaagcgtggcccctgcaccagcggcagcagcatcacctgacatccgaattctcaggtcccaccccagacctggtgaatcaatcagagctggggctggggctccacaatcggtttaacgagctctccaggtgattctgatgcacgctacagcttgagaaccactgcttggtggaaagagctctcactgggactgagacagctattaaaagaaacaaccccaggaagtttctgcgcagcgttggagatggggagactgtggaatttgatgtcgtggaaggagagaagggcgcagaagccactaatgtaactgggcctgggggagtacccgtgaagggcagccgttatgcccccaaccgacgtaagtcccgccgattcatcccccggcctccctcagttgccccaccacccatggtggcagagatcccctcggcggggacaggacctggcagtaaaggggagcgggctgaagactctgggcaacggccccgacgatggtgccccccacccttcttctaccgacggcggtttgtgcgaggcccccggcctcccaaccagcagcagcctatagagggcactgacagggtagaacccaaagagacagccccattggaggggcaccaacagcagggagatgagcgagtccccccgcccagattccggcccaggtaccgaaggcctttccgccccaggccacgccagcagcctaccacagaaggtggggatggtgagaccaagcccagccaaggtcccgctgatggttcccggcctgagccccagcgcccacgaaaccgcccctacttccagcggagacggcagcaggcccctggcccccagcaggcccctggcccccggcagcccgcagcccctgagacctcagcccctgtcaacagtggggaccccaccaccaccatcctggagtgattccaactcaactcaaaggacacccagagctgccatctggtatctgccagtttttccaaatgacctgtaccctacccagtaccctgctccccctttcccataattcatgacatcaaaacaccagcttttcaccttttccttgagactcaggaggaccaaagcagcagccttttgctttttcttttttcttccctccccttatcaagggttgaaggaagggagccatccttactgttcagagacagcaactccctcccgtaactcaggctgagaaggaaccagccagctcttacctcctcctggttgcttttcttgcccccaccccaagtttatttttgttttcccccggccccctacctctgaagccattttatgatctgtcatgtgccacctgagcctccagtaaaaacaaaaacaggc

SEQ ID NO: 132772 - DNA, 1277 bp, Homo sapiens
tgccattggcctcggctccgggcccgctgccggcgtgtgggcgaggctcggggcgcgaggaccgagcagggcggtgggttcgcgagccggggggaggggccggggcggtggcggctgtggccggtactggacccggcgggatgagcgaggtggaggcggcagcggtggctacagcggtccccgcggcgacggtgcccgcgacggcggcaggggtggtagcggtggtggtaccggtgcccgcaggggagccgcagaaaggcggcggggcgggcggcgggggcggagccgcctcgggccccgctgctgggaccccctcggcgccgggctcccgcacccctggcaatccggcgacggcggtctcgggaacccccgcccccccggcccggagtcaggcggacaagccggtgctggcaatccaagtcctgggcactgtcaaatggttcaacgtccggaatggttacggattcatcaacaggaatgacaccaaggaagatgtctttgttcaccagacagctattaaaagaaacaaccccaggaagtttctgcgcagcgttggagatggggagactgtggaatttgatgtcgtggaaggagagaaggcctttccgccccaggccacgccagcagcctaccacagaaggtggggatggtgagaccaagcccagccaaggtcccgctgatggttcccggcctgagccccagcgcccacgaaaccgcccctacttccagcggagacggcagcaggcccctggcccccagcaggcccctggcccccggcagcccgcagcccctgagacctcagcccctgtcaacagtggggaccccaccaccaccatcctggagtgattccaactcaactcaaaggacacccagagctgccatctggtatctgccagtttttccaaatgacctgtaccctacccagtaccctgctccccctttcccataattcatgacatcaaaacaccagcttttcaccttttccttgagactcaggaggaccaaagcagcagccttttgctttttcttttttcttccctccccttatcaagggttgaaggaagggagccatccttactgttcagagacagcaactccctcccgtaactcaggctgagaaggaaccagccagctcttacctcctcctggttgcttttcttgcccccaccccaagtttatttttgttttcccccggccccctacctctgaagccattttatgatttccttgttcaattggtgctaaaacacctcaggcgggtcctattaaaacactct

SEQ ID NO: 132773 - DNA, 472 bp, Homo sapiens
cggggaggcagtgctcatgggctggaagcctggctcctggaggtggggtggggcagctgggtgagccctggggagggagtattccctggtcccctcagagccttgttccttgccttaggcctttccgccccaggccacgccagcagcctaccacagaaggtggggatggtgagaccaagcccagccaaggtcccgctgatggttcccggcctgagccccagcgcccacgaaaccgcccctacttccagcggagacggcagcaggcccctggcccccagcaggcccctggcccccggcagcccgcagcccctgaggtgaggacctcagatgtgggatgaaagaaaaggctgagaccagctccctcccccacctgctcctttttctttcctactctatcctttggctcctcccctcccctgccctggccctgccaccaccctcttccatgcagcctgctgggtccccccctggc

SEQ ID NO: 132774 - DNA, 161 bp, Homo sapiens
tcactgagtaagataaaggaaatacatcatgtagccagaaattatcagtagcttacttctctgatagtaggtaattatagtgggaatgataaaaaaaaattacatttttatgaattatacagattttaaaaatttcagttccaccagattccctgtgactt

SEQ ID NO: 132775 - DNA, 409 bp, Homo sapiens
tcccagctcaaatgtcacttctgcagagaggcttctcttagccatccaatataaagtagatagattctctaaatcaggggtctgtgtttcaaatcaggcccccttcctgtttttgtaagtaaagttttattgtcacatgaccatgcccatttgttcacctattgtccaatgcctgctttcacattacaacatcagagttgggtatttgccactgagactgtacaatccatgaagcctatatttactatctagatctttacagacaaagcctgtcaactccttgctccagatcatatcaccctttcttattgctttgttaatagacgtcggtctctgaatgtgtcttgttattcagctattaagttgtctgcatccttcactaaactgtcagctccacaaaggcagaagt

SEQ ID NO: 132776 - DNA, 245 bp, Homo sapiens
ccatagaggatccccggcatactggaccttctcaaaggcggcgtctttgagaaggtaacatctgagcatggatttcaattaagtgaggcatcaagccttatgaatatctgggagaagagtattccaggcagagggaagaataagtatgaaagtccttaagcaagaatgaactttgtgcatcaaggatttcaagaaggctgatgtttctggagttgaattgagcaaaagcagaaggtccaggtatg

SEQ ID NO: 132777 - DNA, 544 bp, Homo sapiens
ccacccctcatattgtcttatgcccaatttctgcctcaaaagaaagagtaaaaactaaaagccagaaatgaaatccacaggcagacagcccggtgccacaccctgggcctggtagttaaagatcgacccctgacctaaccggttgtgttatctatagattctagacattgcatagaaaagcactgtgaaaatccctgtcctgttctgttccgttctgattaccagtgcatgcagcccccagtcacataccccctgcttgctcaatcaatcacgaccttctcacgcagacccccttagagttgtgagcccttaaaagggacggaattgctcactcagggagcttggcttttgagacgcaagtctgctgaagttcccagctgaataaagctccttccctctttaacccggtgtctgaggagttttgtctgtggctcctcctgctacaaaaggaattgctaactagaataaccagtttagagaagaacacaaatgacctggtggacctgaaaaacacagcatgagaacttcatgaagcacacacaag

SEQ ID NO: 132778 - DNA, 173 bp, Homo sapiens
ataacaattcatattagtgtcagcataaaccatctggtaaagtacagttctgtatcgataacattttaaaattagttatgtagaaagagatactcctaaatatttagaattagggatttatctcagaaggctaaagattgtgtaattgaaccaatttcttttttttcgttttt

SEQ ID NO: 132779 - DNA, 425 bp, Homo sapiens
gcagcgaggaggcccggagcatggttcactaacacatgttataatatgtgggttatcaatacacatttataaatacacatctcataaataatgaacgctcttcctgtttcaatgtgaatggaacacagcctactgatcagaatgctactgagtacaacaaagagaaattgatgaaaaaatattgttcttccatggtaagggtaggaatatctatgcgcacgcgtgtgtgtgtgtatgagtgtgtgtctgtctctctctgtctctgtgtgtgtctttctgcctcggtctctttctgtctctctgtctctcaatttgcccctttgagacctacgctgcttcccacgcaatgatttatgcatcttatgcaagaaaaggcagctggttcttatagtgggtttttttaatgtgctcttctttgtcattca

SEQ ID NO: 132780 - DNA, 144 bp, Homo sapiens
cttcattttctgtgtttgtcgttgtacttacttatggaactgaagccagctgattttgcttccaagtcataaacccaaatggaccctctagcttcactgtttcctttcccaggcatgcccttggcttgaccacacctcttctgt

SEQ ID NO: 132781 - DNA, 335 bp, Homo sapiens
cttctggactctgtattctgttccattggtctattattctatttttgtgacactgccacactgtcttaattactgtagctttctaataactgttcatatgtgtgagtgtggatactccaaatttgtcttcaagcttgcatccgccatttgaatctctccctgggatttaagttaaaattacattgaatctagatgaatttggggaggcctgacatttctataagattcaatcttggaatccatgaatatgctgtgtgcccccatttgtttaggtcttatttagtttctttcagtattgttttccttagctatatgggctcccttccctcctggat

SEQ ID NO: 132782 - DNA, 579 bp, Homo sapiens
gtatgcagggagcagggaggatataggcctttcagtccatctccaaggcacgcagtaaattactcctatggcaaatactggagaccaggttactttggtaggggtgagggtggtggtggggtggttctgaagtttcagaagaaggaaagaaaagcatgtcctgaaaaacaagaaggatttcagagaaataagaataaaacctgatgtacttgaacttggcacctttcttggagaagggttaagagcaaggaatcatgaacaaccaggtcatttttgaaccaccatcctccttacctaccatatagggaagtgtggtcacagaacaccaggcatctgcctaaatccagtgtcactcagaaaggctgaggtcactcctgtccagggccagaatctgtcctaacttcaaaggttctgcatgggtcaagcactagagtcactggcacacttggtgctgcacatacagtgtcacacaaacataaccacacatccactcttttatttttttgagacagggtctcgctctgtcacctagactggaatgcagtggttcaaacacggctcactgcagccttgacctct

SEQ ID NO: 132783 - DNA, 732 bp, Homo sapiens
tacagtgagctaggattgtgccactgcactccatcctgggtgacagagcaagatcttatctctaattaaaagaagataaaactttccccttgctaaactaggcataaaatgaagtgttacatgttgatattttaaaagtagcttaaaatatgactgagagataatcatgaatttcatattttggaaaaaataagacagaagagaaaggaaataatttggtttgagataagtagctaagataataggaacaaactgcaagaccataaaacttttccaacaaggctaaaataatgcactatttaaaaagtatttacttttccaaggacctttatgttcttttatgcaatcttctcagtcttttttgcaaaccttctcaaagccatgcaacagactggagaaaaggcagcaaaatacaataaacttcctctgaccttcagaagtttagtaaagttgagtaattaggaaaagatgagatgaaacaacaatttctcatgatcactatttgtaaaccagtctgcacttcaacagtctgcaactactgacaaaatattaggttaaaataggcagaattaactgatagtgataatttaaaagtgctacaattggtaaatttaaatatctaatgtgaaatatctaatgtttgaaatgttgtgacatgcaaaagctatatttaaataacttattaaaacaaacaaatacatatttatgataggaaattataaaataaacaag

SEQ ID NO: 132784 - DNA, 187 bp, Homo sapiens
gaaccgcgttaaacgtccccattatgccccaggatgaggccgtcccattttacaggtggggaaactgagccccaaggaggcaaagtcgcttcccaaggtcacgcacagaggcagagctgggattcgaacctcgccctgcctgattctccaggactcacgttcaaagcagttttggctacaattactg

SEQ ID NO: 132785 - DNA, 4023 bp, Homo sapiens
tctggctcgcgcctgcctgttccctccagcccggacccccctgaaatatgttcaggggcgcttggatgtggcccgggaaagacgccgccgcgctgactatctgctgctgctgctgctgctgggctcccaggccgagcgacaaaccttgcgccgactccgagcgggcgcagcgatggcgactgtccctggcgtccctgctcttcttcaccgtgctgctcgctgaccatctgtggctgtgcgcgggggcccggccccgggccagggagctgagcagcgccatgcggcccccatggggggccggccgggagcggcagccggtgcctcctcgcgcggtgctgcccgtgccgccgccgccgcccggcgagcccagcgcgcccccaggcacctgcggccccagatacagcaacctgaccaaagccgcccccgccgccggctctcggccggtctgcggcggcgtcccagagcccacggggctggacgcagcttgcaccaaattgcaatctttgcagagacttttcgaaccgactactccggccccccctctgcggccccctgactccccttcccgtgccccggccgagttcccctccgccaaaaaaaacttgctcaaaggccactttcggaacttcactctctccttttgcgacacctacacggtctgggacttgctgctgggcatggaccgccccgacagcctggactgtagcctggacaccctgatgggggacctgctggccgtggtggccagcccgggctccggggcctgggaggcgtgtagcaactgtatcgaggcgtaccagcggctggaccgacacgctcaggaaaaatatgacgagttcgacctcgtgctgcataaatacttacaggcggaagagtactcaatccggtcctgcacgaaaggctgtaaggctgtctacaaggcctggctgtgctcagaatacttcagcgtgacccagcaggaatgccagcgctgggtgccctgcaagcaatactgcctggaggtgcagacccggtgcccctttatactccccgacaatgaggaaatggtgtacggagggctccctggctttatctgtacagggttgctggatacttcaccaaagcgtctggaaaccaagtgctgtgacgtgcagtgggtctcctgtgaggcgaagaagaagaagaagttcaaggagtctgaggcccccaaaacccaccagcagcaattccaccactcctatttccaccactaccaccaacagtaccatcactaccacccccatcatgatcccccaggccgtgtcagcaacaagcccgccctgctgccggtctctgggggctcccgcctcagccctagcaggatccggctctgcgtccttgttctcatgctcctccataccgtggtgtccttctccagcaaccagggtggtgggggattggggctggagacactgcctgccctagaggagggcctgacacgggaagagtgacagtagggagggaggacagacctccaccacactgacatcagctccagctcccccaggttgggggggaggggctcctcccatgggaggtgtaggataaggtgggggcgggggaaatgggggaatgacacatcccccccaacctacccccaccccaaaagcagctccaacagaatggccagagggcctcagggagctgcaaaactcatccaggagaaaaaggcaggagcagcaagtgacccctcccaagctcccatctatggggcttagcaaaaaaagggaggaagtgggggctggatatgcccacccctgccaaaagccctgaccccagggaaggaggctgctcacccagccttggccctgcagggaatgttggggggcacagaggggagaagctctttcccccactccacattccttttgttgccaagatccttaattccctcctgcccatatccctacaggcgacggcagacagtgcaatggccctcctgccacttcagcacaccttgccccacctgggaccatcacacgtgaagcaccaggctgggagatgaggtgcacacagttgcagctaggtcggggccccagttaagctgtgccccaccaccctaggcaatgaggggcaggaaaggggtacagaatgaatggtgaaagagagtggagatacggaagggggagaggagaggagaaatgtggacagagggcttgaagacatggccgaataggctactgccacccggctttggggagatgggcgataagtgttgaggtaggctcgagaactgctccccaaatcagtgagaattgcattaggagccctctggggaaagagcacaggaactgagttgctgggcctcaaaacaaaaggctgcaggcacatggttagactgccgctgtctgaaggaccatatcttacagaaggtgcacatactcccaagggccactcttgccctggagatcttggccttggggccaaagacatttccatttccgatctccatggggaggagggacttaagcccaagtgggtcaggcctggcccaggtccttatactcccctatcttgtcctagcccaggcctccatgaaggagaacctggtggcattgccccagagctctccagagatgagcctcccctatccccaccctgtccccgtccccagcctaccaaagagtattcacacctttccatccctgactctatgggttactgtcccaattgcgaaacacccatactcctcttcaccctgtagcagggtcttctgctccagtcaccccggcctcttgcaagagaaagtccagggactggcaagaagaccctttgactaaagataatgtgctgtcatatcttggctgagaaactgttgagtcaggctagaggactggacaagagaagaggcattgagagcccccttgggagccattagccttgctctggtctgctgtgtggggttggggagtaggggggatcccacattgcctgggacatctgaatgctgatacgaatggacaggaaagggagccagagctgtatacctgggacaggccagggagcctttagtgccagcagggcctgtgtcctgggatgtgatgctagtgagtgaatgggagggcgggcctggagctgcgtgagagtgaaaccaagaagcggatggggaagggagagctggccttggtcagcttagggatgaatggagaaggaatcattcatgggcctcggctaggtcccagactgattacatgagactggggagtccttccctgccagttttctcatttattacagcctatcccccaaccctacccctgtgccctgcctacacactcccgtttggccctcagcactttgggcctggtcacataccccatgccctagagtgctcttttcagctggggaggggaagaggtgctggctcctttctagacatgcttatgtataagtaaaggggcaggtgcttgggctccagagagaccctaggtactgccttctaactcctgcatcctcagaaggggaaaagggactgggaagtaaagggaaaccatatggccccagggaatggacccttggagactcccatcctctcttccccctcaccaagtgcccaggagacccctggctcagaccagcccaaggccttgcccagtggcaggggaaaggggcacctcactccacctcaaagtcatttgactgcccccatccaccccaccaccctaatcttccaccacctctccggctgcccctgccctccatcacagacagcagagccgggcagctttcttatgccattttctacactgtgcttcatgagtaggactttcttgcactagttcctatgactgagtctccaaactggtttcctagtagtcccccatcccttcctcccttacccagctatgattcagttgtctctgccctccctcttaccctgcctctgtgtttcggtgagagtctctgtatatgtactgctttctgttttgttgcattgtggggcagaggcctctctgctcttgtttaaccccataaagaaataaatggtaagacttgatggtaacc

SEQ ID NO: 132786 - DNA, 3777 bp, Homo sapiens
tctggctcgcgcctgcctgttccctccagcccggacccccctgaaatatgttcaggggcgcttggatgtggcccgggaaagacgccgccgcgctgactatctgctgctgctgctgctgctgggctcccaggccgagcgacaaaccttgcgccgactccgagcgggcgcagcgatggcgactgtccctggcgtccctgctcttcttcaccgtgctgctcgctgaccatctgtggctgtgcgcgggggcccggccccgggccagggagctgagcagcgccatgcggcccccatggggggccggccgggagcggcagccggtgcctcctcgcgcggtgctgcccgtgccgccgccgccgcccggcgagcccagcgcgcccccaggcacctgcggccccagatacagcaacctgaccaaagccgcccccgccgccggctctcggccggtctgcggcggcgtcccagagcccacggggctggacgcagcttgcaccaaattgcaatctttgcagagacttttcgaaccgactactccggccccccctctgcggccccctgactccccttcccgtgccccggccgagttcccctccgccaaaaaaaacttgctcaaaggccactttcggaacttcactctctccttttgcgacacctacacggtctgggacttgctgctgggcatggaccgccccgacagcctggactgtagcctggacaccctgatgggggacctgctggccgtggtggccagcccgggctccggggcctgggaggcgtgtagcaactgtatcgaggcgtaccagcggctggaccgacacgctcaggaaaaatatgacgagttcgacctcgtgctgcataaatacttacaggcggaagagtactcaatccggtcctgcacgaaaggctgtaaggctgtctacaaggcctggctgtgctcagaatacttcagcgtgacccagcaggaatgccagcgctgggtgccctgcaagcaatactgcctggaggtgcagacccggtgcccctttatactccccgacaatgaggaaatggtgtacggagggctccctggctttatctgtacagggttgctggatacttcaccaaagcgtctggaaaccaagtgctgtgacgtgcagtgggtctcctgtgaggcgaagaagaagaagaagttcaaggagtctgaggcccccaaaacccaccagcagcaattccaccactcctatttccaccactaccaccaacagtaccatcactaccacccccatcatgatcccccaggccgtgtcagcaacaagcccgccctgctgccggtctctgggggctcccgcctcagccctagcaggatccggctctgcgtccttgttctcatgctcctccataccgtggtgtccttctccagcaaccagggtggtgggggattggggctggagacactgcctgccctagaggagggcctgacacgggaagagtgacagtagggagggaggacagacctccaccacactgacatcagctccagctcccccaggttgggggggaggggctcctcccatgggaggtgtaggataaggtgggggcgggggaaatgggggaatgacacatcccccccaacctacccccaccccaaaagcagctccaacagaatggccagagggcctcagggagctgcaaaactcatccaggagaaaaaggcaggagcagcaagtgacccctcccaagctcccatctatggggcttagcaaaaaaagggaggaagtgggggctggatatgcccacccctgccaaaagccctgaccccagggaaggaggctgctcacccagccttggccctgcagggaatgttggggggcacagaggggagaagctctttcccccactccacattccttttgttgccaagatccttaattccctcctgcccatatccctacaggcgacggcagacagtgcaatggccctcctgccacttcagcacaccttgccccacctgggaccatcacacgtgaagcaccaggctgggagatgaggtgcacacagttgcagctaggtcggggccccagttaagctgtgccccaccaccctaggcaatgaggggcaggaaaggggtacagaatgaatggtgaaagagagtggagatacggaagggggagaggagaggagaaatgtggacagagggcttgaagacatggccgaataggctactgccacccggctttggggagatgggcgataagtgttgaggtaggctcgagaactgctccccaaatcagtgagaattgcattaggagccctctggggaaagagcacaggaactgagttgctgggcctcaaaacaaaaggctgcaggcacatggttagactgccgctgtctgaaggaccatatcttacagaaggtgcacatactcccaagggccactcttgccctggagatcttggccttggggccaaagacatttccatttccgatctccatggggaggagggacttaagcccaagtgggtcaggcctggcccaggtccttatactcccctatcttgtcctagcccaggcctccatgaaggagaacctggtggcattgccccagagctctccagagatgagcctcccctatccccaccctgtccccgtccccagcctaccaaagagtattcacacctttccatccctgactctatgggttactgtcccaattgcgaaacacccatactcctcttcaccctgtagcagggtcttctgctccagtcaccccggcctcttgcaagagaaagtccagggactggcaagaagaccctttgactaaagataatgtgctgtcatatcttggctgagaaactgttgagtcaggctagaggactggacaagagaagaggcattgagagcccccttgggagccattagccttgctctggtctgctgtgtggggttggggagtaggggggatcccacattgcctgggacatctgaatgctgatacgaatggacaggaaagggagccagagctgtatacctgggacaggccagggagcctttagtgccagcagggcctgtgtcctgggatgtgatgctagtgagtgaatgggagggcgggcctggagctgcgtgagagtgaaaccaagaagcggatggggaagggagagctggccttggtcagcttagggatgaatggagaaggaatcattcatgggcctcggctaggtcccagactgattacatgagactggggagtccttccctgccagttttctcatttattacagcctatcccccaaccctacccctgtgccctgcctacacactcccgtttggccctcagcactttgggcctggtcacataccccatgccctagagtgctcttttcagctggggaggggaagaggtgctggctcctttctagacatgcttatgtataagtaaaggggcaggtgcttgggctccagagagaccctaggtactgccttctaaccctgccctccatcacagacagcagagccgggcagctttcttatgccattttctacactgtgcttcatgagtaggactttcttgcactagttcctatgactgagtctccaaactggtttcctagtagtcccccatcccttcctcccttacccagctatgattcagttgtctctgccctccctcttaccctgcctctgtgtttcggtgagagtctctgtatatgtactgctttctgttttgttgcattgtggggcagaggcctctctgctcttgtttaaccccataaagaaataaatggtaagacttgatggtaacc

SEQ ID NO: 132787 - DNA, 377 bp, Homo sapiens
caagtaccaaacgatggcaaagagatactgcagaagtttgaggcaaagagctaatcactgtgaggggaacggaggtggaggagcttattaagggtagaacttgagatgtgccatccatactgagtaggtaaaaggagaagtactgatttttaaaatgtgtttgtgtgcaccttgggcatatgaaggcgaggcaggagacaaagcagggcggtaagctctcgctaacaattaaaacacagatcttgaccaggccgggtggctcacacctgtaatcccagcactttgggaggttgaggtaggcagactgcttgagcccagaagcttgagcccagcctgggccacatggtgaaactctctctaccgaaaaaacaacaaca

SEQ ID NO: 132788 - DNA, 196 bp, Homo sapiens
agaattgcctcctttcactttgcagtgaccggatccttcaagatgttccatttaacaggtttgaagcagccaagcttgtcatgcagtggctttgcaaccatgaggatcaaaacatgcaaaggatggcagttgctatcatttctatcctggctgccaagctttctacagaacaaactgcacagcttggtactgagct

SEQ ID NO: 132789 - DNA, 290 bp, Homo sapiens
ccttgcagcgtgctggagcaggaagctcccactaccctgtggagtcaatcagcgtaacaaacctatctgtacctgcgcagtaggaaagtattttaaagtaaattacaggtatccaaacacagcctttcctcacagggttggtgtgaaggccagctatgttgttttgtgtgtggaatcaatcacttggactataaatcgttgaagttactgcttctgcgaaatgtctctgctttttttttccacaaagccaccagtgatttctctttaatgggaaaatctggacctcttct

SEQ ID NO: 132790 - DNA, 308 bp, Homo sapiens
tcacagagtgggctggagagccaagctgttctttcggggtgcacagtgcaccagccataacacagcttagaaacatggatgagtatacctcaagacaggtgaacacggagtggggagcaaaagaaggcagaaactcctctgagtttcacaagcatcaggcacagatcagggcacagaggaagaagaaagaaggtttaccactggtctgtctctgtaaattgttacagagcaattttactttgtgttatttaggatcaagaaacaagtgttatttaaaagttctcttaccctccaacctttgtcatact

SEQ ID NO: 132791 - DNA, 378 bp, Homo sapiens
gagaggggtatacacagggaggccaggcagcctggagttagtcgaccgttgcgagacgttgagctgcggcagatgagtccaaagccgagagcctcgggacctccggccaaggccaaggagacaggaaagaggaagtcctctccctcagcacgagctgccgccggaggagccagtgagcgaggggacccagcacgaccccctgagtcaggagagcgagctggaggaaccactgagtaaggggcgcccatctactcccctatctccctgagcagcaactaagtttaggcccagctgccagacctcagagatctcaccagcagggtgcttcccatgttgatgacaataaaatgaatgtgttgcaaaccgaaaaaaaagaca

SEQ ID NO: 132792 - DNA, 546 bp, Homo sapiens
cccctcgcctctttcctcacaagaagcctctcctgtcctcacttggcacaaccccccaacccggcccccaccgcttctgaggacacgtccctgttcccagcctcctccatcctcgtccctaaaccagagcccttctgtgatctccctgttgtccttccagactaccaaggtggccgagaagggagaagcagttcgtggagggagacgcgggaagaaaggggctgcgacaaagatggcggccgtgacggcacctgaggcggagagcgggccagcggcacccggccccagcgaccagcccagccaggagctccctcagcacgagctgccgccggaggagccagtgagcgaggggacccagcacgaccccctgagtcaggagagcgagctggaggaaccactgagtaaggggcgcccatctactcccctatctccctgagcagcaactaagtttaggcccagctgccagacctcagagatctcaccagcagggtgcttcccatgttgatgacaataaaatgaatgtgttgcaaaccgaaaaaaaagaca

SEQ ID NO: 132793 - DNA, 560 bp, Homo sapiens
gagaggggtatacacagggaggccaggcagcctggagttagtcgaccgttgcgagacgttgagctgcggcagatgagtccaaagccgagagcctcgggacctccggccaaggccaaggagacaggaaagaggaagtcctcctctcagccgagccccagtggcccgaagaagaagactaccaaggtggccgagaagggagaagcagttcgtggagggagacgcgggaagaaaggggctgcgacaaagatggcggccgtgacggcacctgaggcggagagcgggccagcggcacccggccccagcgaccagcccagccaggagctccctcagcacgagctgccgccggaggagccagtgagcgaggggacccagcacgaccccctgagtcaggagagcgagctggaggaaccactgagtaaggggcgcccatctactcccctatctccctgagcagcaactaagtttaggcccagctgccagacctcagagatctcaccagcagggtgcttcccatgttgatgacaataaaatgaatgtgttgcaaaccgaaaaaaaagaca

SEQ ID NO: 132794 - DNA, 820 bp, Homo sapiens
tgctattggctaacattacagtttcgctttaaccaatgggattgcggttttgaaaaacacttattttgattggacaaagttaatatacgtttccaggactcaccactggttaaacgcacaacttcattctctaccccacttgcgttaagaagcagtgaataagcggtaggttgacagagctaccgtcttcctgtttttttcctccaattttccggcagttactcccagtcatgcccgagccctcaaagtccgctcctgccccgaagaaaggctccaagaaggcagtgacaaaggcccagaagaaggacggcaagaagcgcaagcgcagccgcaaggagagctactccgtgtacgtgtacaaggtgctgaagcaggtccaccccgacaccggtatctcgtccaaggccatgggcatcatgaactccttcgtcaatgacatcttcgagcgcatcgccggcgaggcttcccgcctggcgcattacaacaagcgctcgaccatcacctccagggagatccagacggccgtgcgcctgctgctgccaggggagctggccaagcacgcggtgtcggagggcaccaaggccgtcaccaagtacaccagttccaagtgagcccgcccaccgcggaacgttcggaagagaaaaagaagattcacagagagcattaagaaggcccatggattcagaaagctcaagatttggctaaaattaagagtcagcaaccaatctccagatgacatttatattgcaagagattgaatgcagaaagaagaattcagctttcttttattaaacaaggcattagagagatttgcaaaatt

SEQ ID NO: 132795 - DNA, 1187 bp, Homo sapiens
tgctattggctaacattacagtttcgctttaaccaatgggattgcggttttgaaaaacacttattttgattggacaaagttaatatacgtttccaggactcaccactggttaaacgcacaacttcattctctaccccacttgcgttaagaagcagtgaataagcggtaggttgacagagctaccgtcttcctgtttttttcctccaattttccggcagttactcccagtcatgcccgagccctcaaagtccgctcctgccccgaagaaaggctccaagaaggcagtgacaaaggcccagaagaaggacggcaagaagcgcaagcgcagccgcaaggagagctactccgtgtacgtgtacaaggtgctgaagcaggtccaccccgacaccggtatctcgtccaaggccatgggcatcatgaactccttcgtcaatgacatcttcgagcgcatcgccggcgaggcttcccgcctggcgcattacaacaagcgctcgaccatcacctccagggagatccagacggccgtgcgcctgctgctgccaggggagctggccaagcacgcggtgtcggagggcaccaaggccgtcaccaagtacaccagttccaagtgagcccgcccaccgcggaacgttcggaagagaaaaagaagattcacagagagcattaagaaggcccatggattcagaaagctcaagatttggctaaaattaagagtcagcaaccaatctccagaactatctatagccaccacttttcacattaagatgatccttctcaagccatcagagaactaagtgacatctgcaatgaaatggcttcaccacttctgtcctcgggtaattctgcaatctatttttgctggatccaatccctgaagaccatcctgcctttctaagggatgcttctccctttcagctaccttcatgtcttttaatgcaattgttgcttctttctgtcctggtgttgtactttggcagtggtcacacccatggagcacagacttctacaaggcacaaggcatgactttgatttttctgttgtaatttgatggaattggccaggcgtggtagctcatgcctgtaatcccagcactttgggaagccaaggcaggcggatcacctgaggtcaggagttggagactagactggccaacatggcaaaaccctgtctctactaaaaatacaaaa

SEQ ID NO: 132796 - DNA, 2377 bp, Homo sapiens
tgctattggctaacattacagtttcgctttaaccaatgggattgcggttttgaaaaacacttattttgattggacaaagttaatatacgtttccaggactcaccactggttaaacgcacaacttcattctctaccccacttgcgttaagaagcagtgaataagcggtaggttgacagagctaccgtcttcctgtttttttcctccaattttccggcagttactcccagtcatgcccgagccctcaaagtccgctcctgccccgaagaaaggctccaagaaggcagtgacaaaggcccagaagaaggacggcaagaagcgcaagcgcagccgcaaggagagctactccgtgtacgtgtacaaggtgctgaagcaggtccaccccgacaccggtatctcgtccaaggccatgggcatcatgaactccttcgtcaatgacatcttcgagcgcatcgccggcgaggcttcccgcctggcgcattacaacaagcgctcgaccatcacctccagggagatccagacggccgtgcgcctgctgctgccaggggagctggccaagcacgcggtgtcggagggcaccaaggccgtcaccaagtacaccagttccaagtgagcccgcccaccgcggaacgttcggaagagaaaaagaagattcacagagagcattaagaaggcccatggattcagaaagctcaagatttggctaaaattaagagtcagcaaccaatctccagatgacatttatattgcaagagattgaatgcagaaagaagaattcagctttcttttattaaacaaggcattagagagatttgcaaaattgtaaaacagtgtcactctttttattttaaaaaatagctatttttcataaaatatgtatgctaacataaaatgggtttattactgttatttttaaatgaattaaccaaatttttttgttttactatataatacggtaaatgtcaatagttataacctacagaaacacaaattctttggattgcaaagctccaccacctaatatgctatagatcaaggttcaaaagagagctccctggaaaactccttggtgttttgttcactgaaatattatttaaggagaacatattttattttaatgactgtcattgctggcatccgaactctaattcccaaggcatcctcaaattatcatctgcatcacttcattactttttaagagtgtaagtgggtcatgagaccagaaggttcaagaactgctgccttagggtatataccacactagtaatgttcatttgtgttcaaatgactatttttcaaagtatttggagtatcccttcctgcacacttatgttatgatctagatatacagatccatttactttgttttgctgttgatgtctaggattggactttttaatgtttggttctatcattacataaaatatttttacatagtcccaaggtcaaatcaaattatatccaaagaaatctttctccttcatgctaatagcctctcttgccttagagtaataattttaaaggttatgatatatccttctgttgtttattataagcatatatgtatgtattcttagggaatattaacttcattttgctgttgatgtctagggattggactttttaatatttgtttctaccgttacataaaatatttttacatagtcccaaggtcaaatcaaattatatccaaagaaatctttctccttcatcctaatagcctctcttaccttagagtaataattttaaatgttatgatatatccttctgttgtttattataagcatatatatatgtattctagggaagattaactcgtatcacaggagaggagactggaagttgatactatgcaagataaactttgtcacagacagtcacctgttctttggagggcccattcatctttcccaaaaataatttcctctcccctacattgcctacatcccccttcctgtcttccctatgaagacagtatataagcttctagatctcactgggcttggggggcattcacttatttttcatgtgatacctccatgcacaaaataaaatttttttttttcgagacggagtcttgccgcgtctcccaggctggagtgcagtggcgcgatctcggctcactgcaagctccgcctccggggtttaggccattctcctgccccagcctcctgagtagctgggactacaggcgcccgccaccatgcccggctaatttttttgtgttttcagtaccgatggggtttcactgtgttagctaggatggtctcgatctcctgacctcgtgatccgcccgccttggcctcccaaagtgctgggattacaggcgtgagccaccacgcccggccacaaaataaatttttatatctttctcttatt

SEQ ID NO: 132797 - DNA, 2034 bp, Homo sapiens
caaggttcaaaagagagctccctggaaaactccttggtgctttgttcactgaaatgttatgttaggagagcttatttcatcttagtggctgtcattgctgggaatccaaactctaattcccaaggcattctcaaattatcatctgcatcagcttctgccatagccatccccaccagtgtcaccaacaatattgttactaagaaaataattttcaaaaaatgtttgcttttttttttgtcctaaggacagtgatttctataatggcaacaattgcagttaatttcaaaatgtggtctggggacccctgaggcccttgtagtgggtctgtgggctaatattatttcatactaattctgacactaatttttctttttcattattattttcagatgacatttatattgcaagagattgaatgcagaaagaagaattcagctttcttttattaaacaaggcattagagagatttgcaaaattgtaaaacagtgtcactctttttattttaaaaaatagctatttttcataaaatatgtatgctaacataaaatgggtttattactgttatttttaaatgaattaaccaaatttttttgttttactatataatacggtaaatgtcaatagttataacctacagaaacacaaattctttggattgcaaagctccaccacctaatatgctatagatcaaggttcaaaagagagctccctggaaaactccttggtgttttgttcactgaaatattatttaaggagaacatattttattttaatgactgtcattgctggcatccgaactctaattcccaaggcatcctcaaattatcatctgcatcacttcattactttttaagagtgtaagtgggtcatgagaccagaaggttcaagaactgctgccttagggtatataccacactagtaatgttcatttgtgttcaaatgactatttttcaaagtatttggagtatcccttcctgcacacttatgttatgatctagatatacagatccatttactttgttttgctgttgatgtctaggattggactttttaatgtttggttctatcattacataaaatatttttacatagtcccaaggtcaaatcaaattatatccaaagaaatctttctccttcatgctaatagcctctcttgccttagagtaataattttaaaggttatgatatatccttctgttgtttattataagcatatatgtatgtattcttagggaatattaacttcattttgctgttgatgtctagggattggactttttaatatttgtttctaccgttacataaaatatttttacatagtcccaaggtcaaatcaaattatatccaaagaaatctttctccttcatcctaatagcctctcttaccttagagtaataattttaaatgttatgatatatccttctgttgtttattataagcatatatatatgtattctagggaagattaactcgtatcacaggagaggagactggaagttgatactatgcaagataaactttgtcacagacagtcacctgttctttggagggcccattcatctttcccaaaaataatttcctctcccctacattgcctacatcccccttcctgtcttccctatgaagacagtatataagcttctagatctcactgggcttggggggcattcacttatttttcatgtgatacctccatgcacaaaataaaatttttttttttcgagacggagtcttgccgcgtctcccaggctggagtgcagtggcgcgatctcggctcactgcaagctccgcctccggggtttaggccattctcctgccccagcctcctgagtagctgggactacaggcgcccgccaccatgcccggctaatttttttgtgttttcagtaccgatggggtttcactgtgttagctaggatggtctcgatctcctgacctcgtgatccgcccgccttggcctcccaaagtgctgggattacaggcgtgagccaccacgcccggccacaaaataaatttttatatctttctcttatt

SEQ ID NO: 132798 - DNA, 2350 bp, Homo sapiens
tgctattggctaacattacagtttcgctttaaccaatgggattgcggttttgaaaaacacttattttgattggacaaagttaatatacgtttccaggactcaccactggttaaacgcacaacttcattctctaccccacttgcgttaagaagcagtgaataagcggtaggttgacagagctaccgtcttcctgtttttttcctccaattttccggcagttactcccagtcatgcccgagccctcaaagtccgctcctgccccgaagaaaggctccaagaaggcagtgacaaaggcccagaagaaggacggcaagaagcgcaagcgcagccgcaaggagagctactccgtgtacgtgtacaaggtgctgaagcaggtccaccccgacaccggtatctcgtccaaggccatgggcatcatgaactccttcgtcaatgacatcttcgagcgcatcgccggcgaggcttcccgcctggcgcattacaacaagcgctcgaccatcacctccagggagatccagacggccgtgcgcctgctgctgccaggggagctggccaagcacgcggtgtcggagggcaccaaggccgtcaccaagtacaccagttccaagaagagaaaaagaagattcacagagagcattaagaaggcccatggattcagaaagctcaagatttggctaaaattaagagtcagcaaccaatctccagatgacatttatattgcaagagattgaatgcagaaagaagaattcagctttcttttattaaacaaggcattagagagatttgcaaaattgtaaaacagtgtcactctttttattttaaaaaatagctatttttcataaaatatgtatgctaacataaaatgggtttattactgttatttttaaatgaattaaccaaatttttttgttttactatataatacggtaaatgtcaatagttataacctacagaaacacaaattctttggattgcaaagctccaccacctaatatgctatagatcaaggttcaaaagagagctccctggaaaactccttggtgttttgttcactgaaatattatttaaggagaacatattttattttaatgactgtcattgctggcatccgaactctaattcccaaggcatcctcaaattatcatctgcatcacttcattactttttaagagtgtaagtgggtcatgagaccagaaggttcaagaactgctgccttagggtatataccacactagtaatgttcatttgtgttcaaatgactatttttcaaagtatttggagtatcccttcctgcacacttatgttatgatctagatatacagatccatttactttgttttgctgttgatgtctaggattggactttttaatgtttggttctatcattacataaaatatttttacatagtcccaaggtcaaatcaaattatatccaaagaaatctttctccttcatgctaatagcctctcttgccttagagtaataattttaaaggttatgatatatccttctgttgtttattataagcatatatgtatgtattcttagggaatattaacttcattttgctgttgatgtctagggattggactttttaatatttgtttctaccgttacataaaatatttttacatagtcccaaggtcaaatcaaattatatccaaagaaatctttctccttcatcctaatagcctctcttaccttagagtaataattttaaatgttatgatatatccttctgttgtttattataagcatatatatatgtattctagggaagattaactcgtatcacaggagaggagactggaagttgatactatgcaagataaactttgtcacagacagtcacctgttctttggagggcccattcatctttcccaaaaataatttcctctcccctacattgcctacatcccccttcctgtcttccctatgaagacagtatataagcttctagatctcactgggcttggggggcattcacttatttttcatgtgatacctccatgcacaaaataaaatttttttttttcgagacggagtcttgccgcgtctcccaggctggagtgcagtggcgcgatctcggctcactgcaagctccgcctccggggtttaggccattctcctgccccagcctcctgagtagctgggactacaggcgcccgccaccatgcccggctaatttttttgtgttttcagtaccgatggggtttcactgtgttagctaggatggtctcgatctcctgacctcgtgatccgcccgccttggcctcccaaagtgctgggattacaggcgtgagccaccacgcccggccacaaaataaatttttatatctttctcttatt

SEQ ID NO: 132799 - DNA, 701 bp, Homo sapiens
tgctattggctaacattacagtttcgctttaaccaatgggattgcggttttgaaaaacacttattttgattggacaaagttaatatacgtttccaggactcaccactggttaaacgcacaacttcattctctaccccacttgcgttaagaagcagtgaataagcggtaggttgacagagctaccgtcttcctgtttttttcctccaattttccggcagttactcccagtcatgcccgagccctcaaagtccgctcctgccccgaagaaaggctccaagaaggcagtgacaaaggcccagaagaaggacggcaagaagcgcaagcgcagccgcaaggagagctactccgtgtacgtgtacaaggtgctgaagcaggtccaccccgacaccggtatctcgtccaaggccatgggcatcatgaactccttcgtcaatgacatcttcgagcgcatcgccggcgaggcttcccgcctggcgcattacaacaagcgctcgaccatcacctccagggagatccagacggccgtgcgcctgctgctgccaggggagctggccaagcacgcggtgtcggagggcaccaaggccgtcaccaagtacaccagttccaagtgagcccgcccaccgcggaacgttcggtcagtctcggcccacaccccaaaggctcttttcagagccactcagtcttcccaaagagaactggca

SEQ ID NO: 132800 - DNA, 842 bp, Homo sapiens
tgctattggctaacattacagtttcgctttaaccaatgggattgcggttttgaaaaacacttattttgattggacaaagttaatatacgtttccaggactcaccactggttaaacgcacaacttcattctctaccccacttgcgttaagaagcagtgaataagcggtaggttgacagagctaccgtcttcctgtttttttcctccaattttccggcagttactcccagtcatgcccgagccctcaaagtccgctcctgccccgaagaaaggctccaagaaggcagtgacaaaggcccagaagaaggacggcaagaagcgcaagcgcagccgcaaggagagctactccgtgtacgtgtacaaggtgctgaagcaggtccaccccgacaccggtatctcgtccaaggccatgggcatcatgaactccttcgtcaatgacatcttcgagcgcatcgccggcgaggcttcccgcctggcgcattacaacaagcgctcgaccatcacctccagggagatccagacggccgtgcgcctgctgctgccaggggagctggccaagcacgcggtgtcggagggcaccaaggccgtcaccaagtacaccagttccaagtgagcccgcccaccgcggaacgttcggaagagaaaaagaagattcacagagagcattaagaaggcccatggattcagaaagctcaagatttggctaaaattaagagtcagcaaccaatctccaggtacccttgcttctcaatctgtagactaaagaccctagaccaaaaatcctgattcccaggaagtgcttggaggatcttgatggtgcttcattacagttggtttctttaca

SEQ ID NO: 132801 - DNA, 144 bp, Homo sapiens
atgccactctctcctggcctactgggtttctgctgggaaatctgctgatagtcatattgtctcctttgtatgtgatgtgtttattatctcttgctgttctcaaaatgttttgtctttgatttttgacagctagattattgtatg

SEQ ID NO: 132802 - DNA, 562 bp, Homo sapiens
acccaaggggtggtggacagaaaaatggatcaacacactgtggtccatccacacagtggaatattactcagccatgaaaaggaagggaatcctgacgcaggctacagtgcggaggcatcttgaggacctcaggctcagtgagagaagccagacacagagggacaaatgccgtgtgattccactcctaggaagtccctggagtcatcaaattcacagagacagaaagtaggatggggatgccaggggctggggagggagatggggagtgagtgtttcatagactcaaagagtttcagtttgggaagataaagttctggagagggtggaggtgatggttgcacagccacgtgaatgtgtttttaacgctgctgaactgtgcacttagaagtaggtcacgctgggcacagtgactcacgcctgtaatcccagcacttcgggaggccaagacgggtggatcacctgaggtcaggagttcgagaccagcctggccgacatggcgaaaccccgtctctactaagaacacaaaaattagccaggcatggtggcgggcacctgtaatccc

SEQ ID NO: 132803 - DNA, 551 bp, Homo sapiens
ctaaaactgtaaacctctcagaagaaaacacaggagtaaatcatgactgtgggttagccaaagccttcttaaataaggaatcaaaagcataaatgactaaagaaacatcaaaagtaaaaacttgtatgcatcaatggatactaccaaagaaagtcaaagacaaaccacaaaacaggtgaaaatatttgtaaatcattattatctggtaaagaatttgtatctagaatatatgagcaacatttacaactcactaaaaaaaacacaaataacccaattaaaaactgggcaaaagtgggaggttgaggtggaaggatcacttgaaaccaggagtttgagaccaatctgggcaacaaagcaagacctcatctctacaaaaaatttaaaaattagctgggcacagcggcatgcacgtgtaatgtcagtcattcagcaggctgagtcagaaggatcatttgaggcctggagttgagggctgcagtgagctatgatcacaacactgcactgcagcctgtggtgacaaagaaagaccctgtctcgaaaaaaaaaaaaaa

SEQ ID NO: 132804 - DNA, 452 bp, Homo sapiens
  misc_feature (400)..(400): n is a, c, g, or t
  misc_feature (406)..(406): n is a, c, g, or t
  misc_feature (429)..(429): n is a, c, g, or t
agaaaaagggaaatgaagtttgggctacttataggagtgaaaataaactctgtgatgtgccagcaccagcacaggctcttgtagtttcctcccaactttgggctcagtggtatcatgttggtggccagtttaggagtatttatatcacaaaatccacaagtgctgcaaatcaaggcttttctattctagaatgctggttgataaataatagcctcaacatttaccagaacactataaaacaattcagtgatcataaagttattatccacagtgggaccagctcgagtctcaagtgggacaatgttatcttacagactgggagagagtgctagtgaatgcttttgtcttcaatgcccatctcttgggaaatattggaaggtgggagtaggcaaccggggcnttatantatctcttggggaaaagggaccntcaggcatggggggattttcccc

SEQ ID NO: 132805 - DNA, 736 bp, Homo sapiens
gcacgattgtatgctgttcagaagaatggactctggcaactggttgcctgggcttgggccctggctctccccctcccttgtttgacgtctgaatctttcaatcctttcatgaagattctttgtctgcaaaatgtgcagatcctaagagtactattttatgattgttttaatgattaaaaaattatacatgaaacgcatctacaaaatgcttattttacagaaatagtaaacgttagctattatggaaaatgacattcatgttggattgcataaattttatgaactttatgcttactcagagctttatgctttctttctttcttctttctcttttcttttcttgtgcttaaagtgatgtcaaacatagcacctttacaaattcttttgaccagttgtgctagtctttgaaggtgatgatttatgaagtgaccacattgaatcttctcttggaataagtgtttatggaatcttagttatctcaaagataaagagagaatgggtaacctgtcatggtttaatgcatcagaaatacgttgagattaacagatatgcagtgagacatctattatattcaggtgaagttcatctttaaagagtagagtattttaataattttgaaaattaaatagagaaatttatctacaagtctggaaatatagtttgtgcacctcatattactaactaacccagtttgtaactttgttttattccattactgacaactgaacacctgctc

SEQ ID NO: 132806 - DNA, 636 bp, Homo sapiens
tataatcccagctaatcaggaggctgaggcatgggaatccttggaacctgggaggtggaggctgcagtgagctgagatcgcgccactgcactccagcctgggtgacagagcgagactctgtctcaaaaaaaaaagatatataactactgaagagagggaattgagccattaactctgagcttaaatccctcgttacttcaacacaacagagtgagactccatcaaaaaaaaaaaatttttttttttaattaaaccttaaatttttagccccgagaaatgggctacatttggcttcctcatttaacatttggctttctcataccttcccaattaaaactcactagtttaacaagggatagttgttttcaaacttatgccttggtaaccgggaaagggtcaaaaagatcaaggaccatccgggccaaccttgatgaaaccccgtctctcctaaaatgtgcacaaaatcagcggggtgtgggggatacgcgccgtgttgtcccacctactcaggaggcctgaggcaggagaatcgctgggccccgggaaggcggaaggtttgcagttgagctgagatcacgcttatggcactcccggcctggggatagaggcaggactccggtcctcaaaattttatta

SEQ ID NO: 132807 - DNA, 381 bp, Homo sapiens
tcatttaactccacagtatgccattccctccttctctccatctctgccagttttatttcaatatttcgttttttaattgacttttacagccttgtatttaaacctctctttcttaattcaccaaactgagtttctcttaaatcctctctctgtaaaataacagattagagtccctgtatttctcttcatttcttttcccctttctacttcccaacctttctccattaattattacttttactttgtcaaggtgatatcatgttctgtactatctattttttacacgtttttaaaattggatgaataacatttacaatatgaaaattacataattgttctctgcagaaacaagtggtaagtataaatgcagagagaaagcca

SEQ ID NO: 132808 - DNA, 703 bp, Homo sapiens
gaaatcactataagattttaatagagtgttcaaagtttcatttcataagtaatattttttcaagtatctacagaaactatctgctaatgctgagaagaaaacactttaaggaatccatgattattaatttattcttcttgattatatggtttgctcctcataccctctggatgctcagtcatagaaaaaaatgtgatcctttaactacggggttagaacaaaggcccattttctgcccactgcttatagaaatcaagagacaaaattttacttagagagctgtggtctaatggaaatgtgggtattcagaagtagcttctgaatttaaagttgcatttaaagttggcatttctgtccaatctggttgagaatctgaaagcagttccacatttcttcatcaggaagtcaggctgacttgtgatgaaagatgatgaagacaaatcccaaacagggcttcctgtttgtttaaacccccaacccaggagaaaatcgcttccaagtttccctgtacaatcactgtaatatattttcttttcagattgttagcagactgctcagtttgtgcttggcatttcaattatagtgaaaaaggtgaaacccagaagactcaaggaattctcattaggagtctgaaatttgatagacttttaaaattaacctctgcttcttgttctatctttagtaggcacattattcattaaat

SEQ ID NO: 132809 - DNA, 742 bp, Homo sapiens
caattcattgtatacagtcagctaaaataaatatatcgtgtcatcttaagtgtaatgacaacctgataaaacaactaaacctagtatgaataaaaatttatttaacagataagtattgatcacccattatgaatcaggcattggctagcatcctgcagggtattgcttaagttttgtatgtcttttattgacattttacatgcaatatttaagacatacaaaaaagataagcataagccaatggtgttcatttattcgtaggccagctacatagttgaaagcccccatgcaccatacaccctggaagatataggcaacagagttctgaaggtttaaattatatatatttacatgaatatatacttaaattttgaactgtagaatactgtaaaattcattacataaaacaaagacagtgtaggcaatatttgcgtctagttcccaaggctagaatatgacagggtcaccatctgcattcagatacaaagttccagaaactggactagactgagtcaggtatttacagaataagagtttgaataatagtcacagaaggaaagctaaacaaaaatcaggaaaactggccctgaaaataagatttgaggtgtgaattaaagccataatcttataagccagaaccagaggcttaccccttttttgaatcatggactactttcaaaacccaatgaaatagttcctcttgcctataaacagtccttgtaatagtccctcttccattaaa

SEQ ID NO: 132810 - DNA, 760 bp, Homo sapiens
tggatgaaccttgcacgtatggccccaatcacaaagacaggttaataagataaagcatgacacacatctatttaacaaaaggttttatgtgacaagtgagccttcagaaacaaaaacccaaagaaacaggcaaatctgtctattttttatgcttgggtttgatgaagaatgaacagtcatgtaaaaatatgcttagacaaaaagcaggtgcaacttaatggtaataaactgggggcaacttgccaaggcccgtttgttcagattcttcttggcctctggaatgaggatcctatgacccgcttttgggggaggtaggtcagagaattctcttatggcttccttcaaggcagaaaagcaggagacggtcagagagacacaatttccttcagcttgagatactcagcatgccaaggtgccgtaatttggggtattgcattctgagccccatcactgacatctcacaaaactgtagtacaatatgacgaccattaagactggtacagtcaagacagagaacatttccatctcgaggaaacccttatgctgcccaaaaaggcataaaaataaccacatccactttcctcccacagtaacactccttaaccctggcacccaacaatttgttctgcactaatataactttgtcattttaggaacgttctataaatggaataatcctatatgtggtatcttttgcctgacatctctggaaattcatgaagactgctgtatgtgtcaatagttcattcctttgtattgc

SEQ ID NO: 132811 - DNA, 692 bp, Homo sapiens
acagtaaccgtttttatagtgtgctctatgtaacagtttcatgggctttcagagactgatgaatttattacatattattttgtgttgatttcttcaagtaaacattttccatatgaaagggttagatagtttgtttttttttaatatatacacttttgggaggaaattctttgctgctcatattcatattatttggctgctaggttctaattccattgcttttgtgtttagaaagtatttttctctagactgttggtagtaacagcagttttgggaatatgttgtctcacataccaataagggaaaatgttcttccagcctgtagatacttgtttcatgtgttaggtcaaaggaaaacgtatttaagtgtacttggcatttcttgtattttctaaattacattatcggcaggataagagtttattgaatcatagtttcagaatttagtttatttcatagcataaacgggagtgctatggaaatggaattgattctgcattcactgtaggaatcttgaggacactgtgtgttcttttcaacaggctttaatttcctgacattccattacatttctgggaaacagaattggcactgccctttcctgccctatcttgtcctttataattttggcgaggttcatggtcttccatttctttttctttttgtaactgattaataatctatagaatcac

SEQ ID NO: 132812 - DNA, 853 bp, Homo sapiens
agggcgcgggatgatagcgcctagcacctgtctccgggccttcccgatgagccgcgcttagggtccgtgggcttcagctgcatgaaccacgttccagcagttcggccctcctggccccaacgcgcctttgaaatacgcggacagtgcgctttccttcttggcccgagcggcgcttcgcaatgcgggcttgtgcactcgtgaggcccgcggacacctcccgcccctgcgcggcggagcgctccgccggctacctgctcctcagaagtggcctggaggctggatttccttggccatatctggtccctgggctctcgccgacaaagaagcattgtccgtactgtctgtgtgcccagaaatgggaagcgggtgtaaggggaggccaaacttgactttcttagtgtcgcgaggtgggtcagagcgttacattgacataaaacagattaacaacagaaaaacatacatctcttgaatatgttttacgtgaaaaagacacaaagaaatggcaaaacccaaatacttttgtgctaggcagaaccaagagcggcagctgtgggagagtaaagtgtgcggggaggctaatggaagatggaactgcttgaaccacgtctaggtagaaatctccgccttgctcggctctggtgccgagtgtttctttgttcctggtgtagggaggccatgttttacaggagttttctcttgtttcaggaagaaaagggggcagtttagagcactcttctgtttttcaagtgcttttagcttaaataatccttatgccagagacatatttttgggatggcataccctgtcacccttcacgggctatctgaacagaatctaacgtgggaggcaaaaa

SEQ ID NO: 132813 - DNA, 264 bp, Homo sapiens
attgcctcgtagatgcgcatgcttttctctcaaaggcatctcaaatcactgtgtttaaatctgtaccaatttttctttgacttcactctagtcagtgattttatatgtatgtatgtatacacacatatatatatacagatatatatatatcacatagcactatattgttattatttgtctatttttctgtctccttcactagactggccctgtcctcaaaattgagaccatgtggcactctttgtatcacataactgacacgaa

SEQ ID NO: 132814 - DNA, 323 bp, Homo sapiens
gctgggattacgggcgtgagccacagcgcccggctaaaacagcagttatcttatgccggtactgtttgctcagccccgtggccccactctgagggaggggctatgatgatgcctgcatcacagatgtagacattgaggctcagagatgtggagctacttgtccaggatctggcagtcggtggtgccgacacaggagttccagttatctgaccttggggcctgtgctgtctctgaccgaggcattggagagcttcgcagagtctaaaatattttgcctgggctgtcgagttctgtttcatttcctgcaggccttccaattgaac

SEQ ID NO: 132815 - DNA, 468 bp, Homo sapiens
tcccttctctgacagtgaaaaacctggctccttttatcctccgtatctttacttattcactcaatcctagaatatgcagaaagtaatttgagaatgctaacccacaccacggtgataaatgaacctccacccccaagtttaaactgttcaaatcagcagttagtggtcagcttctgttcagctcagtgccttgtcagttagtcatccaaacaaaacagatgaagtaatgctctgcagttccccaggggcatgtttaagaaaagagctgccagactccatcaacagcttactttctggtgatgtcggagcacaaaattgaaaaatcaggagtcgccagaaaagaaagggagattaatttcatacagtttataaaaaggacacctgttgtgggaaaaacagtttgtcatcttcatctcaatgtacaaattgccaaagagaagaaataaaaaggaaagtgttgagccagtg

SEQ ID NO: 132816 - DNA, 585 bp, Homo sapiens
gctgaaggggaaagcgggcagtaagggcaattggtgggtgtttatttcctcatatgaaatgaaatgtttgtagtcttctcttgggataatgcagagtctgactgctgtctgggatgattaccttggccatggccatcactaacatgtagatcttgtctctattggattagcatgtccaggattcccatgactccacttcttgatttctgatttcttgccagtttattttcactgtgacaactgaacattttaagtgctgtcatgggatgactaaggacatatttcctctaattctacttccacgcaaaggatcaagggaaaaatgggaaaggggattgcgtgtgtgtgtgtgtgtgtgtgtgtgtgtgtgtgtatgtgtgtgtttgggagtagagtgtctgtttctcctccagaagaagcagagttatatggagctcctaccatgctaccatgaggtctatgctgtaaggcacagtatatggatgctacagaggggatgcaggcttcccccgagacagagcagaagccaacacattcatttgaagaaatctctcttgtgcttcagctttgccatttaccaacctt

SEQ ID NO: 132817 - DNA, 675 bp, Homo sapiens
atccactatataaatacagagtaatgtgagtatataattctaataattgctacttactcataagtacagaattattagggcatttacagaagtcacacaactcaacctttaaacaagctcaaactgagtaggataatgataggattaaagacttaggaatgccatgttttagatgtgtaaaactgatacactccccacctgcttctagctgttttggaaaaaagtgagatttgctatgccaagcatgccagtgttaagtgaactcatgtgaactgtaacattttttgtcccactgttgtcatgactttgtacaaataaactaagataagattgtctggttcgggcagattctgataaagagacttgataagaaaaatgcagtagtgctggaaaatctacaagatgaaggggaaactgttaacagttaatttataaattttaatggctctctgcccaggtgcagtgtctctttgccatggggaggtatacattaaacatcagagcccttaatttaatagctattattgcggctgtgtatagtctgtttctttatagtaaggaattatttatcaaaacatagcttccatgcctctggcatttactgttaacccattattttctggactttggcctccttgacaggtattttaaaatcaatgtaactcaagtatccag

SEQ ID NO: 132818 - DNA, 1274 bp, Homo sapiens
ctgcaatggggttgctactgctgcgaattcggccaaagaggctctatgcttctctgaagacttgcagcaaggcttgctgaggctcacagaagatagccccagtgttttggagtggttttgaatgtgattctgagatcagactgactgagctggaatcctggctttatatcttaccagctacacaaccttggagtcttagaaattttttcttttcaataagcagtcatccttactttccctcaagatgacaaacagttcgttcttctgcccagtttataaagatctggagccattcacgtattttttttatttagttttccttgttggaattattggaagttgttttgcaacctgggcttttatacagaagaatacgaatcacaggtgtgtgagcatctacttaattaatttgcttacagccgatttcctgcttactctggcattaccagtgaaaattgttgttgacttgggtgtggcaccttggaagctgaagatattccactgccaagtaacagcctgcctcatctatatcaatatgtatttatcaattatcttcttagcatttgtcagcattgaccgctgtcttcagctgacacacagctgcaagatctaccgaatacaagaacccggatttgccaaaatgatatcaaccgttgtgtggctaatggtccttcttataatggtgccaaatatgatgattcccatcaaagacatcaaggaaaagtcaaatgtgggttgtatggagtttaaaaaggaatttggaagaaattggcatttgctgacaaatttcatatgtgtagcaatatttttaaatttctcagccatcattttaatatccaattgccttgtaattcgacagctctacagaaacaaagataatgaaaattacccaaatgtgaaaaaggctctcatcaacatacttttagtgaccacgggctacatcatatgctttgttccttaccacattgtccgaatcccgtataccctcagccagacagaagtcataactgattgctcaaccaggatttcactcttcaaagccaaagaggctacactgctcctggctgtgtcgaacctgtgctttgatcctatcctgtactatcacctctcaaaagcattccgctcaaaggtcactgagacttttgcctcacctaaagagaccaaggctcagaaagaaaaattaagatgtgaaaataatgcataaaagacaggattttttgtgctaccaattctggccttactggaccataaagttaattatagctttgaaagat

SEQ ID NO: 132819 - DNA, 1220 bp, Homo sapiens
ctgcaatggggttgctactgctgcgaattcggccaaagaggctctatgcttctctgaagacttgcagcaaggcttgctgaggctcacagaagatagccccagtgttttggagtggttttgaatgtgattctgagatcagactgactgagctggaatcctggctttatatcttaccagctacacaaccttggagtcttagaaattttttcttttcaataagcagtcatccttactttccctcaagatgacaaacagttcgttcttctgcccagtttataaagatctggagccattcacgtattttttttatttagttttccttgttggaattattggaagttgttttgcaacctgggcttttatacagaagaatacgaatcacaggtgtgtgagcatctacttaattaatttgcttacagccgatttcctgcttactctggcattaccagtgaaaattgttgttgacttgggtgtggcaccttggaagctgaagatattccactgccaagtaacagcctgcctcatctatatcaatatgtatttatcaattatcttcttagcatttgtcagcattgaccgctgtcttcagctgacacacagctgcaagatctaccgaatacaagaacccggatttgccatgatgattcccatcaaagacatcaaggaaaagtcaaatgtgggttgtatggagtttaaaaaggaatttggaagaaattggcatttgctgacaaatttcatatgtgtagcaatatttttaaatttctcagccatcattttaatatccaattgccttgtaattcgacagctctacagaaacaaagataatgaaaattacccaaatgtgaaaaaggctctcatcaacatacttttagtgaccacgggctacatcatatgctttgttccttaccacattgtccgaatcccgtataccctcagccagacagaagtcataactgattgctcaaccaggatttcactcttcaaagccaaagaggctacactgctcctggctgtgtcgaacctgtgctttgatcctatcctgtactatcacctctcaaaagcattccgctcaaaggtcactgagacttttgcctcacctaaagagaccaaggctcagaaagaaaaattaagatgtgaaaataatgcataaaagacaggattttttgtgctaccaattctggccttactggaccataaagttaattatagctttgaaagat

SEQ ID NO: 132820 - DNA, 1185 bp, Homo sapiens
ctgcaatggggttgctactgctgcgaattcggccaaagaggctctatgcttctctgaagacttgcagcaaggcttgctgaggctcacagaagatagccccagagtcttagaaattttttcttttcaataagcagtcatccttactttccctcaagatgacaaacagttcgttcttctgcccagtttataaagatctggagccattcacgtattttttttatttagttttccttgttggaattattggaagttgttttgcaacctgggcttttatacagaagaatacgaatcacaggtgtgtgagcatctacttaattaatttgcttacagccgatttcctgcttactctggcattaccagtgaaaattgttgttgacttgggtgtggcaccttggaagctgaagatattccactgccaagtaacagcctgcctcatctatatcaatatgtatttatcaattatcttcttagcatttgtcagcattgaccgctgtcttcagctgacacacagctgcaagatctaccgaatacaagaacccggatttgccaaaatgatatcaaccgttgtgtggctaatggtccttcttataatggtgccaaatatgatgattcccatcaaagacatcaaggaaaagtcaaatgtgggttgtatggagtttaaaaaggaatttggaagaaattggcatttgctgacaaatttcatatgtgtagcaatatttttaaatttctcagccatcattttaatatccaattgccttgtaattcgacagctctacagaaacaaagataatgaaaattacccaaatgtgaaaaaggctctcatcaacatacttttagtgaccacgggctacatcatatgctttgttccttaccacattgtccgaatcccgtataccctcagccagacagaagtcataactgattgctcaaccaggatttcactcttcaaagccaaagaggctacactgctcctggctgtgtcgaacctgtgctttgatcctatcctgtactatcacctctcaaaagcattccgctcaaaggtcactgagacttttgcctcacctaaagagaccaaggctcagaaagaaaaattaagatgtgaaaataatgcataaaagacaggattttttgtgctaccaattctggccttactggaccataaagttaattatagctttgaaagat

SEQ ID NO: 132821 - DNA, 581 bp, Homo sapiens
gtctcggtctacccctctgagaactgggaggcatggaagacccctgcagccctggcatgccaagagactgtgtcaagcccagcagaggctggagagcttcacttggtgaccacacgaggttataacagtgcatcctgcccggctgggctcgctgacagtccctctcagcaggcaacctgcagcctgactcaaccaggatgcacccttttcacagatgagaaaccagaacctgagggctcgcaggggtgtctccatagatcagagacatttccaaatcaaacagctccaaatccaccctcaggaggcaccgtctgcctgttagaacgggtggttcccaccactcctgaatgagggtgtgactcctggttttggggggacatttcttcgtaatgctgtctccccacatgttgttttaggtcataattacgctccctggcaggggtgggcaaggccctctgaccctgtttaaagacaaggaactgtgagggctatgagcaggggcacctccctggcctgggcatgtttggcgttggggtgtggctgcggagagcttgggcagaggggtgtgggaaagtattggc

SEQ ID NO: 132822 - DNA, 152 bp, Homo sapiens
catttacacctgcttgcgaaagtttgcttcccctggtgtccaaatgcctgagaagagagggacaaactgtctattcgaagctgagaatgtcaaagaatgaatcattgtcacgagtggagtccagaacgcacaaaagatgaaacttcgctaaa

SEQ ID NO: 132823 - DNA, 573 bp, Homo sapiens
gatcttcctagcaatctgtgattacggtatgcattcttccatggtttctacgtttttgtctattctataatgaaattttctaagaagccagaaattaattaagtgctacctaaaaatatcaaaatgtcaggtacaagaatttggcattttcccagtaacataactagattgttctgaataccgttattatttcccaataatacaaacatcacaatttcagttctgtagtacctggcctacctacccttcccactgccttgccccaggtaaacacagcatgcctgtcactatacattattttacatgcctggaaatatatttaaatggaatcatagaggtggtttctttttttttttttatcaacacctggcttttttcattcactccacttatttttatatttatccattttattgcatttatctattgatatacttcattctttttgattgctaaatactattgcggtatacaaccacactaaacattttattatccatccatttgtcgatggacattttggttgtttctcatttggggctcttgtaaataaagctgctatgaacatttgtg

SEQ ID NO: 132824 - DNA, 627 bp, Homo sapiens
gatcttcctagcaatctgtgattacggtatgcattcttccatggtttctacgtttttgtctattctataatgaaattttctaagaagccagaaattaattaagtgctacctaaaaatatcaaaatgtcaggtacaagaatttggcattttcaaaattagtaattacaatgtaagtttgccctattataatgatacccagctatgtccagtaacataactagattgttctgaataccgttattatttcccaataatacaaacatcacaatttcagttctgtagtacctggcctacctacccttcccactgccttgccccaggtaaacacagcatgcctgtcactatacattattttacatgcctggaaatatatttaaatggaatcatagaggtggtttctttttttttttttatcaacacctggcttttttcattcactccacttatttttatatttatccattttattgcatttatctattgatatacttcattctttttgattgctaaatactattgcggtatacaaccacactaaacattttattatccatccatttgtcgatggacattttggttgtttctcatttggggctcttgtaaataaagctgctatgaacatttgtg

SEQ ID NO: 132825 - DNA, 391 bp, Homo sapiens
tccactcaagagtttttaatgagagctttgtgtgaaactgaaaggcaattggtccttcagacttggttgtagagaactattgtttgctgcctccaggcgctgaacagccttgtgggtgattgtatagaaagtaaatactgtgctgtatagaaattaaataaactgctgagaattaattgagattcatgccacacagaacagatgtagaccttggggctggggccctctggtcagacgccctgggggagctggcctccctgcctgtcagctcagggaactgtgtcttccttcacctgcccttgtcaccacccaggccaaggctcagtgtccacttgaaccctcacaggactaccagtttctgcctcccttggctgggagctcgccattgatt

SEQ ID NO: 132826 - DNA, 206 bp, Homo sapiens
ttaaaaatctgtcatcaaaaaaaatctctataagacaactgtgtgacaagacttgcaaatatatatctactttccaaaaacatagtcccagtcataagagtttggagctctgcctatgaatgtaaagaaacaaggggcattacgttggaaatgttattgaaaggaagaaaaagtaaatggtgcaggttgtccatgatagatgtagg

SEQ ID NO: 132827 - DNA, 691 bp, Homo sapiens
tattccacggtgactctgcagcggagacacctcgggtctgaggccccttggagggccccgggaattcctgagcagctgctgagacttcacggcccagagctgtaagcctcctgcagatctcgctgaggaaggagaagcttagagggcaaagcaggacaccaccggaactgcagagaatcaagcatgcagctctgagaagggcctgccggaggagtgggaaactcatcaaaattaagagcctttgaataagcaggatgagcacaaggtgggggaggggcggggagccctaggtaagggctccaggaatgacttcactgcaaatgttaagtgacccaagaagacaactgtccccccgctgctctcagaggaagctgtgagcctgggtggatacggacggcaggggacacagtttgcctctcattgggcaatttccaccagtggagtttcaattcctgggtcgtggactctcgtctcctggtgaagtgcaacatcattcctcttgtcgccggtgcgttgtgcctgcatctttgctccagctaagccagctcctctaggcctctggctgcccaccgcagtgggctctggactggactctggaccatgcgttgctgggtttgctgctgtgatgatggaggtgctgcttttgtctgtctgatgtttatactttgtgggtgtggagtgtgctaggaac

SEQ ID NO: 132828 - DNA, 1382 bp, Homo sapiens
accccgcaccagggtggggggaggggtgggtttggggtgggaatgggaatgggagccgccactgcaaagcagtccctggctggcttcctgccctgcacccagtcatgcaaggcctcccgtcccacccctgcccctcatcacctccacccctaggctgtccagatccaggctccagaagtctcccaggatccaagaactaagggcaaccactgggctccgcagcccctagtccatgagtcagccacccctctgcaggctgacaaaccttggctgtcacttatcttccgccccaaaccagccccagccccatcctgctgcaggtctgtgtggctgctggagaggctgggctcctttcctcaccccgaggctgcctaatatgctttctggatcctggagaaaactgacccactattctcatactggtgcaacttcttccaagacctcaaaactggacaacgtgaacttgtcttgtttcttgtctcttcttgctagggctgtcattgggacagtctgagatggggagtcgggggagacaatggatgaatggatggatgaatggacagcagtccagggagatgtccctgtgtgtcctgaactgggcccttcctccagtgagaagccttcctgagtgagtttatatagtcatcccttggtatccatggaggattagttctagggtccccggggatgccaaaatccatggatgctcaagtcgctgacataacatgacctagtatttacatataagctatgcacattctcccgtatacattagaccatctctagattattcattatgtgtaatacaatgcagatgctatataaatggttgtgatactgtatttagggaatgatgacaagaacaacgtctgcacatgttcagtagagacaaccatccgatttgttttctgaatattttccatctgctgttggctgaatccacagttgcagagctcccagatacgagggccaagtgctttgagagtagggtgggtgaggttgctaatgagtacaggggagcaggtgttgatcagggggaccctgcactgggcatctggacgccctgtctcaggacttgagactccgtttggatggcacaggcagactaagcccaggtcaaagccctccccttggatgttcattttatcccaagctctttctggaccctggaatttggcatcccctaggccctgggtgggacagctgagccaggttttagataacatgtctagaaaagtgggcccctactgtgtgcctggcactttccgcacatgatcctctagctagaatatccaagggtcatggagagaaatacccagttaaaatatcagaaatgaaaaagtgataccattagagacactaaaaagacgattagagatact

SEQ ID NO: 132829 - DNA, 382 bp, Homo sapiens
caggattaaggaaggagtgagggaagaaggaaagtgagtgtgactatcaaagaacaacttcagggatccttgtggtgaatgaaatgttctgtatcttgactatatcaatgttaatatcatggctgtgatattgtactatagcttttcttttccttttttttctgtgacagcctaccattgaatgtactatagtttttctatactaaaggtactaaagatgttaccattgggagaaactgggtaaagggtgcccaagatcagtctattatttgagacttgcatgttagcaattatcttgaaatacaaagttgaattaaaaaaattaaaatcaacttaaaatgtcctaaaaggctgaccaatattttctctgggtggtaagagt

SEQ ID NO: 132830 - DNA, 214 bp, Homo sapiens
ctgggctccttaggacttgaggtgtaatttgcagaaggatagattggttcatgtgagttagctatggttcatctcttgagtgatgggggcggagttgttatagaatgtaagaatgcaaagattgaatggtcaatgtggtattttggcattcttccaaatccttgtagctcttttggagaagcataacactgctttgtaggaaagagaaaagtgt

SEQ ID NO: 132831 - DNA, 116 bp, Homo sapiens
ggaggtcatttcaacaagtaaaaaaaggagaagtcattagaacccagagctcaatggtagacctcacccccttcaagtgaccacccctttctcaagtgatcactgagaactagcca

SEQ ID NO: 132832 - DNA, 329 bp, Homo sapiens
aattggacagaaagaaagccacaggaaatacggcatcttcagatgacttcgcctggaatcaaactgacctgcaaggatcgtggaggccctgaccccaagaagacaagaaagaggggttccccgatttcctcccgcagacgggaagctgaaaggaaatcaaccagggttacctagaggataaaaggaccaggggcccggggtgacactcaccctcagataatcagaagattccgtggatccttttccattcggcagcggcttctctggaggtttcccggaaaacatgtggaggagagccttcctctgcgggtcttgttgcctgcagaaca

SEQ ID NO: 132833 - DNA, 485 bp, Homo sapiens
cgtttttcatgtagaaacagtagtcggtatcttagtttctaaaatattcagtaccatctaattaaatatgttcaacacaatttacatttcaacaacctggagaacttcgctttttacactacgtagtaattgcttttaaaaagttacttctgtgcataggcaggctattgatttgtgggagaaaatgctttgtcttgcttgtattcagagccagtactagttctacttcgatttcagttttttaatattcaaagttggctgggaacagtggctcatgcctgtaatcccagcattttgggaggccaagacgggtggatcacctgaggtcagaagtttgagaccagcctaacatggtaaaaccctgtctctactaaaaatacaaaaattagctgggcgtggtggcgggcacctgtagtcccagctactcaggaggctgagacaggagaatggcttgaacgcaggaagaggaggttgcaatgacccga

SEQ ID NO: 132834 - DNA, 484 bp, Homo sapiens
taaaaggcatggagaagacctacaggtaaagaaagctagttaacatttagaaaaggttcatatttaaataaatttcaagaaaccaagttaaatatttttccaggtaacaccaactaacattctgtgaaatctctgggaaacagtatctcatggctaattagatagccatccggtcttactaagatccaactttttttttttttttaagacggagtctcgtcctatcacccaggcgggagtgcaggggatgcaatctcaactcacggcaacctctacctcccgggttcaagtgattctcctgcctcagcctcccaagtagcggggattacaggcacctgccaccacgcccagctgatttttgtatttttagtagagacggggtttctccatgttggtcaggctggtctcaaactcctgacctcaggtgatccacccaccatggcctcccaaagtgctgggattacaggcctgagccaccatgccc

SEQ ID NO: 132835 - DNA, 265 bp, Homo sapiens
taaaaggcatggagaagacctacaggtaaagaaagctagttaacatttagaaaaggttcatatttaaataaatttcaagaaaccaagttaaatatttttccaggtaacaccaactaacattctgtgaaatctctgggaaacagtatctcatggctaattagatagccatccggtcttactaagatccaacttttttttttttttttttttttttttttattttttttatttttttctttttttttttttttttttttttttatga

SEQ ID NO: 132836 - DNA, 562 bp, Homo sapiens
ttcctgtgctggcacagagaaagtgctgggcccacaaagcccctgaactgcaggcactggactcggcctgaggggctgactcggtcaggaggtcaggccactaaagcttccacagtgtgaccctgactttcccgtaacgattccacagaaaaccccgcacactggtcaacctgctcacaagtgacaggggcatgggttctgcccacagtggattccggccggggggtgctccgttagatgcggcctgtcctccaggtcccgaggacatgcagttatggacgtgcattgcacagagcccacagctcctagatgagagcaggaatgttccaggctgtccctcatcagaaccttctaacagtaaaagtcgaggaaggcctaaaaatctagacttcattcaactcagaggagggaacggagagccagatgccagggaaaacctgcacctagaggaacaacagaagctgggcgcacaccgggcgctgtgtgctatgcgagcccctccggaaggacaccccatgcatcaagaaatgcccgggagacgggctctctcatctcactacac

SEQ ID NO: 132837 - DNA, 846 bp, Homo sapiens
gatcatgccactgaactccagcctgggtgagtgacagagtaaggccctgtctcttaaaaaacaaaaaattctagtttgatcaagtcattttctcattggacctgccatcccctcctcctccaccggttctcagccaggggcagttctgcccctaggacacactgggcaatgtctggagaactttctggttgccatactctgggttgctcctggcatctgctaggtagaggccatggatgctgcccaacaccccacagcgcacaggacagccccccaatggcaaagaattatccaaccccaagtgcaaatggcagtgaggccgaggagccctaccccagtcttttgttttttaatccatttatgctttgcgttccattattggtacaggagccccagcttctgttgagttcttggggatatgtgagccactgtgcccagatttttttttttgccctttggcttctttgtagagcacgggcactccacccgcctcggttcccagagtacggggcattgacgggcgtgagccaccaggtcgggccaacaaaagagtttggatgcccacggggtgaacagccacattgggtggccccgggaagaaacagggggcctgaagttagtttagaaccctccctgctgggttcctaccaaaggtggcacgctcctaccccttccccgaggccagttcctacaatcagaacaaattggtggcccgtgaagacggtatgaaggttagggcgacaaagacaatgggtcgtaacgccatgcgggacttcccagacgggaattggtagggtgcgtgtcaagacacgcgtgtggtcccatacacaccaagggggaaattac

SEQ ID NO: 132838 - DNA, 496 bp, Homo sapiens
gatataaacctcacctaatatgtactctcttgcctaatatgtgagcactccataaatattgcctgctattgctccatataatcttgcccaatatgtagtaagcactccataaatgccagctgctgttaatatcattcttggaagactggatatagacacagatccccaaagggcttaagaccttaccgttgttgacttttattgcaccaaaatgaatatcccctgagctcctgttcataacagcatagagctggggctgaaagtgcgttgtatttgcaaagggttttattcatttctttaagaattacataacaatcgcagattcttggagctggaaaggatcttaaaggtcatcttgcctatcccccacctaaggcttaactcccttctaccctctcctttaccctcatctgaacaccttatcttgagcctactcgagagctcttgctctgggaaagttcttccttatgcttgcctggatctattgccagccccc

SEQ ID NO: 132839 - DNA, 305 bp, Homo sapiens
agttctgcctctccaaacaagacagtgatgttcctgaaaaaaatctgtagttttcagagttgagaaatacaccttgaacggaaaaaaacagaggaccaagttatcattgtggccaaggccatggggaatagtacacaaaataaaggatatataaatgacatttccacatgttcaactagtaatacttaataatttccatacaattaagtttcacaaccattccttgctaactagataactattcaggatttcccccaaagaatttggacatacattttgtggcagataatatgcatgttacaggt

SEQ ID NO: 132840 - DNA, 563 bp, Homo sapiens
agaagtatatcttaacaattcaatcaaataactgacaattaaatatctatcaaatgaatgaatgactcctattccacacacttcatgataacagggctctgctgtttcaggctcaatttatttaccttgtcacctggcccataagtaagaagactgtcatccatggccattgttttctagttcttctgaggacttttctcctctgtcagtttaaagcctccctaatcaaccaagtttgtttctaggcacatgcactcttccctcctctcatgtgctcagcccttgggtaagagtccatccttctgtggtctcattagaaatttcacattctggccgggcacggtggctcacacctgtaatcccagcactttgggaggccgaggcgggcatatcgaggtcaggagatcaagaccatcctggctaacacggtgaaatcccatctctactaaaaatgtaaaaaattagccaggcatagtggcgggcgcctgtagtcccagccactcggggggctgaggcaggagagtggcgtgaacctgggaggcagagcttgcagtgagccaaga

SEQ ID NO: 132841 - DNA, 216 bp, Homo sapiens
caatctgtccacctcggcctcccaaagtgctgggattacagtgtcagccaccgtgcctggcccctgcattaaaatttttcaatgacttgacactgctggtattacaaaatttaaaatccagagctgggattgtgcaactgcacgccagcctgggcagcagagcaagatcctgtctctaaaataatttttaaaaaaattaaatcctcacattccctg

SEQ ID NO: 132842 - DNA, 203 bp, Homo sapiens
caaagagtaattatttgactgtcaggttctgcccagggtaaagctatcagcaggcttggcaaatatacaaagtcaaacttccctaaggcaggtacagggcaaaaccaaatacccctgcctccataatccattttttaagctttccatttatcagtaaacaacagctagtttaaaaaagaaagaaggggtatcctttgaaagaa

SEQ ID NO: 132843 - DNA, 353 bp, Homo sapiens
ctctgtcacccaggctgagtgcagtggtgcgatctcggctcgtgcaagcagggtgaggtgtgagcttatcgccttaaataccccattagaaatatgattcaatagagtaaacaggagcaagctcactgcagaaatgcactgcaaatgtttatagctatagcctccaacagcaagaaaaaactcccccaaaaaacaaaaaacacggcttagaaactgaggcaatttatttagtaacttgaaatattgcagcttcaaaaacaagactgtaagactaaaacataaaattgtgtaaaatttaaatactgaaatacactatgactcatctttggtcgaccaagagcttaatttctttt

SEQ ID NO: 132844 - DNA, 387 bp, Homo sapiens
ctcgattttctccccatgaagtctctgagtgaccttcggctaatatcaaattctgcagttgtaaaattggatttcaattttaatccccatcataaatggcattactgagattttggcttcggtgattagaaatcaccaggcattattttatagttccaaatactctttccttggaaaaaaatatataagctatatatctgtatgtgtgtgtctgtgtgtgtatatatataaggtgtatatattttatatatatacatattcatgcatatacatatatacagacacacccaaatatatatatatacacacaatgtatatatctgtatatatactaataataatatttatacatagtttgacaaatggtatcatgctttatgtgttatt

SEQ ID NO: 132845 - DNA, 266 bp, Homo sapiens
caatccagggatgggggtagcagagcggggcagtatgacaagaaacctgatgaacccacattgttctagttggatgatgggtacatgtgggttcatcaggctgttctatttttgctacaattttaaagtttccatagtaaaaaatctgaaaataatgacagagttgtaaagctggctaatgacaagaccaaaagccaaatccaggttctcctgattttaagaccagtgtcggccgggcgcagtgactcacgcctgtaatcccagca

SEQ ID NO: 132846 - DNA, 448 bp, Homo sapiens
aataaataattcccagaagtcttaccattactctttgcttcatcctgttctcttttccccttaattttttttattactttttactttattctgtcattgattctttttgaaaatatacataaaacatagcttatatatagtcatgcactgtataacatttcagtcaacagtggactgcatatatgatggtggtctcataagattataatggaggtgaaaaatttctattgcctagtgatgtgtagccatcataatgtagcacaaggcattacttacgtgtttgtggtgattctggtgtaaacagacttactgccagtcatataaaagtgtagctcacataattatgggtagtacctaatacttgataatgatgataggtgactctcttactcatttgtgaatttactatactatatttttaaatcattagagtgtactcctacttatt

SEQ ID NO: 132847 - DNA, 668 bp, Homo sapiens
taattcaattcagtactaacaactttaaaaaatacaaacaagcgtaaagatataaaatctggatggaataataatagatctaatattatttagatatttatctctctcctacagatagaaaggtattcattaaactgttaattttgaatttgttgtagatatgcatggagttgtgggaaataatactcagaggccttatgtgatctttaccctgtttaggtatatttttaattttcaagttggttgcataaactattcattagtcaacagatactggacaaaatctaccattggactgacattttttctgtttttggtagaaaaataaaatgccaaaatatatgaaatactaacaacaaatacacaaatagaatatgtattcttctatcgttggttagagagttttaaagacatcacttaattagagttggtaggtaatttgggagttctggtgttaggtgcatacacatttaggattgataattcttgatggatgggctcctttgtcactacttaatttccctctttattcctggtcacattcattgttctgatcccaggaatacaaagttgaattaacatttggaaataaatcaatataaccaccatactgccaaatacagcagaaaacccatataagcacacaaaacgtgcagagaaaaaatgtg

SEQ ID NO: 132848 - DNA, 336 bp, Homo sapiens
tgtgcagggtgtgccaccgagattaacatttgagtcagtgggctgggaaagggaggccacacttaattgggtgagcgccatctaatacgctgccgatgaatataagcaggcaggaaaacgtaaaaaggagagactggcctaagctcccagtctacatctttctcctgtgctggacgtttccagcacacaaacaccggcacacactgtcagggacgcacaggctcacacatgggcacacacgctctcagatgcacaggctcacacgcacacaggcacacatgctctcagggacacaggctcacacgcacacgggcacacacgctctctcagggatgt

SEQ ID NO: 132849 - DNA, 118 bp, Homo sapiens
cctctcattaatcagcacagaggcttggaacaaaactccaggatccatgactaccttcaaacaacaggggtgtgttgtcagccaggccacttggctcccagctcacctaggccagagg

SEQ ID NO: 132850 - DNA, 405 bp, Homo sapiens
acttatgtatcagggcttcccatcctggctgttgaattacctattctggcagctgttccagtcaatacagctgatagtaaattttaataactggcagtaaaagtcttccccagtaaccctgattttcaatgttttgttggccattttcacacattttttcaggtgtatattttttcacactatttgttcagatgatcattgtaattcatttcagaaactagatatctcttgtaatttcctgggcttctccttaccctggcgagtattctttgtaccgattttagtctgaagtctggtaggtacaaaagttagtttgtgtatttgctatttgttaggtgcccttcatccctggtatttaaaattctggcccataatagaaacatacctactactcactgctcctct

SEQ ID NO: 132851 - DNA, 233 bp, Homo sapiens
aagatcaccaaggatctcctgtcaaatcattcattctttcagtggaatcaccagggagtttatatgaagtgatggagacaaggctgagaatggaccccaatggacatcaacatttgagggaattggtgaaggaaaagataatgaaggaaattagaagccagggttgaaggagaaagccaggagagtgtggtattccaaaaagaagagagtttttaagaaggaggggaattaag

SEQ ID NO: 132852 - DNA, 377 bp, Homo sapiens
acatcatttgcatcctatttgtaaaactctattaacagagcgtataccatgactggtctaaatgatatttgatatctaatggttagagggcacagactgatatttaagtaaggttgcaccatggtaactttgatgggttattttatattgaggataaccagatatgacatttttaagaaaggtctagatcactaaagaaaatgaaaagaatggcttaattgcatcagagggaactgatctttaacataacttggattaaaaaaaagatagatatgtataaagaaagatatatagatggatagccataaagatagtttatttttgtttcaccatttttgagaagagtcatgctataaagtgtttttcaagaaatctaa

SEQ ID NO: 132853 - DNA, 734 bp, Homo sapiens
tcagtttggggagcatttccatcttaacactgttaagtcttccaacctatgaacatgggatgtctgtccattaattaggtctttaatttctttcaatgatgttttgtagttttcagtatacaaggcttctttgttaaatttaatcctacatatttattctttttgatgctgttgtaaatgaaattgttttcttaatttcatttccaaattatttattgctaatgtttagaaatacattttatatttatatatatatctggtatcctgcaaccttacaaaaatcatttgttggccgggcatggtggctcatgcctgtaatctcagcactttgggaggccaaggctggtggatcacttgagatcaggagtttgagaccagcctgggtaacatagtgaaaccccgtctctattaaaaatacaaaaaaaaaaaaaacagaaaaaaaacaaaacgaggggggcgccccggcccacagaaaaaagcaacaaaaacaaaaaaaggaacacgggcccaacaagcaacgaaacgagggcaaacaaattgcacaaaaaagcacaggggcaaaacatatagtggccgaagaacacaaaggaaatacaaatcgccagatgtgcaaacagacggagatcacgagaacaaaacaagagaagggaatataagaggaaaatacgggggcacacacaaaaacggaggactacagagaacagccagaaagacaaaaaagaccccagatgagt

SEQ ID NO: 132854 - DNA, 572 bp, Homo sapiens
tgagtctcaaccacccccacagtcacacacctctcacgccctggctctgggctttcaccaccgcctggggccctgcttggactctgcagctgtgtcccaaggctgcgccctagatttgtctactccttcccctgccccctccctgctttctcccggcctctgtagtcttcctgctcctccacctacgtggctgccttgggccccatgcagctcctcccccgggatgccccatgctctgttctgtactaagaaaaattcttctgccttgggatcctgttgatctgtgaccttacccccaaccctgtgctatctgaaacatgtgctgtatccactcagggttgaatgaattaagggcagtgcaagatgtgctttgttaaacagatgcttgaaggcagcatgctccttaagagtcatcaccactccctaatctcaagtacccagggacacaaacactgcggaaggccgcagggtcctctgcctaggaaaaccagagacctttgttcacttgtttatctgctgaccttccctccactattgtcctgtgaccctgccaaatccccctctgtgagaaa

SEQ ID NO: 132855 - DNA, 309 bp, Homo sapiens
taactgtgacttgtgcttcaaccttgagctcatgtacgagctctttgcagatgcatctcacccaggtgagtgctctttctttggggtcctgtagcaccctgcagttattttagtagagcgccaatcacagagttttatgtgaacttctccataagccctgcaagggcagagatcaagtctatcttgtttaattccacatcccagggtctaactaatagaactttttatgtattagcggcataaataaataagttgtctataggttgagtataatctcattgccaggaactggatagaggttcttggact

SEQ ID NO: 132856 - DNA, 692 bp, Homo sapiens
ggagtaatttgttaggaaaactactttctgaggtgcccccacctcccctccttccaacctgaagaggcagagaggtttgtgtaaacaaaggtcctgcaaggcacagctgttttacattctgatgttctatgactttcttaaataaaaaccttttggattttcatatctatttagctagtaggaatatttcctcctttttcggagaataaaatcctagacttaaggatattccttgggtgactgagaagtcataccagcctaagcagtacagctggccccctgtatccatggcttctgcatctgtgaattcaaccaaccatggatagaaaatatttgggaaaaaaaatccacaaagttcgaaaaagcagaagcacgatttgctgcttactgagaactgcattgaatccatgtgagtaaggtgatgtgtaggcgttgtattaggaattataagtaatctttaggtgatttaaagtatttgagaggatgtgtgtcggttttatacaaatactacaccattttatataagggacctgagcgtccatggattttggtattcataagaggtcctggaaccaattgcccatgggtagtgagggatgactgtattttctaattaaaaggttttttttttaataagcaaatgttttacttagtaccttataatattttaaaaagcgtaaaattcccaaata

SEQ ID NO: 132857 - DNA, 342 bp, Homo sapiens
gaggataagaaacaactccttgtagacaagaggaaaagagtatgtaaaaatgtaaactgcgattacctcaggtttaagaggtgcaggctgatcactgttttcttctttatactttatttttgacattcctttaatggacatgttattacttttataacaaaaattttaagttttttttctttttttctaactttatgttttgatataatctcaaatttacagaaaagtttcaagaacagtacaaataattttcatatactctcaaattcctcaaatgtgcacattttgacacgtgtgctttatccttctctctactttgccttgatatatgggaatgtgtag

SEQ ID NO: 132858 - DNA, 428 bp, Homo sapiens
aacgtaacatgtaaccaatagcaactgaaatgtttacgtttttggtgattatatcaacatcaaagaaatgcaaatcaaaaccacaataagatgccatctcacaccaatcagaatggctattattacaaagtcaaaaaataacagatgttggcaaggctgcagagaaaagggaatacttatatactgtttgtaggaatgtaaactagttcagccactgtggaaagcaatttggagatttctcaaagaatttaaaatagaactaccatttgacccagcaatctcatgactgggtatatacccaaaggacaataaataattttacacaaaagagacatgcacttgtatgctaatcacagcactattcacaatagcaaaaacgtggaatcaacctaggtgtccatcaatggtggattggataaagaaaatgt

SEQ ID NO: 132859 - DNA, 691 bp, Homo sapiens
aaatattggaactccctcacaaatttatttctcatagtcataacagaaagtgtgtcctgagctagatgtggtagctcacacctataatcccagcaccttgggtggccaaggtaggagaatcgcttgagctcaggagtttgaagcctgcttgggcaacgtagcaagaccttgcctctataaaaatttttaaaattagccaggtatgatggtgcatatagtcccagctactcaggaggctgaggcaggagggtctcttgagcccaggagtttgagggtacagtgtgctatggtcacaccactgcactccagcctgggcaatagagtgagccctgactctaaaaaataataataaatagaaaaagaaagcatgtcctcttgttaaagatttttcaatgacacttgttcaaggatggtaaggctgactttttcaagatcatcagaatagatacagggaccaatgcaatagcattttacagcgagggagagagattgggctcaactctgaatacagtttgggtaagtgggaatttattgccaaggagtagggtgggggtcagtggattgaaaattactaagaggaaacttcaagagtaaggaaagattctggcttaactgacctaacaggattcttgctgaaaacaggctggggtgttgagacactacctgggagatggtggaggatgaagccctg

SEQ ID NO: 132860 - DNA, 135 bp, Homo sapiens
tgggtaccactgggagatatgctgttcctgatgggcccaagaagatggaggagtgatacgtaatcttagcctgattctgcagctgtaagtgagtggggaaaactgttaggagtccacagctgctggaataggcca

SEQ ID NO: 132861 - DNA, 846 bp, Homo sapiens
gagattacattgaacccatctggataactcaggagaatctcctaattttaagattcttaatttagtcgtgtctgctaagtcccttttaccatgtaaggcaacgtgttcacaggttccagggattagaacatggatgatctttgggggggccgttattcagcctactacatgggggaagaacttgaatgtgcttaaaagaataaaaatagaaatggagagaaccaattgagatggagaagttgaatatacaaggaaaagagggggcaattcattgtgaatggcttctgttcagaaagtgatcaaacctgaagcgtaactaaagggaataagtaagagagttttgaagttttaggagaattgagaagttttgaaaaactcattctgagaaggagagtgaacagaccagagaaatatactaggattatttggctacagttgggggtccatttgagttttgtgatcataaacttatagagagattaatctgcactactgtgtgaatttctccaaaattgatgtgattctctagcgcaggcatgaaaaaagtaaataattgggtttctttataatgtacgaaggtctgccacgaacacacaaacacaccggcacgacaggccagtcttagaaccattgggggcacaaaaaccccagctactactttactcggtcctccttagcaccttgaactccaaagccgggctaagaacagcattcaacaggaaagaacctcagaatggctgctcatgcaacatccctttgtctaaggtgctcggtctttggggctctgaattattccccttcaggaaaattttccacacaaacaaacaaccacagacacacaacaac

SEQ ID NO: 132862 - DNA, 438 bp, Homo sapiens
ctctggatgcaagtgtctctacccgctagggtcttggggtttttataggcacaggatggtagggggcatggtaggctaggttggtcttgggaaatgcaacatttgggcccaaaggctggagtgcctgtcctcacctaggtccgtgggcacaggcctgggggtggagccctcgccagggactcacccttctttacccagcacttcccagcatcccttacatatcaactactgggttccccagtcggcttccttgttcagttgggggacagtaacccaccagctctgaaaagtggtaagggaagggacccactcccctagaaatctagccctcggttcagtcggcccctaagggagggggatgtagccggctaaagcccctcttgggtcaaaggttgggtcaaaggaaacaggagcactgcgctagccactgaagggggc

SEQ ID NO: 132863 - DNA, 564 bp, Homo sapiens
acctgtcattgtaaccaacataagggccgtaataaagggatgtgggccatgctatgggagcacacagtagagacatctaaacctacctgggaagagaggtgagcaagaaaggatttcccaagtgaccccgaaagcaaagacttcagcctgcaatggttagcgtgagcaaacataaggcgggttgggggtagtatgtgtggaaggcattctgagaagaagagtagcatgtgcaaggtaggagtaagacagaagaacccaataacaggacaggaagtaagccaacatggccaaggctacatacagcagtgaatgaacaggaagagatggtagaaaaataggtaggggagctctgggacacagtttttgtgagtaaaatccacatgccatgcagagtccctaaaagcatttgtctttcagagaatgggagtttacaaagaagattagagagaaccagcactaaaaagaaagagaggagccagaagctctaggaaacctctatcttcagtccttttggaggactcagtgggagtctaggccctctcagaatactaagagatttttctc

SEQ ID NO: 132864 - DNA, 748 bp, Homo sapiens
gagatggggtttcaccacgttggccaggtggctgcgtcggcctcccaaagtgctgggattacaggtgtaaatcaccatgcctggccacgatctgtattttaataagctctcttagtgattctgagggacagtcaagtgtgagaatcactggcttagtgtaaaacttcaaatgagatctcctccagccgtctgtgtctgacttgcactagaagggagggtggatggtgcagagttctgtcctcagcaaagacataatctggagggtatatcataagataaaggcatgtccctctcggtcctggagcttggaagaaaccaattttttttcagatagaaaagttgctaagggagctggtggagttcctagaactattattcttccaaatttgctcaccatcctatacttacagcttccagtctgcccccacctgagggcctggggcaaactcgacttttagaggagttgctttctagtgaagactgcccctgacagctgaagacctgctcccaccccactataactgtattagttagggttctctagagggacagaactcataggatggatggatagatgatagatagataaatgatgatagatagatagatagatagatagatagacagatagatagctaaagaggagtttattaaatattaactcacatgatcacaaggtcccacaataggctgtttgcaagctgaggagcaaggaagccagtccgagccccaaaacagaagaacttgg

SEQ ID NO: 132865 - DNA, 320 bp, Homo sapiens
aagcaaacagtggcagccttgtgggaatgtgctggggccaagcccactctaccacagggtgaagagcagaactcgagacctgaggtcagaacacaggaaggctggccttggcttggctgcctgctggtgactttgggcaaattaccaaatgacaatagtgcttattccatgcccacatgtaccacagactgtgtgtgcactgcctacaataaatcgtcacaatgacccctttcctccacccactttagagaccagaaaactgaggtagagaggaagaatgaccccactgtgcagttgtgcgtggctgagctggggtgaag

SEQ ID NO: 132866 - DNA, 209 bp, Homo sapiens
cactccagcctgggtgacagagcgagactctgtctcaaaaaaaaaaaaaaaaaaagcctcctgagatgccctgccccgttttcagcagttctgctccattctttcaacaattctttcttctcaactacgagcctctgcccaaagcaagagaaatgccgggtgcagtggttggtgcccatagtcccaactactcaggaggctgaggcaga

SEQ ID NO: 132867 - DNA, 286 bp, Homo sapiens
gtatgtaaactgcacccatcccaattcaaggcagagagttaaaattcacgattttattttttcttatagtgaaggttaaacagagaaccaaatatcatgtgattcttagaaagaaggttctaataacgaaagtgcaacagctttagatattagctttacccaggtggatacacctatacacaggcatatatgcccatatatatgctgtgggagggagtggaagaagagaaaaatatgccacttaatgttgggtcactatattaaaggtagagtaaaggtctgaatc

SEQ ID NO: 132868 - DNA, 491 bp, Homo sapiens
ccatccaccaagcaaagattcttcatggctttcaagggcaattgtcaatattccagaccctaaaaggcccatctgacccagtgcctaaaatcaatattaactaaaagtaggaggtgttctttcctcttccttcctccagggaaagaaaagaagaggtgaacacaaaagacaaggggatgaggaatgaaaagtagccatggaaaaaaataagataaattttgaaggataatctaaagtgatttttatctgcctggaaacaaaattaggccttcaaaaaaaaaaaagatgttatttatcctacctttagccacaactatactaattatttccaataccctcagacaattacatgttacttttgtacatttcaaattttaaaaagtttccattctaattattttttccagaaggatttcttaggagataggtgaaaagttagaggacatgggtgcctaaagaatctaataaatgcattgatccttttgccaaaa

SEQ ID NO: 132869 - DNA, 554 bp, Homo sapiens
caagttgcagcctgaagtaggaaggaaatatggagatgctggcatcctctctccaataaagcattgaggttaaagactggaatctgaaaatacacagcaatttcaggggaatctgctgaaactggaagattgtttcttgaacttctgacctcaggtgatccacccacattggcctcccaaagtgctgaggttacaggcatgagccactgcgcctggcctgccttctgtagcttttgtctgtaaaccaagtactacagtagaaagaaggtgggttttgccacctattatataataaggacatttttttcaaatggtaactcccgtgctgacaaggatgtggcaaaactcaaacttccatactttgctgatgacaatgaaatgtcaagttgaaaagcatttttagttctatgtattagaactcatgaaaatattcgtatcttttgatctagaaatcccattttggtaagtttatcttgagaattccatagacatctgtaaaaagatgttcatttcagtgttatttataaaagcaaaaaattgaagtcactctcaat

SEQ ID NO: 132870 - DNA, 443 bp, Homo sapiens
tactgtactcctcagtacaacactgtcaggctcagaaaagcttctcagtacataacaaatgaatgaaagcactgctaactaaatgaatgaaagcacaaatggagggatatcacaaacccttgatggcgggtggccacagatggcttcccaggtaatgcctgagtcttaaaggatgcataggaattacctggatggaagggggcattcctacaaaagcaaagacaaagaagcaagagagtgctacagcttatgatgttgtggagtgtgttcaggccagaggggaatggtgtgctttaacaggacacagacacaggaagagaagcccaagtcaggacacctctgaaggccctcatcaggaagcatatcaggatgaggtatttgggcccctgtagggagaacaggatggaggcaagaaaaccagtcggaaccatctgcaccgctgc

SEQ ID NO: 132871 - DNA, 510 bp, Homo sapiens
cctgtagggaggtgttgattgtagagacacacagcaggggctatataattccataatcaggaaacccagcaaaactggtatcacacgaaggaattgcaactattgtattagtccattctcacacatctataaagaactacctgagagtgcgtaattaataaagaaaagaggtttaattggctctgcagcctgtacaagtagcatggctggggaagcctacaatcatggcagaaggtgaaggggaagcaggcacttcttacatggctggagcaggaagaagagaataaagggggaggtgccacatacttttaaacaaccagatctcatgagaagtcactcactattatgagaacagcaagggagaaatctgcccgcatgataaaatcacctcccagcaggcccctcctccaacactggggattacaattcaacatgagatttgagggaggacacaaatccaaaccatatcacctatggtttgggttttggtagcacaacactggtacaacc

SEQ ID NO: 132872 - DNA, 244 bp, Homo sapiens
gagaatgtgtgataataacagtaacaaggtcctaaataaggaataaggcatctggaagagaccaaggaagcggcatgattgaagcaaatatcaatattgggaaatactgagaaatgaagtcagtgaggtacagtgttagcaaattacaaggttaaagaatttggattttatcctgcttaagtaggattttatttatggaggttcatgaacggtgttgacaacgatagtgaggagtttggagggg

SEQ ID NO: 132873 - DNA, 549 bp, Homo sapiens
gatttgtgaggatacagatcataaaattagagagcactacaaaggctggattctggaaatccatgagttccaggttattgaagtaaatcctctaatggtttttgagttgctaaatagcaatgcttttcatatctgacaggcagcacaggtttctttgtgcagggacacagagaggccaaatgttaaggtaggaagcaagtaatatcatggcattttcctgacctctttcatctctgcaggctctggccctaacaggcttttagggggaaattgtacattccttctggtatttaccagtattggcctacccatccttaaaccctcaaatcccgctgtataattacccctaggaggccaggggtcatttagaacaccaaatgtaggcaacacccagctattagaactcaaacttcagagctctacctaaattctggcctgaagcatactgaagatgggaggggggccccaaaggtggaggacctttgagcatggtgtttctttcttgaaataaaggtgtttagtttctgaggttggcctgggcaggctgtg

SEQ ID NO: 132874 - DNA, 252 bp, Homo sapiens
acttggaaaatgactgtcatttatatggggtgtgcagaaagtcttaaacatcagcagagattcagaaatataagagctgcaaggactttgtgcaaccatttggtccaatcttctcattatacagatggacggaggttaatagcacagagtaggaggaggaaattgagctggaaggtacagacctggttcagttattatcttcctctctctgtctctgtcgctgtctctgactctgtctctgtctctctcctt

SEQ ID NO: 132875 - DNA, 338 bp, Homo sapiens
ccaacacagggaggtcctggggaacttctgcaggcaggactttgagaacaaaaatctagagaactctcttcagaggacatacacttagcaaacctcacgtggtcactaaatcccaggtgaggaagacagggctcgaccttactagaccttaacaacactgggtgctgcatacgccacctgcccacgtcttcgatgaacacggcgaggagtgggggaacgtcaggactgcttgaaaggaagaaccagacgcaagtccttctggcttctttccccatagaggcagctgcaacgccacctcctcccgctgggctcacgctgctgtccggctcccctgggaa

SEQ ID NO: 132876 - DNA, 397 bp, Homo sapiens
ttggcaggctgaggtgagagaattgcctgagcccaggaagttgaggctacagtgagccatgactgcaccactgcactccagcctgggcaacagagtaagacactgtcttagtcaatcagtcaaggaggatcatgaccaggtgtgtctttgaaaaaaattacacatgtgctttgtggagaatggatgtgaaaggggaaaactgagggtagacaagtcagataaggtgctctttgagattctaggcaaaacatggaggtggtttggactagatggctggcagaggtagagtggaatgggtaggtcagaaccaccaaatgttactgaaccttgtctctcccaaccagagatttaattactcacattgacaaaggcaatatgtaaagaccatgccttaatg

SEQ ID NO: 132877 - DNA, 374 bp, Homo sapiens
tcttaatctaccccaaacttagactaatggtcattattatggtctctgaaacagtttagacatggagatagacagccctaaagtctatttccataccattacttccatctggcaaaatttgatggtttccttcacttactaaagttgattctcagaggtcaaaaaatgtgctcagatattcaaaaacttggtattcaaaatgcctaaatttggtaaagagacttaggattattactattttttttatttctggtgcttacaaaataaagtcttattttaaatcattgagctatctagttagtttataaatagaattcaggtggttcaaaatacattatttcatttaaaattttaggatccaacgtgttatgtac

SEQ ID NO: 132878 - DNA, 450 bp, Homo sapiens
tccaacccctgatctttttactgtctccgtagttctgccttatccagactgtctgtatagttggaattacaagtatatagcattttcagattggcttcacttgatctgcatctaatgatcctctatgtctttttatggtgagatagctcatttcttttcagtgctgaataatattccattgtctagatgtgccactgatgatttatccattcgatttactgaaagacatcttggttgtttccaagttttggcaattatggatacagctgctataaacatctgtgtggccgagcacggtggctaacgcctgtaatctcagcactttggggagctgaggcgggcagatcacctgaagtcaggagttcgagaccagcctggccaacatcgcgaaactgtgtctctactaaaaatacaaaaaatagccgggcatggtggcacacacctgtagtc

SEQ ID NO: 132879 - DNA, 149 bp, Homo sapiens
ggccaggctgctcctccctgggtgttgtttagggtcccacgtttagggctcttgttccaagaaaagagtggccccaacctagagatgcagctgtgctacctccacagctctccaaggattcacacgggactgcttatgagcgccggccc

SEQ ID NO: 132880 - DNA, 991 bp, Homo sapiens
cagggcttgccaaattgtataaaaagttaatccctttccaagtttttccttggctctgatttcatgagcagctgtaaatgtctttcttccaaagctctcttcacttcctgagtgtgttatctctttgacaaatttcagtgaactctttttcctgtctttacaattctagaaaaatgtgtagatgattaattaggaggtatctgtcagcacatccctctgaaaccattctgagcttcagctcaagcttcgtgttgcttgaaaaatgaaatgtacagctgatctgagtttgttagaaaaagatacataaattaaacttgaagaaaatagatgacaggaaagaataatgctaagagcagaagtcaatgaaatagaaaacaaaatagagaacattaataaaactggaagttttttttttgaaaaatattataaaattgataaccccctaacaagatcgataaggaggaaggtgaacataaattaccagtatcagaaatgaaaaagggagtgtcactacaaatcctactgaaatcaaaaggacagtaaaggaatacattatgaaaaactttatgccaataaatttaacaacttagatgaaatgaaaaagtttcttaaacacaatttaccaaaattgacacaaaaaataaacagaaaatcagaatgttctgccaggaacagtagctcatgcctgtaatcccagcattttgggaagccaaggatggcagatcgtttgagcctagaagttcgagaccagtgtgggcaacatggtgaaaccccatctctactaaaaatataaaaattacccgggtgtggtggtacacacctgtagtctcagctactcaggaggctgaggtgggagaagcatttgaacctgagaggcagaggttgcagtgagccgagatcacaccactgcactctagcctggtcaacacaaccagactcaaaaagaaagaaaagaaatcagaatgttcaagaaagaaagaaagaaagaaaa

SEQ ID NO: 132881 - DNA, 237 bp, Homo sapiens
ttttgtgtcatactaaaattgggaaaaaataggtatctttcccaaagatctgatgattttatgagagatttttatgagaaagctgaaatatcataaaccagctgcttaaagctcataaagcccaaaatcatttcatttcaaaaaaataatgtacatggatgtctgaaatcttcattagtgttttctccagtgccctctaatggccataagatgaaaaagcaaagaaaaatacatacc

SEQ ID NO: 132882 - DNA, 256 bp, Homo sapiens
tgttctcccagcttcaaaaactgcgctctgcccagtgcagaggcttgataaaatcttgtctattgattctcacattagccacttcccctactaaacaaagtgagtataaacttggtcctcccaccaccatccctcaaaataaatatttgccattgcaaagccaccagagaaatccacacacgcacacactgccctcactcaatccatggccccgcgtgtccttcctggctctggccttgtttagcactggcctttg

SEQ ID NO: 132883 - DNA, 900 bp, Homo sapiens
tggaattccaggatcagaaataatttctagacttttctcaaatttccattcaaatctgtgatatgatacaaacagtgaaggattgtcagcttttagtttcaggaatgttcttcacaaaccccttgatttttgaaaatgtttaaatgagagtcagattgtataagatgtagaaaaagtgctccctctgctgactttatggcaactgaactgcaagtcataacagtatgaagccagaaggagccacagctcatccagtcccctgcatttcgtgataggaaaaaaagaaaggaagcccagagatattaagtatcttcccaaggtcacagagctacctagagtcagcactagcactagtggccagctctattatatccctcagtcactcaactacttcccattgcagtatcttggaccaagtaagctgaacttgattgagcagcccccatgaagcttcgtaacaaaccatagaacaaaggaaattgaaatcaacactagaaaactatgtaggatttttcagcattgttaatttattgaactttagaaaaattatctgaatcagaataatgggaaaaacagcatttcaaatattttgagctatattttgatgccactactgtagtaatattagtttcataaccaaaaaggattaaaagtgaatcagaggataatacagtgtttttagcatgtgtataattttggtataatgagataaaaaaatcttcagagttgggccagattttacaagtcagttatttagtccaagtgcccatatggtaacatggtaagataaagttagaacagaaatgcaaaaataatattgtctatattgtatctgaaaatctgaaaaaactttattttagtcattgatttattttaatgaattaaaaggctgaagtcata

SEQ ID NO: 132884 - DNA, 362 bp, Homo sapiens
gcactatgacacaaggtgcccaacattcattcttcttagttcagtttggctatgagttctctcttggaatacctattgcatgtttctcctttcccttgtgcattttaaatttatttccataatttaacagcttcaaccacttatccctctcttcttttaaaaaaattttagggtgaagtgtttattaggaactttacataccttttcagaattgttcgtatttttatttggattgtttgggttttgttagtagtctggcgacaaggttgcacgagtggtctattccaaccatttttttccataagccctataagttttagtgtgcgggtatgcagaatgccaaggttttcagtgtttcatat

SEQ ID NO: 132885 - DNA, 549 bp, Homo sapiens
taagctttatctatcaaattaagatgtgcttggaaacgatgagaaggtacttacgtgcagcaggcattagcacctgctcatggtcacaactgtccagcagtggcctagctgtctctgcaaatggcaagcaccccttctcagaatgtgtgacggtgtgtcagccaagaatggccccccacagctagggcactgcatagcccaacaggggtggagaaggggagggccagagaaggcttgaggtcccttccggtggcaaaattcaggtggacaatgctcaggtggactcactccacttccacagatgaggaccacacctccctcacccaagcatcctggcctggaaagtttccaccattgcaaagctcacaaagaggctcagagagggtgtgcaatctgctcccagttgctcagcacagctaggaaacaggcagtgttgtacaaggacctccaggccagtctcagatggacttggaccatgcctattccctcaccccacaacaaaagctctccccaccagagagctcatggtgtgtgcgcgcctttacagtg

SEQ ID NO: 132886 - DNA, 615 bp, Homo sapiens
cctcttttctaaccccacacttttttttttttaagatcaaaataacgttgcatttgtgtgtgccctgcttttatttatttatttcttttgtagacacgaggtctcactatgttgcccaggctctctccaactactgagctcggtgatcctcccacctcggccttccaaagtgctaagattataggtgtgagacaccacacccagcccagccctgctttcacaaaaaacaaaataatgatgaatatattgtactaccctcactgttttcatttgtctgtgaatgcttcttattttatcaggaaaaggaaaaatttctgtttcttgactgtaattgttgaaatgtattttcaaagttttttactttatttttggactgataccataaaatcgtgtgaaatgatgtgaggattttctaatggagaaatgacttagaatatcccttggatgtcctatctgctttttaattgttttatcatcccagacatgtttctctattcctgtctattcttttatctgtaaaatgaggttattgaactagatgctgtctacaactttttttttttctttcattaacattaaatctctggtacctgagaacattgggatcaggctgat

SEQ ID NO: 132887 - DNA, 403 bp, Homo sapiens
gtaatggagagtgatcagatgagggaccagtcagaataaggatagtggtagagcagattagtttcagactttgtataatttgatgatatacatattcattgtagactgtattctgggaattgccgatagagaattcctacctgactaaattgcctgctgagaaatgtgtttcacattttgaattaataagctatcttcaatttttgattataagttgaacattttaaactaatgatttatgtcttttactaagttttgagacaaaactttttgtatacttctttttttgtactaagtttggactgtaaagataaactttattatacaatagaaactgaagaaaaattatgtttttaaggagcagaattgtaaggtagtttgattatgggtttagttcgctata

SEQ ID NO: 132888 - DNA, 442 bp, Homo sapiens
atatcctgagaatattctctatattctcaaagaaactggcataactttgcaggcaccttgcctaggagccctcttacttccatccacagagaaggtactactagttataagaaagaaatggcccaatccctgtactttagcacactaatggaaataaactacaaatttctgaaaggaagttatcaactcagcccttagtggccaagccaggacctaggggtataggaaatgaggcaaaatattttttatgaccagcagcctgatttgaagatcctaggaggtcaccccaggagaagtggctctaaagaggtatccagtgataattgctggcagcaaaaagggaggagaacccagcacttgctgctctgctctgagtgagccaaggaggtgctgttctcccggggcacccacttcaacagctgttgtccagtgctgcattgta

SEQ ID NO: 132889 - DNA, 494 bp, Homo sapiens
gctttattattttgcctctaatactcagacccataatcctagacttgttttttttaatggtatgaggtaaatgtctaatattactttttatcataaggatacccagttgtcccagtaccttttattgtaagctctgtcctttccactgttttgcagttccgtctgtgccataggcaagtgtctctaaatctacttctgaaccctccattccattttatttgtctatgtccatgggcaaatactgtcctaccttagatattatagctttgtaatgagtgttgctatagaaaatgccctcctaccttgttgttcttcttcataagtgtctttttaactcttgaacctttgcattacattttggaaactatttgccaagttctaaaaaagaagtcctattgagggttgtttaatattgtaatgaatgtatgaataaatttggcaagaatggagagctttgcaaaataaagaacattgtatacattttcacttactga

SEQ ID NO: 132890 - DNA, 302 bp, Homo sapiens
cccacaagaaaccaggtaacgccttcaacacttctcttgaaattctcctttactatgtaccaactttatcacttataccttctgttttccatatgactgcaggaagcaattttctaagttttctgttactacacaacaataatatttctctttccaataatatttttttcaatatttttctctttcttttaagccatcatcagcagagtccttgaagtctagattttttttactaaaagtcaatttgaagcaattttttttaatcatgcccctcaacatttttttagcctttacttttagtt

SEQ ID NO: 132891 - DNA, 374 bp, Homo sapiens
tcactgttcctcaccgtcttcacataatttttttctctctttacctggcttacactccatggttagtcattcttaccaccttcttgcatctactcctatgtctctttctcttctctctctccaatgaactcacttgcgaaaacatatatcctagggaaatccaaatctctacctatcctgcacttctacccaaccagatgaatgtgactgaagacaaaatataaccatgctgactgatttcactttaaaatcaacaagtgacctcaagtaagaccttagcaatacccaacaatgctactacatttcactagggactttctcctactttcatcaatgattacttcatacttcttctctctcctcaaatctataac

SEQ ID NO: 132892 - DNA, 457 bp, Homo sapiens
gtagctgggattacaggcgcacgtccagctaatttttgtatttttagtagagatggggtttcactgtgttgaccaggctggtctagaactcctgacctcaggtaatccacctgcctcggcctcccaaagtgctgggattacaggcgtgagccaccgtgcccagccccagctggagtctttcaaaataaccctattggatgaataaagagaaaattttccagcttagttataatacagcttgcctttggaaaaagctaatgagttttcagtcaaggattccaaatgtgtggttaaagaggagaatttgtagatgctctcttgcaggtctttactgaaaaaaatacctggtaggctattagaattagggttctgtagccctgcactttaagaattatgtatcatgttacctgtttcaagtgtgagatacctggcaggtgttggatatttatcagtgagt

SEQ ID NO: 132893 - DNA, 629 bp, Homo sapiens
agagggccagctgtataggcgtttagaagacagaagaggggaatttaatcttgggaggaagagtcaatgtgagctaggtcttaaagatgagtgggagttacccaaaaggacaagatatatggcttattgcatatatgacaagcaaaagaacttaggtaagagctggtatgtagtaagtgaggaaccatgtgcatttatagttcccgggcaaacagaaaaggtcaagaaatgaacctggagacagaggtatgggctagatcataaggcaccttgtattacgtttgagaaagcacagacttcgtcttggagggagcgaagactattgaaggattttaatcaaggaagttatctggaaataaggagacttattttggataatccaggtgagaggtgataaagacctaaaatagaagtagtagtgattagcaaagtgataagaggagagacttgaggatattggagaggcacagatatcttattgatgatttgacaagaatacagaagtataaggaggatgttcagtggattgacatcttacacatggggcattttgggggcggggaataaaagtggatgtgtttaattttctgagtagtcacttagcaggcggcatgatttttaaggtgaaa

SEQ ID NO: 132894 - DNA, 239 bp, Homo sapiens
ctagaggatcccgatgtactgctctgctgcttgtctctgtccctgattcctgtcagttctgagggctctttccacatggggttcccacggggcaggtacactagaggagctgtgggactgagggcacaggccgggccccgcccacagcgttcatcacggggaatgtgtgaggcaggaacatgggcagaagaatgaggtctcccagaaagagccaggacaggaggccccctcagcaagct

SEQ ID NO: 132895 - DNA, 454 bp, Homo sapiens
caattaggaacaaagtggctacagacatttgtgtgcaggttctgtgtggagttgcctgttcatttttcagtcttcacccatacaggtacagtccaaggagagcaggcctgggaacactgtccattctgggctgccgtaagatactccgtgggctccatttttctgaaagctccttaatacgtgtttggttctcagctaccatttctgattgtcaggtagcttttgcagatatattttcttaagcttggttactactagtgactgaaatgtaactatttcccttaaggctgccactaaaaatgagcagatttcctctgttgactccttagagtgccaaaactggctcagagaattaaacagggggagcaattcccatatagtaaatgcagcaactccttatttgtcccagaggcatggacattactttccaggactgtaaagctccagtggaaat

SEQ ID NO: 132896 - DNA, 700 bp, Homo sapiens
accccacctctactaaaaatacaaaaattagttaggcactgtggcaggcacttggtagccccagctactcaggaggctgaagcaggagaatcgcttgaacccaggaggaggagattacagtgagctgagattgtgccactgcactccagcctgggtgacagagcgagactctgtctccaaaaaaaattggcataatcatcaactaacacatgccttcagtgttattaacagcttattatcagtaattacaaacatatttgattttgttgtttttttttttaactccagagtgtctcaaaatatctttgctttatgtctaaggaaaccattttttcttctctctccccctacttctttccaactagtatatcattctccattgtgtggactcagtgctttcaagaaatatccgtattatttgttatttgacatcatcctttaaactgaagagtaaagcagtttctgaaagtagtcttcactgggaatgtatctagcagctttaatagtcaatagcgattagcctatattgctcacttgatgagctaatgattgcaggccttactagcgacagtgatcgcacttcagttatctactgttacagttacactactaaatgctgataactatcatcagctggttgccttttacttagcactgaaccagtctagttagatggtgtttaggatcctcagcttctgca

SEQ ID NO: 132897 - DNA, 603 bp, Homo sapiens
gtgggactacaggatgctagtgctagcatgaacagataataggaatacgaaaaaagacactagaaaacggtagagaaggggtctcaccatgttgcccaggctggtcttgaactcctggcctcaagtgagccttccacctcagcttcccaaaatactgggattataagtgtgaagccactgtgcctggcctttattttcagtatttctagtcagatatttgctaagcaatctctacagctcgcagaaggtaggttcaaccaggaacaacattgttggctatttgatggttttcttttacatgggactaagcattattgcctacatatagggccaagccaatctgccttggtctgagaattgaagttgctctgaacagaaggtaatggtgtcagtgtcgcctttccttctgcacttgtcttcctcctgacttttcttctttggctctggtgctacagaagggcttcctgagttaccctctttcctacatcttcagccaggcagctagacaagtcaagagcttaggatgaatctaggctttaaagaggttggaagacctgtttttccttttctctgactgacccaaaagtataagacttttttttc

SEQ ID NO: 132898 - DNA, 147 bp, Homo sapiens
tggtatgttttttaaaatgctgccatccaggttgcaacccctggagattctgattcatctcagattgggccctggcattagttttgttttcttgatggttcgttccctaggtgatcctaataggcagccagggttgaaaccacaggg

SEQ ID NO: 132899 - DNA, 636 bp, Homo sapiens
gattgcagttatttcatccaggttcccaagagcaaagtacagagatgagacagttggtgctcctggtttgttcaagaattattttctattaatgctttctttcacaacagccacaatatagggttatggtacataaagtgagggcaatgagaatgggaggagcaagatctccacagtgttctgaaggacccaccaaggggacttcatagttgtctatgtgagtgataggaaaaagatgtcaaataagacttcatggtttcttatctgaagttccagaaaaaacattgataatggttgaggctataagaacagaatagctctaagggagagagaacgtaagttatacattcttacagagatgataagttataactgaaaatggaatcttagataatgtccactgtcagtggtttgggaataggattttaaaaaaaagatcaaaatgtaagcaagaacagtaaacttactaggagagataaatgagtctagggaaagagtaagatttagttatgaggagatatattacatgaagcaatagtataaagtcaactgaagagagattcttgaattccagtaacaccaacttaattggtaacatagaattgatttaataggtgaatagagaaaagagactgt

SEQ ID NO: 132900 - DNA, 669 bp, Homo sapiens
gctgaagaatcgcttgaacctaggaggcagaggctgcagtgagccgagatcatgccaccgcactctggcctgggcaacagagtgagaccgtgtctcaaaaataaataaataaataaataaataaataaataaatagatttttaagccaggccaagtggctcacgcctgtagtctcagcacttcgggaggttgagacaggaggatcacttgagcccaggtgtcccaggctgcagtgagctatgattgtgcactccagcctgggcaacacagcaagagtttgtctctaaaaaaattaaaaataaatgaaacaagattttaaaaaacttatcaaaccagcaaaagaagtttaattataatacctaatgttgttgaatatacagggaactatgcattttcatttacttggaagtttaaattggttaaaagtttttttttttctgagaaacaccagcaatatattaaatgattttttaaaaaatcacacttttggttatgtgcagtggctcatgcctgtaatcccagcactctgggaggctgagactggaggatctcttgaggccaggagtttgagactagcctgagcaacatagcaagaccccatggctacaaaaaattaaaaagttagccaggtgtggttgtgcacacttgtagtcccaggtactcggaaga

SEQ ID NO: 132901 - DNA, 343 bp, Homo sapiens
cttaggggatggcacagagccaactggaagaacacgccactcgaatgtggctaaatacaaacatgctggtacactaaccacaagatgcaaaataacgtgaaatgaaacaaaatcaagaacacagagctaaagcagaaaaatgcgttatttttgccagtatttaggatgactttttttctagacagtatgagactcttatatacttagaaatccttaaaagataggaattagtcttttttttgtttttctgagacagagtttcgctcactgcccaggctggaatgcaatggtgtgatctcagctcacagcaacctccaactccagggttcaagtgattctcctg

SEQ ID NO: 132902 - DNA, 130 bp, Homo sapiens
tgtacatcatgaaaggatgtggcataaagtacggcattttaaaagaaaacaaaaagagaaaaataaataaaccatggaagcacaaagcttccattctagagccccaagccagatgactgactgaggttac

SEQ ID NO: 132903 - DNA, 279 bp, Homo sapiens
gttagtcgaggataaagccaaaattggaatctgggggtgttgacttcagatctttccatttccatggattcctctactggctgtccaggcatggccctctaggatccatgctgtgctatcctgtcatgcctaggctgtgtgtgtgtgtggactttcccgattagaggacccagactttgagattctcaaaggggctgtgactcgatagagcttaagaactttgtttctccctggtgactgcctggctcaagggaccaaaaggatgccgaaattagaggg

SEQ ID NO: 132904 - DNA, 683 bp, Homo sapiens
gtgatcagacatcgcctgggggatggtagaggatgaagaacccgattacatattgagggtgatcaggtgtgaaggatgaggattctggttaaagtgacttagcagggttatttctaaaactgcattttataaggaagaacacagatgggtctaggaaaaggttcaggagcctaaccaaagtttggtcatgcgaagaatatttttcaatatcaatggaagcttttcagataaggccaggattcctctttcttcctcagatagtccttataaagagcttatggactgaaacattaaggggttgaagttgtccagtaatgccaccaggaattacagtgcagttcaagcattccaagacaatggccacatggctaacagtgattgtaagacaccattagctctaaaacaaatttttattttgaaggttgttagacttcaaaccaacaaagatcaaaagagacaaagaaggccatcacataatggtaaaggggtcaattcaacaagaagaggtaactatcctaaatgtatatgcacccaataacaggaggacccagattcataaagcaagtccttagtgacctacaaagagacttagactcccacacaataataatgggagactttaacaccccaccgtcaacattagacagatcaacgagacagaaagtcaacaaggatatccagga

SEQ ID NO: 132905 - DNA, 500 bp, Homo sapiens
atgaaaggacagtgttctgtgggtccagagaaggaggatgggaatacatttggctaggaagattttttttaagttttcaagaaggtggcacctgagttgtctcagaaaggcagacatttaacagccagagtttgtggagacgggaacgcactccactcagtggcagaaaagcagggctgtgcagggaactgaggagtggcccaatccagctgaagcataaggcacatccaggaggacagcaggagaggaggctacaaaggaatcttgggccattctgcagaaggcaccagaagctgggtctgcagcacttcactcagtcagcagttggcttccctgaagaatgttttagaaggaataacatgactgaagctctgctctaggaagactcttctaaggtgtgtaggattgcttggaaaggaagagcattttgctggcagaattcacaggacttaacaattgattaagagagtgagtggtggctgggcgcggtagctcacacc

SEQ ID NO: 132906 - DNA, 191 bp, Homo sapiens
ctaggtgactctccaggatcttgatcagagcatacccctgatagagcatacccctaatgcttggtgtatataaaattatttaagaaacaaactttctagaggaggctgaatcagatgatgatttcttggaggtcccttcccagttctatgatttgagatgattctttaattttccttcactgtcatttata

SEQ ID NO: 132907 - DNA, 591 bp, Homo sapiens
gcttgaatccaggaggcggaggttgcagtgagccaagatcgtgccattgcactccagcctgggtgacaagaacaagactccgtctcaaaaaaaaaaaaaaatctttgaaactcttaatagctacaaaaatatacagattgtgcatctctccataagatacattcaccaaacttcagctcaaagctgtaagatcttctgtcaaacttgtgtggaagtacaaaagttataactgagtaacagtttttacccagttgcttttggcagacaatatcattttagtggcatatgaaaaaataatcacttggccagacacagtggctcacacctgtaatcctagcattttgggaggccgaggcaggcagatcgcttgagtctaggagtcagagaccagcctaggcaacagagcaaaaacccatctccatgaaaaatacaaaaattagccaggtgtggtggcgcacgcctgtggtcccagctatcaggaggctgaggtgggaggatcacttgagcccaagaggcaggggttgcagtgagccaagatggcgccactgcactccagcctgggcaacagaatgagaccctgtttcaactgaa

SEQ ID NO: 132908 - DNA, 464 bp, Homo sapiens
gactcgcctagcaacagtgctagagcatgtttcaaattattctgtcattttggttccttgtttgtcctcttctgatcattttggtgtttcaatcccttgaccaattggttaagctagattccctaaatctcacttccctgtgtgcacatggacacagacatcccaccctacccagcctactattctagattggtagactccagattgtcttcttgggaattctctgttccaagcctgagaaagtgtgttacagtaattttattgatcatagttatgaggcagaggaggggagttatgggaactgataactgggaccagaaaccaattgaccagcaatcaaaaacaacttttcaattatccctagaggcttctgctgtccacggtgctgtggaacacaaaagaaatattcgaagtggtctctgtcctcaaagaacttctgaagaagattgacatttactgttcaa

SEQ ID NO: 132909 - DNA, 183 bp, Homo sapiens
ttcactgggtactcttcactgtctactgtctctatcacaagcagcttcaagaaactaaggttgaggcccaatggctcatgcctctaatgtaatcccagcacgatgggagggtgaagcacgtggattgcttgagttcatgagtttttgaccaacctgagcaacatgacgaaaactcgtctctac

SEQ ID NO: 132910 - DNA, 272 bp, Homo sapiens
ttaaaaaattagtcaggtgtgatggtgtatgcctgtagtcccagctacctggaggctaagctgggaggatcgcctgagcccaggaggttaaggctatagtgagtagtgatcatgcctctgcactctggcctgggcaataaagtgagacatggtctaaaaaaaaactaagaaaaacaaaaccaaaaagaaaacaacccttcccctccagccccaaactcctccaggaggcatttaaaaaacctcactaagtagcgacactattatctatatcc

SEQ ID NO: 132911 - DNA, 705 bp, Homo sapiens
gggtattactgtatttgcaaagcatttttccattatcatttgagcctcacaatgacccctgtaagttaaccatatattttattatccctgctttaaaaactggtacaacttgaccaattgaaatctttatacttattagttagatgcattagctaggatggaaactaagttgctataacaaaagaactccaatatcagctgcttattaaaaaaattgttgagtgatatatattgacaggtcactcatggtcattttaaaactgaattctttctatcttgtttctccacttacctgtgagtatcttccttaactgcaaggttgaagcagagttgtggtcgtagccgtattctagctagcaggaaggaggagagagcctagtggaatacatgcccaaagtctggaactcagacttggaagtagtagattattctccattcatattctactgataggagcaaaatcaattggctatatttatctgcaagggaggctcagaaataaactctctaggtgactagtcatattccgaaacctactctatagtagaagaagaggagaacaaattttggtaaaatactgcattttctgctacagttcaactctctggccttccaaatatctccaaagcccctacttcccacatactcccaaaggagaggatatataaacaaactcatttacttcatctagctcaaagtctagga

SEQ ID NO: 132912 - DNA, 163 bp, Homo sapiens
acctggtcagtccccaccaaacaggaataggagaaatccaatctcagttgtatttaaggattccaccaaaccttcccactgtaacgaaccccagggatatgcagtccaagagatttgggaaggttcccggcttgtcatttttcatggttgcaattgactgttc

SEQ ID NO: 132913 - DNA, 660 bp, Homo sapiens
tgtctttatgctccctcccagccagcaagccagtcagcaggcacggggccttcctagtcatccaagctcttcaggatctttcactcttcattgtacataccaggcacttattaaatgtcaaatcaaattcctgtcaatatcagtgtcactagtagcttttcccaaatatagctgtttactcacataagctacgtggatagtcatgaaataaagacatggcctagcactgagtgctttctttttcttccttctttcttttttttcctctttcttttcttttctttttttttttttctgttggagacacagtctcactgtcttccgggctgaagtgcagtggcacgatcttggcttactgcaacctccacctcccaggttcaagcgattctcctgcctcagcctcccaagtggctgggattacaggcgtgagccaccatacccggctgatttttgtattttgatagggacggggtttcaccatgttggacaggctggtttcgaactcctgatctcaagtgatcctcctgcctcagcctcccaagtagctggaattacaggtggtccatgagttggaactttataacacaggatattatttaggcatgttcatgaattcttttgcagtctttcaggtatgttttgcttgctatattgaaaaga

SEQ ID NO: 132914 - DNA, 371 bp, Homo sapiens
tgcataaaaatattctctcattcctatgaccctctggggtgttgtgctcctcctgcctcaagtgagatgctggttaaaagctaattagattcagattttcaagcactttctgattatgagaatacagtacttccttctgtttttatcttttttaaaacgctgaatttccaaagatggaggttagctcctagtgagcaaacaccagttatcttggatacggccttcatgtatataggaaaatcagaaacttcttgtaaagtttttttaacttttgtaaattgggttcagtctatactgctcaggagatgggtgcgccaaaatctcagattaccactgaagaacttactcatgtaaccaaataccacctgttc

SEQ ID NO: 132915 - DNA, 440 bp, Homo sapiens
tgggctgtgggaggtgtggagcagggtcagagctggagggggagggcatagcctccagccaccataagttggtgtgttcttggtaattatattgcttgtcaaccgaaggcagaatcaggacaatgaaagtaatgagaatccctagctttgtaacagttagtggttatctaaaagtaggtgaaattgtacatgagtgagtggcatgaatttcttattactaaagtgctcagatagctggctaactttctgtcaaagatccctctgctaggatcaacatttgattaatatatttatcctgtaataagaatttgggattcttaaagcaaaatagttgtcatgtggctgactacacaaccaaagatggtccaggtgtcgctggaagaggagagactgaagagctgttgccaggttcccacgtggaccttcggcatgacccggcc

SEQ ID NO: 132916 - DNA, 232 bp, Homo sapiens
caccactgcactccagcctgacaagactctgtctcaaaaacccaaaaccaaaacaaaacaaaacaaaaaaacagtattaccaagatcatcttcagtgggaaaagaatgacttaggagtgcaagaacatcagataaataacagcaaaattatttttcctgctggaatttgaataacaacattttaaaattaaatactctaagtattaccattaaactttactttacacactga

SEQ ID NO: 132917 - DNA, 662 bp, Homo sapiens
gactccctgtctcaaaaggcgaaaataagaaaaccctaattctttgacacaagtaagttcactgttgttagcattgtgtaagatttagatttagacataaataacaaataattttaatagatttaatacaaagctatccttacggaaaaggtataactatgattttatccaggcaaaaatatgtgtaattttttttttgagttattctattctcttgcttggttcagtgagtagcaaaagtaaaagtaggatatttattggaattaaagagtttcaggtttttagtgcttgaatttcttttaaatatctgtctgaacatctatggtgattgggtgctatcctaccatcttttattagttttgactgagacaaggtttttcttcatattgtgtctttatcacaatttgctcctggtttgaccctttatactctataaaacaagtctatttttttttttcctgcatagctgtttgttaagtaaaaatggaagtggtattctagtggaggttttcatttcttgactaaatattctcagggtctttaaccattcctcacattgcagctccaccataaatagcttgtatgatcttggggagttacttaatctgtgcttggtttccttatctttaaaattaagaatgttggtactgggctcataaatt

SEQ ID NO: 132918 - DNA, 343 bp, Homo sapiens
gctaacagtgacaaaggctgctgagccaagcatgggagaacccagaagagactattctccagatttagcaacagggaagtcattggtggccttgatgagagctggttgggtggagcagtaggggccaaagcctggttggagctggtccaagagaggtggaggcaatgctttaaaggagttttcaagcgaaggagagagagtgtggcagtgctgttttttatgatagaagaaatacagcatatctgtgagatgattggaaagatccagtagaggggacagaattaaggatgtaggagaggaagttgcaggagtgacagccttgactgcagcccagccttgactg

SEQ ID NO: 132919 - DNA, 308 bp, Homo sapiens
tccaggaactctgacccatcccaggtagatgcaatgccattgctggggagtggctggaattcaaagccagtgggtcttatcctgtgaagctctatgaaagtggggtccacagactgatgctgctcagccccatggattcagctttcttcctaggggtgtttacagaggtccaaattcttgcattttctgagtagctttcacctttgccagagatcccggagccagagtatctaaggctcctgagattctgtttgtgcctgagtagttgctctgccaagaccatgcagctctgtgtgtcagaccaaaag

SEQ ID NO: 132920 - DNA, 187 bp, Homo sapiens
tgctgggattacaggcataaggcaccacgcctggccaggatctaaatttttgaaagtctgttcttcatttccctgaaggatagcttttcattagcaaggaggaatttctaagtggatgacatggtatttcagagtccacatatttctagatgaataatttattattatttgtgtacattttccaaga

SEQ ID NO: 132921 - DNA, 1205 bp, Homo sapiens
attaggaacaaatgctctttaagtctgtttcttcataaaacccaaagtggaagtgcctgagctgtgaatgcggccacagcgttcatgccagcttgttcccaagcctaggagaagcaagcagccccgtgacgggcacaggccacagtgtgggcgtgagctcaccccatgtgtagccgggtgctgggcccaggccgctgggtttctggggtcggcagagtgggccaggcaacaacctcacatgcctacctcactgccactcgtccgcctcgtccactcctggcatttgggataaacatcctgtctcagacacacccttctcgtgcgcccatgccacctgctcaggcctatgccgcccgcccgtcctcccaagcgtgcacacccgtccgccatccttctcccgtctgtgccccatgggacagaggcctccagctgcaccaccactgctcgttaacagctgccatccacaccgaggaagcctcttcgagcccagggagtggaggatggggctctgctgtgcacgtgctccctcaggccctcccagcagtggtagatggggctctgctctgtccttcttggtcatcttcctgggcctgcaacaaagctcagcccagcagccaggcagctccttacagaggctaacgccgggtctggtccctggtgaccgcaggctgctgtgagaacttgtgacccccgagatcagaacagccttcgggtcccagagcttcccgcatgatcgtgtgtggaacagaccgggagattccagcagatatgggttcaacgttgaccaccaaccttgacaacccaagggctgcctcccctgaccatgacagccaactcctcctccacagtggctctgccaggcgccgagtccataaagggcagccactgtttggcaaggagggccggtctgccgggggctcccaggccctggggtcaggctgagagaggaagatgggtgtgagggtgcaggggcaggggggcgggccctgcagggcagtgcctggcccgtcctgcacccccagcctgggaacccccggctttctcgcttgggcctctggggagcccgcgtccccaaatgtagccacatcagagcacacttctccggcagcaacttcccaggcatgtccgtggcctcctcgggggcaggcgccccctcctggacgctgagctgacctctctagcaggactctgctcatctgcaccat

SEQ ID NO: 132922 - DNA, 735 bp, Homo sapiens
  misc_feature (722)..(722): n is a, c, g, or t
  misc_feature (726)..(726): n is a, c, g, or t
gaaaatacaaagcagaaaagttgggccaggcatggtgactcattcctgtaatcccagcaccttggaaggccaaggcaggcagatcaacttgaggtcaggagttcgaaaccaacctggccaacgtggtgaaactccacctctactaaaaatacaaaaattagctggtcttaaactcctgacctcaggtgatccgcccaccttggtctcccaaagtactgggattacaggcatgagccactgcctgaccagaagtgttctaatgtaactttttgaatgctctttttctcactgatttggagtgttacttttacacactgtatgttacagaggttttttttgttcgtttgttttttgaaacagagtctaactttgtcacccaggctggagggcagtggcacgatctcagctcactgcaaactccgcctcccagattcaagtgattctcctgcctcagcatcccgagtaactgggattacaggcggccaccaccacacccagctaatttttgtatttttagtagagacagggcttcaccatgttggccaggatggtctcaatctcttgacctcgtgatctgtccaccatggcctcccaaagtgctgggattacgggtgtgagccactgcgcccggcctcttacatgtatttttcttccatgtgctcttttatagtttaaaaatcggtgtatctctttaacccttctggaagtttggcttttttgtntgtnttggtgtgt

SEQ ID NO: 132923 - DNA, 149 bp, Homo sapiens
ggagctctccgaaaatccatctaggaaggaagaggcctgggaaagaatgtctcgaagggaaacatgaacaggtcagcagcggggtcttgctgaccgcctggccaactgtggggcagagggcggagtggggagggtgtggcaaggccaga

SEQ ID NO: 132924 - DNA, 109 bp, Homo sapiens
atttactgcaaatttatcatggcccactgaactatcagctaagtagatttttcaaaatagagagctgtaagcacaaaggtaacaataaaaaccacaaaaaataaaagct

SEQ ID NO: 132925 - DNA, 498 bp, Homo sapiens
tgggtctttgaggttccctggctggtcgaggtctcactcctgccccggttttcatgtggccaccttccctccatgcttgtctgtccctgtgtctgaatttcccctttgtgtgacaccaggcttcttgggttaggacccagactcatgacttcatttcaactccattccctctataaataccctgtctctaaatgaggccacatctacggtactaggggtcaggcatgaacgtatctttttaggaaaaatcaattcattcccaatacctgagaactcgtcttttgcatccttgtaatagtattccccttttatttgaggagtgagagtgggtttctttgcttgtaaccggtgggtctccaccgcagtggtttgtgggtgctcacttccatgtgagtgaggagccggggggccctggggtgtgctcccacgggctgtgtctgtccgcaccgcacaacaggtgacggccaaagctgtgggcagaaagtagagaactggatg

SEQ ID NO: 132926 - DNA, 564 bp, Homo sapiens
ggtttatgcagaaagcatgtggtctctgttaactcttattattatccctattatggagggttagatttctgaaaactcagtaaacaccgacaatgtgacacaactactaaaaagttagtgcaggccaggcgcggtggctcacgcctgtaatcccagcactttgggaggccgaggcgggcggatcacgaggtcaggagatggagaccatcctggctaacacggtgaaaccccgtctctactaaaaatacaaaaaattaaccgggcgaggtggcgggcgcctgtagtcccagctactcgggaggctgaggcaggagaatggcgtgaacccgtggggcggagcctgcagtgagccgagatcacagcgagactccgtctcaaaaggaaaaaaaaaaaaaaaaaaaatggtagtgtaggcttaagcccaacagatatgaagacccaggtcataagaagaatgatccaactggactcttcactggcagttccagagaactttgcaatgagatgtaacagcctgagaaatcttaggtacagaatttactattttatcattgcctaccacca

SEQ ID NO: 132927 - DNA, 421 bp, Homo sapiens
gttgagttatttgcatctcacaagacagtatatactttataatttatttctgaatggtactttaaaaatatgtagttcatttcctgggttttttttactcttttttaggaagaaagtttttaaatttttttatgtttgcaagggggttgaaaagaaatatcttttttctagcagaaccattttctttattgcagttctttccattgtgatttgttttcctgggaaaatgaaggaaaaaagagaaaaattaatttgcaaattagtaattgcattaatgaatctgtaaagaacagattatataatattgttggagtgataagtattaaggattgccaaaaactgcaagtacatgatatagtaagataatagaattgagagttttagatctggaaggtgggatgaggatagagatgagagttgg

SEQ ID NO: 132928 - DNA, 534 bp, Homo sapiens
caagtgaaacggatttccccttatcaaaccatcaaatctcatgagacttattcactaccatgagaacagtataggagagaccgcccccatgattcaattatctccaactgggtccctcccacaacatgtgggaattatgggagtacaactcaagatgagagttgggtgggggacacagagccaaaccatatcaaggagttagttggaagtgaatgagaggcatgggaatggagtgatatagcgcctggtgatggattctaggctgagatatgtggaccaaaaggacaggaaaaggtaaggggtggtgaaagggtgatgggatcaatgtgttgtaagtcttggtggagttaaatgattgatggagaaatgaatattagagagagtaagctggaaactcagggggtggtggacagagtgtgacacgtgaaattgtgattatggaggagttgcagttattggcaatgacaaagcttttggattcttacctgatctcctgctctcacttttcaaaggcctgggttccttttcttcagt

SEQ ID NO: 132929 - DNA, 770 bp, Homo sapiens
gatatttgatgcacatacattcagtggctgtgtaccatgcattctgttctgtatcattatgttatatgatcatattcaactgaatactttcattttctcatttgtgaaaggcataaagggaataggaataactaacaaaaggatttaatttactcagaaaaaaaaattatgcatgaacagaagacagtttgaggagctcctagagaaaaatatatattccatagcccagaatggcatcacacatggggtcattaggaattcaacagtgtgatctgagactccccagccccagttccagacagttcttaatgttgtcttcctgcagttatccctcagttgtaaaggtgtctggtctgtatttgctttgaaaccttcagaagccgctggcctggtctgtgctctggactctccccatctctcttggcgtctgctttgtgttttgcttggcttgagtgcagctcctgagccgtgggtcattacagtctaggtcccggaggctcatttggagtcagcctctattttttattccacattatcatgacctgtgctaaaccacagggaccctagagcaagaattactgagaaggaaaggtaattcagtggcaagacacatctctaagccatttggagtgtttaaagtttctcataattgctccaccaactgaattcagctattcccgggaatagcattcacagtaggtcactgaagactagcgcaacatcatttgcttataatcagcataagctcctctactcttgtagtcagcatc

SEQ ID NO: 132930 - DNA, 326 bp, Homo sapiens
aaatatactttgatctcgtttcatgtggaatcttaaaaatatgtggaaggttttcagtggtagctgttactgtaaatttttgaacttcaggttaatgttagcttaatgttcattagcaaaacacaaaattagaggagtaaatatggcaatgtttcccctatacagataataacttgttggacatgtgtaatgtatagcaaggaattggggcctgggaaggtgggaattaatatttgctaggttttctcagttattcgtattatactttcatctatttataaaccagaatgtgtttatagatgatactgaggctcaggtggacactt

SEQ ID NO: 132931 - DNA, 534 bp, Homo sapiens
taccaagaaagggatccctgtatttctgtctgtttagagacaagaagatactatgttcattgctatgaatgcttgattcttaccctttgtccatagaggtgtgtatgtcattaatccttattaagctcattagtgatgctcttttgcaaacagattctctcaaatatagaaggcttaaggaaagtgggtgtaaagaccctcaggtggatgccaaagtgctacagagaccatgaaataataaaactacgtttcctttaaaatagttattttccttctactcactcccccctattcatttattttacaaatatttgagtttgctttatttccatgtgtcagttttaaacatggtgggcaatgcagatgagcaagacctagtccatgctttcagggacctgtttatgctcagaagaaatgggatacaaaataactacattaagaagaagaaatggatgtgggcactaggagggataaattgtttctcgaacatagaagaggaaaaaatgccttcaatttggacccaggaggatgtta

SEQ ID NO: 132932 - DNA, 735 bp, Homo sapiens
ggacagtggttaaggaaataggctgtggagttgccctgcctgggttcaaagccctgccctgccatttattagctgggagaccctgtaatcccagcacttagggaggctgaggtgggtggatcatgaggtcaggagagcgagacaatcctggctaacacagtgaagccctgtctctactaaaaatacaaaaaattagctgggtgcgatggcaggcacctgtagtcccagctactcaggaggctgaagcaggagaatcgcttgaacccaggaggtagaggttgcagtgagccaggattgcgccaccacactccagcctgggcgacagagtgagactccatctcaaaaaaaagaaaagaaaagaaaagaaactgtgtgtctgaggatggtgtaagaggaggtatcagagggacagaccaggggcctggagtttagaacggacatgtcctggctgggcacggtggctcaagcctgtaatcccagcactttgggaggccaaggcgggtggatcataaggtcaggagatggagaccatcctggctaacatggtgaaatcccatctctattaaaaatacaaaaacttagccaggcatcaggcatggtggcaggcgcctgtagtcccagctactcaggaggctgaggcaggagaatggcgtgaacccgggaggcggagcttgcagtgagccgagatcacgccactgcactccagcctgggtgacagagcaagactctgtctcc

SEQ ID NO: 132933 - DNA, 288 bp, Homo sapiens
agtgctgggattaccaggcatgagccatctacgcccagccactagtcagtctcttatcctagtgatacttttcttggcgcgagtgtcaacagaattaaaaataatctgtagtgcgcttgggaacattactagtgagtcaccagatattgcttttaataacaaaaaattggaaaacaacataatgtataataatagtagctaatatgtattgagtgtttagcatgtgccaggcactgttgtaagtgctttacatggattacagtactgtttttatattttacagctgag

SEQ ID NO: 132934 - DNA, 829 bp, Homo sapiens
cgcggtggctcacgcctgtaatcccagcatttgggaggccaaggcaggtggatcacctgaggtcggaagttcgagaccagcctgaccaacgtgcagaaaccctgtctctactaaagatacaaaattagccaggtgtggtggcacgttcttaagagaatatcaaaatacttttccagagacacaaagcattgtctcatctgggaaaacaggaagacggaaactcggagaagttaaatacttaactgagatacccagaagttcagctgccaaccaggcaaggcatctgagaaggctgttccatgagtctggcttctgtcagttacagatatttcatccaagttatgttatatctgtgttactttgtcaagtaaaatggcacactccctcagttatagtctttttaatttattttttttgtgacagtctcactctgttgtccaggctggagtgcaaagactccatctcagaacaaaaaaaaacaacgtgaaaggaaaaagaagggacaaaggaaacacggccctgaaccccacaaaggacgagagaacaccccaggaacttgggcgaccttaataaaaggcaccgaaacatcacctccgggccagtggtacaacttgaggccaccaactgtgtaaggtagcggcaggcattagggggtcaaggcctatatcccagacagtggggagggcaacaagtgattcgacttgacggcccaggatgtgggaaccacgagggggcaacaaaaggaagaacgggtcccaccagacaaggttaaacgtagcaggccagggaggtcgcccagaaccacctaacagaggtgaacgagccacgg

SEQ ID NO: 132935 - DNA, 772 bp, Homo sapiens
gctctgttgcccaggctggagtgcagtggcgcgatctctgctcactgcaacctctgcctcctgggttcaagcaattcttctgcctcagcctaccaagtagctgagactacaggcgcttgccacgaagcccaggaaatttttgtatttttagtagagatggggtttcaccatattggccaggctggtcttgaactcctgacctcaagtgatccacctgcctcagcctcctaaagtgctaggattagagccatgagccgctgcacgcagccgaaactttcttttttaaaccagataattctttatttcatttcaaaaatcagaggcaatctacacaacaaaatggaactgcctcactcccccagtagaagggagtaggggcttgggctccctttcacctggagagcagcctggagggtatcaggaggaagccatttgaaacgcagcaacagaggctcctgacagtgcctcacctgatggcgtttggactgaggagacagagttaaattgtaaaaagtgatttatttctatgtcagaatgttgggcaagatatcatttatatagatatcatttaattgtaaccaattcatgaaggtttgagtcactgccattgaaaatttgaaatgatctccacagccacagacatgtgcccacttttgtcttccttcaaaccattgcaaatttcttgattacctacaatctgaaagcaacattgtttttattctgaccatgtctcctaaaaatattttgttggttttaattttctcaaaggttt

SEQ ID NO: 132936 - DNA, 165 bp, Homo sapiens
aactgaaattttatagatcactttctatgacaaaaatggaattagagtataaaacaataatataaataattgataaatttaaaaatatttagaaatgatacaacacagtattaagcatgcacttgttgaaataactggctgggtgcggtggctcaggcctgtaat

SEQ ID NO: 132937 - DNA, 653 bp, Homo sapiens
gtaagcatgataatagaggccaactccatttgttttgtttcactggatctggattggctttctattccaacctgggataattacattcccttctttgggaatttagggagaaattatctttcttggtgcccatttgtgcttggaagttgtgtatggcattcttctactcaccacatggattgctcagcagacaaagttggtcttcagaaaaaaaaaataataataaggccaataagcagaaagaagtagccagacaaaaagaaaataatccctgggttctcaatgaccttgaaatagctgattccaattctttccaacatccggttctattggtcttcataagggactcttgtattaatatttttttctttattgcttaaactattttaggttgttttatgttatttgcaactaaagttaccatctcctaccactggaaatgtttattgctcccacagactaccactggaaatgtttattgctcccacagactaccaagcaataatgctgtactagaagcatttccatttgcaaaccataagatgtagagcgagtataatttgtcctcatgcccactgccagattacattattaacaaaaaggcaatgaaaatgtacatatttacctgatgaataacagacacagttggaaag

SEQ ID NO: 132938 - DNA, 923 bp, Homo sapiens
tcaccaggtggtacttttatttgaattcttcagttgtacagagttgcaggaggttccctggggttaggtggagtcattgctcaggaaggatgggattatctggtgcttcagtagaaatgtatgcttgaggtttgcgtctttgcctaaccagggccttagggtatggctttgaggttaagctgagtgctgtttgaagttttgggtgttgcagaactagctcttgctctttaccaaaatgtgtagtcgtggggagctctctccccaggtggagccttcaagtagagcctaaggctgggcctggaagatggctgttgggattcaagccaggcacaacttttcaccacttgggagtgaccatcttggctttgcaggtgtgctatgctgtttgctggtacctctcactgggggctgccactggaagatacacagagatatcaccagtatctgctgtgggccctgtctccttgctttgtttctaactgactccagctggtctcgccatgccgctacctcgagcattctttatgaagtgagactgaggtgggcttcctgggaaggcatctcagaatgctagagaagctagatgtctgcttctggttctccctgcccactgcagaaaccatgggccctgaggcatcctctctgtgtggcaccatgctgaatgaaaggatggagggagaagcagtgtggtcaaagtgagaccatttctcctacccttccaatgcagacttcattcatttctgtagtctaggcaggtctctcaggcttattcccaagttttggggttttgacccacatgttcctgtctgtagataattgctagttgaaatttctgtgggtgatagtaaagcctggggccacctgttccactatttttgcccacttctctttatttacaatttatctttccccttgtttagacc

SEQ ID NO: 132939 - DNA, 942 bp, Homo sapiens
gtgactctgaggacccgatagagcataccctagtatagctagtaaacttctgttgtacagagttgcaggaggttccctggggttaggtggagtcattgctcaggaaggatgggattatctggtgcttcagtagaaatgtatgcttgaggtttgcgtctttgcctaaccagggccttagggtatggctttgaggttaagctgagtgctgtttgaagttttgggtgttgcagaactagctcttgctctttaccaaaatgtgtagtcgtggggagctctctccccaggtggagccttcaagtagagcctaaggctgggcctggaagatggctgttgggattcaagccaggcacaacttttcaccacttgggagtgaccatcttggctttgcaggtgtgctatgctgtttgctggtacctctcactgggggctgccactggaagatacacagagatatcaccagtatctgctgtgggccctgtctccttgctttgtttctaactgactccagctggtctcgccatgccgctacctcgagcattctttatgaagtgagactgaggtgggcttcctgggaaggcatctcagaatgctagagaagctagatgtctgcttctggttctccctgcccactgcagaaaccatgggccctgaggcatcctctctgtgtggcaccatgctgaatgaaaggatggagggagaagcagtgtggtcaaagtgagaccatttctcctacccttccaatgcagacttcattcatttctgtagtctaggcaggtctctcaggcttattcccaagttttggggttttgacccacatgttcctgtctgtagataattgctagttgaaatttctgtgggtgatagtaaagcctggggccacctgttccactatttttgcccacttctctttatttacaatttatctttccccttgtttagacc

SEQ ID NO: 132940 - DNA, 476 bp, Homo sapiens
ggattattttaaataaccaaaaggctacggccaggagaaagcgatcccatctaccttttttttctattgcagcgtaattgccgcgttcaatcaatttccctggcattacaaatttcatcacaatcaacattaatctttattcattgtgatggctaagaaccgggccatttctcctctttttcttaactggcaaaattaatcagggaaaagattttaaacatttacccgtgcgaaagaggtcagccctgccactatattgctcagcagataagggggctaataaaaagaaaattgaattactaatgatcaccaagaacagagtatataaaacctggccatcgccagttcaggaaaagggagaatcaattttcttgggacaaggtgcgttcattttttattttggcgcatattatcagcaatttaatttgagaggcataaacaggaggaaacagggaataatgagcctggaggtgtaa

SEQ ID NO: 132941 - DNA, 674 bp, Homo sapiens
aagctctgcagggtccatgctgtgtagcaaggcaaggccagacattggggaaggtacccaggggcacaatttggaaagcaggtttgaaatctagttttgaaatcatgccatactaaactatctttagggggttattacatgctcacctatttcagtgtttaggtgtattagagtgcatctaggtgtattcctctttgcaaagatgtaaaatgcaaaatctgaatacatttagattcaaaaattccagcctagtattatatctgaatcaataaagagtaaagtatccaagaggaaaaacacaaaacaacacacaaaaaaaaaaaaaaatgtgttgtgggcgcgcgcctcttgcggccccttgagaaagagcttttcttgaacacattgcggttgtgggcgcggcgggggcccccgttggggttagtgtgtgaaccctgtggccaagaggcggttcccccagaggagaagactccgggggcccaggagacaagggcgtcgggggttctctccccaaataaaaaaaaccgccgggcggggacaacccgagaggcgttccgtagaaacaaatctccaaagggagaggcccagaaggcgccaataaccggggagcccttatccacaacggggggtccaagagagagaccgagaaataaattaagccccgccgggggatg

SEQ ID NO: 132942 - DNA, 992 bp, Homo sapiens
cctctgacactgatagatctgagggcctgtcaccctggcccaggtcaccagggaatagtcccttaggggatgagtttccgggcatgttcacttatgattatgacacagctcttcaatccaaggcagcagaatggcattgctcacttagagacttagaattttcaaatgtggacgttttacagcaaacaccaccatgttctgctgaagttccctcagatcctgataaggctgccttccatgaaagagactcagacattttaaaataagaatctttcattaaggaaatattcacagctctaaacaatattcttttaaagatcatggcaggggaaaactaaagccttcacaacaagatcctgaaggagacaacatgaattccaaccaagtggacactgatgcaaatgagggttttgtgggcccacttgagggcgatgattctagaagggttataagctaaacacacttgttaacatcctatggggatgaacctgctcttcagtgtgaaagagaaagaggggaatattttgagatcattccaagaaccatgcaccattattacaagagctccaaacaaaaccagttcactgagaacacaggagcacttcatcaataggttggggtaaatattcagaagagaatctgttgcagttaaacgaagtggttctaactttccttctcaaatacagacctggagcaatctgatgggatttggctctctgaaaagaacagctttaggatgacaaagacaaggatgttcaacttgatcatcaaagagaattcaaatgacattttttcatacatattgaagcacttaagtggaaatgctggatagattttaatgaattctgaacacacactagcacaactttttggaggctgatcgtgaaactgcaaaattggaaaagttctgagtaaatataaatgtttttaaataagttatgttaaaagagaagaggggccactttttagaataaagtgtaaattaaaaatca

SEQ ID NO: 132943 - DNA, 422 bp, Homo sapiens
actaggctaaacattattccttgccgtcacaaaataaaatcttgattgcttctctgtgagattatatttcagatgttgaaaagctgttatatctgcttgtgtctcctctcctactggctagcatccccagttctgtgcctattccttacataatattttagacttcatggtctctgcttaaacgtgctcctccaaattcacaaggcccaggactgaataacctaggtgagaaatgaccaagcatggtacagaatgactgaggctctaaccaccgtacacggaaatgctgtgtctttgttaatgaaagctttcttggggtgcaggcggggaagctttcttgggagcaccatatgctgactctcacaataagtatgtgaccaagggtctatacatttcctactgccatgttcccatactgtgca

SEQ ID NO: 132944 - DNA, 445 bp, Homo sapiens
taatgatcccactgagttgagccagagaccatggctcaaggaggcaaaagcagctagaatttgcagggcagagtcctggaaggaacagaggtatgcaaataaaaacaaaacaataacttgcatagaagtcccctccttgattctttggttgaataatctgaatatatacaacatgaaaccccatgaggccaggcaagaataacttaccatgaaagaatagtagggatctgtaggatgaacatttccttgagctcatgatgagaaagaattcacattccctctagctagagtgtagaggcattatcaactataaggggcatttagtagggaacctagaatgaccacacattagaagtacggctaaattaattctagaacaaaggctacttgatcaaccatccaaaagttcctgaaaaggcaaaacactctaaagaaaacaatccaa

SEQ ID NO: 132945 - DNA, 435 bp, Homo sapiens
cacccaggcgccttctgggcagagccgtggagagttggacgtaggccaggtgtgaggaggagaggtgtgtttggggtggccactggctcccttcctgcgtgacgtaggctggcgtgggctcttcccccagccccttgccggtgctgctacgtgagaagtgcgcctgggtgcgcacccaggcgtgcttctgggagtgctcaccccaagtctgaattagacgcaactactctctactctcctggagaaaacatactcgtaataccacttcaaacacaagctggtggtgtacttgcccagttctaccaatgaactgggatgacacaaaagtaatgaacagatgaagtttcatatcccccgtccccaagagaggatctggtgtcgtctatttagcttccttgcctctcctgtgctctctgaggactgagagattaaaag

SEQ ID NO: 132946 - DNA, 407 bp, Homo sapiens
cactccactccatggggccagttaaggtcccaatctttcccctggtcctttctgcctagaatagtcttcccttggagatgcacaaggctactttaatgcctcctttcaggctattactcaaatgtgacattctcattgacatcatccctgacaaccattttttaaattgtactcttctacaccctggcaatcctgatttaagcagatttattttcttcttactgtaaacaaaaataaaattctaagacccacccccaactatttgaatagacctctcctcttggccaagggcattccaaaattaacctgaaaaactagttcaggccatgacgggaagcagggttcgaacatgcctcattagttcttcctcccttttggaattcaggaagagccaaccagaattaaca

SEQ ID NO: 132947 - DNA, 394 bp, Homo sapiens
cagcattttacccatgataaaactttcaaaattggagtccatcctctgtaactctgttactgctttatcaactaagtttatgtaatattcagaaattactttctttgcccatctattacaaatagtttctcatccactcaagttttatcatgaaattgcagcagtgtagtcacatcttcaggctccatgtgtaattccagttttcctgctgtttccaccacatctgcaattatttcctccactgaaatattgaaccccccaaagtcatccatgagggttggaatccacttattgcaaactcctgataatgttgctaatttgccctcccatcagtcggaaacgttcttaatggcatctagaatgaattatttccagaagattctcaatttacttt

SEQ ID NO: 132948 - DNA, 587 bp, Homo sapiens
tgcagctagagaaaagcagttaagagttggactacctgggtttaaattctagtactatcacttactagttaaatgacttttgtaaatttaacctgcccttgcctgaggtccctcacttacaaagtgataataatcacaatacctacctcatatgctattgtgaagattacataagtcagtatttgtaaattacttagaaccatccttttattgcaataatgaaagttccttaaagttactgtcttgcatgctgatgcacacactgtaattttctagccctatatagaagccaaattccaaacaatagactaggacttgagactcaaactggacaaaaattgtttcaggaaaatattagtcctaaattaaacttatatccaaagtgtaaagagcagcagaatgacagagtgactttttttttttttttttggagacagagtcccactctattgcccaggctggagtgcagtggagcgatcttggctctctgcaacctgtgtctcccaggttcaaacgattctcctgcctcagcctctcgagtagctgggactacagacatgcaccatcacccctggctaatttttgta

SEQ ID NO: 132949 - DNA, 363 bp, Homo sapiens
catgagcagctttgagagttggctgtataaatgattaatagcaataatggattcttagggttaatatgcagcaggccgactgacttctgcagctatggtcagcctaactccagatggctctctgcagagggtgggaggaatttcccactaagaagatggataggtgaggaatttggaaatctccagatcatagaccatggtggtagataggataatagcctcccaaagatgcccttgtcctaatccccagaacctgtgaagatgttaccttatattgcaaaagagactgttgagtcagggttttccagagagacagaactgacatgataactatttagggagagagacgagaaggaatttatc

SEQ ID NO: 132950 - DNA, 863 bp, Homo sapiens
gtggggggaagaatagccttttcaacaaatggtgctgggtaaaagtaggtagactctacttcatcagaatattgtgcttcagaagacatcaagaaattgaaggctggccgggcatggtggtgttcatagctaatcatcagttacagattccttggttccttccccactcccactgcttcactcgtgatccacccacctcagcaagtgctgggattacaggcgtgtgagccaccacgcccggcatgaaatatttttacttaaaaattgggaataagcttttggtttttgtgggttttgtttggtttgtgtgtttttttttttggaggagggagtctggctccctgtggtgcagggctgggagtcgcagggcgcgcaggtcttgggctcatggggagccttccacctccgggggttcaacgcaattctcccttcttcagcctcccagagtaggtggggatttacagggcttgcaccaccacaccgtgggtaagttttggtgtttaggtaagaggcggggtcgctatgtggcgcgggggggttcaaactctgacctcagtggatccacccgcttaggctcccaagggcttggatacgggcgtgaaccagcgggtccgccagaatagcttggacttcccattccgatgggtgcaccgtgcggctgccttggggagaaggagtcgccctgttcccaggcgggacgaaggcgtgttcacgacctgtgccgtgttttagagatccggtccccccacgttggatttgtgtgcgcggcccggccaaggttgtttttgtaacccatgttgttctgcgggtaccaaattgcggggcggcacggatctgtaatgtgtcccaccagcgttgtctca

SEQ ID NO: 132951 - DNA, 396 bp, Homo sapiens
tcccttctccttctgccatgactgtaagtttcctgagtcctcccagtgatgcttcctgttaagtctgtggacctgtgagtcagttaaacctgttttcttcataaatcacccactctcatttagttctttatagcagcgtgagaacagactaatataagctcctatattttgtattttcatgaattgtgaacttcacttaactgatgtagtaggttgctatggaagagactgtaggatgtttctaaaacccctaagggcacagctcttcctctgtggtacacaactagcctatattttctaggcttccttgttgttaggaaagccttgtgactggttctagcccacataatataagtagaagtgatgagtgtaacttttaggcttggcccataaaga

SEQ ID NO: 132952 - DNA, 339 bp, Homo sapiens
gttatggccatagaagagcctctggccctcactcagagcctattgacctttacattacacatgtatgttatccggttctgtgttttcttggttgttcgaaaataaatgtgagaagatgtgctagacaggactagtgatggccacaggtggaaataaactttgaaaagacaaacgatctcaagaagtgtggctggctgggacaaacccagttctgaagaacctcacgaccctatggatttctgaataacgattttctaaaacattcctggcattgtttggactctgggcactgtttggactctgggcactgtttggactctgagcactgtttggactctg

SEQ ID NO: 132953 - DNA, 1023 bp, Homo sapiens
agcgtctgtccttgccaggaaaggcattccaaaggcagagagcatgccaagtaaaaaggctttgcttcaggattatggagacagttctgaaaagccagcataacttaatgatcaatcagaaaaatatagagcaaaaaaaaaaaaaaaaaaaaaaaaaaaaaaaaaaaaaaaaaaaaaaaaaaaataaaaaaaataaaaaaaaaaaaaaagaaaaaagagacgaggggactgagaaaagttgttctcgttgaggggacgaataatgtactaccgacgcccaagatttttgaagaagaaggcgcccccttttgtgagactgatattaatttaataaaagaggcgtcgctattataaaacaatcgattgctaggaggacaacaatcatcatgggagacaatattgtagaacagacaacacagcttggtgggggacacaacatatattggcacacacatcactagccattgatataaaggagccatgaagataagtttaatacgacgcgacagagtaagggtagaaccacctgcactaatattctatacaccgaaaacaaaccttggacaccagagaaaatcttgttacgaacaccatttatacaccgcagcgcctactgtagatcacgacgatgcaaacatacagactagcaatctatatagcacaagaggtcacatacaggatgacatagggaaataaaaacagactgaaggtcagagaaaaaaggacacagaagaataacgcagagacgaagactggaaacacggtgaaaaaaagcagaagggaatcaaagacggaccaaccaagaaagaggaaaagcagaatgcaagaagccaagaacaagcaggagggcacaagagagaccaagaacacagcagcagagcaacgacaaatagaagagcatcaaagcaccgcaacagcaatggacagaaagagaaagagacaaatcagaaaaagaagacaaaagagccgacagcccgagtaagaaaaagcgaacacgatagatagaggacgatgaacaagaca

SEQ ID NO: 132954 - DNA, 313 bp, Homo sapiens
aatacatgcagagagagggaaaaaatgagacagaaaagctgagaaccatatactggggacatctagcttactaaggtttttcttctgcatgaggtcctagaagaagttttgtcaaactgtctttgatcacaaacttttcacatagtattagaaagatattccttcagtatgaagtacgtttgaaacattacaggtacaagatgtgaaatccagactagaagtgccactggaggtcacaatgggggacattgcctttggaaagtaggctgtgaattagtgtggcttattccaagtcagatgaccaatgagtggg

SEQ ID NO: 132955 - DNA, 301 bp, Homo sapiens
attttccatttaatattttcagagcacaactgaccatgggtaaccacaaaaagcaaaactacaaataaaggggggactactgtaactgggagaagattcttagatttaataaaaatacaggctaaactataggctagctaatttgcaggaaagaataggagtggagaatagacttcactaaaagaacacagcagtcactaaacaaataaacaggcaaataacaatgacaagatatgggggcacagtacccagagttgctataatatataatctaaaatatctagtttccaacaaaaaatta

SEQ ID NO: 132956 - DNA, 252 bp, Homo sapiens
tactacaaaattataaaagtttttcccccatttgcctcccaccagatgacacaagagttggtattttctgtcttcatggaccacacgcgaaatcagaccaacttctaataactgttgtttcctaaatgaaccagcaaggcaccatctgaactgtgattttcttttaaacaggtgtattcatgtgggctacatatatgcataatatgtaggagagaacggaaagaagagaaaagccaaaagatacacgcatgg

SEQ ID NO: 132957 - DNA, 300 bp, Homo sapiens
gtagccaaaacgtggcaggcccacatgacttgttacctttctcttcctttgggtacattctttgccctcctgggaggctcctcccttaccccttcctaggagttggtgcattcatttatttattcattctctctcccacatcattcagtattagaaggcctgtccaagataccagatctccaggggtaggtatgcagatagtccctcctaattcccctccaccctcaataccctgcctacccagtgagaataggttaatacattgatgaggcacatagtgagtctgattcttgtcttttt

SEQ ID NO: 132958 - DNA, 852 bp, Homo sapiens
ggggtttaggtggctcacaaatcttcatgctttacaaggaacacggtaccagcatttgcttctggtaaaaggctcagactgcttccacttgtggtggaaggtgaaagggagctgatatgcacagagatcatgtagcaaaaaataggacacgagagagagggaagtaccagtctctttttaacagcaggatctcgaggatatttttatggaaattaatacagaactcaatcattaccgtgaggatggcaccaagacattcataagggatctgcccccatgatcctcacgcttcctcttaggcccacctccatcattgtgaatcagatgtcaacgtgctttctaaactatagtagactccatccagtacattaatagttcagcacttcaacatcacactctcactgttgcacagatcatctagacagtcaataaagaaacattggatataaactgtacattagaccaaataggcccaacagacatttacaaaacattttatcccacagctacagaatacatatttttctcatcagaatattattacttttccaggacagaccagatgttaggccacataaaaaaaatcaactaatttttaaaaattggcatcatatcaagcatcttctcatgccacaatggaatacaactagaaatcaatgacaagaggatctttggaaactgtacaagtacatggaaataaaacaacatgctcttggtcaaccatttactcaataaattaaggcagggcatggtggctcgtgcctgtaatctcagcactttgggattgagctgcagtgaaccatgattgcaccattgtactgcagcctgggcagcaaagcaaaagctggtctc

SEQ ID NO: 132959 - DNA, 798 bp, Homo sapiens
ggggtttaggtggctcacaaatcttcatgctttacaaggaacacggtaccagcatttgcttctggtacagagatcatgtagcaaaaaataggacacgagagagagggaagtaccagtctctttttaacagcaggatctcgaggatatttttatggaaattaatacagaactcaatcattaccgtgaggatggcaccaagacattcataagggatctgcccccatgatcctcacgcttcctcttaggcccacctccatcattgtgaatcagatgtcaacgtgctttctaaactatagtagactccatccagtacattaatagttcagcacttcaacatcacactctcactgttgcacagatcatctagacagtcaataaagaaacattggatataaactgtacattagaccaaataggcccaacagacatttacaaaacattttatcccacagctacagaatacatatttttctcatcagaatattattacttttccaggacagaccagatgttaggccacataaaaaaaatcaactaatttttaaaaattggcatcatatcaagcatcttctcatgccacaatggaatacaactagaaatcaatgacaagaggatctttggaaactgtacaagtacatggaaataaaacaacatgctcttggtcaaccatttactcaataaattaaggcagggcatggtggctcgtgcctgtaatctcagcactttgggattgagctgcagtgaaccatgattgcaccattgtactgcagcctgggcagcaaagcaaaagctggtctc

SEQ ID NO: 132960 - DNA, 235 bp, Homo sapiens
gtaagattagattccaaaccacagcttggaggttaccaattcagtaacatcccttcccttagagttaagtcaatgaagagagcccattctgagtaaagtttgctgctttaagtaaaagtgaacctcttttctaacaggctaagatggaagtttccttgctctctgtaaatttttttttaaaccctgtatttaccagaatttctgattatttactgtcagtcagagtttggacagt

SEQ ID NO: 132961 - DNA, 231 bp, Homo sapiens
tgggaaaactcactgtaattttaattttaaggggatgctttataataaagcaagaattgcaagataaaagtcacttttcagcaatttgttttacagaagctacattaggacatatctctatctttaagtgaggtgtactcatatatatatttttccctttctgtaatattagttcctctgggactacaggcgcctgccaccatagctggctaatttttgtatttttttagt

SEQ ID NO: 132962 - DNA, 248 bp, Homo sapiens
aaagacagaaatgacctcttatctggaattgatgaatttttagatcaagtaactgtcctacctccaggagagtgggatccttctatacgcatagaaccaccaaaaagtgtcccttctcaggaaaagagaaagattcctgtgtttcacaatggatctacccccacactgggtgagactcctaaagaggccgctcatcatgctgggcctgagctacagaggactggacggtgggtgcaaatactgatatt

SEQ ID NO: 132963 - DNA, 326 bp, Homo sapiens
gtgagaccctatctttacaaagaaaaagtaagagaaacttaagaattaacaagaaaatgaaagatatttctgaaaaacattgcaaaactttactgaagctcataaaagaattgaataaatgctaaaacatattttgttcttgaacaggatagctctcacatttgtaagatgtcagtatctgctgtaagttgctgtattttatattgttagaaagatccttttttactttttatgatttctaaagttaagatacgccttaaagctgatgacatcttccaggtacttctggccatatggtaattatgaagttaggttaggagcatctt

SEQ ID NO: 132964 - DNA, 361 bp, Homo sapiens
atattgtatgattccatttacatgaaatgtccagaatacacaaatccataaagacataaagcagattagtggtggccaggggatggggagagaagggattgggaagtgactgcttatggatactgagtttctttttagggtgataaaaaatgttagtggtgatggatgcacaaccttctgaatacactaaagaccacttaattgtacaccttaaaatggtgaatttatggcatattaactatatctcaatttttaaaattccaaaataagccgctaatataaatccattcctttagcacactagcccattttctttcctcagcagacttagagaacaagtactcttcatttaccatagcat

SEQ ID NO: 132965 - DNA, 358 bp, Homo sapiens
gcttgtcggtctctccaacaaaattgtgttcttagtgacatcaggattatattttgtttattgcttgtggtatccatggtgactagcatagtatcttgaacatgataagtgccctacaaatatttgctgagtataagaatgaatgaatgaatgaatgaatgaatgaatgaatgaatgcttcatggcatccagctacccagtcctgacattctctgagtctcagtttctctctcactaaaaacgagatgacttctttttcattgttgtactctctgcaaacctgtagaaatgaacccctagtggctatgagaagctgcctaggccaagggcgtgggattcaattgctgtttggtttctc

SEQ ID NO: 132966 - DNA, 648 bp, Homo sapiens
agggagggcactggtccctatgccgtggagcttggccttggggcatgctgtaccccaggcagttcagatgacccctgaggagtccctctttgctgaggggtgactgtgggaggccagaggccagcgctacccttgcgtgtggatgtcctgggtccctctccctgccccagcaggggaagctgcagcaaatcccctcacaggccttcgtgggtgaagttgggcactaagggtgagggatgcacgctgagccaagtcagagtgtcatctggcctagctggcttctgctgggctcagggaccctgagcctctgggacgggcacgtcagcaggtcacatgctggaaacttgcacaggtgaggcaacagggcctgtaagaagttgccccatagtcaaaataaaaaattcacaaagtggaaacaacccaaaagagggagttgaattcgacgggaggcccccagtttgctcttctgtacctccttcacttggccttccctgagcccacacctgtacttctgctcttttcgttgagagtgttttcccctgtaccactcaatttgtgtgcatgctgcatccccacacacctaggccaaatctctgtctccttccttatgcctggccttagagtcacaggctttggtcgattgcgtta

SEQ ID NO: 132967 - DNA, 509 bp, Homo sapiens
tctctctctctcccttcctcccatagagaccagtcttggggaaccacctttgaggtttgtgtggagcaaagtagtgatgatcaagagggtgtgatatgtgagcatttcttattgttctctgaacgtgtaattcgcctgtgctttctggtagtcttattgatgacaattcaaggactttgggttggtgtcaaagacgggcttcagaataatggcagtagactttatataaccaccgatgggatgtgaacttgaaaggcccaaactcgcaagagttccatttcatatagctattctcttttgggggaaaaaagaaaagaaaaacctacagtataggcagatctttatttttcctataaaagaaacccagatgcttgagggtcacggtgatcactgtgacttaggccatattgactttgtgctgtgcaccgccctgcgcccttcacccacatgaactcaaatgttccacctcttgacagacgagggcccatctttaacgcattcattcagca

SEQ ID NO: 132968 - DNA, 524 bp, Homo sapiens
accacctacaaagagtgtcacgtaatgaaccgtctggtcaatcactccttccaaagatctaagcctttcatctccttttgtcagaggaagaaacctcagggttttcatgaaaccatcacctcctctaacagctgccttttcttcatacagcacctctcagtgttgcctcattctgcctggttaggtgctctctaaccaatgggccatcaatcccaggtcactgaaaggtcctccagggttttgggagatgtttagacttctattgtggagtcctctctagatgaagagatatccatcttttcttcaacatcccttgtttcccaatctttttattgttttctggcctcccttctaatttatggatgtttttaacggtgagacgccccaaatggaaccagtatccgatggaggcgtaatcactgttgaccagaacagaataattacctcacttactctgcaaggtacttctgttaaatgctatcccatccattatgtgccttttttttttttaaactactactgca

SEQ ID NO: 132969 - DNA, 364 bp, Homo sapiens
tgcaaaggcagcaacacagccctgctgctgcaggatgctgtcctaggaaattccaccagttggctcactgacttctcgcagttcctttctgctgggttatcaagcaggtgagcaatgacagtcatcccctcttccagggaatcccagacccctccagcaactgatgactcattctctaacaaaaggtgggcggtctggacctccccttggaatctctcctttacctgtactatcatcccccgatcgactacccgtgagttgggggctgagtccccaggcagcaaaatatctgggggggtatgctctacccctcccactccgtcttccttttggagactctctgttaacttcgttagggtttcag

SEQ ID NO: 132970 - DNA, 657 bp, Homo sapiens
ggatcatgtaggtcaggaattgagaccagcctggccaacatggcaaaaccccatctctactaaaagtacaaaaattatctgggcatggttgtgggcacctgtattctcaggtacttgggagactgaggcagcagaatcgcttgaacccaggaagcagaggttgcagtgagccaagatcaggctgctgcactctagcctgagtgatagagtgagtgagactctgtctcaaaaaacaaaaaacaaaaaaacctttcgatttattttccagaggtctatttttaatttagtaacaagatttttaaaaatatttataaaattaaataacaatagaatgttagaactaggccctataaaatataaaattgtcaaaattgcttagcatgattgtagcttcaaggatcctattgttaatgtggcaacttctgaaaccaaacatcatcatgcttagcatcaagagctaaagtagtcatgagttaatggagaagaacaactaaggaattggctgccgaagtaaagtttatgctaaatttaaatgaaatgaaataacaaagtagtttgaaatgaacattccattgattatttttaaaattttatttattaacaaagtagcttatactaactgcccactgtctatcccaatagttacagcaataacat

SEQ ID NO: 132971 - DNA, 526 bp, Homo sapiens
ctctctgatttctccccacttttttctgtctcatcgccttatcagccagagcttctgcggcggtggcattgggtcaatggtttgagtgtctgcagccagctggaaatgaatgaccatttcctgtttaatctcactgggtctgggcttgcttgataattgagcagtaaatcaatgcccctgaaatgtcagcagagatgatcaggtccccctccctctgaattgcagcctgttcagtgcccagccgtacccatgggatactgctttgtgctacaactgaaatatcaaacaattgctaattgttaatggaacattaagtgcattttcccagaccacttatttaaagtgcatttcccttctgtgggttgataatgaggctgtgtttgaggtctgtgttgaggaagaaatgaggggaggtgggcttgggccccagaaatcgggcaggctgggggcatttgcacattggcagctgatgggattcttccccaagccctggctacttagcgctggtggtgtcccgctgtgaccg

SEQ ID NO: 132972 - DNA, 610 bp, Homo sapiens
gaggtggtggtggtgatggtgaaggctcaaccaagtccatgtcagtggactggaaagagagagagtatcaagaggccttctgaggttgtaaatgacatgcagaaagctgagtagggaggggacatggtaatgatattaaccaagatgggcactacaaaactggagcatgttagaggtgagggtgcagagagagacaaggagtttgcttttggtcaggcaggtaggtggaagtcagctctaggggtctaaataaaggattccagggccagagatcaaatgattgtctcagccatttgtgcattcattcataaaatatgtatcaaatgccctctctgtgccaggcactgtcctaggctctaaggataaagaaataaatgagatgtagtctcaagatacaatttaatggagaagaccaaaacaacaacaaaaaaaaaaaaaaaaaatttggggggggcccgggggcccggaaaaggttttaaaaccccttgggttggggggggggggcccccatggtgttgggagccccggggccaaggggggcccaaggggacaccggggccagaacgggggtggggtttccccccaaaaaaaaaagcgccgggggggacga

SEQ ID NO: 132973 - DNA, 357 bp, Homo sapiens
agcatctcaagccacagtgtgagaacagcaggtatttcataaacattgctgcaggatgacatagtaacatgcccacaatagctccagtgctctgaccttccttcctcagggcaactcaacccactgttcacagtaagcttccatccctgctggcaacaggtatttctttataacaacacaacaatggcctaacacaccctgcacggcgggaaggaaaggcagagaagtgacaccgtcagggggaaatgacagaaaggaaaatcaaggccttgcaaggtcagaaaggggactcagggcttccaccacagccctgccccacttggccacctcccttttgggaggtggcatcgataaaca

SEQ ID NO: 132974 - DNA, 205 bp, Homo sapiens
gagctcagaaagtgatcttcctaggttttatggcttctttcaagggagaggaattctagtttctttgacttgcttcaggagacaaaggaaggtacgaaggagggagggataagttcagagacaccttcttgcttctgtggtcctcctggtgtccttcagctcaaagtattcagcatgccaaggtagcgtacttccagatattgtg

SEQ ID NO: 132975 - DNA, 507 bp, Homo sapiens
actttgcctttattcttggatgatggtttcgttgggagaaagtaacaggttaatatgtacattttgtctgaagactctggagctgtaacactgcagtctcctggcttctgtgggtcatcaggctaattgattttcctttgtaagtgaccctccctacctctagtgacttcagaaaccttccttttgactttagtgttcagaggtttcaatgtactgtaccaaggtggtgcattatttttatttatcatgcctacactttgttgtgattcctgaatctgagggtttatgtctttcatcaaccgtggaaagtcagtaccattatgttgtagaatattgcctcccctaatgcttctgatcttttccagaaacttctatttgaccatctcattgtcttcctcagctgtctcatagattttctatctctgtctccctctgcttcattcacagaattttctatgcagtttctaactcttgagatgtttctgttccactgctttatctacccac

SEQ ID NO: 132976 - DNA, 181 bp, Homo sapiens
cctttttccccgggtcagtgcccagcggccacgtgggcctgaggccgaggtctcctggagggaccctggtttcctgccacgtgttcctcttgctgatccaccccatttctcttgaacaaaagttttgttggcttcccaaatgtaaagcaagccagaagcaagatgataaagggtgtttaaa

SEQ ID NO: 132977 - DNA, 361 bp, Homo sapiens
taaaattccaatttaaaatatgagtattcttattcttaggctatgaggccactggcaaaggaacttaagaaaataggccaaacctaatagaaataagattgtgggaaaggaacagcaacaaaaatagaaacgctgtctttggtgctgctttggaaatatactcagctactggtgctcaagagcattatttataaatcactggtcaaagcaagggtggccatgagttattgctgaagaatgcaggacaacttctgtaaaggatgtagaatagcaaaacatgctaagttctctcatttgggtaaggatatctctaagcttatcagtattttaggtgattagaggtaaaattgcagagtccaac

SEQ ID NO: 132978 - DNA, 772 bp, Homo sapiens
gggggtgggggtggggtttaagagctgcacttaatgtgagctataaaagaactgctacagcacacaaaatagctatttttattattataattataattattattattattttgtaccttaaaaaatagacacatacaccaaagacatttgtgtgagcctttaaacagtctgtctgtggttggtatcattcaccatcaatgagtcaggggttgggattcaaggttgagtagtgtggattgtgttcaggcttaaaagacctgagaagtttggtttttgactccttttacatccatgaaacaggacatttcatactggatgtacagtagttgtacactgttggatatcaagttcaatcaaattcatggaactacatgcttgtatgtgtatatatacattgcttgtgcatatgcatatctgtatgtatatatacatgtattgtaccatgtccatacacattttaagcacttcaggctgtcattttttaatgttcttaaagcaatgaatgtttgtgtgcaaaacacagtatttttaagaaggataggctatagtttttgcttttactctgaactaggtgggcgcatttcaaaaattcggatgggaaaaagcctggaaattccagtgaatattcagcaaggccctctttcattgtacagggatcaaatttcctcctcttttttgtgccccctcccacttctacaagttatcccctgtggggaaaacaggatgataatcaaaactctgggctgatgtttttccaacttagtgtctattg

SEQ ID NO: 132979 - DNA, 373 bp, Homo sapiens
tgtgccaccgtgcctggctaatttttgtattttcagtagagatggagtttcaccatgttggccagactggtctcaaactcccttggacagactggtctcaaactcctgacctcgtgattcacccaccttggcctccctaagtgctgggattacaggaatgagccaccaggcccggcccaaatatctttttttaaaaaaaaacattcatccacttctctgcctttgtgaggaagaacacaatcaaatcaaagtacctgctgcattaaaaggacactgctatctctgcccaacatttctgagggacatttctctgaaagcactggtaacataaatacttaggaaccaggtataaaggaatactgatcccagcgca

SEQ ID NO: 132980 - DNA, 384 bp, Homo sapiens
gggacaatgaactccttctggtctaagttattggtgctgcccctgctggctccgctgtccatggcccgagcctctgcctgtcagagatggtagagccaccaggacatggagtcattgctgacacagggaaatatgagatgtcttaggtttggtgtatgtgaaacatgcatgagaaatagaggccaaaagttccactgtggagcgcagacagaatggtctgaatgctcttgcagttactacgtcagtagtttgtcatctaatatatattatacatctataacctatgtatttaccttattgtgataatactgttttgttttgttttttttctaattttgctttgtgcaaagccaaatccctttcagcagcattgagctaaaaaaa

SEQ ID NO: 132981 - DNA, 389 bp, Homo sapiens
tgtgagctacaactgcctgttgttcataaaccacccagtttatggtgttttgttataacagccaggatggatgccattagtccatccattagtctgaaatacttcaagtgtgtggttcctaagaactggcatgttttcttacataaccacaggagaatgatcaactttagtatttttaatatcgatgcaatgcttttatccaattcaccgtccatatgccagtgtctccagttgacccactacagcatcctccccctctcaatatgatccagtctcgggtcaggcattgcatttgattggatctcatggagccccagacagagccgtggcttagcctcaggaaggatcagaatcagggacacagggaacccaggagttttcttcctttg

SEQ ID NO: 132982 - DNA, 625 bp, Homo sapiens
catttgttcacaagaatcaaggattggaataggcctgcaagtcatctccatctcacactctctgattttaaggtaaaactccagttactagaaagacagtatagaggagaaaccacaaattgccttggttgctgagaaacacctctgaatatactgattccctagcctgctattgctcattaagaaaaagtagaatcaagtcatgaatacttagtgtatgtatttccagaggcaaatatgacatctcaaatggatttatagcctctaaagtcggtatgggatttatatcttctaatatttattctgtggtaaaggagttcattaaaatatggagtttcagtactttttttggccaaatattaaaactgtgtgtgagagaaatctatatcatgggagaactttgtttctcaaactgccaggtgattgttcctatttgttattctcataatttcaacaaaaacaagattcctaagtctgttttgttttgttgaatttgtgcttggtttttaacgcaggctggttcagtccttccctaggggttcgttccttatggagttttagaaattaagcatagctaagtgcatgtgcacacacacacacacacacacacacacacacacacaca

SEQ ID NO: 132983 - DNA, 375 bp, Homo sapiens
ggatggagatggagggtggatggagggtggagatggtgagtggtgatggagggtggagataaatggtggtaatggacagtggagatggacagtcgaaatggagagtggtgatggatggtagtgatggatggtggagatggacagcggagatgaatggtggtgatggatggtggagatggagcgtggaaatggtgggtggtgatggaggatggagatggagggtggagatggagggtggtgatggagggtggagatgaatggtggtgatggatggtggagatggaggatggagatggagggtggatgaagggtggagatggaaggtggtgatggagggtggtgatggatggtggagatgaatggtggcgatggacg

SEQ ID NO: 132984 - DNA, 143 bp, Homo sapiens
tgctgggattataggcatgagccactgtacccggctgcagtagtgcagtgtttttgctttgagtctctgaaacatgcacacatactcccttttttaaaaaaaaattgtttgtatttttaaaatttttgtgggttcatggtagg

SEQ ID NO: 132985 - DNA, 380 bp, Homo sapiens
ggcagtgatgtcgaggtcgactctaagatccctccgtcttctggccctacaagacctgatatgaaggatgattattaaaggaaaagcagagcatgtggatgaaagtgtatagccctgtattcgaagtttccttggcatctttttgaatattcatgcaaaagtcgatgactgttccatccatgaagtcagtttcctgattatcaattcaactccacaagcatttgctgcacgactactatgtgcagaatgtggtagggatccattgaagatacaatccttgccctcctgttctttacttcccaggagggagatcataataatgtggacagaactgtaaatagaggcggaagcaggaagcaggaagcggcagaagcaggaag

SEQ ID NO: 132986 - DNA, 535 bp, Homo sapiens
gacagacctcagatgtgcctaaagccatggtcaaccaggcaagaagaggactatgacagtaacactgccaccttagcacatcagaaagtgttagagaccagcaatgatgaaacttgctgaggaacaggaaacattttaagaaaatgtgtcatcaggtcacacagggagaaagtggctaatctgaagatgggaggcactcgaaagtggcaaggcacttcagagcagagagtttttctgtcattgcagagagatcaaatcagctgtttaagagtcaggctgtcctgggctcctcctaaaggagccaacaatgtagcacagccaggctgcctccgtgaactcagattctactcccagaattaatggcctctgggtgttgtgcattctccagcctttcagctgtcaagctggggatccttgtgaatgcagccagcagtgagagttcacagccacacagccacatccagcactggctcggactggggactccatgccttggctttgctgaagctgcctcgctgcataacccgagggcagg

SEQ ID NO: 132987 - DNA, 485 bp, Homo sapiens
atgcccttagataaattgtttaatgcagttttcttttttcttccacattgtggggactagtggtttctgtgttgatgaaagagcagggagcatcttttcttgtgtgttcattcatgcaaaattttgccctcttgaaaaatgaacaaagatcatagccagaaggtatttatcatgcagttaaccacaagaaatcttgaatgagatcatcatcaagtaacttaaataaaacagttattttctgacactttatcaccagagtcattctttaggacacttagcattattatgtatgcatttttctttttcatataattgccaactattttgaagaatgggatgcttcagattaacgtcttgggagggagacacaatctacttgaccctgatttaaaggaatagtggaagtgggtggttcttcaccacacatgtgattgttactagggattcttcatagactctgtcatagcaaaagtattatatttggc

SEQ ID NO: 132988 - DNA, 303 bp, Homo sapiens
ctttcctgtgtgcaactaactgtaccttattctctctttgacaagagatcagagacattcctctgtttccatatgcatgtggctggcctacaaatctgaggttatgtgttttcccatccttctcccagtcccaattctcaaatcctgactagtatctctcagtcccaattccaaatacataggcaggagaatctgattgatcctgcttgagagagatatctgcccctatgtcctggaagtaggaggtaatatgaaataaacatgcattcacttaattgccttcaacaactatttgttgagctc

SEQ ID NO: 132989 - DNA, 405 bp, Homo sapiens
ctcttgggataatgggtctgggacagctcaattacaggtgggggcttcttatgcaattccattcccaacactgggtcaggctaggcaccgcctgtccttttgtctttgaccataccctggtcttgctcctcactcatgaaaagtatctgaaggcctccctcgagttctgttcctagccttaggtccagccatcgttccgggtaggggagatgaagccataatccactaaccattttctcctggactcctacctccaatgatttcaccattccctgcaggaaaccccacctaatcacatcctactccctccaccacaactgctatccccctcctttgtagagaccttggcttccttatccacacagcctctttctctcctcattcttcataatccagcttagagca

SEQ ID NO: 132990 - DNA, 333 bp, Homo sapiens
ggtaaaaggcagaataaaacatttaaatcaaagtctttcaaatgaatttagattcaaagaactcaagaatcattcaggggttaaaaaaggttttatattaaattacaaagtgaaattcattattaaaattctatttgctatattaagtcatgcattgcttaacaatggagatgtcttctgagaaatgcactgttaggcaaattttttttcttttttttttttgagacggagtctcactctgttgctcagactggagtgcagtggcactatctcggctcactgcaacctctgcctcctgggttcaagcaattctcctgcctcagcctcctgagt

SEQ ID NO: 132991 - DNA, 774 bp, Homo sapiens
attccaaaatctgaaatctgaaacacttctggttccaagcatttcagataagggatactcaaacctgtactgtagggatagtcataagaataacctgacaactttttcaaaaaattagattctcaggtctcacttccaaaggttgattcttaaggtctgggctggagcccaggaatccagcaagcatctcatctcaagtacatctgaacctgcagacacctttgagaaacaagctttattagtcttctgcctactccactggtggcttctcactctttctttggctccccatacaacagcctcttgagaacaggtcatctttaggatttggcgcttaccctgctgaggctctccagtctatgtagtacttatggggataatggggcttacaattcaagctgagatttggcggggacacaaaggttaacgatattattggaacaacatggatgatttcatgtttgagaaattctagaacacacagcataatctttaattacagaaagcagatttgtggttttctgggccaaagagtggggtgatgctgactgataaagaggtgaaaaattgtttgggatgatagaaatgttctatatcttgattatgatggtggtaacaagactatatacatttttccaaactcatagaactctatactgaaatagatgccttttatcatgtataaattattccttaataaagtttattttaaaataaaaacttttaagaagagttgcaaaattttcaaacataatattaatatatgaaaatctg

SEQ ID NO: 132992 - DNA, 163 bp, Homo sapiens
cagggcctggcacccacaaatccccttcctgcctctgtggattggcctctcctggacattctgtagaaatggaattacatattgtatggccttttgtgtctggcttctctcacggggtgtgatgtcctcaaggttcatccatgcagcatgtgctagagtgtaa

SEQ ID NO: 132993 - DNA, 185 bp, Homo sapiens
atccctcacttcctgtggccagtgttgggaggttgggccaactccatgctcagccatagaattttgatcttccgtcccttctccctgttagcaatataatcctgtagtcctgaaaatagattttcctgaggagccatccatttgacagacagatgaatatggaccactgctgatgattactaagt

SEQ ID NO: 132994 - DNA, 684 bp, Homo sapiens
cgtggtggcgggcacctgtagtcccagctacttgggaggctgaggcaggagaatggcccgaacccgagaggcggagcttgcagtgagccgagatcgcaccgctgcactccagcctgggcgacagagtgagactctgtctcaaaaaataaataaataaaaaataaaatgagcaaagggttagaatacacaattctccaaagaagaaacgcaaaaggccaaaaagcacaggaagggagatgcaaatcaaaaccataatgagacaccactttacacatgctacaagtaatataaaaatcaattttaagaaaaaagagacacaagtgttggtgagcacatggagggagaaagcagagccctcatacacttccggtgggaatggtaaatgatttcactctctgaaaaacaagtctggcagatcctcaaaaggaaaacacatgagttaccacgtgacccagtaattccacgcgtacgtatacacccaagaaaatacacatccacataaaaacgtgaacgtgaaatgttcataatagaattttctataaaagccaaacaataaaaaccacccaaggctgagcacggtggctcacgtctgtagtcctagcacctcgggaggccgaggcgggtggatcacgaggtcaggagtttgagaccagcctggccaacatggcgaaaccccatctctac

SEQ ID NO: 132995 - DNA, 471 bp, Homo sapiens
tccgcctcccagattcaaatgattctcctgccctcagtctcctaagtagctgggattacaggcatgtgccaccacgtccatctaagttttgtacttttagtagagacagagtttcgccgtgttggccaggttggtcttgaactcctgacctcaggtgatctgcccgcctcggcctcccaaagtgctgggattaccccggctaaagcttgtttttaatgtactttgttttccagattgatcattaccagttaacttatggtaacctactctgcccagagcagatgaagactagactcaaggcaatacctagttacttctcttccttctgtctttactgtgttctttccctctttctttctgctaagtctcgcccattataacctctccttcttcctcatcgctaaagaatacttccagtttaagccattccaggaaatcgggtggttttatgatgtgttcctccgtgaggga

SEQ ID NO: 132996 - DNA, 195 bp, Homo sapiens
gagtgtccatggtatttattttggatttgcaatgaaatttgggaattaaaggagataataatacatgtattcagcatttaatttgtgttctttatacgtcagaggaaatgtctgcaaattaatcctacgcaacaataattctgtaaagcattacatatgtgaagatgactacaccaagcattagttgaaatagag

SEQ ID NO: 132997 - DNA, 542 bp, Homo sapiens
gtgtttaaagctatgaaattgattatttcttcagccttgaaagacttctctggagatgatacagagctgatacagacattgatgatggggctgtttcttaattgctcaggagaaaataattgttgtatggttcttacaggcaactaaacttttatttagagaaacaaagtaattgggaatatgagaagtgaaatgtgtcttaatatgccttcacttattcctattctttctagtgttctattttagctgtttaaaataccacgctagaccggtgttaaaggctcatacctttgggagccaaggtgggcagatcacttgagctcaggagtttgagaccagcctggacaacttggcgaaaccctgtctttactaaaaatacaaaaattagccaggcatggtggtgcgcacctgtaatcccagctacttgggaggctgaagtgggaggatcacttgaacccgggagatggatgttgcagttagttgagatcatgccactgcactgcagcctgggtgacagagtgagacctcatctcaaaaaaaaa

SEQ ID NO: 132998 - DNA, 627 bp, Homo sapiens
tactggagaatctggggattgggagctgatgagtcttactctgttgcccaggctgcggtgcaatggcgcgatcttggctcacagtaacctccacctcccgggttcaagtgattctcctgcctcagcctcccgagtagttgggattacagacacacaccactgcgcccggtaacaactaatgttggaactatgaaaagctcttctctacttttaacaaagcttagtcacaaacagttccccagttgataagaaaaactaaaacaacagaacaattgaaagtccgaatctgcaagttcatctctgagaaccgaattttacagccactccagatttgtactccaaatggatagtttgattgtagaaatcacatcccttcagtctgccaatgtgataactgcccaagagaaagtgatgcctacattcatagataatcccctttcccccatcctatatataactggagtcaacagcagctggaggaaaatggcaagaacttggaatcaagattaggttagaataacactgctgtagacagtttatcagctcttcagcatatgtccattttccttgaaggatgagcctttagaaacctctgacaataaagtttattttgcatccaaaaaaaag

SEQ ID NO: 132999 - DNA, 607 bp, Homo sapiens
tagttgggattacagacacacaccactgcgcccggcaattattattattatcattattattattattgttattattattattgtgcgtgtgtatgtgtttttagtagagacggagttttgccatgttggtcaggctggtcttgaactcctgacctcagctgatcaaaagtaggtgaggtcaaaaaacataccctgggagaggctggcacaatgcccagaaccgctatcgctaggcctggggttttcctctgtagtggaatactagtattcatgtagtgcagggacaaaaccaattagatagttctgggagttaaaaagagatgatttacagtgccatttgagaaggggtattaaggaatttgccagggcactgacgcgtgtcaggtgtaaacctcaggttgagagagagctaagtattttctgtccatgaaggtgataagcgagggcctgaagaaagagggactggggaggacactggcaccagaaataggaaagggcttcttgggggtgggaaggatgggtcacggtgctatctagaaagttgcctggcagtggatgtaggatgtgggagtgagacatcaaacatgaagcagtcgcttaaagtctg

SEQ ID NO: 133000 - DNA, 782 bp, Homo sapiens
accctcaatttctttatatatctatagatattcagtgcatatgcaaatatatgcatataattcctctttttaattaaacacacatggtaatatctattgtaaagtatacattttttgaaatcttgctttttttcaggtagcagtattcagaatcaggtgaatagcaaggcaaataagttgttttcattctttttaaattggtccatgtgtcaaggtctgtttagtaccttttgatggatatgtaggttatttacagtattaggttgctttacacagtgctgcagtgaatattcttttatattgtcttgagttgcctgcatttctaggtcagaggatatgttcatttgcaattttgttaaatattgccagattgccttcccaccatctgtatatgtatggtgtactgttcttctatatttttcatgtctctctcatgctttcctttaaatccacaagtgtataatagctgttttaaaatttatctgttggccaagctcagtggctcatgtctgtaatttcagcactttgggaggccaagtcaggaggaggattgcttgaacccaggagttcgagaccagcctgggcaatatggcaagaccccatctctacaaaatttaaaaattagctgggcatggtggcacatatctgtggtctcagctacttgggaggctgaggtgggaggatcgtttgagctcaggaggtcgaagctgcagcaagccatgtttgtgccattgcactttagtctgggcaacaaagactgtctcaaaaaaaaagaaaaaaaa

SEQ ID NO: 133001 - DNA, 232 bp, Homo sapiens
ctctgactcaaagcacaactagcttcaaatgcagttttaccatttaactagccctgtgactttagttattaacctctctgagtctcagtgttctcactcatacaatggtaataacaacaatcttgcaaagctgctgtaaggattaataataatgcaggtggccaggcacagtggctcaagcctgtaatcccagcactttgggaggccaaggcgggtggatcacgaggtcagg

SEQ ID NO: 133002 - DNA, 469 bp, Homo sapiens
gatctgtatgctgaaaattgcaaaattctggagatggaaatcaaagaagatctaaataagtggagagacatattgttcatggattggaagactcatatagtaaatatgtgaattctccccaaactgagctatagctttaatgcaatttctatcaaaatcacagcaagggctgttgtagacatagcaagcttattttaaaatttatacgagaaagcacagaccttagcatatctaaaacaatcttcaccaagaataaattggaagaaatcacttttccatataaagcctactatgtaggtacaataatatgtagtagtatgtgaaaggatagaaacatagctcaacaaaaaaaaagatcccagaaataaacctacacaaatatgctcactttatttatggcaaaggcacaaaagcaattcaacagatggtgttagagcaactggatatcccttagaccacaaaaaaagca

SEQ ID NO: 133003 - DNA, 529 bp, Homo sapiens
atccaaacaagtccaaaattccctgacactggcaattccattgtagtaggtacttattggatgggatattgaagatgatctagatcagaaattcccaccccggctggatatcaggatcagctggagaatctttatgacacagaatcctaagttctctcggagaatctgattcagtagttctgggtggcacgtggaaatatgtattttaaaaatcttaccatcatgggtgtaacaactggaaggggggcccaagggaggcttctgagatggtggtcatattctttccttgatctgggcgttggctacacagatatatttgctttataaaaattatttgaggtgtgtacttatgatacatgaattggtttcctgtatgttttatatttcactaaaatgttaaaaaataaaaaacctcttttcaactgattctggtgatccatgagtttatctagtatttcttcaatgcaagcccttgcacctgctgcttcagaattaaatgccaattctaggactcactcagaaccttcta

SEQ ID NO: 133004 - DNA, 791 bp, Homo sapiens
attgcccaggctgttctcaaacttttggcctccagccactgccctcacacctgtaatccaagcactttaggaggccgaggcaggaggattgcttgagctcaggagttcaagctagagtgagctatgataatgccactgcactccaacccaggcaacagagccagatcctgactcaaaacaaaaacaaaaacaagacattgaatctacaattaatgaccttccaaaccaaaaagcattagacccagatggttttactggtgaattatattgaaaacataatgaagaaataacaatttcctataatcttttccagaaaatagaggcagtaggaacacttcctaactcattcaatgaaggttgtaataccttaataccaaaactagacaaagacattacaagcaaggaaaaataacacactaatatttctcaggaatgtagatataaaaatcctctacaaaaagtcagcaacccaaacctaacatgtgtaaaatgaatgatacatcacaaccaagtgggatttactccagacattcaaggctggtttaacactcacatgtaaattaatgtaattcatcacatcaatgggctaaagaagaaaaaacatgatcatatcaatagataaaggaaaagcatttgacaaaacccaacacctatttatgataacaactctagcaaggcaggaatagagtggaacttcctcaacttgatagagaacatctacaaaaaaacctacagctaatatcatacttaatgttgagaagctgaatgctttctctttaagactgggaaca

SEQ ID NO: 133005 - DNA, 412 bp, Homo sapiens
ttagtgctgttcaacataaattctcaggatattatactcgagagccagtaggaataagggcaaagaaacaagcgttaaggcaagtaaattagatgatgagagaaaacctagtctacaaagttaccatttaaatcttgaactccggacagctatttcataaatggttttctttggtcatacaaggtgaccatgggtcatataaggtaatgttaaaatcacaagtcagggtttctgtctgactgctggtgggtcagatatcttcccctcccatgaaagaaaagtcattctttagtgttaataatcttgtcatgtctgtagaaatgagcacttcctcttccaccaccaagctccccaccccaaattctgcttgggacattatactgcaggctaatgatctaaacaaaattaagat

SEQ ID NO: 133006 - DNA, 460 bp, Homo sapiens
ggtgccacatctggactgagaagcacctcatagatacgccctacccactgctggactttgagaaactacaaggctcctctgccactagcacttgggaatcccctgcatggcagcacatggtgccacagggcaggtgggcaatgatccttaaaacatcaaactcactcagcaacgaaccacagtggtaaccactctccatcctccttcctgtgccagtcgggcggggacctccacctgaaacaaggggtggagaaaccgacaggaagaccagtggcccaaggacaggctcagcatgggccatgagcacacacagctggcatcctgcttctggacggtgatgggatgccagtgagactgcagagtggacacttccttgagctagaagcctaacgaacataccagctgggcctgcaccagctgaaaacactggctgctccatggctattcactttccaaatac

SEQ ID NO: 133007 - DNA, 127 bp, Homo sapiens
aatacatgactctcataattgaaatggaatagtatatcattttttatttagttctaatgtataccaggcattatatgaatctgacaattttaggaataaaaataaattacatcccgcatttaaaagg

SEQ ID NO: 133008 - DNA, 292 bp, Homo sapiens
agactcctcccactacagggcatcatgctgcttccctacaaggtcccaccatctccacctcagggtgtcctctgggaggagtgacaaagggactgatattcacttgacactaaaagagacttggcagctgtgggcatcttggggtggccccaggcagctctgaaacccaggaccaggaaaccatagaggatgggctggggactcatcactctgtaacgtttccaaagaggaaacttaatccaaagacattctcaaaaggtgtctctgtctagggatgatgaagggaggacag

SEQ ID NO: 133009 - DNA, 277 bp, Homo sapiens
gggcccgcatgttgtacagcacagcttcctgtggtgtggcagtgggctccatccgggctgtctggtgcggccggagccccagccgcatgtggctgctggacactggaagcatggctggggagaactagagcccgactcttaaattttactggatttgtgatttcagttgagccacacatggtgggtggcttccatttgggaccaggcctctgcagaggaggccaggtctgggtggccggttcaccaggaagggaggtgaccgtgtcctcaggggaag

SEQ ID NO: 133010 - DNA, 704 bp, Homo sapiens
ggtttttaatgtaataatttttaccttatttcttaagtcttccatgaagcattatttgtaatggtggcaaaatagtccttaattctggtgcagcgtcatttattttaaccatttgtataatgtatattttgattgtttctaatttgactattctttagttttattattttcacgataaagatgaaaaatattcacttcacgaagttattgtgaaaaataaatagcataatccatggaaagttcttattgccacgtctgacaaaaagtaagcacttgataaaatgctttttttcttatcattattaaggcttttgaaaaatcagtgattaggggagttagggtagaacctgtgtttatgggcagagatttctctttacactttctgaggaaactgtattacggcagtacatcgtaggagtaaaccagcaaggagactgcaagctgactgcttgagctcaatgctggccctgccacttcttagctatgtgggcttgagcaagttacttaaactaagactcagattcatcatctgaaaaatgggttgataataatagaatctacttcctcactttgtcctgaggattaaataagaacacgcatataaagttcacacagcacagtacctgaaacatagtatgctctcaacaagtatttttttattataaacaagataaaattgattcccctcatttacatctctggtc

SEQ ID NO: 133011 - DNA, 514 bp, Homo sapiens
aattgggttatacgtagaggagattaaaccatagccacatcccatctgccctcttcactctatgagacccagagtttccaccacagaacagaggactgactggaatcaaagctcacccctttcttggaggctattctttgatgtgctggacacccttcacagccaacctttgaaaggaagagagacgcgaaagaattgggccaaatgtagacaatgcttcagaaatagaagattggtagaacttgaggagatatgggaaaatccacattccttttacccatgctctcaactttttacccatttccacaattattttatttcttggaagtaaaatagtatttgagggaactataatgcattaatctcacattcatgtgattgagtcattggaagccgtgccaggcttgagagcagagaaggaataaagagacaggaggaaatctgcattcaacctggacctagttttttcagccaaataaatggcatattgggagacactgcaattcatgaaaag

SEQ ID NO: 133012 - DNA, 642 bp, Homo sapiens
tgtagtgtacagtattataaaatccaaagaagggaacttcgaaaggaggaaatgttctagaaaacttgagaattgggtgcaaacagagccttgaagttgtagtgaataaagaggaaagtattcaaagtaggtgaaagtaaataggaatgaaccacttattttaagatttcttctgtgttgatagttaaaggagagttggcaataaagtcagttgaaggagttttattggttttcccctaagaaaattttatatttaaagcagagggaaagaagccattgaagatggaaatagctcttctgatttatttctcattctttattaacactattactctctccctcttatccaagacagatacctcagccattagcaagctctgtcagtttttttcttttcttatgcctgtcttattctttctctcttggtttatgcttcagagcacttgaaaaaccagtatcactaaaatctaatttttgtcaaattatcttcaaaaattgtatggctctttttattgtattgagtgtcccttaactttcagcattttttgtagtttggcagtagactttctgacattctctcttatttccatatcccagtgaaatcattgttccatttcagctagaacaatctatagtgtcccc

SEQ ID NO: 133013 - DNA, 273 bp, Homo sapiens
gattctcctgcctcagcctccccagtagctgggattacaggcgcctgccaccacgcccggctacttttttgtatttttagtagagatggggtttcaccatgttggccaggctggtctttaactcctgacctcgtgatctgcccgccttggcctcccaaagttctgggattacaggcgtgagccaccgcgcccagcggaaacctgattcttgactttacattttttatgcccatctaaagcagtggaggctgagactcacagaggttcagtcac

SEQ ID NO: 133014 - DNA, 833 bp, Homo sapiens
cactgcttcctaatgtactcccttgttttgactcttggggcacaggcacctttccttcagtcttccttctaaaagtcttcttgtgtggggtaacctctaggaccccactgtatcccttaagagttctgcctcctttatttcttgttctctgaagaatgtcccccattccttcttatagacagatagtgacatccatctctgtattatcacttagaatagtagattgcaaaccttacacattgtgtcaggtttgaacagcacccattagaccccaagcaaaagacatcggagtgataaggaaacaggacactaattcctctcagatcctgaatcaggagttcttcaccctcccaggagctacttggtaataaaggtgtaaagctctcaggtgctgaacttattaagcctcaagattctgaatttttattttaagctctatcaaaagtataatcttacccctcaaaaaaaagatgaataaaggaatgaaatggttcaaagaaggaatgaaatggttcaagcatgattcaagacacagagataagaaataacatgatgtggcttgcagtggtggaattccataacatgatgtagtatgcagtggtggtattcctagagcgttaaatattcagtgataagtgggcagggttgaggctgaaaagatagataggggccaggtcaaagtgggttaatttatgtgctgtttgtaccaacaagcttggactttgtatgtgacaggcagttaggaggcattcaagacttaagcagagtgacatggtgctttgttttacgttgttttccattttttaaagctatcaactactgtacatggaaag

SEQ ID NO: 133015 - DNA, 397 bp, Homo sapiens
ttttccccttagtttcaaaatggtgaggttgctagatttatgtgtgctaatttctgtatgttaaagcatcccatcagtcaggtatggaacatttagtaagcacttcttgttgcagaataatttcattcatttgaaatctcttcccttaaaaccctttgaggctgggattggtggctcatgcctgtaatttcagcacttcgggaggccaaggcgggcagattgcctgagctcaggagtttgaaaccagcctgggcaacatgctgaaaccctgtctctactaaaaatacaaaaaattatctgggcatggtggtgcacacctgtagtcctagctactcgggaagccaatgcatgagaatcacttgaacccaggaggcggaggttgcagtgagccaagatc

SEQ ID NO: 133016 - DNA, 442 bp, Homo sapiens
ggctgggatcacttaatctgtttagttttccttctccaaaggtcagatggtgtgagcagagcacacccagagttaaggagggatgagggttaacctcaatgggtgcatgaggggagcaccttggttttgagcctgtggtagctctacatgggcctcacaacaaagtctcccctgaaactacaatgatttataattgtagggaatggggcaaaagggccagagaaagtagccttacgaggagaataataagactttagtaatcagatgcttaagttgctgtgctgcgttttttaaatgggggtctgaaacaaaagaataaaagacctctttcctagaaatgttccagaccagaaagtaacaaaacaagcctctgtcacaaatttaccttttatcatttgttgctgtacagggattaacaggcaaatattatctatttgcttct

SEQ ID NO: 133017 - DNA, 306 bp, Homo sapiens
agaggtgccagcatggactccagacccatgttagggtaggaggttgggatgcaaagtggggattgtctaacaaagtaaaaagcttgctggtcacagagccatgggcagtgtgtatgtgtgtggtacatagcccaaatactagtttggtttgttctggaaaagacttgatgtcacttttaaaaatgcttgccactaaagataaatcaagtgaagatgaaaatgagacaaagggaaggttagggaagggaagataaaatgaagccagaagtgaggtttgggcacagaatccatgcagtgtgggtctgt

SEQ ID NO: 133018 - DNA, 787 bp, Homo sapiens
gcttgtctctcgctgcagctggagcgctggtctcgtcttccctgcttgtgtcccctgctcttagaggcccagcctctgtggccctctgacctgcaagcattgggagatccacagctaagacgccagggcctcccctggaagcctagaaatgggaccattgacatttatggatgtggccatagaattctctgtggaggagtggcaatgcctggacactgcacagcagaatttatataggaacgtgatgttagagaactacagaaacctggtcttcctgggtattgctgtctctaagccagacctgatcacctgtctggagcaaggcaaagagccctggaatatggagagacatgagatggtggccaaacccccaggtaggtgagagtgaatatgacagatgacacagatgagaggtccaaatgtcaaggagaaagtcagtttttgaaatacgatttggggccgggtgtggtggctcatgcctgtggtcccagcacttggagaggctaaggcgggcagatgacctagggtcgggtgttcgagaccagcctggccagcgtggagaaaccccgtctttactggaaatgcagaattggctgggtgtggtggcgcatgcctgtggtcccagctgcttgggaggctgaggcgggagagtcgcttggacctgggaggcggaggttgtggtgagctgagatcgcgccattgcactgcagcctgggaacaagagcgaaactccgtctcagataaataaataaataaacgaataaaaataagaaatacaatttgggag

SEQ ID NO: 133019 - DNA, 218 bp, Homo sapiens
tcgctcctcttctgagccgtgagctgggcagggccgcgctcacatcattcctctccccctgtcgccgggtgggaaatccgtaacaggctctgtggcaaaggctgggccaaggtgcctcgtgggcagccgatccatcaggcggccgacaggcgtgatcgagtgccgtgtcacacgcagcccaggaaacaaacacgccgcgcgaaaggtattggtgaacg

SEQ ID NO: 133020 - DNA, 527 bp, Homo sapiens
ccccaccaggcctgccccaaggtgcgtcagatcttggacatctgggccagtggttgcggtgttgtgtccctacattgcttccagcacgtggtcgctgtggaggcttatacacgggaggcgtgtattgtggaagccctagggatccagacgctcaccaaccagaagcaagggcactgctatggagtggtggcaggctggccacctgctcgtcgccggcgcttgggggtgcacctgctgcaccgtgccctccttgtcttcctggctgaaggcgagcgacagcttcatccccaggacatccaggcccggggctgagtgctggggagttggccatccagcctggggagaaatgtttgaatgttccagctgccccatgctgacagcagcccccatctctggtttcagaaggggtgtgtgtgtgtgtgtgtgtgtgtgtgtgtgtgtgtgtgtgtgtttgtgtgtgtgtgtgtgtgtgtagggagcacccaggcagatctcccccaggctgagagaggactttgttacagatg

SEQ ID NO: 133021 - DNA, 374 bp, Homo sapiens
aaaggtaatatgtaacgaaaacatatgaaagttctatggatataaatagggcacagtggattcagaataagagagaatagcctacttgagaatagctggctgggaaccaaccctgcaaatcaacaaaaggctggaaggaacacatgcaagtcagagcaaggaaacagaggttttgtgtggaggtcatgtgggtgcctccttgggttcaagtcctggcttctctacttacctgtgtgggaccctgggcacattccttaacttctctctcagttttctcatttgtaaagtggggttaacagtatcatctaccccttagggatgaagggattaatgcaggaaatcaccaacagctagtatataggatacatgttcaa

SEQ ID NO: 133022 - DNA, 402 bp, Homo sapiens
taaaaaaatattctggggtgattttaaaaagaagtgaaaagctacttgataatttaattctgccccttgagttcctgcctacgcctagttgttatgctttagttggttaaacacaatattatcactagcaaatcacttattgtgatccccaagcagtagtttgcatccaaaataacttctcctaaagaactttttagtaactccactactgatattgctattaagggaatactgagtctgaaactcaggtttaacatttagctgctgtgtaaattctgttactcaccctctcttgagtctccacttcctcatgcgacaaacagggacactgatacctaccccaccgctctcctcagctcacctccctccaccttggattctatgttctgcccacattcacgt

SEQ ID NO: 133023 - DNA, 419 bp, Homo sapiens
tactttcccacagggtgccctaaagaagacagaaacgtcaaagtgctattttttggcttatgatgtcaatttttcaggattgaagtggcgagcgtcccacagagtttattgcaaactattatgaaggtcttggagttactgttggtatgactcatttatgaaaaaaatatgatttcagtaactgcaggctgtatttgtaatgtgatagattttcatttaatctctcacctctctataatttgcccaatttaaaaatgccctgaagcttgctttctctttgtctgggagccctgttcttggtatgtgttattacaataatagtaataagaaattgtgccaatatgtgtctctcttccagctcttgctgtctccttggtcatttaattacttctggtactgatttcccccagcctgatctc

SEQ ID NO: 133024 - DNA, 121 bp, Homo sapiens
agcacatggaatatggcaggaacatgagagcttgttaagttctgggatggctagagtaccctgtggatggggagtggtggagaagtggctggaagaactcgttggccagatgatggacatt

SEQ ID NO: 133025 - DNA, 368 bp, Homo sapiens
gactttgctgcctcaccgttaatctcatttggatatctcgacttgtcatgtttcagctgttgcttcatctgcctattttatcattactgtctctaggtctatacagcaattattgtccaaaacactctactgttttctggaagtaagtttttgaaaacattttcttttttaccttttacttctgtatcagtcagtataggctacagtgtgctgcagtaataaataaccttgacttcttagtggcttagtataataaagctttttttcctcactcatgctttagctattgattggggctctgcttcaagttatcttcacttcagcatacaagctgatggggctgccaccatgtagaaggttgctatgat

SEQ ID NO: 133026 - DNA, 640 bp, Homo sapiens
acaggcatggcatttcatcatggaaaggaacccatgtcaagcagcctggaatctgcaggcgcacagcgacagaggaagaattaaatgaaggaaaaacactggaaacaaccttcaaaaccacaataataggggattttaacatggttctctgaaatttgacagactgattaggaaaaaaaagactaagggacgacttaagacacatcaccatagactcaatctgacaaggatgttctaaattctgtaccccatggagtcatcatgcttctccagtgtctgtgggacagttatgaaaatgaccaggtatgatagaacaaagaaaccctcaatatatttcaggtaacagcacataggacatgccatttgaccccaagtgcaaaaaaaaaaaaactaaaaatgagcaaaaacaagtagtcccctcacctccaaacgctgttagaaattaaagttcaatccttcaggtaactttattaactcaagcgctttgtgtatttaaggcagcaatgggtcaggcgtggtggctcacacctgtaatcctagcactttgggaggccgaggcaggtggattgcctgagctcagaagtttgaaaccagcccgggcaacacagcgaaaccccgtctctactaaaaaatacaaaaa

SEQ ID NO: 133027 - DNA, 385 bp, Homo sapiens
ggtgccgtgcctgatgtgccgaaaggtgcctctagtgctattacaatgcagacacagtttccatcaatcatatggacagcagctgccaagttctcttttacttggtgagttatggatggcaaagatgtctttcaactatgcacaaaaattggtaaagaactggctaggtgtccatccgtcaggtaggaaggagtgattataactgatctgaaggtagagtgagatacaaaatgccctctgaggatattttacttattcctgagagctgctgctgtctttgaacacctttgaacatttactttttaagacaattagatcaagggaaaaaatcatggaaagcatgattcaaagatcaaattcttcaatttgatgaagtcacacttca

SEQ ID NO: 133028 - DNA, 888 bp, Homo sapiens
  misc_feature (447)..(447): n is a, c, g, or t
ctggggacaaggccagggctaagagggacgagagagccaggaaagtccaggccaagggtgcctcttgaaccttgtggctgaggggagcaggctgttgggatgatcagcagacatggaaagtccttccagctctacccctgtgtatttcccagcgaatgctctcggattttaggacttacctcctaaaattttcacttggtctaaagcaaaaggccccaggctttctgtcaggagctgcaacttttcatctgatgaggagatgaagagatggcacatcagagaaaagtgacaaaggtggcaaaggtgtggagtggtgcgactggcatttccattccagagtgcatcacttcaaaccttacattcctgaggctgttcgtcgaaggcttctcacatctaaactgcagttcatttattgcagagccctgttcacatgggttctcagagacnttttcattctcgcttctcaccacgctggagatgagaactagatgtggttttctagatacagtctacatttccctttgaatctggaagtccggcttcaaggtgatccacaaacatccgagaaggaaagaaacttagaggtaaatgattcaatgattcttaaaacctgactgtggcactcttctccaaatacctctgttctcctccatatttctcagcccctttgaagaggcaggcccatgggatgaattctgaccaatggatttggctaagatttaagagccagtgcaccatccttcagctaactcttctctccacctgctgcaaggacataaacatttcaatggcacaaagatagagcaccttgaattgttactgcaaagaagacatcttttctggagagtcacccaagcagtggatttgtgaataaataaatcttgtgtt

SEQ ID NO: 133029 - DNA, 359 bp, Homo sapiens
tggtttcagctactggagagactgaagtgggaagatctattgagcccaggtcaagtctacagtgagccatgattgtgccatggcactccagcctgggtgacagaatgagaccttatctctttttttttctttgagacatatctacaaatgatattttgccttctttccaatacttgtttttctattttaattaaaagataattctagagtaacaaatacggaataaaagaaatactgcttgacatgtatgatacgttactgattgtattaaaaatgtttctggtctataaactgtattaagcatgacggtatatagccttttatttgagatatttacttgtcatgttgaattatcaatc

SEQ ID NO: 133030 - DNA, 588 bp, Homo sapiens
gtgtggagaacagggaggtaggagtgagggtgaggtggttagtgaaaattaaagactttcctgacagacaaggtagaaaagctgaatgagctcagatctttaaacaaaggagagactcttctacatcatttgggctggagatatgggggatggctaagatgattttcagagaactctgccatgtatcatgagatcagttgtataactgttccaatgaacatttatatttagggtagctgggagcaggaggtgattagcaggtcttaggatcaggtctgctcactgatatataagaatacactgataaaatcaccatgatgatccttatggagccccaaggagatagatcttaaaagagaggctgagctccacagtctttaccatcagtaaatccctgtcccacacaaagtcaagtcagctacataatcaaatccaaaatgtgttcaaatgatgaatcttcacttgccccaaagtggtacaaggatagctttagagaagacagctgaccctaagtgctaggacggtcactcccctaaatgaatgagaaggtgctacttggctggggtcagaaatagagctcaagcattt

SEQ ID NO: 133031 - DNA, 198 bp, Homo sapiens
ggcttacattatccctctgtcttgggagggtatcctctcctggttttagagataccagctcttgttcttctacttagggtctttttctagcaatgggttgttctctggggccttgatcttttacttttaatttttatttatttaattataaaattgagatgaggtcttgatgtgttgctcaggctggtcttgaactcc

SEQ ID NO: 133032 - DNA, 725 bp, Homo sapiens
aatctaaatctacttaattgttaatgattgctttgttttggatccattaattccattgtagactattatttaactttgaggtgacagaagaaatgatttataatggaagctggagaggaacaaatagattaattttctaaaccatttctagtcaaaacgacagtctcataagctatcaaaattcactgtattttgttaatagatctctttattttaaaatgagtaagaacatattttgaatatcagatttttatcctctcatatccaactgattccttattttactgatatgagtgagcatatattcccttaagagtgaattttgaagtattattttaaaaattaacagtaaaattcttctgatactatactggaggtttttgttcccaaagatcaataaattactctataggacataataactcaatgtgtatcctcaaatgaaattgaaattccttccatatacataaaatctgcaaaggaatttatttcagtaggataatagttaatttatagtgtgaagttcaaaaaggcagaagaagataacaactcaatttaggtaaagatgtagcacatataagctggaggaaaatcaatgtcaaatagaaaaccatatctgaaattcagatcatatttagatgcacaaaaaactgttcagagcagtagggggtgattgtattccaattcaatttcctttactcacatcaaccagtcttggtttgaaa

SEQ ID NO: 133033 - DNA, 603 bp, Homo sapiens
tagttaatgttaggaaaacatgtaaatttggatattttatttatacaatatacaaatacttgtcagattgataaaagcagaacaatgacagagacataactggaggaaaatagattggcaaataatttcataatcttgtctaacatgacatcaaaggcaaaaatcataattggagattgatagacttgattgtagatatattaaaacttctatacatataaaacagagaagagactcaaatagcatgaacctaataaatgtttgaaaattgctttttcttgattttttgaggggaaatggaattaatgaatcaataaattctgactaacattccaatatattactgtttgatggcttagtaaagcagaaatttttctgggatagtactaatttgctattttatctcctgaaggcacacagcatcacagaaatttttgtgtgaagaatacataatatatcttagttaaaaataaagatgaaggccaggtgcggtggctcatgcctgtaatcccaacactttgggaggccgaggcaggtggatcacgaggtcaggagattgagaccatcctgactaacacactgaaaccctatctctactaaaaa

SEQ ID NO: 133034 - DNA, 725 bp, Homo sapiens
aggcataaaatctaataatcaaaggagacgttggaagttatgtagtccaaccctcacttccctctctgtgcagataccttttctgtaatatcttgacatagtcattctgtgttccaaaacccttctggtaaagtgatagtcattactttataggccacccaacctattgctaagaagccccgttttagtgaagctctgtagctcacactcactggtctttgcccctggaacagtacagagggaatctgtgacagtctttaggcacattttcttcaagctcctcggcaagctgtatgtatctcagacggtttgactgtcgtgaccccattactacgtacacatttttgtttatcagtgttctacttgagatgttatttaggaacaagtacagtcccgagggtgtggtctggatggcacatagcgacaggactgtccccgttttggatgcccgtgtactatttactaatagagactaaaactattagtgtttctttggttttgtcatcaccttgtactgtcagttccttttgaatttgcttcccccaaaacctccaagtagagttctctttaactcctagatagccaggtttcttgccctgtccctcatcatttagtgtcacctacaaatttgataaagcatgcctacctggttgtccaaataacacattaacttgcttacaaaaacagagatgcatgacttttatcttttttttttttttttggaa

SEQ ID NO: 133035 - DNA, 350 bp, Homo sapiens
aaagaatagaaatcaatgatccagaaaagagacaactaggaaaatcaacacaaaaagacaaatgttggttttgactgatggaaggaaagataaaaggcttacgttactaacaacatgaaatgaaaaacaggaatcactcctgatttagaggtgttaacaggataacgaaagtcatatgaataattttatgccgatgtatttgcaaatttatatgaactagacaaattccttgaaaaacattatttaccaaaagagaaacgactaagaaacagaaaatgtgaacaatagtattatcttttttttcttctgagacagggtctcactctgttatcccggctggagtccagtga

SEQ ID NO: 133036 - DNA, 433 bp, Homo sapiens
tatgcactgcggtggttgccagtggtgccttgaaagatcccctttatctagtatgtgaacccatttcccagctgctgcaaatgttggctgctaacagctcacagctgccttcaatacccagagaattgctcttggctgataggagccactgccctggggtcaatatgcttcacacacctcatcctcaagtggtcagcaaccaatgtcccgctgacactgaagtccaaagaccagccccttgcctcaacatggggataactttatgaaatgatgatacttcagagttcacatggactgggacaagtttagagtaggagtcgggaaactttttctgtaaagggccaggtagtaagcattttagactacataggccatcagtctctgctttgactattcaactctgcctttgtagcatgaatgcagccctagacag

SEQ ID NO: 133037 - DNA, 442 bp, Homo sapiens
caccagggacggggaggcaaggctgagggaaacctccataaacaaaccttgctgaacgaatccttatcttcctagtcacttctccacaactaactgccctagcccatgctcctttgtctggtcacgttttcacaatttactttttgtccaacttcatatataagcattcagttccacctgcttctttggatcttccttttcctatgggaactccaatgtcagacatgacactgatgcttcaaattcatcataatatacgtgaaatcccattcccagtagtcccaagttactctccaaagtgatgtgtttttttattaatgtgctaagtaggcatgaattaaatggcttctctgctgggcattaaaatgtaaaaatctgtatgctttctcctgttaacctgtcttatgtccatttagttctcaggcccagccagacaccctaa

SEQ ID NO: 133038 - DNA, 401 bp, Homo sapiens
atttattttcctcccaaagagacttcatcttaatgattaatgcacattataggatggagaatgaaatacaaacacctctcccttcttgtgtaaagtaggaggagtttccttgtctagatacacagaaacttcaaaagctagcaaagaaattgtgctttaaagaaaaaaaaactacaaaggaaagtgactctggatcacacacagacttagatttccagtctgatgaggcatatccacctcagaaggatttacatgggcatatgttgccaacaggaaaaaaaaaaaagtggagttttatgaactgaaataacactagttctgcctctggtagtagaaaactgacttaccctaaattgctacgggttaactaacttaacttatatcctcttaataattagaga

SEQ ID NO: 133039 - DNA, 147 bp, Homo sapiens
ttttcaaatataagttgttcaaggaacattaggtctcttattgcttgaatcaatggggaaaaagctaaatgatttttgaaaaaggtttgaagcaaccaaaaagataatctttcttttcttctggcagtcaacttaaatgatgaacaa

SEQ ID NO: 133040 - DNA, 388 bp, Homo sapiens
acaatgtatgtgtgatttttttaaaaagaaacttacaggcaaagctgaggggtagagggaatacttggggtggagagtaatttactcttccaggggccaacaagctttaaagtcaatttcaaaaatacacatgcttagtaaaagcatccagatataaaaggtagtgtatttagaattccatttataaaatgttcagaataggcaaattcatagaggtcatgtaaattagtggatgccaggggttagtggacggaagatagggagtgactggtaaagagtacagggtttctttttggggttctaaaactgattgtggtgacagttgtacaactctgtttgaatacactacaaaacaggcaggcacggtggctcatgcctgtaatcccag

SEQ ID NO: 133041 - DNA, 171 bp, Homo sapiens
tcacatatacaggcacaagggtaatctcctcaacttccttcagcaagtcactctactactaaaacatcttcagtggctccctgctgcctacaggataaatccaaattcttttttttttgagagagagtcttgctctgtcgcccaggctggactgcagtggtgcgatctcag

SEQ ID NO: 133042 - DNA, 422 bp, Homo sapiens
aatctgataggtaaaaagaaatggtaactaagtatagttttaattagtaaatcccttttgtaataagtaaaaaatgttttcttttcatatgttctaagatatgtttactaatgtctcataggtacttaggtctatgtcaggatttttattatattctactgatgtaaaagacagtgtgctttctttataaatcatattaagaaaatatgcttctatgccccttcaacaaaaatgttttaagacccattttgtcaaatgtcttttcaggaactgtaaaggtagtcaaaagaaaaatgggcaaaggataggaacaaagaattcaaagaaaaaacagtaatggttctcaaccctcattcattagagaaatacaaattaaaaccaacccatacacaaaaattaaccatggattaacagcctaaata

SEQ ID NO: 133043 - DNA, 268 bp, Homo sapiens
cacagtcctcaacccccagagttccctaagtcaaaccattcttggcttcatgactttggtagatactgccaataatctcccaatatccatcttcccttctattttttttggtaaaagaatccccaagttttacatgagcccagctagagactaatttcttgtcttcttaagcagctagatgtgaccatgtgattctgtctgaaccaaagggactctcacttgtgccttaggtgatggctggctgaagaaatcttgggagccatatatt

SEQ ID NO: 133044 - DNA, 683 bp, Homo sapiens
gaaaaaagattaactatatttccctttttaattactgtgcttttttcttttttaaggtaatatttcattacattaaattttagtgttattctactgagctattccttaaatattatagtattttggatttcacatataaatttgtaacacatcttgagtttattatgtatagagtaaggctattttcttttttttttgttttttaaggtaaaaatcacatagtataaaattaataacaaccattttaaagcatacaatgcagttgcttttagtatattcacaatgttccaggacaatttcatcatgtcccttctaaaaacccattatccataaagttgttacaccctattctgcttccctgagccctaatgaccactaatctgatttatatcccaattgatttgccaattcctgatgtttcatctgaataaaatcaggtaatatttgtctttttgtgcacttaatgctttcaaatttcacccacattataccatgtataagtacttctttctttgttatagctaaaaattgggtgtccatttatgagtcaacaagcatatggattgtttccactttttgactgtatgattattactgctgtaaatattcatgcacatgtttgttatttgagcacctatgttttgtaagattaacagctgacttaacagaaacaatggaaggca

SEQ ID NO: 133045 - DNA, 579 bp, Homo sapiens
cacattttgtttatccatttatccattgattggttgtttctacttttttttagctattatgaataatattgctgtgaacatttgtgtacaaggttttagtggacacaagtttttatttttcttgggtatatatctaggagtggaattgctgggtcatattgtaattctgttcaactttttgaagaacttcccaactgttctccatggtggctgtgccattgtatattcctaccagcagtgtatgaagttacaaatttctccacatcctgagaacccctttattattttctgtttttctttttgattatagccatcctagtaggtgtaaagtggtatctcattgtgattttattttgcatttccctaaatgattaatgatattgagcatcttttcatgtgcttcttggccactagtatatcttctttgaagaaatgtctattcaagtctttggcagtttctaaatgagttattgtctttttgttgttaggttgtaagagttataatctggataacagatccttattagatatgtaatttgcacatattttctcccattttgtgggttgtcttttgtcttt

SEQ ID NO: 133046 - DNA, 496 bp, Homo sapiens
ccaccgtgcccccagccaacaccttcaatcttaagaagagctgtatgctccttttggctctgcagaccttacttatagccaggccttggaaagcagctgccaagacatttacttttagaagttcagttctgttcccagcaggcctctacagaaccttgtgagacagggactcactctgtcacccaggccggagtgcagtggggtgatcatggatcaccgtagccacaacctctggggctcaagcaatcctccatctcactcctccaccaggtagctgggacttcaggcacatgctaccatgcctggcttcaatactgtttttcattaggggaatgtaaattaaaaacagtgagataccactgcataactaccaaaatggttaaaatccaaatcactacaactccaaaagctgaaaggggagcaataataattctcactcattactggtgggaatgcaaaatggtacagccactttggaagatcatgtggcagtttc

SEQ ID NO: 133047 - DNA, 535 bp, Homo sapiens
atgtacacctcacaacacacactctcccaccctcgaactgtttcatatttcttttaaaaatgtactttttttctctcacacacattctcatgttctctcactcccaactttgtaatgaagcccactttttatttagtcaggatcttaaagatcttaccacagacgatcagatttaatcatacaagatgcccctagtgaaggatctctacaataaaaggtcttgacacaaacaaaaatgaagcaagcttcagattagtcagccccactctgcagatggtctttgtgggcttaatgaaagtaggttcaggctgaagaccctggatatacaaattgactaaacaaacatcaatttgtctaccaaagtgcctctgaatcacaaatgagtaaaatcgagttgtcttggaatctgagttatttggctttaaacttggctggcagtaccattaactattgatctgttaatttacaatggtttagaacaagactttgatggaaggtactagagctttgaccataaagtcaataagtctcttat

SEQ ID NO: 133048 - DNA, 146 bp, Homo sapiens
gtataggtggattggttggaaaaagtgggatgcatggatctttttcttcatgtgatctctctagcaggctagctttgggggatcttcagatcatggcctcaggatttcaagtgaagaaaaaagcaggtaatcctcccatgtgcaag

SEQ ID NO: 133049 - DNA, 325 bp, Homo sapiens
tatgtttaatgcccaccaccagtctttagattgatggctctctagttattttggttgtctgaagcatgtcctttggtaggttccttaggaagttcttattcttccatggtgagtataatttgtcagagtactttatatctcaaagtcacttttgctgcatccttagctccttggctcactctttaagcatcttaaatatgctactcccatttttttaaaaataacttaaagcattgctagtgaaaagtatgataattaaatttcttttaaaagtcttcgattttgggtagaggccccccagttttttctcttttttttttttgag

SEQ ID NO: 133050 - DNA, 417 bp, Homo sapiens
aagctggatcacctcacttagaacccaagaatgctcactgagaaaagcccaaggcctgaccatgtgtacacagcccctctggtctgccttccagactgccccgtgctgcctcattctctccctcattcactccaccatgggcttaccagccgcctccttgctgcagggcctcaagtgtaacccatgggctcccaccttaaggcctctgaacttggttccctctgcaaggaatcctcttccccaacatggtcactgggcttctccccatttcattcaggtctcagttccagtgtcattttctcgacctgttttggcgtgacacgggacttcatttccagaggatgtcagacctcaaagaaacaggcacaaattgcaatattctgaggtaactggcgtccaggactcagctgatactta

SEQ ID NO: 133051 - DNA, 224 bp, Homo sapiens
caggcctgcccgatcccgaagcgcattttggccctgggcctctctctggctcagtctgggcgcaaagcgggtctcagcaaccgtcccacttgccttcataccctcccaccacgctccactcagggactccagaaccagcttagacctccattgagagctgaaagcctcttccgataccgagaaccagcactgaaagcctcttccgataccgagaaccagcatgg

SEQ ID NO: 133052 - DNA, 400 bp, Homo sapiens
tgaaaatgttctaaaactgatttatgatgttgattgtacaacttggtaaacttacgttacaaaaatcgctaaatcatacacttggaaaggatgaattataagatatatacaatatgccttaataaacttaggacttgttttattatttatttagagacagggtcttactctgtcgcccaggctggagtgcagtggcatgatcacggctcactgcagccttgacctcctgggctcaagggagcctcccgcttcagcctcgttagtagttaggatcacaggtgcacaccactgtgcctgatgaattttttattttcttgtagagatgatcttgttatgttgcccaggttgtccgaattcctagggtcaagtgatcctcttaccttggcctctcaaagtgctg

SEQ ID NO: 133053 - DNA, 758 bp, Homo sapiens
ccacttaggctaggtacgaggccggggtaatcggccgagggagcaagaggccacctcccatgtggctctagacaccacgtgggctcattagccccagcgtctgtgccggctccaggtgcctgcctctgggtgtgtgagtgggagactttgctccctggcctcatcctagagaggcccctggtgcctagtgctgaggcctctggggctggaaagcctcagcagaaaggaggcactactgagcaactatgcattgtcattgtcgggtttggggctttcggtggttccttggtgactgggaattgcttgtgtgcatgtgttgggtgcatgcttccgggtctcagctgccccaggcccgcacaggcaaccccttcccatccaaagccattggtggagcttctctggaatcatttgccaaaagcccaaggcagaatccaagggtccaagaccatttccatggagctcatgtttttcttttctgtaggaacttttttttaaccagcacccaccataattccgaaggccacgtttcatctttcctggatcactacagtgaagtattacagttgtacagttcccagtctggccttggcttgctcggataaaactttgtatgtattttgtatggcatagattctatattgtaatgatgtcctatgcaaaaagaaaaattaacgaaattgtaaattttattgttttaacgtgtatgcatgtttagtgacgtttacattttgaaataaaatttatgattcattatttta

SEQ ID NO: 133054 - DNA, 436 bp, Homo sapiens
ggctggaaagcctcagcagaaaggaggcactactgaaggcaaccccttcccatccaaagccattggtggagcttctctggaatcatttgccaaaagcccaaggcagaatccaagggtccaagaccatttccatggagctcatgtttttcttttctgtaggaacttttttttaaccagcacccaccataattccgaaggccacgtttcatctttcctggatcactacagtgaagtattacagttgtacagttcccagtctggccttggcttgctcggataaaactttgtatgtattttgtatggcatagattctatattgtaatgatgtcctatgcaaaaagaaaaattaacgaaattgtaaattttattgttttaacgtgtatgcatgtttagtgacgtttacattttgaaataaaatttatgattcattatttta

SEQ ID NO: 133055 - DNA, 5927 bp, Homo sapiens
  misc_feature (716)..(716): n is a, c, g, or t
tcgcaccccaaggcgcacctgagaactcacacaggtgagaggcccttcgcctgcagctggcaggactgcaacaagaagttcgcgcgctccgacgagctggcgcggcactaccgcacacacacgggcgagaagaagttcagctgccccatctgcgagaagcgcttcatgcgcagcgaccacctgaccaagcacgcgcgccgccacgccaacttccacccgggaatgctgcagcggcgcggcgggggctcgcggaccggctccctcagcgactacagccgctccgacgccagcagccccaccatcagcccggccagctcgccctgagcccgccacagccatgagcagccgctcccaccccctcgtgagtccctggcctttccttttgtaataagaaagaagagagagaacttgatgcaaagtccacgaaaaaacaatttttttcacctcaggtgtcaaagtaaatttgttaaaaaaaaaaaaaaaacacaaaaatttcaaaaaacaccacccaccaaattgcacaatagatacacccacaaagttgagattcagcgttgttgaaccccctttctcagggatggacacgtttcacgaggtcagtgaggacaccccttcctgccgccttactctgtacatagatttgcactctggagttttctgttaggttcgggaacacgctggggacagagcaggccagccagtctggtggagctcancgtctggctggctggccagcctgtgggtctgttgggagcagatgtgctcactgacgtttgtgcctccagggcagattcctaagcagctggcctgacctcttcctgcccagcccccaacccagtctctggcctctgcccaacgagcctggctgggcttgcaacgcagctgattctgagacaggcccctgcagagggatgccttaaagctgtccctggctggaggagcactccaccttggggatagtggagggggccttcagccctctgcaccctgcctgcctcacaccccgccttcaggagccctctcctacggcgctagggagcactggaagcagagatgccagccctggctgagcgtagcactgcaccgtccgacctccgaggcaggggccggggtcacacctgccaggactccgcttctccgtgtcccagcagaaggcatgcaggaccctgtcactactatacctgggcctctgatggggaattctggtcttctaaaaagatgttagaaattcctggtggcacatccagttccgagtttgcccgcatgggcacttttgttggaaacagtgggcaggtcatggggcctcctcatcagagggtctgtgtgagcggctgtgcatgtggcagcgcaccatgcttcacagagaccattctgtagcaagagaccggaacattgtgacttggaccttttcaggagtggcgcggatgttacaggaaatgctgtcggagagcgcgcattctatttcctccgcagggaatgccagatagaaagttgcgggcaacacttttctcagacccaccatgtccccaactcagacttagcaaacctccagcctctccgtttcccctggactcctcctcccttttcctcctgcttctccttgtcctgcctggaggctccaggccacacccagctggtggggctgctccagtgccccatcaccggccttctcctggcaggagaggaggagcagagagctgggtcctgggctgggattcgagccctgggcgggggtcagtcaagccgtggtccagcaaactcctctgcagatggctggagtgttgacccaggcttgtggcccaggtatcaccttcccttcctcctgagagttgaggcctgtaaatacaagggcccaggacagagtgtgtgcgtgcgtgtgggtgtgtgcgcgcgtgagcacacacgcgtgtgttggggggggtggggggattggggtggactcagggtatcttgccagagatacctgttttgatgagtacctattttgatgcaaaggaacggccctgggacctcagagggccacagatgggcttcctgggcctagcgtgccttggttgtggccatcctgcttctactcagccctgccatgctatggggtgcagcacaaacccaggacccaggcctagccactgcccacagctgatggtcactgttttggctggctccagagtggacaggtacgctctgtccacagcagctgctcaggcacagtatgccgtcaggtgcccgcttcttaccactgtgtgtcagctgggattggccgacagcgtggtggtgacttctaggtagaccgatggaccctaaattgggcagtggcattgtttctgctgtggtgggaactggcagggagagggtcacctccactctggttggatgcggagctggtccctctggctgccatgctgtgttggggctctctgacctccctgcttgcattgggtctgggagagagagtggaatatttggtagggaccttgacagaagagagccctgggtgcttgtggtgcaaagatcttcatgcccagttccaaagtgaggtccctcccaaagttgttttcgtgtgaggcagagaaagccacactctgaatacattttatgtctcaggaattcacattccaggttcaggaattttattccaaagtcctttggtgcactcaccgtccaccgttccccaaggcagggagagggagtggcccgtccctgggaggctggcaaagtgctctccagggaggggtcagacgtccttgtgatctgcccagggtgtcacggaaggagattttctagctccacatctgtctgcacataggaaggaaaagataggactctaaacctagtcatcttggaataaaaagaagagctggtttgttttagagcagggcggggggtgggggagggaagcgggtgttggctgtttccaaagagagcacttaatttaatttttcctttaaatgacccagggctgttccgtctgatagatggaagggtaacattgccttaaaacagaaatatgcaggcgttggctatttttggcataagagcgtgtcttcattcccaaagtggttctcgtttaatggcagggtgcggtccttaggccccggcctggactgggaaatgggggtagggcaccaggagagaaatcctcctgggtactcctggccagaccctcctgaatcatctgcggcttaaactcatctcgcttgaagggcagggagaaacccatgaatctcaggcacggttcacaggggtcctcaagggcaggtttccatttcatcatgaagtgagggactcctgtggaagagggtggtgggccttggaacgctgcctccactgaggcgggcacacaaggcggaccctcctgaaacagcctccattttcttcaaacatgcagaatgttttcccagactgcgtctatttcagggtcttccatttttgtggtttatggccatgcttgccagttttggtggggttgaggaacccataggactcatagaaataatagtgaaaactcaaacccttattttgggacttcagttctcgtggtccataggggcagagatgtcaaagtgaaggttgcctgagtgaagggagagttcccctataaaaggcctaaaattgatttggggctcagccatcaaggggctggtgttgctcctgtcccagacaaggaagcccctctttacatcagccatattaggggaacggttgtcagctccccaaatgcctactggatcctacagccatacaggaaaacagacggacacagccctttccttaaagagccctggggtcctgtcctgcaggatgctgcataggaatgggcagagatgtcctggatgggaacatggtcctggaggtgccctacctgcatcctgctgcacccccacccacgacactcgagtgcaagatcgcctcactcctaaccctgactttattcccaggccccacaccgaggcaggtgcaggattcgccatggtgcagcctccgggtacaaacatctgaggcactggcgatcccagtccttgcagcaccctgaacacagctcagaccagtgaggggtgattcagaggtggggatgggcagagagggctggccactctgcctcaggacttgacctcaagtgttctgtctccccacccggtgtgtccagaagaccagcctctttcttgccagaagcaggtgctaagatggactgcacagggtcccggcactccctcgggacccattcaggatctcagctgggcaggggtgccacccaacaggaagatgtgatctgagcaatagtgtggccttgtttctccgcttctggttgtggctgtgtgtacagggctacctactattttgacttctgacaggtgtcactgattttctttcccccatttaaaaaaggtcatttagtcaaagacacagtgctagaggtttaaagggtgtaatgtgttggtcacatcacaaccagtaagaaacgcttggtaggttatccacatcttttgctgactgtttccatatacaattctggtcaccatattttccaaagctaaaatctgaggcgtgggctgatggtttttgaaatcaggattaccccaggaagaaccaggtcctattactaattttcctgattctgaggctctgaaggcttgtctgagacacattccggagacctttgtaccagaacttggatgcatagtccaccttactactgatacacgcctgagcaccctttagggcgaggcgccgcctcctgcctgctgtcctgtccctcagcatcagaagagttgaattcagcaggagacgggagcccggtgtccatgagggaagaggggtcgcgcttggtttctactgacccccatgaagatttcagacttgcagtgcggccacctggccctgccctgcctctctctttctcatacagctttaaaactttactacttttatttaaaaatgaactggatgggagagaagtagcgtcccctaccctacaagtcacacattccggggaggggggtggggggtggaggcaggaagtcatgggggtgggggtgggagcacgggaacagctttcttaaggcctcagggtcctgttttccctggcctcttctagagggcccgtggacaggtcgcagtgcgtgcttatttggaaaccaggtgtgtgagccgaatgcctgccaggccatgcactcagcagaggagcccttgtacctggctgccctgagaggagcaagaggccacctcccatgtggctctagacaccacgtgggctcattagccccagcgtctgtgccggctccaggtgcctgcctctgggtgtgtgagtgggagactttgctccctggcctcatcctagagaggcccctggtgcctagtgctgaggcctctggggctggaaagcctcagcagaaaggaggcactactgagcaactatgcattgtcattgtcgggtttggggctttcggtggttccttggtgactgggaattgcttgtgtgcatgtgttgggtgcatgcttccgggtctcagctgccccaggcccgcacaggcaaccccttcccatccaaagccattggtggagcttctctggaatcatttgccaaaagcccaaggcagaatccaagggtccaagaccatttccatggagctcatgtttttcttttctgtaggaacttttttttaaccagcacccaccataattccgaaggccacgtttcatctttcctggatcactacagtgaagtattacagttgtacagttcccagtctggccttggcttgctcggataaaactttgtatgtattttgtatggcatagattctatattgtaatgatgtcctatgcaaaaagaaaaattaacgaaattgtaaattttattgttttaacgtgtatgcatgtttagtgacgtttacattttgaaataaaatttatgattcattatttta

SEQ ID NO: 133056 - DNA, 5988 bp, Homo sapiens
  misc_feature (777)..(777): n is a, c, g, or t
tctgtatgacttagaggatcccgcgtggctccttcagagagggtgtgaaggcggggccaggtgcggatactgatgctctgcccctgtgcccacaggtgagaggcccttcgcctgcagctggcaggactgcaacaagaagttcgcgcgctccgacgagctggcgcggcactaccgcacacacacgggcgagaagaagttcagctgccccatctgcgagaagcgcttcatgcgcagcgaccacctgaccaagcacgcgcgccgccacgccaacttccacccgggaatgctgcagcggcgcggcgggggctcgcggaccggctccctcagcgactacagccgctccgacgccagcagccccaccatcagcccggccagctcgccctgagcccgccacagccatgagcagccgctcccaccccctcgtgagtccctggcctttccttttgtaataagaaagaagagagagaacttgatgcaaagtccacgaaaaaacaatttttttcacctcaggtgtcaaagtaaatttgttaaaaaaaaaaaaaaaacacaaaaatttcaaaaaacaccacccaccaaattgcacaatagatacacccacaaagttgagattcagcgttgttgaaccccctttctcagggatggacacgtttcacgaggtcagtgaggacaccccttcctgccgccttactctgtacatagatttgcactctggagttttctgttaggttcgggaacacgctggggacagagcaggccagccagtctggtggagctcancgtctggctggctggccagcctgtgggtctgttgggagcagatgtgctcactgacgtttgtgcctccagggcagattcctaagcagctggcctgacctcttcctgcccagcccccaacccagtctctggcctctgcccaacgagcctggctgggcttgcaacgcagctgattctgagacaggcccctgcagagggatgccttaaagctgtccctggctggaggagcactccaccttggggatagtggagggggccttcagccctctgcaccctgcctgcctcacaccccgccttcaggagccctctcctacggcgctagggagcactggaagcagagatgccagccctggctgagcgtagcactgcaccgtccgacctccgaggcaggggccggggtcacacctgccaggactccgcttctccgtgtcccagcagaaggcatgcaggaccctgtcactactatacctgggcctctgatggggaattctggtcttctaaaaagatgttagaaattcctggtggcacatccagttccgagtttgcccgcatgggcacttttgttggaaacagtgggcaggtcatggggcctcctcatcagagggtctgtgtgagcggctgtgcatgtggcagcgcaccatgcttcacagagaccattctgtagcaagagaccggaacattgtgacttggaccttttcaggagtggcgcggatgttacaggaaatgctgtcggagagcgcgcattctatttcctccgcagggaatgccagatagaaagttgcgggcaacacttttctcagacccaccatgtccccaactcagacttagcaaacctccagcctctccgtttcccctggactcctcctcccttttcctcctgcttctccttgtcctgcctggaggctccaggccacacccagctggtggggctgctccagtgccccatcaccggccttctcctggcaggagaggaggagcagagagctgggtcctgggctgggattcgagccctgggcgggggtcagtcaagccgtggtccagcaaactcctctgcagatggctggagtgttgacccaggcttgtggcccaggtatcaccttcccttcctcctgagagttgaggcctgtaaatacaagggcccaggacagagtgtgtgcgtgcgtgtgggtgtgtgcgcgcgtgagcacacacgcgtgtgttggggggggtggggggattggggtggactcagggtatcttgccagagatacctgttttgatgagtacctattttgatgcaaaggaacggccctgggacctcagagggccacagatgggcttcctgggcctagcgtgccttggttgtggccatcctgcttctactcagccctgccatgctatggggtgcagcacaaacccaggacccaggcctagccactgcccacagctgatggtcactgttttggctggctccagagtggacaggtacgctctgtccacagcagctgctcaggcacagtatgccgtcaggtgcccgcttcttaccactgtgtgtcagctgggattggccgacagcgtggtggtgacttctaggtagaccgatggaccctaaattgggcagtggcattgtttctgctgtggtgggaactggcagggagagggtcacctccactctggttggatgcggagctggtccctctggctgccatgctgtgttggggctctctgacctccctgcttgcattgggtctgggagagagagtggaatatttggtagggaccttgacagaagagagccctgggtgcttgtggtgcaaagatcttcatgcccagttccaaagtgaggtccctcccaaagttgttttcgtgtgaggcagagaaagccacactctgaatacattttatgtctcaggaattcacattccaggttcaggaattttattccaaagtcctttggtgcactcaccgtccaccgttccccaaggcagggagagggagtggcccgtccctgggaggctggcaaagtgctctccagggaggggtcagacgtccttgtgatctgcccagggtgtcacggaaggagattttctagctccacatctgtctgcacataggaaggaaaagataggactctaaacctagtcatcttggaataaaaagaagagctggtttgttttagagcagggcggggggtgggggagggaagcgggtgttggctgtttccaaagagagcacttaatttaatttttcctttaaatgacccagggctgttccgtctgatagatggaagggtaacattgccttaaaacagaaatatgcaggcgttggctatttttggcataagagcgtgtcttcattcccaaagtggttctcgtttaatggcagggtgcggtccttaggccccggcctggactgggaaatgggggtagggcaccaggagagaaatcctcctgggtactcctggccagaccctcctgaatcatctgcggcttaaactcatctcgcttgaagggcagggagaaacccatgaatctcaggcacggttcacaggggtcctcaagggcaggtttccatttcatcatgaagtgagggactcctgtggaagagggtggtgggccttggaacgctgcctccactgaggcgggcacacaaggcggaccctcctgaaacagcctccattttcttcaaacatgcagaatgttttcccagactgcgtctatttcagggtcttccatttttgtggtttatggccatgcttgccagttttggtggggttgaggaacccataggactcatagaaataatagtgaaaactcaaacccttattttgggacttcagttctcgtggtccataggggcagagatgtcaaagtgaaggttgcctgagtgaagggagagttcccctataaaaggcctaaaattgatttggggctcagccatcaaggggctggtgttgctcctgtcccagacaaggaagcccctctttacatcagccatattaggggaacggttgtcagctccccaaatgcctactggatcctacagccatacaggaaaacagacggacacagccctttccttaaagagccctggggtcctgtcctgcaggatgctgcataggaatgggcagagatgtcctggatgggaacatggtcctggaggtgccctacctgcatcctgctgcacccccacccacgacactcgagtgcaagatcgcctcactcctaaccctgactttattcccaggccccacaccgaggcaggtgcaggattcgccatggtgcagcctccgggtacaaacatctgaggcactggcgatcccagtccttgcagcaccctgaacacagctcagaccagtgaggggtgattcagaggtggggatgggcagagagggctggccactctgcctcaggacttgacctcaagtgttctgtctccccacccggtgtgtccagaagaccagcctctttcttgccagaagcaggtgctaagatggactgcacagggtcccggcactccctcgggacccattcaggatctcagctgggcaggggtgccacccaacaggaagatgtgatctgagcaatagtgtggccttgtttctccgcttctggttgtggctgtgtgtacagggctacctactattttgacttctgacaggtgtcactgattttctttcccccatttaaaaaaggtcatttagtcaaagacacagtgctagaggtttaaagggtgtaatgtgttggtcacatcacaaccagtaagaaacgcttggtaggttatccacatcttttgctgactgtttccatatacaattctggtcaccatattttccaaagctaaaatctgaggcgtgggctgatggtttttgaaatcaggattaccccaggaagaaccaggtcctattactaattttcctgattctgaggctctgaaggcttgtctgagacacattccggagacctttgtaccagaacttggatgcatagtccaccttactactgatacacgcctgagcaccctttagggcgaggcgccgcctcctgcctgctgtcctgtccctcagcatcagaagagttgaattcagcaggagacgggagcccggtgtccatgagggaagaggggtcgcgcttggtttctactgacccccatgaagatttcagacttgcagtgcggccacctggccctgccctgcctctctctttctcatacagctttaaaactttactacttttatttaaaaatgaactggatgggagagaagtagcgtcccctaccctacaagtcacacattccggggaggggggtggggggtggaggcaggaagtcatgggggtgggggtgggagcacgggaacagctttcttaaggcctcagggtcctgttttccctggcctcttctagagggcccgtggacaggtcgcagtgcgtgcttatttggaaaccaggtgtgtgagccgaatgcctgccaggccatgcactcagcagaggagcccttgtacctggctgccctgagaggagcaagaggccacctcccatgtggctctagacaccacgtgggctcattagccccagcgtctgtgccggctccaggtgcctgcctctgggtgtgtgagtgggagactttgctccctggcctcatcctagagaggcccctggtgcctagtgctgaggcctctggggctggaaagcctcagcagaaaggaggcactactgagcaactatgcattgtcattgtcgggtttggggctttcggtggttccttggtgactgggaattgcttgtgtgcatgtgttgggtgcatgcttccgggtctcagctgccccaggcccgcacaggcaaccccttcccatccaaagccattggtggagcttctctggaatcatttgccaaaagcccaaggcagaatccaagggtccaagaccatttccatggagctcatgtttttcttttctgtaggaacttttttttaaccagcacccaccataattccgaaggccacgtttcatctttcctggatcactacagtgaagtattacagttgtacagttcccagtctggccttggcttgctcggataaaactttgtatgtattttgtatggcatagattctatattgtaatgatgtcctatgcaaaaagaaaaattaacgaaattgtaaattttattgttttaacgtgtatgcatgtttagtgacgtttacattttgaaataaaatttatgattcattatttta

SEQ ID NO: 133057 - DNA, 2043 bp, Homo sapiens
gggcgatatggtcgcttgtatgtgcggttctcttttttttctttcccctctatggccccacaccgaggcaggtgcaggattcgccatggtgcagcctccgggtacaaacatctgaggcactggcgatcccagtccttgcagcaccctgaacacagctcagaccagtgaggggtgattcagaggtggggatgggcagagagggctggccactctgcctcaggacttgacctcaagtgttctgtctccccacccggtgtgtccagaagaccagcctctttcttgccagaagcaggtgctaagatggactgcacagggtcccggcactccctcgggacccattcaggatctcagctgggcaggggtgccacccaacaggaagatgtgatctgagcaatagtgtggccttgtttctccgcttctggttgtggctgtgtgtacagggctacctactattttgacttctgacaggtgtcactgattttctttcccccatttaaaaaaggtcatttagtcaaagacacagtgctagaggtttaaagggtgtaatgtgttggtcacatcacaaccagtaagaaacgcttggtaggttatccacatcttttgctgactgtttccatatacaattctggtcaccatattttccaaagctaaaatctgaggcgtgggctgatggtttttgaaatcaggattaccccaggaagaaccaggtcctattactaattttcctgattctgaggctctgaaggcttgtctgagacacattccggagacctttgtaccagaacttggatgcatagtccaccttactactgatacacgcctgagcaccctttagggcgaggcgccgcctcctgcctgctgtcctgtccctcagcatcagaagagttgaattcagcaggagacgggagcccggtgtccatgagggaagaggggtcgcgcttggtttctactgacccccatgaagatttcagacttgcagtgcggccacctggccctgccctgcctctctctttctcatacagctttaaaactttactacttttatttaaaaatgaactggatgggagagaagtagcgtcccctaccctacaagtcacacattccggggaggggggtggggggtggaggcaggaagtcatgggggtgggggtgggagcacgggaacagctttcttaaggcctcagggtcctgttttccctggcctcttctagagggcccgtggacaggtcgcagtgcgtgcttatttggaaaccaggtgtgtgagccgaatgcctgccaggccatgcactcagcagaggagcccttgtacctggctgccctgagaggagcaagaggccacctcccatgtggctctagacaccacgtgggctcattagccccagcgtctgtgccggctccaggtgcctgcctctgggtgtgtgagtgggagactttgctccctggcctcatcctagagaggcccctggtgcctagtgctgaggcctctggggctggaaagcctcagcagaaaggaggcactactgagcaactatgcattgtcattgtcgggtttggggctttcggtggttccttggtgactgggaattgcttgtgtgcatgtgttgggtgcatgcttccgggtctcagctgccccaggcccgcacaggcaaccccttcccatccaaagccattggtggagcttctctggaatcatttgccaaaagcccaaggcagaatccaagggtccaagaccatttccatggagctcatgtttttcttttctgtaggaacttttttttaaccagcacccaccataattccgaaggccacgtttcatctttcctggatcactacagtgaagtattacagttgtacagttcccagtctggccttggcttgctcggataaaactttgtatgtattttgtatggcatagattctatattgtaatgatgtcctatgcaaaaagaaaaattaacgaaattgtaaattttattgttttaacgtgtatgcatgtttagtgacgtttacattttgaaataaaatttatgattcattatttta

SEQ ID NO: 133058 - DNA, 5873 bp, Homo sapiens
  misc_feature (716)..(716): n is a, c, g, or t
tcgcaccccaaggcgcacctgagaactcacacaggtgagaggcccttcgcctgcagctggcaggactgcaacaagaagttcgcgcgctccgacgagctggcgcggcactaccgcacacacacgggcgagaagaagttcagctgccccatctgcgagaagcgcttcatgcgcagcgaccacctgaccaagcacgcgcgccgccacgccaacttccacccgggaatgctgcagcggcgcggcgggggctcgcggaccggctccctcagcgactacagccgctccgacgccagcagccccaccatcagcccggccagctcgccctgagcccgccacagccatgagcagccgctcccaccccctcgtgagtccctggcctttccttttgtaataagaaagaagagagagaacttgatgcaaagtccacgaaaaaacaatttttttcacctcaggtgtcaaagtaaatttgttaaaaaaaaaaaaaaaacacaaaaatttcaaaaaacaccacccaccaaattgcacaatagatacacccacaaagttgagattcagcgttgttgaaccccctttctcagggatggacacgtttcacgaggtcagtgaggacaccccttcctgccgccttactctgtacatagatttgcactctggagttttctgttaggttcgggaacacgctggggacagagcaggccagccagtctggtggagctcancgtctggctggctggccagcctgtgggtctgttgggagcagatgtgctcactgacgtttgtgcctccagggcagattcctaagcagctggcctgacctcttcctgcccagcccccaacccagtctctggcctctgcccaacgagcctggctgggcttgcaacgcagctgattctgagacaggcccctgcagagggatgccttaaagctgtccctggctggaggagcactccaccttggggatagtggagggggccttcagccctctgcaccctgcctgcctcacaccccgccttcaggagccctctcctacggcgctagggagcactggaagcagagatgccagccctggctgagcgtagcactgcaccgtccgacctccgaggcaggggccggggtcacacctgccaggactccgcttctccgtgtcccagcagaaggcatgcaggaccctgtcactactatacctgggcctctgatggggaattctggtcttctaaaaagatgttagaaattcctggtggcacatccagttccgagtttgcccgcatgggcacttttgttggaaacagtgggcaggtcatggggcctcctcatcagagggtctgtgtgagcggctgtgcatgtggcagcgcaccatgcttcacagagaccattctgtagcaagagaccggaacattgtgacttggaccttttcaggagtggcgcggatgttacaggaaatgctgtcggagagcgcgcattctatttcctccgcagggaatgccagatagaaagttgcgggcaacacttttctcagacccaccatgtccccaactcagacttagcaaacctccagcctctccgtttcccctggactcctcctcccttttcctcctgcttctccttgtcctgcctggaggctccaggccacacccagctggtggggctgctccagtgccccatcaccggccttctcctggcaggagaggaggagcagagagctgggtcctgggctgggattcgagccctgggcgggggtcagtcaagccgtggtccagcaaactcctctgcagatggctggagtgttgacccaggcttgtggcccaggtatcaccttcccttcctcctgagagttgaggcctgtaaatacaagggcccaggacagagtgtgtgcgtgcgtgtgggtgtgtgcgcgcgtgagcacacacgcgtgtgttggggggggtggggggattggggtggactcagggtatcttgccagagatacctgttttgatgagtacctattttgatgcaaaggaacggccctgggacctcagagggccacagatgggcttcctgggcctagcgtgccttggttgtggccatcctgcttctactcagccctgccatgctatggggtgcagcacaaacccaggacccaggcctagccactgcccacagctgatggtcactgttttggctggctccagagtggacaggtacgctctgtccacagcagctgctcaggcacagtatgccgtcaggtgcccgcttcttaccactgtgtgtcagctgggattggccgacagcgtggtggtgacttctaggtagaccgatggaccctaaattgggcagtggcattgtttctgctgtggtgggaactggcagggagagggtcacctccactctggttggatgcggagctggtccctctggctgccatgctgtgttggggctctctgacctccctgcttgcattgggtctgggagagagagtggaatatttggtagggaccttgacagaagagagccctgggtgcttgtggtgcaaagatcttcatgcccagttccaaagtgaggtccctcccaaagttgttttcgtgtgaggcagagaaagccacactctgaatacattttatgtctcaggaattcacattccaggttcaggaattttattccaaagtcctttggtgcactcaccgtccaccgttccccaaggcagggagagggagtggcccgtccctgggaggctggcaaagtgctctccagggaggggtcagacgtccttgtgatctgcccagggtgtcacggaaggagattttctagctccacatctgtctgcacataggaaggaaaagataggactctaaacctagtcatcttggaataaaaagaagagctggtttgttttagagcagggcggggggtgggggagggaagcgggtgttggctgtttccaaagagagcacttaatttaatttttcctttaaatgacccagggctgttccgtctgatagatggaagggtaacattgccttaaaacagaaatatgcaggcgttggctatttttggcataagagcgtgtcttcattcccaaagtggttctcgtttaatggcagggtgcggtccttaggccccggcctggactgggaaatgggggtagggcaccaggagagaaatcctcctgggtactcctggccagaccctcctgaatcatctgcggcttaaactcatctcgcttgaagggcagggagaaacccatgaatctcaggcacggttcacaggggtcctcaagggcaggtttccatttcatcatgaagtgagggactcctgtggaagagggtggtgggccttggaacgctgcctccactgaggcgggcacacaaggcggaccctcctgaaacagcctccattttcttcaaacatgcagaatgttttcccagactgcgtctatttcagggtcttccatttttgtggtttatggccatgcttgccagttttggtggggttgaggaacccataggactcatagaaataatagtgaaaactcaaacccttattttgggacttcagttctcgtggtccataggggcagagatgtcaaagtgaaggttgcctgagtgaagggagagttcccctataaaaggcctaaaattgatttggggctcagccatcaaggggctggtgttgctcctgtcccagacaaggaagcccctctttacatcagccatattaggggaacggttgtcagctccccaaatgcctactggatcctacagccatacaggaaaacagacggacacagccctttccttaaagagccctggggtcctgtcctgcaggatgctgcataggaatgggcagagatgtcctggatgggaacatggtcctggaggtgccctacctgcatcctgctgcacccccacccacgacactcgagtgcaagatcgcctcactcctaaccctgactttattcccaggccccacaccgaggcaggtgcaggattcgccatggtgcagcctccgggtacaaacatctgaggcactggcgatcccagtccttgcagcaccctgaacacagctcagaccagtgaggggtgattcagaggtggggatgggcagagagggctggccactctgcctcaggacttgacctcaagtgttctgtctccccacccggtgtgtccagaagaccagcctctttcttgccagaagcaggtgctaagatggactgcacagggtcccggcactccctcgggacccattcaggatctcagctgggcaggggtgccacccaacaggaagatgtgatctgagcaatagtgtggccttgtttctccgcttctggttgtggctgtgtgtacagggctacctactattttgacttctgacaggtgtcactgattttctttcccccatttaaaaaaggtcatttagtcaaagacacagtgctagaggtttaaagggtgtaatgtgttggtcacatcacaaccagtaagaaacgcttggtaggttatccacatcttttgctgactgtttccatatacaattctggtcaccatattttccaaagctaaaatctgaggcgtgggctgatggtttttgaaatcaggattaccccaggaagaaccaggtcctattactaattttcctgattctgaggctctgaaggcttgtctgagacacattccggagacctttgtaccagaacttggatgcatagtccaccttactactgatacacgcctgagcaccctttagggcgaggcgccgcctcctgcctgctgtcctgtccctcagcatcagaagagttgaattcagcaggagacgggagcccggtgtccatgagggaagaggggtcgcgcttggtttctactgacccccatgaagatttcagacttgcagtgcggccacctggccctgccctgcctctctctttctcatacagctttaaaactttactacttttatttaaaaatgaactggatgggagagaagtagcgtcccctaccctacaagtcacacattccggggaggggggtggggggtggaggcaggaagtcatgggggtgggggtgggagcacgggaacagctttcttaaggcctcagggtcctgttttccctggcctcttctagagggcccgtggacaggtcgcagtgcgtgcttatttggaaaccaggtgtgtgagccgaatgcctgccaggccatgcactcagcagaggagcccttgtacctggctgccctgagaggagcaagaggccacctcccatgtggctctagacaccacgtgggctcattagccccagcgtctgtgccggctccaggtgcctgcctctgggtgtgtgagtgggagactttgctccctggcctcatcctagagaggcccctggtgcctagtgctgaggcctctggggctggaaagcctcagcagaaaggaggcactactgagcaactatgcattgtcattgtcgggtttggggctttcggtggttccttggtgactgggaattgcttgtgtgcatgtgttgggtgcatgcttccgggtctcagctgccccaggcccgcacaggcaaccccttcccatccaaagccattggtggagcttctctggaatcatttgcctttcttttctgtaggaacttttttttaaccagcacccaccataattccgaaggccacgtttcatctttcctggatcactacagtgaagtattacagttgtacagttcccagtctggccttggcttgctcggataaaactttgtatgtattttgtatggcatagattctatattgtaatgatgtcctatgcaaaaagaaaaattaacgaaattgtaaattttattgttttaacgtgtatgcatgtttagtgacgtttacattttgaaataaaatttatgattcattatttta

SEQ ID NO: 133059 - DNA, 5467 bp, Homo sapiens
  misc_feature (716)..(716): n is a, c, g, or t
tcgcaccccaaggcgcacctgagaactcacacaggtgagaggcccttcgcctgcagctggcaggactgcaacaagaagttcgcgcgctccgacgagctggcgcggcactaccgcacacacacgggcgagaagaagttcagctgccccatctgcgagaagcgcttcatgcgcagcgaccacctgaccaagcacgcgcgccgccacgccaacttccacccgggaatgctgcagcggcgcggcgggggctcgcggaccggctccctcagcgactacagccgctccgacgccagcagccccaccatcagcccggccagctcgccctgagcccgccacagccatgagcagccgctcccaccccctcgtgagtccctggcctttccttttgtaataagaaagaagagagagaacttgatgcaaagtccacgaaaaaacaatttttttcacctcaggtgtcaaagtaaatttgttaaaaaaaaaaaaaaaacacaaaaatttcaaaaaacaccacccaccaaattgcacaatagatacacccacaaagttgagattcagcgttgttgaaccccctttctcagggatggacacgtttcacgaggtcagtgaggacaccccttcctgccgccttactctgtacatagatttgcactctggagttttctgttaggttcgggaacacgctggggacagagcaggccagccagtctggtggagctcancgtctggctggctggccagcctgtgggtctgttgggagcagatgtgctcactgacgtttgtgcctccagggcagattcctaagcagctggcctgacctcttcctgcccagcccccaacccagtctctggcctctgcccaacgagcctggctgggcttgcaacgcagctgattctgagacaggcccctgcagagggatgccttaaagctgtccctggctggaggagcactccaccttggggatagtggagggggccttcagccctctgcaccctgcctgcctcacaccccgccttcaggagccctctcctacggcgctagggagcactggaagcagagatgccagccctggctgagcgtagcactgcaccgtccgacctccgaggcaggggccggggtcacacctgccaggactccgcttctccgtgtcccagcagaaggcatgcaggaccctgtcactactatacctgggcctctgatggggaattctggtcttctaaaaagatgttagaaattcctggtggcacatccagttccgagtttgcccgcatgggcacttttgttggaaacagtgggcaggtcatggggcctcctcatcagagggtctgtgtgagcggctgtgcatgtggcagcgcaccatgcttcacagagaccattctgtagcaagagaccggaacattgtgacttggaccttttcaggagtggcgcggatgttacaggaaatgctgtcggagagcgcgcattctatttcctccgcagggaatgccagatagaaagttgcgggcaacacttttctcagacccaccatgtccccaactcagacttagcaaacctccagcctctccgtttcccctggactcctcctcccttttcctcctgcttctccttgtcctgcctggaggctccaggccacacccagctggtggggctgctccagtgccccatcaccggccttctcctggcaggagaggaggagcagagagctgggtcctgggctgggattcgagccctgggcgggggtcagtcaagccgtggtccagcaaactcctctgcagatggctggagtgttgacccaggcttgtggcccaggtatcaccttcccttcctcctgagagttgaggcctgtaaatacaagggcccaggacagagtgtgtgcgtgcgtgtgggtgtgtgcgcgcgtgagcacacacgcgtgtgttggggggggtggggggattggggtggactcagggtatcttgccagagatacctgttttgatgagtacctattttgatgcaaaggaacggccctgggacctcagagggccacagatgggcttcctgggcctagcgtgccttggttgtggccatcctgcttctactcagccctgccatgctatggggtgcagcacaaacccaggacccaggcctagccactgcccacagctgatggtcactgttttggctggctccagagtggacaggtacgctctgtccacagcagctgctcaggcacagtatgccgtcaggtgcccgcttcttaccactgtgtgtcagctgggattggccgacagcgtggtggtgacttctaggtagaccgatggaccctaaattgggcagtggcattgtttctgctgtggtgggaactggcagggagagggtcacctccactctggttggatgcggagctggtccctctggctgccatgctgtgttggggctctctgacctccctgcttgcattgggtctgggagagagagtggaatatttggtagggaccttgacagaagagagccctgggtgcttgtggtgcaaagatcttcatgcccagttccaaagtgaggtccctcccaaagttgttttcgtgtgaggcagagaaagccacactctgaatacattttatgtctcaggaattcacattccaggttcaggaattttattccaaagtcctttggtgcactcaccgtccaccgttccccaaggcagggagagggagtggcccgtccctgggaggctggcaaagtgctctccagggaggggtcagacgtccttgtgatctgcccagggtgtcacggaaggagattttctagctccacatctgtctgcacataggaaggaaaagataggactctaaacctagtcatcttggaataaaaagaagagctggtttgttttagagcagggcggggggtgggggagggaagcgggtgttggctgtttccaaagagagcacttaatttaatttttcctttaaatgacccagggctgttccgtctgatagatggaagggtaacattgccttaaaacagaaatatgcaggcgttggctatttttggcataagagcgtgtcttcattcccaaagtggttctcgtttaatggcagggtgcggtccttaggccccggcctggactgggaaatgggggtagggcaccaggagagaaatcctcctgggtactcctggccagaccctcctgaatcatctgcggcttaaactcatctcgcttgaagggcagggagaaacccatgaatctcaggcacggttcacaggggtcctcaagggcaggtttccatttcatcatgaagtgagggactcctgtggaagagggtggtgggccttggaacgctgcctccactgaggcgggcacacaaggcggaccctcctgaaacagcctccattttcttcaaacatgcagaatgttttcccagactgcgtctatttcagggtcttccatttttgtggtttatggccatgcttgccagttttggtggggttgaggaacccataggactcatagaaataatagtgaaaactcaaacccttattttgggacttcagttctcgtggtccataggggcagagatgtcaaagtgaaggttgcctgagtgaagggagagttcccctataaaaggcctaaaattgatttggggctcagccatcaaggggctggtgttgctcctgtcccagacaaggaagcccctctttacatcagccatattaggggaacggttgtcagctccccaaatgcctactggatcctacagccatacaggaaaacagacggacacagccctttccttaaagagccctggggtcctgtcctgcaggatgctgcataggaatgggcagagatgtcctggatgggaacatggtcctggaggtgccctacctgcatcctgctgcacccccacccacgacactcgagtgcaagatcgcctcactcctaaccctgactttattcccaggccccacaccgaggcaggtgcaggattcgccatggtgcagcctccgggtacaaacatctgaggcactggcgatcccagtccttgcagcaccctgaacacagctcagaccagtgaggggtgattcagaggtggggatgggcagagagggctggccactctgcctcaggacttgacctcaagtgttctgtctccccacccggtgtgtccagaagaccagcctctttcttgccagaagcaggtgctaagatggactgcacagggtcccggcactccctcgggacccattcaggatctcagctgggcaggggtgccacccaacaggaagatgtgatctgagcaatagtgtggccttgtttctccgcttctggttgtggctgtgtgtacagggctacctactattttgacttctgacaggtgtcactgattttctttcccccatttaaaaaaggtcatttagtcaaagacacagtgctagaggtttaaagggtgtaatgtgttggtcacatcacaaccagtaagaaacgcttggtaggttatccacatcttttgctgactgtttccatatacaattctggtcaccatattttccaaagctaaaatctgaggcgtgggctgatggtttttgaaatcaggattaccccaggaagaaccaggtcctattactaattttcctgattctgaggctctgaaggcttgtctgagacacattccggagacctttgtaccagaacttggatgcatagtccaccttactactgatacacgcctgagcaccctttagggcgaggcgccgcctcctgcctgctgtcctgtccctcagcatcagaagagttgaattcagcaggagacgggagcccggtgtccatgagggaagaggggtcgcgcttggtttctactgacccccatgaagatttcagacttgcagtgcggccacctggccctgccctgcctctctctttctcatacagctttaaaactttactacttttatttaaaaatgaactggatgggagagaagtagcgtcccctaccctacaagtcacacattccggggaggggggtggggggtggaggcaggaagtcatgggggtgggggtgggagcacgggaacagctttcttaaggcctcagggtcctgttttccctggcctcttctagagggcccgtggacaggtcgcagtgcgtgcttatttggaaaccaggtgtgtgagccgaatgcctgccaggccatgcactcagccatcaaggggctggtgttgctcctgtcccagacaaggaagcccctctttacatcagccatattaggggaacggttgtcagctccccaaatgcctactggatcctacagccatacaggaaaacagacggacacagccctttccttaaagagccctggggtcctgtcctgcaggatgctgcataggaatgggcagagatgtcctggatgggaacatggtcctggaggtgccctacctgcatcctgctgcacccccacccacgacactcgagtgcaagatcgcctcactccta

SEQ ID NO: 133060 - DNA, 5238 bp, Homo sapiens
  misc_feature (716)..(716): n is a, c, g, or t
tcgcaccccaaggcgcacctgagaactcacacaggtgagaggcccttcgcctgcagctggcaggactgcaacaagaagttcgcgcgctccgacgagctggcgcggcactaccgcacacacacgggcgagaagaagttcagctgccccatctgcgagaagcgcttcatgcgcagcgaccacctgaccaagcacgcgcgccgccacgccaacttccacccgggaatgctgcagcggcgcggcgggggctcgcggaccggctccctcagcgactacagccgctccgacgccagcagccccaccatcagcccggccagctcgccctgagcccgccacagccatgagcagccgctcccaccccctcgtgagtccctggcctttccttttgtaataagaaagaagagagagaacttgatgcaaagtccacgaaaaaacaatttttttcacctcaggtgtcaaagtaaatttgttaaaaaaaaaaaaaaaacacaaaaatttcaaaaaacaccacccaccaaattgcacaatagatacacccacaaagttgagattcagcgttgttgaaccccctttctcagggatggacacgtttcacgaggtcagtgaggacaccccttcctgccgccttactctgtacatagatttgcactctggagttttctgttaggttcgggaacacgctggggacagagcaggccagccagtctggtggagctcancgtctggctggctggccagcctgtgggtctgttgggagcagatgtgctcactgacgtttgtgcctccagggcagattcctaagcagctggcctgacctcttcctgcccagcccccaacccagtctctggcctctgcccaacgagcctggctgggcttgcaacgcagctgattctgagacaggcccctgcagagggatgccttaaagctgtccctggctggaggagcactccaccttggggatagtggagggggccttcagccctctgcaccctgcctgcctcacaccccgccttcaggagccctctcctacggcgctagggagcactggaagcagagatgccagccctggctgagcgtagcactgcaccgtccgacctccgaggcaggggccggggtcacacctgccaggactccgcttctccgtgtcccagcagaaggcatgcaggaccctgtcactactatacctgggcctctgatggggaattctggtcttctaaaaagatgttagaaattcctggtggcacatccagttccgagtttgcccgcatgggcacttttgttggaaacagtgggcaggtcatggggcctcctcatcagagggtctgtgtgagcggctgtgcatgtggcagcgcaccatgcttcacagagaccattctgtagcaagagaccggaacattgtgacttggaccttttcaggagtggcgcggatgttacaggaaatgctgtcggagagcgcgcattctatttcctccgcagggaatgccagatagaaagttgcgggcaacacttttctcagacccaccatgtccccaactcagacttagcaaacctccagcctctccgtttcccctggactcctcctcccttttcctcctgcttctccttgtcctgcctggaggctccaggccacacccagctggtggggctgctccagtgccccatcaccggccttctcctggcaggagaggaggagcagagagctgggtcctgggctgggattcgagccctgggcgggggtcagtcaagccgtggtccagcaaactcctctgcagatggctggagtgttgacccaggcttgtggcccaggtatcaccttcccttcctcctgagagttgaggcctgtaaatacaagggcccaggacagagtgtgtgcgtgcgtgtgggtgtgtgcgcgcgtgagcacacacgcgtgtgttggggggggtggggggattggggtggactcagggtatcttgccagagatacctgttttgatgagtacctattttgatgcaaaggaacggccctgggacctcagagggccacagatgggcttcctgggcctagcgtgccttggttgtggccatcctgcttctactcagccctgccatgctatggggtgcagcacaaacccaggacccaggcctagccactgcccacagctgatggtcactgttttggctggctccagagtggacaggtacgctctgtccacagcagctgctcaggcacagtatgccgtcaggtgcccgcttcttaccactgtgtgtcagctgggattggccgacagcgtggtggtgacttctaggtagaccgatggaccctaaattgggcagtggcattgtttctgctgtggtgggaactggcagggagagggtcacctccactctggttggatgcggagctggtccctctggctgccatgctgtgttggggctctctgacctccctgcttgcattgggtctgggagagagagtggaatatttggtagggaccttgacagaagagagccctgggtgcttgtggtgcaaagatcttcatgcccagttccaaagtgaggtccctcccaaagttgttttcgtgtgaggcagagaaagccacactctgaatacattttatgtctcaggaattcacattccaggttcaggaattttattccaaagtcctttggtgcactcaccgtccaccgttccccaaggcagggagagggagtggcccgtccctgggaggctggcaaagtgctctccagggaggggtcagacgtccttgtgatctgcccagggtgtcacggaaggagattttctagctccacatctgtctgcacataggaaggaaaagataggactctaaacctagtcatcttggaataaaaagaagagctggtttgttttagagcagggcggggggtgggggagggaagcgggtgttggctgtttccaaagagagcacttaatttaatttttcctttaaatgacccagggctgttccgtctgatagatggaagggtaacattgccttaaaacagaaatatgcaggcgttggctatttttggcataagagcgtgtcttcattcccaaagtggttctcgtttaatggcagggtgcggtccttaggccccggcctggactgggaaatgggggtagggcaccaggagagaaatcctcctgggtactcctggccagaccctcctgaatcatctgcggcttaaactcatctcgcttgaagggcagggagaaacccatgaatctcaggcacggttcacaggggtcctcaagggcaggtttccatttcatcatgaagtgagggactcctgtggaagagggtggtgggccttggaacgctgcctccactgaggcgggcacacaaggcggaccctcctgaaacagcctccattttcttcaaacatgcagaatgttttcccagactgcgtctatttcagggtcttccatttttgtggtttatggccatgcttgccagttttggtggggttgaggaacccataggactcatagaaataatagtgaaaactcaaacccttattttgggacttcagttctcgtggtccataggggcagagatgtcaaagtgaaggttgcctgagtgaagggagagttcccctataaaaggcctaaaattgatttggggctcagccatcaaggggctggtgttgctcctgtcccagacaaggaagcccctctttacatcagccatattaggggaacggttgtcagctccccaaatgcctactggatcctacagccatacaggaaaacagacggacacagccctttccttaaagagccctggggtcctgtcctgcaggatgctgcataggaatgggcagagatgtcctggatgggaacatggtcctggaggtgccctacctgcatcctgctgcacccccacccacgacactcgagtgcaagatcgcctcactcctaaccctgactttattcccaggccccacaccgaggcaggtgcaggattcgccatggtgcagcctccgggtacaaacatctgaggcactggcgatcccagtccttgcagcaccctgaacacagctcagaccagtgaggggtgattcagaggtggggatgggcagagagggctggccactctgcctcaggacttgacctcaagtgttctgtctccccacccggtgtgtccagaagaccagcctctttcttgccagaagcaggtgctaagatggactgcacagggtcccggcactccctcgggacccattcaggatctcagctgggcaggggtgccacccaacaggaagatgtgatctgagcaatagtgtggccttgtttctccgcttctggttgtggctgtgtgtacagggctacctactattttgacttctgacaggtgtcactgattttctttcccccatttaaaaaaggtcatttagtcaaagacacagtgctagaggtttaaagggtgtaatgtgttggtcacatcacaaccagtaagaaacgcttggtaggttatccacatcttttgctgactgtttccatatacaattctggtcaccatattttccaaagctaaaatctgaggcgtgggctgatggtttttgaaatcaggattaccccaggaagaaccaggtcctattactaattttcctgattctgaggctctgaaggcttgtctgagacacattccggagacctttgtaccagaacttggatgcatagtccaccttactactgatacacgcctgagcaccctttagggcgaggcgccgcctcctgcctgctgtcctgtccctcagcatcagaagagttgaattcagcaggagacgggagcccggtgtccatgagggaagaggggtcgcgcttggtttctactgacaggcaaccccttcccatccaaagccattggtggagcttctctggaatcatttgccaaaagcccaaggcagaatccaagggtccaagaccatttccatggagctcatgtttttcttttctgtaggaacttttttttaaccagcacccaccataattccgaaggccacgtttcatctttcctggatcactacagtgaagtattacagttgtacagttcccagtctggccttggcttgctcggataaaactttgtatgtattttgtatggcatagattctatattgtaatgatgtcctatgcaaaaagaaaaattaacgaaattgtaaattttattgttttaacgtgtatgcatgtttagtgacgtttacattttgaaataaaatttatgattcattatttta

SEQ ID NO: 133061 - DNA, 4991 bp, Homo sapiens
  misc_feature (716)..(716): n is a, c, g, or t
tcgcaccccaaggcgcacctgagaactcacacaggtgagaggcccttcgcctgcagctggcaggactgcaacaagaagttcgcgcgctccgacgagctggcgcggcactaccgcacacacacgggcgagaagaagttcagctgccccatctgcgagaagcgcttcatgcgcagcgaccacctgaccaagcacgcgcgccgccacgccaacttccacccgggaatgctgcagcggcgcggcgggggctcgcggaccggctccctcagcgactacagccgctccgacgccagcagccccaccatcagcccggccagctcgccctgagcccgccacagccatgagcagccgctcccaccccctcgtgagtccctggcctttccttttgtaataagaaagaagagagagaacttgatgcaaagtccacgaaaaaacaatttttttcacctcaggtgtcaaagtaaatttgttaaaaaaaaaaaaaaaacacaaaaatttcaaaaaacaccacccaccaaattgcacaatagatacacccacaaagttgagattcagcgttgttgaaccccctttctcagggatggacacgtttcacgaggtcagtgaggacaccccttcctgccgccttactctgtacatagatttgcactctggagttttctgttaggttcgggaacacgctggggacagagcaggccagccagtctggtggagctcancgtctggctggctggccagcctgtgggtctgttgggagcagatgtgctcactgacgtttgtgcctccagggcagattcctaagcagctggcctgacctcttcctgcccagcccccaacccagtctctggcctctgcccaacgagcctggctgggcttgcaacgcagctgattctgagacaggcccctgcagagggatgccttaaagctgtccctggctggaggagcactccaccttggggatagtggagggggccttcagccctctgcaccctgcctgcctcacaccccgccttcaggagccctctcctacggcgctagggagcactggaagcagagatgccagccctggctgagcgtagcactgcaccgtccgacctccgaggcaggggccggggtcacacctgccaggactccgcttctccgtgtcccagcagaaggcatgcaggaccctgtcactactatacctgggcctctgatggggaattctggtcttctaaaaagatgttagaaattcctggtggcacatccagttccgagtttgcccgcatgggcacttttgttggaaacagtgggcaggtcatggggcctcctcatcagagggtctgtgtgagcggctgtgcatgtggcagcgcaccatgcttcacagagaccattctgtagcaagagaccggaacattgtgacttggaccttttcaggagtggcgcggatgttacaggaaatgctgtcggagagcgcgcattctatttcctccgcagggaatgccagatagaaagttgcgggcaacacttttctcagacccaccatgtccccaactcagacttagcaaacctccagcctctccgtttcccctggactcctcctcccttttcctcctgcttctccttgtcctgcctggaggctccaggccacacccagctggtggggctgctccagtgccccatcaccggccttctcctggcaggagaggaggagcagagagctgggtcctgggctgggattcgagccctgggcgggggtcagtcaagccgtggtccagcaaactcctctgcagatggctggagtgttgacccaggcttgtggcccaggtatcaccttcccttcctcctgagagttgaggcctgtaaatacaagggcccaggacagagtgtgtgcgtgcgtgtgggtgtgtgcgcgcgtgagcacacacgcgtgtgttggggggggtggggggattggggtggactcagggtatcttgccagagatacctgttttgatgagtacctattttgatgcaaaggaacggccctgggacctcagagggccacagatgggcttcctgggcctagcgtgccttggttgtggccatcctgcttctactcagccctgccatgctatggggtgcagcacaaacccaggacccaggcctagccactgcccacagctgatggtcactgttttggctggctccagagtggacaggtacgctctgtccacagcagctgctcaggcacagtatgccgtcaggtgcccgcttcttaccactgtgtgtcagctgggattggccgacagcgtggtggtgacttctaggtagaccgatggaccctaaattgggcagtggcattgtttctgctgtggtgggaactggcagggagagggtcacctccactctggttggatgcggagctggtccctctggctgccatgctgtgttggggctctctgacctccctgcttgcattgggtctgggagagagagtggaatatttggtagggaccttgacagaagagagccctgggtgcttgtggtgcaaagatcttcatgcccagttccaaagtgaggtccctcccaaagttgttttcgtgtgaggcagagaaagccacactctgaatacattttatgtctcaggaattcacattccaggttcaggaattttattccaaagtcctttggtgcactcaccgtccaccgttccccaaggcagggagagggagtggcccgtccctgggaggctggcaaagtgctctccagggaggggtcagacgtccttgtgatctgcccagggtgtcacggaaggagattttctagctccacatctgtctgcacataggaaggaaaagataggactctaaacctagtcatcttggaataaaaagaagagctggtttgttttagagcagggcggggggtgggggagggaagcgggtgttggctgtttccaaagagagcacttaatttaatttttcctttaaatgacccagggctgttccgtctgatagatggaagggtaacattgccttaaaacagaaatatgcaggcgttggctatttttggcataagagcgtgtcttcattcccaaagtggttctcgtttaatggcagggtgcggtccttaggccccggcctggactgggaaatgggggtagggcaccaggagagaaatcctcctgggtactcctggccagaccctcctgaatcatctgcggcttaaactcatctcgcttgaagggcagggagaaacccatgaatctcaggcacggttcacaggggtcctcaagggcaggtttccatttcatcatgaagtgagggactcctgtggaagagggtggtgggccttggaacgctgcctccactgaggcgggcacacaaggcggaccctcctgaaacagcctccattttcttcaaacatgcagaatgttttcccagactgcgtctatttcagggtcttccatttttgtggtttatggccatgcttgccagttttggtggggttgaggaacccataggactcatagaaataatagtgaaaactcaaacccttattttgggacttcagttctcgtggtccataggggcagagatgtcaaagtgaaggttgcctgagtgaagggagagttcccctataaaaggcctaaaattgatttggggctcagccatcaaggggctggtgttgctcctgtcccagacaaggaagcccctctttacatcagccatattaggggaacggttgtcagctccccaaatgcctactggatcctacagccatacaggaaaacagacggacacagccctttccttaaagagccctggggtcctgtcctgcaggatgctgcataggaatgggcagagatgtcctggatgggaacatggtcctggaggtgccctacctgcatcctgctgcacccccacccacgacactcgagtgcaagatcgcctcactcctaaccctgactttattcccaggccccacaccgaggcaggtgcaggattcgccatggtgcagcctccgggtacaaacatctgaggcactggcgatcccagtccttgcagcaccctgaacacagctcagaccagtgaggggtgattcagaggtggggatgggcagagagggctggccactctgcctcaggacttgacctcaagtgttctgtctccccacccggtgtgtccagaagaccagcctctttcttgccagaagcaggtgctaagatggactgcacagggtcccggcactccctcgggacccattcaggatctcagctgggcaggggtgccacccaacaggaagatgtgatctgagcaatagtgtggccttgtttctccgcttctggttgtggctgtgtgtacagggctacctactattttgacttctgacaggtgtcactgattttctttcccccatttaaaaaaggtcatttagtcaaagacacagtgctagaggtttaaagggtgtaatgtgttggtcacatcacaaccagtaagaaacgcttggtaggttatccacatcttttgctgactgtttccatatacaattctggtcaccatattttccaaagctaaaatctgaggcgtgggctgatggtttttgaaatcaggattaccccaggaagaaccagaggcaaccccttcccatccaaagccattggtggagcttctctggaatcatttgccaaaagcccaaggcagaatccaagggtccaagaccatttccatggagctcatgtttttcttttctgtaggaacttttttttaaccagcacccaccataattccgaaggccacgtttcatctttcctggatcactacagtgaagtattacagttgtacagttcccagtctggccttggcttgctcggataaaactttgtatgtattttgtatggcatagattctatattgtaatgatgtcctatgcaaaaagaaaaattaacgaaattgtaaattttattgttttaacgtgtatgcatgtttagtgacgtttacattttgaaataaaatttatgattcattatttta

SEQ ID NO: 133062 - DNA, 508 bp, Homo sapiens
tcatgtgacagactagactgaggagggtcagaatgggaattgccttcctgccctgcaggggtgcagagtgtggctcccatggagcagcatgggcggctggactccgggaggcctgtgaagccagggcatgggcctgcaacccccaggcgttggagaccactggcccggcatgggtgtgtagtgcagcctgctttgtggtgtacttagggggtccactgccaggagcctggggccctgacctgtacctacccatgggccctgcagtttcagcacttgaaatgttgtttttatcctaggccgtgtcttctgcctccatcccaggcgtgggcgggagggcaggggcccaccttcatctctgccttgatggatttgtcacagaagctcttggaggtggggcatgtgggaggggtgttgagagaccagggtgttgggtgttgcgggcccttccccagagagggtgtgaaggcggggccaggtgcggatactgatgctctgcccctgtgcccac

SEQ ID NO: 133063 - DNA, 5933 bp, Homo sapiens
  misc_feature (722)..(722): n is a, c, g, or t
aggcacttggtggtggggccagggctcctgccggccataggtgagaggcccttcgcctgcagctggcaggactgcaacaagaagttcgcgcgctccgacgagctggcgcggcactaccgcacacacacgggcgagaagaagttcagctgccccatctgcgagaagcgcttcatgcgcagcgaccacctgaccaagcacgcgcgccgccacgccaacttccacccgggaatgctgcagcggcgcggcgggggctcgcggaccggctccctcagcgactacagccgctccgacgccagcagccccaccatcagcccggccagctcgccctgagcccgccacagccatgagcagccgctcccaccccctcgtgagtccctggcctttccttttgtaataagaaagaagagagagaacttgatgcaaagtccacgaaaaaacaatttttttcacctcaggtgtcaaagtaaatttgttaaaaaaaaaaaaaaaacacaaaaatttcaaaaaacaccacccaccaaattgcacaatagatacacccacaaagttgagattcagcgttgttgaaccccctttctcagggatggacacgtttcacgaggtcagtgaggacaccccttcctgccgccttactctgtacatagatttgcactctggagttttctgttaggttcgggaacacgctggggacagagcaggccagccagtctggtggagctcancgtctggctggctggccagcctgtgggtctgttgggagcagatgtgctcactgacgtttgtgcctccagggcagattcctaagcagctggcctgacctcttcctgcccagcccccaacccagtctctggcctctgcccaacgagcctggctgggcttgcaacgcagctgattctgagacaggcccctgcagagggatgccttaaagctgtccctggctggaggagcactccaccttggggatagtggagggggccttcagccctctgcaccctgcctgcctcacaccccgccttcaggagccctctcctacggcgctagggagcactggaagcagagatgccagccctggctgagcgtagcactgcaccgtccgacctccgaggcaggggccggggtcacacctgccaggactccgcttctccgtgtcccagcagaaggcatgcaggaccctgtcactactatacctgggcctctgatggggaattctggtcttctaaaaagatgttagaaattcctggtggcacatccagttccgagtttgcccgcatgggcacttttgttggaaacagtgggcaggtcatggggcctcctcatcagagggtctgtgtgagcggctgtgcatgtggcagcgcaccatgcttcacagagaccattctgtagcaagagaccggaacattgtgacttggaccttttcaggagtggcgcggatgttacaggaaatgctgtcggagagcgcgcattctatttcctccgcagggaatgccagatagaaagttgcgggcaacacttttctcagacccaccatgtccccaactcagacttagcaaacctccagcctctccgtttcccctggactcctcctcccttttcctcctgcttctccttgtcctgcctggaggctccaggccacacccagctggtggggctgctccagtgccccatcaccggccttctcctggcaggagaggaggagcagagagctgggtcctgggctgggattcgagccctgggcgggggtcagtcaagccgtggtccagcaaactcctctgcagatggctggagtgttgacccaggcttgtggcccaggtatcaccttcccttcctcctgagagttgaggcctgtaaatacaagggcccaggacagagtgtgtgcgtgcgtgtgggtgtgtgcgcgcgtgagcacacacgcgtgtgttggggggggtggggggattggggtggactcagggtatcttgccagagatacctgttttgatgagtacctattttgatgcaaaggaacggccctgggacctcagagggccacagatgggcttcctgggcctagcgtgccttggttgtggccatcctgcttctactcagccctgccatgctatggggtgcagcacaaacccaggacccaggcctagccactgcccacagctgatggtcactgttttggctggctccagagtggacaggtacgctctgtccacagcagctgctcaggcacagtatgccgtcaggtgcccgcttcttaccactgtgtgtcagctgggattggccgacagcgtggtggtgacttctaggtagaccgatggaccctaaattgggcagtggcattgtttctgctgtggtgggaactggcagggagagggtcacctccactctggttggatgcggagctggtccctctggctgccatgctgtgttggggctctctgacctccctgcttgcattgggtctgggagagagagtggaatatttggtagggaccttgacagaagagagccctgggtgcttgtggtgcaaagatcttcatgcccagttccaaagtgaggtccctcccaaagttgttttcgtgtgaggcagagaaagccacactctgaatacattttatgtctcaggaattcacattccaggttcaggaattttattccaaagtcctttggtgcactcaccgtccaccgttccccaaggcagggagagggagtggcccgtccctgggaggctggcaaagtgctctccagggaggggtcagacgtccttgtgatctgcccagggtgtcacggaaggagattttctagctccacatctgtctgcacataggaaggaaaagataggactctaaacctagtcatcttggaataaaaagaagagctggtttgttttagagcagggcggggggtgggggagggaagcgggtgttggctgtttccaaagagagcacttaatttaatttttcctttaaatgacccagggctgttccgtctgatagatggaagggtaacattgccttaaaacagaaatatgcaggcgttggctatttttggcataagagcgtgtcttcattcccaaagtggttctcgtttaatggcagggtgcggtccttaggccccggcctggactgggaaatgggggtagggcaccaggagagaaatcctcctgggtactcctggccagaccctcctgaatcatctgcggcttaaactcatctcgcttgaagggcagggagaaacccatgaatctcaggcacggttcacaggggtcctcaagggcaggtttccatttcatcatgaagtgagggactcctgtggaagagggtggtgggccttggaacgctgcctccactgaggcgggcacacaaggcggaccctcctgaaacagcctccattttcttcaaacatgcagaatgttttcccagactgcgtctatttcagggtcttccatttttgtggtttatggccatgcttgccagttttggtggggttgaggaacccataggactcatagaaataatagtgaaaactcaaacccttattttgggacttcagttctcgtggtccataggggcagagatgtcaaagtgaaggttgcctgagtgaagggagagttcccctataaaaggcctaaaattgatttggggctcagccatcaaggggctggtgttgctcctgtcccagacaaggaagcccctctttacatcagccatattaggggaacggttgtcagctccccaaatgcctactggatcctacagccatacaggaaaacagacggacacagccctttccttaaagagccctggggtcctgtcctgcaggatgctgcataggaatgggcagagatgtcctggatgggaacatggtcctggaggtgccctacctgcatcctgctgcacccccacccacgacactcgagtgcaagatcgcctcactcctaaccctgactttattcccaggccccacaccgaggcaggtgcaggattcgccatggtgcagcctccgggtacaaacatctgaggcactggcgatcccagtccttgcagcaccctgaacacagctcagaccagtgaggggtgattcagaggtggggatgggcagagagggctggccactctgcctcaggacttgacctcaagtgttctgtctccccacccggtgtgtccagaagaccagcctctttcttgccagaagcaggtgctaagatggactgcacagggtcccggcactccctcgggacccattcaggatctcagctgggcaggggtgccacccaacaggaagatgtgatctgagcaatagtgtggccttgtttctccgcttctggttgtggctgtgtgtacagggctacctactattttgacttctgacaggtgtcactgattttctttcccccatttaaaaaaggtcatttagtcaaagacacagtgctagaggtttaaagggtgtaatgtgttggtcacatcacaaccagtaagaaacgcttggtaggttatccacatcttttgctgactgtttccatatacaattctggtcaccatattttccaaagctaaaatctgaggcgtgggctgatggtttttgaaatcaggattaccccaggaagaaccaggtcctattactaattttcctgattctgaggctctgaaggcttgtctgagacacattccggagacctttgtaccagaacttggatgcatagtccaccttactactgatacacgcctgagcaccctttagggcgaggcgccgcctcctgcctgctgtcctgtccctcagcatcagaagagttgaattcagcaggagacgggagcccggtgtccatgagggaagaggggtcgcgcttggtttctactgacccccatgaagatttcagacttgcagtgcggccacctggccctgccctgcctctctctttctcatacagctttaaaactttactacttttatttaaaaatgaactggatgggagagaagtagcgtcccctaccctacaagtcacacattccggggaggggggtggggggtggaggcaggaagtcatgggggtgggggtgggagcacgggaacagctttcttaaggcctcagggtcctgttttccctggcctcttctagagggcccgtggacaggtcgcagtgcgtgcttatttggaaaccaggtgtgtgagccgaatgcctgccaggccatgcactcagcagaggagcccttgtacctggctgccctgagaggagcaagaggccacctcccatgtggctctagacaccacgtgggctcattagccccagcgtctgtgccggctccaggtgcctgcctctgggtgtgtgagtgggagactttgctccctggcctcatcctagagaggcccctggtgcctagtgctgaggcctctggggctggaaagcctcagcagaaaggaggcactactgagcaactatgcattgtcattgtcgggtttggggctttcggtggttccttggtgactgggaattgcttgtgtgcatgtgttgggtgcatgcttccgggtctcagctgccccaggcccgcacaggcaaccccttcccatccaaagccattggtggagcttctctggaatcatttgccaaaagcccaaggcagaatccaagggtccaagaccatttccatggagctcatgtttttcttttctgtaggaacttttttttaaccagcacccaccataattccgaaggccacgtttcatctttcctggatcactacagtgaagtattacagttgtacagttcccagtctggccttggcttgctcggataaaactttgtatgtattttgtatggcatagattctatattgtaatgatgtcctatgcaaaaagaaaaattaacgaaattgtaaattttattgttttaacgtgtatgcatgtttagtgacgtttacattttgaaataaaatttatgattcattatttta

SEQ ID NO: 133064 - DNA, 362 bp, Homo sapiens
actggtgtgttattgtcaagggatcttacaggccttgcttcccaggcccctctatcccctctgttcttgcttaggcattagtgatttggttcttctagctttttttctttttttgagacagggtctcgctttgtcatacaggctggagtgcagcagcgcgatcttggctcactgcaacctccgcctcctgggttcaagcaattctcctgtctcagtctcctgagtaggtgggtctacagtcacatgccaccacgtctggctagtttttgtattttttagtagagatagggtttcacttgttggccaggctggtctcgaactcctgacctcaggtgatccgccagtctcaacctcccagagag

SEQ ID NO: 133065 - DNA, 310 bp, Homo sapiens
acaggacccaggccagggagccccgtcagtggaaggcgtcaggaggaggacgctgaccctgcatcccatcccagccacagcagggctgcaaccaagaggaggtgccttccaggcccattaaccacctcctccctccacagacacacagctagctgcaggatcccagcagtgaagatgacatcattcttgtttaaatgctttattaaccaacctgctccctcaccagagaagcaatctcgcctgctctctattaactaacctgctccctcaccagagaagcaatctcgcctgctattaaccaacctgctcc

SEQ ID NO: 133066 - DNA, 215 bp, Homo sapiens
caccgcacctggcctaataacttttgactggaacaataagtggcaacatggacaggtagagggagcactgagctgggaatggaggcctgggcagatagctcatgccactggttcctgggacctgagtcaagccacctctgggctgtttcatgtccttattaacagatcggatgagataaccttttttttcttttttgagacagtctcactacatt

SEQ ID NO: 133067 - DNA, 227 bp, Homo sapiens
cagtcatgtcacatttggatatgaaattccctatttggcaactctaccattttggttagaatacccaatactacactagtgcaaaccttccctttggccaggcacagtggctcatgcctgtaatcccagcactttaggaagccgaggcgggtggatcacctgaggtcaggagttcaagaccagtctggccaacatggtgaaactttgtctctactaaaaatacaaaa

SEQ ID NO: 133068 - DNA, 389 bp, Homo sapiens
gtggcggcatattgtgtccaggagaatgaactgccatgaacagcaagtagaagagccgactcaacatggaatagtagttttagttgaagatatgaagctccccagtcactgcacagccagggtggattttctgccaccttcacaagcctcctgcagggagggtcaccgtgtctcagatctactcactgtggagtttaaatcctccctcctctgcttgtcacccctcagggtgagctgagaagtcagccagagggagcagagtgacagtggctgaagggaaatggtactgggcagttgatagtgaacagagcccgagaggaaaagcccctccccttaaggctgcaagatctgcattagggcaggaggttcttcagtgcagaaagaagcag

SEQ ID NO: 133069 - DNA, 309 bp, Homo sapiens
caaactctgggatcagagtggaattttggccaattttgcatgctatctaccatactctctgtcatgggtactttttttttaaactctgtacttccttgtagggaaatcatctcatatctgtcttctagtatactaaatctctcttcagctatggtcaatgtggtgtttaaccatgcactcaaatgtttaatttcgattactatattattcatttctagaagttccatttgatttttctcaaatctattcttttttcttttctttttttcttccttgggatggggtctcactctattgcccaggctggag

SEQ ID NO: 133070 - DNA, 216 bp, Homo sapiens
aattctagatccgtgtgtgtgtgtgtgtgtgtgtgtaagatgttagacctggaagaataaagggaccataaagtgaaatgcccttctgctgatctcaacggagccacagtattcattgaaagccacccattttacagattaagaaacaagctgggaggctgtgtggaaaccacagccagagacccatgctgcatgtgagtcaggcagcctggctgc

SEQ ID NO: 133071 - DNA, 594 bp, Homo sapiens
cctgctcaaatgtagtatttcttttctatattgctgtatttggttggctaatatttttaaggattttcgtctattattcatgaggaatatttgttgtagttttcttttctcgtaatgattttgtctggttttggtttcagggtaatgtcatctcctaaaattatttgcaagtgttctgtctcctgttttcagagagatttttgtgtagaattggtattatctcttccttaagtgtttggtagaatttggcagtgaagccctcacggcctggagctttctttgtgggtaggttttttattacaaattcaatttcattaggaagctctccagttcatctggagtgaactttggtagtttatgtccttagaggaattttgcccattttatatatgtcatcaaatggataatgccttttgaatttagtcagttaaaattcttactggaatttttgtgtatatgcgtatttgcgaagtgatcttttgttctttggttgacgtctccttatttggatttggaattaatattggtctcctattaagagctgttgtgtctgtttgtttttggtgttctttttttttttatttttcctacttc

SEQ ID NO: 133072 - DNA, 880 bp, Homo sapiens
tggacatttctatccctgtggaatttgctcctgttgtgtccttgagggagctctggcacaggtgtgattcaggtaaaggagacagagtctgtggaagtgactggcactccatgtagttaaatttgattcctagtaacttcaaaaccacttcagagagcaagagaatgaggtggggtttttggattgttttttgttttttcagctaaaataacattttaacaggtagaagacattccaaatcaggagattgctagcttcacagaatgagaggagcatccctgggtcctgggaatggttacagatcctgaggcctttacctgctcttgcctttctgggtcctccccactgccccacgggggagctctgcctatgaatgagctgatgctcagagaggttaaacgccttccaggccagggagctggaaaccaggagggcaaggatttaacccaagtcatactgatgcctaaccatgagcacccaaccactgtgtctgccgatggtcttcgcatgaggcatgatttctttcctggccattgctcttttgtcacagtaatgggacccttcagtgccttaaccttagccttagcccaacataggggcagacaggattcacgggaagagagggtcgccctgatggcaatgcagggaggtgagtgggcatgatctgggacaaacggagtagttaataaatacaggcagtgagtagtgagtactttccaaggaaagatattaacagggcccccaaactgcaggtgacagtgtctaacaggtccaggtagctcggaatgcaaaggttgactgtaccagtccacaatatggcaaaccctgatttttttcctatgtcattgttccttttttaaaaaataaaaattgtggtaaa

SEQ ID NO: 133073 - DNA, 653 bp, Homo sapiens
ggcctggaagagcagcaagtcagcctctccgggcccagctccatcctctcggcggcctctccaggtgcaaaacttcctcgagtcagcctctccaggcccagctcctcctgcctcccattggcctctttcagcccagcccagcccagctcatggctctcggcagccttcccaggccccgcttttgacttttggcggcctcttcaggcccagaacttgccctccagtggacctttgcaggcccggcctcggcctcggcctcacagcggactctccacgcccagctagctctcacctcactgcggcctccccagtccaaagctcctgcctttcggccgcttcggcaggtccagctcctgcctgccagtggcctctttaggcccagctcattcctcacaatggtcttcccaggccccgtttttcccttctggcagcctcttggcctctaatttgtttatcttttgtgtataaatcccaaaatatggaattttggaatatttccaccattatatgaatattttggtaggtaatttatttggagttagtttctgcaccatgcccgaattttttattttattttccttattatttggtgttaaacagatttaatgacggtcatggcaactttttggcacaatgaaaaatatcgcccatga

SEQ ID NO: 133074 - DNA, 482 bp, Homo sapiens
ttctctgaatccgctggggccctctggtttcctggccccgaggtctctagtgttcctgggactggcctagctcctcttccctttctccatggttcagaggcctggtctgggctccgtatatggaattctgggcccaggcttaagcgcgatgctgaagagctgccggtccccctccataacttgcccttctctctggaataaagactccaggcctcccgttctgaaactgatttccaggaggaaggtgtccagtctcaattccgtgttctttctgggatgaaggcaaatcacagaccgcaccaccctgactgaattatgctacaaatatctgcaagccctaattggttcccattcattcatatttcgctttggctcttaatgatacctcagaactagtcttgcccccaaagattccccaagacacagctaacagggttgtaatatactgttgtcattgaaagaaaggagtgtctcgatactgt

SEQ ID NO: 133075 - DNA, 738 bp, Homo sapiens
gtggaaaatatacgcttacattagaaaacagcagtggaacaaagtctgcctttgttactgtgagagttctggacacgccaagtccacctgttaacctgaaagtcacagaaatcaccaaagactcagtatcaattacatgggaacctcctttgttggatgggggatccaaaataaaaaattacattgttgagaaacgtgaagccacaagaaaatcatatgctgctgttgtaactaactgccataagaattcttggaaaatcgatcagctccaagaaggttgcagttattactttagagtcacagctgagaatgagtatggtattggccttcctgcccagactgctgatccaattaaggttgcagaagtgccacaacctcctggaaaaataactgtggatgatgtcaccagaaacagtgtctctctgagttggacaaaacctgaacatgatggtggcagtaaaatcattcagtatattgtggaaatgcaagctaaacacagtgagaaatggtcagagtgtgctcgagtaaagtctcttcaggcagtaattaccaacctaactcaaggggaagaatatctttttagagttgttgctgtaaatgaaaaggggagaagtgatcctcggtcccttgcagttccaatagttgccaaagatctggtaattgagccagatgtaaaacctgcattcagtagttacagtgtacaggttggccaagatttgaaaatagaagtgccaattt

SEQ ID NO: 133076 - DNA, 439 bp, Homo sapiens
tctttgcttattcaggtggctttatttacatgccaggcccaaacctagggtgcagggatctccttctttctcctaggagactgtttttccctctaagacttttttttgagacaaggtcttgctctgtcgcccacactggagtgccactgcatcctcacagtggtgtgatcatagctcactgcatccttgacctcctgggctcagcctcccgagtagcttggactacaggtacataacaccatgctcggctaattttttcatatattttttgtagcagcagggtctcactatattgcccaggctggtctggaactcctgggctcaagcaatcctcccacttcagctcccctaagggctcttaacctctttagtaaaagatcaacaaagcagatgcatcgcttttgagtttcagatcttcccagggctcctcactgccctc

SEQ ID NO: 133077 - DNA, 272 bp, Homo sapiens
tccttttagccctcgcaactccaggtgttctgctctattgaagtataaaatgggttatcatgtttctagagaatatcaaagaagtcaggtgggaagtggatttcagaaatgacatactacccaaccaggatctggttgttcctgacactgactggatgtattgtagtatcttcagattggagcacctccctggatttgtttttgggattcttcactattagaaggactgaggggccacattagaagtggatattctgcagtcagcctaaatc

SEQ ID NO: 133078 - DNA, 388 bp, Homo sapiens
tctctcccaacactcagccggtacccaacaggaatcatacaaaactcagaggctagtgaaaggttaaagcaggtggtccacaccagctgcagagtcaaaaacaaaatacgcgtctgctgccatttagaaagaggacacaaactcaggcaagactgtttttcacacgatgacccatgagtggctcctggctgggcctccccacacatagctgctgacctctgaatacaacatacacttcgggaccaggtgcggtggttcacgcctgcaatcccagcactttgggaggccaagaggaatggatcacttgaggtcaggagtttgagaccagcctggccaacatggcgaaaccctgtctctgctaaaaatataaaaattagttgggcatggt

SEQ ID NO: 133079 - DNA, 752 bp, Homo sapiens
tgcagtggcttatacctgtaatcccagcattttgggaggacgaggtgggcagatcacttgagtctgggagttcgagacctgcctggccaacatagtgaaatcccctctctactaaaaatacaaaaattagcagggagtggtggcacacgcctgtaatcctagctacttgggaggcggctgagacaggagaatcgtttgaacccaggggatggagcttgcagtgagccgagatcctgccactgcactccaacctgggtgacagagcgagactccatctcaaaaaaaaattaaaaatacaaaaaaattagccaagcatggtggcatacacctgtagtcccagctactcgggaggctgaggcacaactgcttgaacctgggaggcagaggttgcagtaagtggagatcgtgccaatgtactacaggcctgggcaacacagcaagactccatctcaaaaacagaaaaagaaaaaggaattcattcaaggaagcaaggaatatctaactctaatcaaggagaccatgttttattctttgatttaaaaaaaaaactataacctaatcaacagaattatctcatgaatgtgccaacacaaagggggttaaagttttagggggaaccccccaatattcatcaatgccacattttggtcaccaaagaggtatgctttattgtggaacatatttttccactgtttcgataaattatttaggatgatccgattgatcgtgtagagctttaaaatcctcacatc

SEQ ID NO: 133080 - DNA, 235 bp, Homo sapiens
gaagctcataaaaagcttacaaattcaccactgcacatacaatgaaggtggtggacccagtctagccaggactagagtgtccccacatacacccagcactagcccagcatcatcagtctcattatctgtgtcactgtcaatgatgacagtggcttcaggtcctagagtcaataccaagagaggacctagaagagaaccttggaactgtggccaatttcaacatgcctcccactaa

SEQ ID NO: 133081 - DNA, 179 bp, Homo sapiens
gacttcgagacagtctgcgagaagctcctgcacaggtgggcaataagaccaacattgtgagcctgagtcttgagacagactgggggttgaattttgcccttactatagccagctgtgtgagttgggatgagttatttaacctacataagctccagtcactgaatacactggacaccaac

SEQ ID NO: 133082 - DNA, 981 bp, Homo sapiens
cagaggttgcagtgagccaagactgtgacactacactccagcctgggcaacagagggagactgtctcaaaacaaaaacaaagaaacaaaaaaaaagacaagggctgagcacttgcttcccgtggcgaaggtggagtctgggcttacgcatgcatttcccctctaataacaaagcttgagtgatggggttatatgtcttgaagaagaaggaaaacatcaacatccagacacacccaggcccagccggcttcgggaggagccgagagcctctgtggctcctccctgtgcctgggaggcctgagtcccacctgctgggctgctctgtcctggcaggtacagcaacatctttcatgtcttcatccgcatctcgagagaagaggggctgaagactctctaccatggatttatgcccaccgtgctgggggtcattccctacgctggcctgagcttcttcacctatgagacgctcaagagcttgcacagaggtaaggagagctgggagcatgaggaggggacgttcaggaagcattccctggggacagcagctccacctgggtcacatagacctggagaccaggcggagtggggtacgacccctgggtggggcaggctgtagacccacatccaaatcgggagaaaacacactgtgtgcagccgccactgaggaacctggactcactgccttaaatgcctaagtgagaggaactctggctggtgccacggctcgtgcctgtaatcccagtgctttgggaggccgaggtgggcggatcacttgaggtcaggagttgcagaccagcctgggcaacatggcgaaaccccgtctctaccaaagatacaaaaaaattaggcatggtggcacacacctgtggtcccagctactagagaggctgcggtgggaggatcacccaagcctgggaggtcaaggccgcagtgagctgtgatctcactgctgcacaccagcctgggtgtcaaagtgagaccc

SEQ ID NO: 133083 - DNA, 545 bp, Homo sapiens
  misc_feature (50)..(50): n is a, c, g, or t
agcgtgggggccgtggcggcatggaggtagcggcggcggcgacgcgtccnggccggaccgagtctcctgccattccgagcaggcctggtatgggtaatggtgtgaaggaaggcccggtgcgattgcatgaggatgctgaggctgtcctgtcctcgtccgtctcatcaaagtgtcttcaaaaagattttctgccaaggaggccttccgggtcctctactacacctacctcaacgagggatttctcagcttgtggcgcgggaactcggccaccatggtgcgcgtggtgccctacgccgccatccagttcagcgcacacgaggagtacaagcgcatcctgggcagctactatggcttccgtggagaagccctgcccccttggcctcgcctcttcgccggcgcactggctggaacgacagccgcttcactgacctaccccctggacctggtcagagcgcggatggccgtaaccccgaaggaaatgtgagtccttacatcggtgatgcgcatcagccccgggggctctgtgtctcgggggctcccaggtc

SEQ ID NO: 133084 - DNA, 1112 bp, Homo sapiens
  misc_feature (50)..(50): n is a, c, g, or t
agcgtgggggccgtggcggcatggaggtagcggcggcggcgacgcgtccnggccggtgagggggcgcggggggcgccgggggggcccatcgcgtcagcggcccgcgcctgtcgggctgaactgaggaccgagtctcctgccattccgagcaggcctggtatgggtaatggtgtgaaggaaggcccggtgcgattgcatgaggatgctgaggctgtcctgtcctcgtccgtctcatcaaagcgtgaccacaggcaagtgctcagctccctgctgtctggggccctggctggtgcccttgccaaaacagcggtagctcccctggaccgaaccaaaatcatcttccaagagccctgcccccttggcctcgcctcttcgccggcgcactggctggaacgacagccgcttcactgacctaccccctggacctggtcagagcgcggatggccgtaaccccgaaggaaatgtacagcaacatctttcatgtcttcatccgcatctcgagagaagaggggctgaagactctctaccatggatttatgcccaccgtgctgggggtcattccctacgctggcctgagcttcttcacctatgagacgctcaagagcttgcacagaggtaaggagagctgggagcatgaggaggggacgttcaggaagcattccctggggacagcagctccacctgggtcacatagacctggagaccaggcggagtggggtacgacccctgggtggggcaggctgtagacccacatccaaatcgggagaaaacacactgtgtgcagccgccactgaggaacctggactcactgccttaaatgcctaagtgagaggaactctggctggtgccacggctcgtgcctgtaatcccagtgctttgggaggccgaggtgggcggatcacttgaggtcaggagttgcagaccagcctgggcaacatggcgaaaccccgtctctaccaaagatacaaaaaaattaggcatggtggcacacacctgtggtcccagctactagagaggctgcggtgggaggatcacccaagcctgggaggtcaaggccgcagtgagctgtgatctcactgctgcacaccagcctgggtgtcaaagtgagaccc

SEQ ID NO: 133085 - DNA, 668 bp, Homo sapiens
  misc_feature (50)..(50): n is a, c, g, or t
agcgtgggggccgtggcggcatggaggtagcggcggcggcgacgcgtccnggccggtgagggggcgcggggggcgccgggggggcccatcgcgtcagcggcccgcgcctgtcgggctgaactgaggaccgagtctcctgccattccgagcaggcctggtatgggtaatggtgtgaaggaaggcccggtgcgattgcatgaggatgctgaggctgtcctgtcctcgtccgtctcatcaaagcgtgaccacaggcaagtgctcagctccctgctgtctggggccctggctggtgcccttgccaaaacagcggtagctcccctggaccgaaccaaaatcatcttccaagtgtcttcaaaaagattttctgccaaggtgagccactatgtcaccgccccggcctggggacagtcaccactaccctgatgggctggcaggagttaggcaggtggtctgaggagagtctcaggggtggggacaggactacctgtcttcccattcccagctctgcctggacacagcccagcctgggaactgacgggacatcccgagtgtccttccggcagtggggtggggagactcaacagctctaaaacaaccttttcatgtttgatttattgttaaacagagagcaggtgctactttcttaataaaggaaaagataaactgta

SEQ ID NO: 133086 - DNA, 1305 bp, Homo sapiens
  misc_feature (50)..(50): n is a, c, g, or t
agcgtgggggccgtggcggcatggaggtagcggcggcggcgacgcgtccnggccggtgagggggcgcggggggcgccgggggggcccatcgcgtcagcggcccgcgcctgtcgggctgaactgaggaccgagtctcctgccattccgagcaggcctggtatgggtaatggtgtgaaggaaggcccggtgcgattgcatgaggatgctgaggctgtcctgtcctcgtccgtctcatcaaagcgtgaccacaggcaagtgctcagctccctgctgtctggggccctggctggtgcccttgccaaaacagcggtagctcccctggaccgaaccaaaatcatcttccaagtgtcttcaaaaagattttctgccaaggaggccttccgggtcctctactacacctacctcaacgagggatttctcagcttgtggcgcgggaactcggccaccatggtgcgcgtggtgccctacgccgccatccagttcagcgcacacgaggagtacaagcgcatcctgggcagctactatggcttccgtggagaagccctgcccccttggcctcgcctcttcgccggcgcactggctggaacgacagccgcttcactgacctaccccctggacctggtcagagcgcggatggccgtaaccccgaaggaaatgtacagcaacatctttcatgtcttcatccgcatctcgagagaagaggggctgaagactctctaccatggatttatgcccaccgtgctgggggtcattccctacgctggcctgagcttcttcacctatgagacgctcaagagcttgcacagaggtaaggagagctgggagcatgaggaggggacgttcaggaagcattccctggggacagcagctccacctgggtcacatagacctggagaccaggcggagtggggtacgacccctgggtggggcaggctgtagacccacatccaaatcgggagaaaacacactgtgtgcagccgccactgaggaacctggactcactgccttaaatgcctaagtgagaggaactctggctggtgccacggctcgtgcctgtaatcccagtgctttgggaggccgaggtgggcggatcacttgaggtcaggagttgcagaccagcctgggcaacatggcgaaaccccgtctctaccaaagatacaaaaaaattaggcatggtggcacacacctgtggtcccagctactagagaggctgcggtgggaggatcacccaagcctgggaggtcaaggccgcagtgagctgtgatctcactgctgcacaccagcctgggtgtcaaagtgagaccc

SEQ ID NO: 133087 - DNA, 2392 bp, Homo sapiens
  misc_feature (100)..(100): n is a, c, g, or t
gcaaaccttaagctgaatgaacaacttttcttctcttgaatatatcttaacgccaaattttgagtgcttttttgttacccatcctcatatgtcccagctngaaagaatcctgggttggagctactgcatgttgattgttttgtttttccttttggctgttcattttggtggctactataaggaaatctaacacaaacagcaactgttttttgttgtttacttttgcatctttacttgtggagctgtggcaagtcctcatatcaaatacagaacatgatcttcctcctgctaatgttgagcctggaattgcagcttcaccagatagcagctttattcacagtgacagtccctaaggaactgtacataatagagcatggcagcaatgtgaccctggaatgcaactttgacactggaagtcatgtgaaccttggagcaataacagccagtttgcaaaaggtggaaaatgatacatccccacaccgtgaaagagccactttgctggaggagcagctgcccctagggaaggcctcgttccacatacctcaagtccaagtgagggacgaaggacagtaccaatgcataatcatctatggggtcgcctgggactacaagtacctgactctgaaagtcaaagcttcctacaggaaaataaacactcacatcctaaaggttccagaaacagatgaggtagagctcacctgccaggctacaggttatcctctggcagaagtatcctggccaaacgtcagcgttcctgccaacaccagccactccaggacccctgaaggcctctaccaggtcaccagtgttctgcgcctaaagccaccccctggcagaaacttcagctgtgtgttctggaatactcacgtgagggaacttactttggccagcattgaccttcaaagtcagatggaacccaggacccatccaacttggctgcttcacattttcatcccctcctgcatcattgctttcattttcatagccacagtgatagccctaagaaaacaactctgtcaaaagctgtattcttcaaaagacacaacaaaaagacctgtcaccacaacaaagagggaagtgaacagtgctatctgaacctgtggtcttgggagccagggtgacctgatatgacatctaaagaagcttctggactctgaacaagaattcggtggcctgcagagcttgccatttgcacttttcaaatgcctttggatgacccagcactttaatctgaaacctgcaacaagactagccaacacctggccatgaaacttgccccttcactgatctggactcacctctggagcctatggctttaagcaagcactactgcactttacagaattaccccactggatcctggacccacagaattccttcaggatccttcttgctgccagactgaaagcaaaaggaattatttcccctcaagttttctaagtgatttccaaaagcagaggtgtgtggaaatttccagtaacagaaacagatgggttgccaatagagttattttttatctatagcttcctctgggtactagaagaggctattgagactatgagctcacagacagggcttcgcacaaactcaaatcataattgacatgttttatggattactggaatcttgatagcataatgaagttgttctaattaacagagagcatttaaatatacactaagtgcacaaattgtggagtaaagtcatcaagctctgtttttgaggtctaagtcacaaagcatttgttttaacctgtaatggcaccatgtttaatggtggttttttttttgaactacatctttcctttaaaaattattggtttctttttatttgtttttaccttagaaatcaattatatacagtcaaaaatatttgatatgctcatacgttgtatctgcagcaatttcagataagtagctaaaatggccaaagccccaaactaagcctccttttctggccctcaatatgactttaaatttgacttttcagtgcctcagtttgcacatctgtaatacagcaatgctaagtagtcaaggcctttgataattggcactatggaaatcctgcaagatcccactacatatgtgtggagcagaagggtaactcggctacagtaacagcttaattttgttaaatttgttctttatactggagccatgaagctcagagcattagctgacccttgaactattcaaatgggcacattagctagtataacagacttacataggtgggcctaaagcaagctccttaactgagcaaaatttggggcttatgagaatgaaagggtgtgaaattgactaacagacaaatcatacatctcagtttctcaattctcatgtaaatcagagaatgcctttaaagaataaaactcaattgttattcttcaaaa

SEQ ID NO: 133088 - DNA, 1385 bp, Homo sapiens
  misc_feature (100)..(100): n is a, c, g, or t
gcaaaccttaagctgaatgaacaacttttcttctcttgaatatatcttaacgccaaattttgagtgcttttttgttacccatcctcatatgtcccagctngaaagaatcctgggttggagctactgcatgttgattgttttgtttttccttttggctgttcattttggtggctactataaggaaatctaacacaaacagcaactgttttttgttgtttacttttgcatctttacttgtggagctgtggcaagtcctcatatcaaatacagaacatgatcttcctcctgctaatgttgagcctggaattgcagcttcaccagatagcagctttattcacagtgacagtccctaaggaactgtacataatagagcatggcagcaatgtgaccctggaatgcaactttgacactggaagtcatgtgaaccttggagcaataacagccagtttgcaaaaggtggaaatttccagtaacagaaacagatgggttgccaatagagttattttttatctatagcttcctctgggtactagaagaggctattgagactatgagctcacagacagggcttcgcacaaactcaaatcataattgacatgttttatggattactggaatcttgatagcataatgaagttgttctaattaacagagagcatttaaatatacactaagtgcacaaattgtggagtaaagtcatcaagctctgtttttgaggtctaagtcacaaagcatttgttttaacctgtaatggcaccatgtttaatggtggttttttttttgaactacatctttcctttaaaaattattggtttctttttatttgtttttaccttagaaatcaattatatacagtcaaaaatatttgatatgctcatacgttgtatctgcagcaatttcagataagtagctaaaatggccaaagccccaaactaagcctccttttctggccctcaatatgactttaaatttgacttttcagtgcctcagtttgcacatctgtaatacagcaatgctaagtagtcaaggcctttgataattggcactatggaaatcctgcaagatcccactacatatgtgtggagcagaagggtaactcggctacagtaacagcttaattttgttaaatttgttctttatactggagccatgaagctcagagcattagctgacccttgaactattcaaatgggcacattagctagtataacagacttacataggtgggcctaaagcaagctccttaactgagcaaaatttggggcttatgagaatgaaagggtgtgaaattgactaacagacaaatcatacatctcagtttctcaattctcatgtaaatcagagaatgcctttaaagaataaaactcaattgttattcttcaaaa

SEQ ID NO: 133089 - DNA, 294 bp, Homo sapiens
atatgcgataagattgcagggaacagtatagttctatagacttaagtgtgaacatagtcctcatttatagtccctagtctcccatggctcacgcagcttggtctttatgtgtttctgaatttagtgctgcagaggcacaatggggtctggtttctggatcttatacagacaagcacttaggtcagctgcagtggatgtcctgcacagacaccgtcgcaactcttgcctggttcctttttgtttttggagatggagtctcgctctgtctcccaggctggagtgcagtggcgcgat

SEQ ID NO: 133090 - DNA, 584 bp, Homo sapiens
gtctgtggggctttaggtcctccatcgctctggctgggggactcaccgtgcaaagcccatggagaaagggggcactggaagtccgtgcatgcatactgagatcttgaagaaacatcaccccttatctggccgcagaatgtgggtgtcagtgtggtggtgctgtatgtgcatctgtgtgtgtgtgtgagtgtgcatgactgtaggtgtgtgtgcggcatgtgatcaaatccaggtaactgagcatgacatttgtggctgattgtgtgcctgtgtgtgtatcggtgggtgtgcagtatttgtgtgtggtgtgtctgggtgtgtggggatgagaaatgaacagtagcgataatgcacatcagcaaatatgttttaggccgagctcggtgactcacacctgtaattccagcactttgagaggccaaagagagcagattacttgaggtcaggagttcgagcccagtctggccaacatggtgaaaccccatctctactataactacaaaaattagctgggcgtggtggcccacacctgtagttccagttactagggaggctgaggcaggaggatcacttgaacccgggag

SEQ ID NO: 133091 - DNA, 543 bp, Homo sapiens
tagaactgttgagagactggggctcagaagaaaggcgtcccccagggtctcagggcaagatggtagcagagaaggggaccctgaatggtcagagaccctgggaaggatctgtgtttgccctaagcttgaaccgtacctcctgagtttgtctctctaatgcaccctccgagtgtcatccaactactgcttaaataccaccaatggcagggagctcactaccaccaagtggtccatgcccgtcgttagttggttcagaatgttagaaagttccttcatttgacaaacttctttcttgaattcctgtaatgtgttgagcagttttctagacatgggatgccatgaactggtccttcagagtccctgccctcagtggagagacaaacaggaacctatacacagcagcatagggaagagagggagggaggagagtccagctcgtgcttagcagtgcagaggacacaaggccacaggagagggtgagggggctttttgcattagttgacattgagcagtgtcgactaagttgagagctgggtgacagga

SEQ ID NO: 133092 - DNA, 217 bp, Homo sapiens
ctttcccttacatttttaattaaaatcaatctggatgagcttttctgattttaggataataagtttgtttgttacgttttattatattgtaaatcaacaaagaatgcagtggaaatatattttcgcagagaaagcaaatatcaattccactataagaaaagcattaatttctgcagtatgtttattaattgttttccaggacagaggttataggcaa

SEQ ID NO: 133093 - DNA, 625 bp, Homo sapiens
ctagcattgcgatcttgagcaagacacactctgcacttatctccagaggccctttcagctcaatgaattgttactactttggggtatgtggtgtttaaagttctggtgggacatacatccttgtatgttaagttgcctttccttcttagctagcatttatttactttcctagtacttgagtttctcttccactttctctttgttttacctgtttttggttaaccttttacttaggctatggattatcactataagattaagactaaaagaaaaataggaggacagagctaacagggtggttagtaaattaataatgaagcttcccaggtcctcctctcccttcttccctccccgcgtcccaggtaagtactcaaagatactgcagcgagtctttttttttttttttaagaatacttttaagggaatgggaaaagacaattgttgcgttttcatccatttattctgccaacttttcctatctttcttttccctgtgttcctgatatgtaggtcatatcgtttaacttgcttttcatgtaccgtctgtagctgtgtgtgtgtgcctgtgtatgtgtatgtgtgcgcgcactttaaatcaggggcaattttgtgtcccagaggacatt

SEQ ID NO: 133094 - DNA, 291 bp, Homo sapiens
aatcactctggcagctgtacagacaatggatcagggtgaggtcacagcctgggtggggctaattaaaagggtactgaggtttcctggagaacagcgatgacagcctgaactaaattttaatagaacttagtacccacaaaatctctttagcctatcatgggctgcagcatcagtggagcgtctatcatggaggcagtgcctcaggaacaggcaatcctttcccagtaaatactgtgcagggcttttcacccccacctgctactgaggtcctggcataacacataacatttg

SEQ ID NO: 133095 - DNA, 261 bp, Homo sapiens
gaaaacagcatggtggaaactctccccatgattcaattacctccacctgatgtctcccttgacatgtggggattatggggattacagttcaagatgagatttgggtggggacacaaagcctaaccatatcacagggtttcaaaaactgaagattgaaacccctccctcaaaaggtttgcagtccacctggaaaacacccaccatattactttggagaatgatggtgatttgaagccgactttgtttttggtggactgtgtt

SEQ ID NO: 133096 - DNA, 512 bp, Homo sapiens
taccactgttcccctggctgggaaagaaggactggtttagcacaaaaaatctgtcccttatgacatttcacatatacatttggccccaataaaactcatttcttgggccaagtgcggtggctcatgactgtagtctcagcactgtgggaggccaaggcaggcagatcacctgaacccaggagttcaagaccagcctgggtaacatagtgaggctccatctctacaaaacataaaaaagaaagaaaggggcaaaaaaagatttcttgatttttttaacagcagctcaaatcctggcatttaatcaaagagactgccagtagcccaccttgtgtagctgtgaagggcaactgtggcccatgctcagagcagcatctgcattaagtatgagcccagtatctaaactacaattactttgcaagtttcccttcttccccaatgcaaagtactttagagtactttatacttttcaaaaacactttcacgtattatctcatttgagtctaccaataagc

SEQ ID NO: 133097 - DNA, 460 bp, Homo sapiens
aagagctgacagcttacaacctgcggtgagtgcattttcctgcacctccctgccttgtgggggccatggtggcattgctgaagctcctctggcccccattctgctgtgactgtgtcccagtcagggggttgcaaggctctgccagacccccattcttcctcagccaccacacctccccaaatgccttttcaatgcctggacctctcgctccccactcctctctgcccatgtggcctcttcctcctccaaatgcactcatacataagtcagggctttccagagaaacagaacaaacagggtgtatgtggagagaggagagaggagagcagggagagaggaggaaggagagcagggaaagagaggacaggaaggtgggggagatgagaggagaggaaagggagagagggggaagagacagatgttgaggaattggctcatgtgattgtggaggcttggtgag

SEQ ID NO: 133098 - DNA, 280 bp, Homo sapiens
ctaacatagtcacagtttctggggaagtcgatacaggagatgttattttgtgtacaatccttgataaataatttaaaattttaatacatactttatttatgcctacaaattaaatattgacatataccatataaatgtattttagctcttataatttacaaattagatgaattaatcatacaagagatctatatcgttgtaaacttgactgcttttcataatctatattatagatgaaattcatgatttagttatccaggtttttttttttttcaggtcc

SEQ ID NO: 133099 - DNA, 402 bp, Homo sapiens
cagtacccaacgcgctgaagtgttgcgcgcggagcgcgcgcttccctagtggtttccgcaggctatggccggacacttagacctagtctggcaccagcgggacgtgctcctcgtccccacccccgatggggagggccctgagcgggtagtgctcgctagtgtggcggagctgggtcttggcttcactgagctgacttaagtcttagtttctgttttgttttccaaagcgccctggcggcggagagtaagggcctcggaggcggaatcttgcgtcctgggggcgggcacctctcccacccaaaaggcacccgacaggcgaaaaacgatccgccaagtagcaactgggggcggggggcaaatggaagaatgaggttccacgcgggagctgtagggcgcagcaag

SEQ ID NO: 133100 - DNA, 329 bp, Homo sapiens
ctattaagcagaataaggactccagtccaggcagtctagtaccaaaggccttccttgtaatcgctgtgctttaccacctctcagagaacaaccacagggactaagcagtctagtgaagcttcaaatgctgtacgtttcagagaatggggaggtccctggctgtcacagaagcttcctggagaagtaggatcatgtaagttctaactcagggcaggtcagggtgatgtgagtgaccaactcactcggaacacagacattcatgggtgttcagtaaaaccggttctagaaccagtgatgacttcagcccaaggatcccacaagggaaagtg

SEQ ID NO: 133101 - DNA, 803 bp, Homo sapiens
gaggctgtaggtgggctccgctgggtaaaagttgccgcagcagctgtcccttggccccatcgcgatttatttttcccccttgctttccgggtcccgggatcccaagtttgtaactaacgggagcgaatccacacccgagcaaaatgtttgcgagtttcaggcgcccttagttgaaaggctgtaattaacaagtccgctgtttgccagccaggcgccgttgcaggcgctttctgtggattgtcatttatttctcacagcaaccctaggagatgaaattgaatcatggaagaatgcctttatctgaggagtcatcaccactagggagctatggaggctgttatccttgacatctgcagcagcccttccaagctgtggagaccaggtcatctggaatgcccatttatgtcaatggaagaaagaaaaaggggtctcctcccatcctcaccactgcattctcccaccaaccctgctcctgtcccacttcccacaactcagttgttgacaatttaacagtgggtttctggaaacagtgctgcctccttgatggtctaactaactaccagagttattctaacagcaggaatttcaagccaggtaaggggagctatgtcaggctgccagatggtggggaagacaggtgtgggtgagctggcttcagactaaaggaagaggagatcaagtgttggaatcacatttgagaaaaggagtcaagtgaacttcattacccattatagaggcctgttatatcctttagtgctatttggacttggattgaacctgtgacaaatccttttcttatgctt

SEQ ID NO: 133102 - DNA, 387 bp, Homo sapiens
cctcttctggggctggaatggtccgtgtgcactctaatgcgcattgagtgggcacacggaccgcgccacccaccagcggcggcgaataacttggtgagaaaactgaggcccaaccagcttgaagtgtcatccaaggtcactccgcagtctgtcttcatgggctgaagcctcctgtgacctgtgtttatcgtacctccagagcctacgggagccttcctgtcaggctgctcgtcctgaatgcccagcggcgtctccatggtgggaagatgctgcggaagagaacacgactcccaccttcacatcgacaaggaactttatcattgctccaaaaacgcccacacagtctgtatcctagcgactctggagagctcctcccagcctctcatg

SEQ ID NO: 133103 - DNA, 182 bp, Homo sapiens
agctctctgtaggacagctctttcaaccagctgttgaaaggtctgaggatatcattcacttccttcataacttcaatacagtcacttccacccaacccaatttaatccaatctatccatctatccacccacctactcatccatccatccactcaactatccatccatccacccacttgctca

SEQ ID NO: 133104 - DNA, 508 bp, Homo sapiens
aaagaaaagaaagaaaaatgatgtgggtagcactcacttagcatgatgtctggtacacacgggcaatggtatcttgtatcatcatcatcatcctcttcattttttgttattgtcatttaaagtctttcagccagtaagcggcaaagctagcatttaaatcatagacgcttgcctctgcaaagctgcaaaaacaaataaaaataataataaatcacagaccaagccaggtgtggtggcttacgcctgtaatcctagcactttgggaggccgaggagggaagatcacgaggtcaagagagggagaccatcctggccaacatggtgaaacaccgtctctactaaaaatacaaaaattagctgggtgtggtggcgcctgcctgtagtcccagctacttgggagactgaggcaggagaatcacttgaacccgggaagcagaggttgcagtgagctgagatcacaccactgcactccagcccgttgacagagtgagactctgtctcaaaaaaat

SEQ ID NO: 133105 - DNA, 794 bp, Homo sapiens
cagaacagcatcaccatagctacagaaatgacataaaataaaatacaaagagagcccggcgtggtatgccccgcctgtagtcctggctactccggaggctgaggcggaaggatcgcttgagcccgggagttcaaggatatagagaaacatgttcccgcctctgagtaccactgtattccagcgtggttgacatagggagaccccacctcctgtagtcccagccactcgggaggctgaggcaggaggattgcttgagcctgggacattgaggctgcagtgagttgtgatcccaccactgcactccagtccaggtgacaaagaccttagcatgatgtctggtacacacgggcaatggtatcttgtatcatcatcatcatcctcttcattttttgttattgtcatttaaagtctttcagccagtaagcggcaaagctagcatttaaatcatagacgcttgcctctgcaaagctgcaaaaacaaataaaaataataataaatcacagaccaagccaggtgtggtggcttacgcctgtaatcctagcactttgggaggccgaggagggaagatcacgaggtcaagagagggagaccatcctggccaacatggtgaaacaccgtctctactaaaaatacaaaaattagctgggtgtggtggcgcctgcctgtagtcccagctacttgggagactgaggcaggagaatcacttgaacccgggaagcagaggttgcagtgagctgagatcacaccactgcactccagcccgttgacagagtgagactctgtctcaaaaaaat

SEQ ID NO: 133106 - DNA, 305 bp, Homo sapiens
gtagctgggattacacgtgcccgccgccacacccaactagtttttgtatttgtagtagagaccgtgttggccaagctggtctcgaactcctgacctcaggtggtctgcctgccttggcctccctaagtgctgggattacaggcatgagccaccatgcccagcctaagtctccttttgtaaagaaaataatcatcccatctgtgttttgaatttaaaataagtatgcattttctcaaactggctgtacatgttgttaatctcctagtatgtaggcagcattaccttatgtaaatatctggctagaa

SEQ ID NO: 133107 - DNA, 301 bp, Homo sapiens
cccaaccactctccacccaacaccacaaagagttaagatcaaaggaatcaaaaattttggccatatagcatttatctcttgctgacattagaaagggagaagggggaagtcactcctaggggagtcagactgccaactcttacctaacagcgtaagtttctgcaggctttttttttttttaattttttttttttttagttaatacatatattaggggaatatatagatagacctctttccatatcagaagatgtagattaccttatatttaaaaaaattttttttcttttttttttttttt

SEQ ID NO: 133108 - DNA, 182 bp, Homo sapiens
ccggtgtctctggatgcaagtgtcctctggatgtggctgcaaaacactgtctactgttctcaataaagcatcttgagttttctacacctcgagtaaagccaatccattaattcatttaattttcacagtctaagaacacatttcggtaatataccactgagtacaacaacattgcgatgaaa

SEQ ID NO: 133109 - DNA, 436 bp, Homo sapiens
ccagtgttttaaagtttttaaattttatatctttttttttttttaaacagatttgtaagactccagggcctcccagccgtgaataatctgatggttcctgaaatgactggggaagcagacgcttcgtatggcagttgaagagtgtgtgtctatgtgcatttaaaaccttctttctgtacttacacattcacacgggaagacaggctcattcttgtgcacacttgagagttttacaactgatgaaaattaatttaagaatcagatggagcaacttgacgccagtgggctcaggagcccggggagaaaaatacatcactaatggccagttttccatatggtctgcacgggtaaagaaagtctgcaaaaagaagaaaaaaaaatttgcgcagattaaaccacaaaaatattctccagtttaaagaaggaactaagtgag

SEQ ID NO: 133110 - DNA, 507 bp, Homo sapiens
caggctggagtgcagtggtgcgatcttggctcaccgcaacctctgcctttcggtttcaagcaattcttctgcctcagcctcctgagtagttgggattacaggtgcccaccaccatgctcagatttgtaagactccagggcctcccagccgtgaataatctgatggttcctgaaatgactggggaagcagacgcttcgtatggcagttgaagagtgtgtgtctatgtgcatttaaaaccttctttctgtacttacacattcacacgggaagacaggctcattcttgtgcacacttgagagttttacaactgatgaaaattaatttaagaatcagatggagcaacttgacgccagtgggctcaggagcccggggagaaaaatacatcactaatggccagttttccatatggtctgcacgggtaaagaaagtctgcaaaaagaagaaaaaaaaatttgcgcagattaaaccacaaaaatattctccagtttaaagaaggaactaagtgag

SEQ ID NO: 133111 - DNA, 511 bp, Homo sapiens
ctcgtttagtcctgggtcaagctgagtatctccacgtttaggtgcacaaatactattttgtgaagatcttaaatttgtggtataagaacttgaaggaaatagaactgatttgttacttctaaaagatttgtaagactccagggcctcccagccgtgaataatctgatggttcctgaaatgactggggaagcagacgcttcgtatggcagttgaagagtgtgtgtctatgtgcatttaaaaccttctttctgtacttacacattcacacgggaagacaggctcattcttgtgcacacttgagagttttacaactgatgaaaattaatttaagaatcagatggagcaacttgacgccagtgggctcaggagcccggggagaaaaatacatcactaatggccagttttccatatggtctgcacgggtaaagaaagtctgcaaaaagaagaaaaaaaaatttgcgcagattaaaccacaaaaatattctccagtttaaagaaggaactaagtgag

SEQ ID NO: 133112 - DNA, 327 bp, Homo sapiens
taaatctgaaatcatccaggtcctccaggccacataataccctggagctgaatttagtcctggaaataactgggaactttcacttttctcctcaatctgaatgtattcacttttaaacactctagaaaaatggcattggaggttcaagtaattgtagattcatgtgggttttgagagtgtgttagagactagggtatgggaggttcatgaatgtcttatttaggagcccatgctttattctgtaggcaatgaagaaccattgaaagtatttgagatgatgagtgacataatcagatttgcattttagaaagatgactctggaagcag

SEQ ID NO: 133113 - DNA, 571 bp, Homo sapiens
gtatttttagtagagacagggtttcactatgttggccaggctggtctcgaactcctgacctcaagtgacccacctgccttggcctcccaaagtgctgggattacagatgtgagccaccgcgcctggccactaccttggtcagatcttaagttagtgttgactagtaaactctagcatgtacccattgtttaggttacataattttgccggatttgctttatctgtttctttcatgtggtggtgttgaactatctgcaagtaaatttcagacattatcttttgaaccctaagtactttgatatgcatctcctaagtactttgtcctatattatcccatctaagaaaattaattctaattccttaaaattatctaatatccagtccatattgaaacgtttttcataattgcttttttgaaccaggactcgagcaaggttcagatactgcttttggttttgtttttccagacctcaaaccctcaccctggccacattggtttctgtttcttgagataattcacatatcatacaattctcctatttaaagttttcaattcagtggttttagcatg

SEQ ID NO: 133114 - DNA, 196 bp, Homo sapiens
aatgaccaggtcacacaaaggaaaaaggatcaggattttcaggggaaagaggagaaatagagtgatcataaaatgtattgtccaacctaggacattttccaagacaaatgctacactggtcaggacagtgggaaaacaggcacaaactgggactttcctaggcaaattgaacatatgatcatactggtcaacaatg

SEQ ID NO: 133115 - DNA, 452 bp, Homo sapiens
ggcgttcagaggtccctgtcggtgcggcgtgccgtgctcatcaattctcatttggaaaaagatcattctggtaaaaatactgaaaatgaacactgcgggccggcgtgatggcctgtaatcccagcacttgggaggccgagagggtggatcacctgaggtcagaagtttgagaccaacattcttcttacaacttacaaaatcaacagcccagttccacaaaagcaatagctgctgccatcactttcactcctgctgaattcccaggagcatgggaacagagatcatctgggacacacatgtagcctaaaagttaaagaactctttctgtattgtgataatcattgtcatatgtgaatttcataatttcttaaaatatgttatctatttgcttccttgctagtactcatgtttaaatttatggctataatgttaagggagaaccagcattatat

SEQ ID NO: 133116 - DNA, 726 bp, Homo sapiens
tataacaattcttaacattcctatagggatttttaaatgtagcctaacaaatatatcttaaagtttatatgtaaaataaaagccaaagcaatttggaagaataacaaatcggaccaagagggtggtggtgttggctattttcatgcctgataacaagataaattataaagttatactaacaaaggcactgttactgatgtagggatggacaaatggatgaatgaaaaggaacatggagatcagccaaagacctaagcttatgtatggaaacttgaaatatgattgagatggcattttagttcatttgaacatcataaatcccgaaatagtactacacttggttttccatttgtgaaaaaacaaattctgttccacccacaaggaaataattttctgataggtttcaggacctacatgtgaaaagcaacacataacaactttttgaagtgagtatttggtttataattttaatgtaaggaaggatttctttagacatacaaagaacacataagaaagaaaaacactggcaaattgattatattaaaatttaaggccaggcatggtgtcttatgcctgtaatctcagcactttgggatgggaggccaaggtgggcagatcacttgagctcaagagtttgagaccagcctgggcaacatgacaaaaccccatctctacaaaaaatacaaaaattatccaggcatggtggcatgtgcctttagtcccagc

SEQ ID NO: 133117 - DNA, 446 bp, Homo sapiens
ccttctaagtgattcgatagaagtttttcaaggactgcacatttttgtttttcactatattttgtgcttttgacctacaacttacgcaaccaaattacataagttttcatgtaacacctacattgtcaaaattcaatcaatttatgtagaggagttgccaaaaatagttccatacaatatcaaattatctctctcaaaggactctgcctctttgccttctcccaaggaggtttgttttaagcagatttcctactaggttagtttagttctgcaagtaagaactgggtgtaaatgtagtcagagtaaactataagaggtattattaggaaacattattgttgttatagaacttaatattgacgtatgtcttttaaaaagcattttgtttcccaaaaatcctctgattgcaaatacagtccctttagtgtcttcatagctgccttgat

SEQ ID NO: 133118 - DNA, 680 bp, Homo sapiens
acctcaggtgatccaccagcctcagcctcccagagtgctgggattataggtgtgagccaccgcactcagcctccctttattcttttaagttacgggatgctttttaaaattttgacatatgtgtttttttaataatacttttcctacttttgtatgcttagatgctgtgataaagatctctggctttataatttcaaacaaggaatcattgaataggaaaacatgaaaattaggtcatacacatagtaccagaaaatatcaagtccattggccatgtgatcgtaactgagatagcactgagcaattaatgaccgtgtaccttacgtggcaaagaacccaagctgaaataaataggttcctaaaagacagattatataatttacatacagaattatgacagaatttctagttagtaaaagtatgttagtttaagctttattagttcagttataatggtcactctagtagcaaaaggatggaataataaaatttacttatttagcaagcttttaaatataatataaattaaaagattaaacattgtatagtaaaagttaaaagtcattgaaataaagtttcgggtttttttgggttttttttgtttttgagacagagtctcattctgttgcccaggctggagtgcagtggcacagtctcggctcactgcaacctctgtctcc

SEQ ID NO: 133119 - DNA, 397 bp, Homo sapiens
catgggagctgtagttaagaaaggtgaagatatttattcagtagtctagaaactggcccaaaactgtattacataaaacttccgctctctctggaaagaagcggagggaaacagaagtattggtaacttcctaagtgcaggcatatgctaggcattttaatttaattcagactcctctgtgagattattctcatcttacaaatgaggaaacagaggctcactgaaacttggaacccagctctatctgacccaaagcttctggtctctctatttcatccatgagtggttttgcatttttccacagggcagccaccataactgcccatggtttcctactgctaaatgcaaatatttgaattgccttaggaaaggcataatgcagagtgattgcttagag

SEQ ID NO: 133120 - DNA, 714 bp, Homo sapiens
gcttatttgttagttgtattatatttggcagttggatgacaggatatgttttagaatacctgaataaattagggaggatatatttctttaatatgattgttttaagttgtagatggcactcatggtaatgttttagtaatctaaatgtactcgtgtatgtaattaaagtttggataatcattagtgatattaaacccctcaaaaaattacattcttccctgggtctaggaagcatcttctgagttaatctacactagcagttttaaaactgtgtatgttccctagaacagttagaggtctggaaaggtataagaaattgggtgatcagaattctcagttccctcttgaaagcttcatccagggatgcttaatttttttggttttgtatgttgggatttcacacagacatattttctaattttgctatttcaaaaaatgttgcagtacagacttttatgaacatctgtgatactcctttaatatagaagatgaatcattgggtaaaaagatagtcttatctaaaatttgatagactaccaaattacttcccgaacagtgtttcctagtttatacttctttcaaaatctatggaaacatcatttcttttcatccttgacatcatttaatattaccatttttttaatttaaattttagatcttaaaaatttgaaaatttaccaacttgattagagtgtgtacctgattactagccag

SEQ ID NO: 133121 - DNA, 167 bp, Homo sapiens
aagggcagagaattggtcattgatgatacatctctcaggtatataaagatatgacattagtgggttttttcctgccagtttgtcagagataatgctgcacattttcacaaagcccatttcccttcctcctgggcacacaggtagattacattccccagcctcctctg

SEQ ID NO: 133122 - DNA, 290 bp, Homo sapiens
ccattgagcacctgccaacagagaagttgaggaagagcctaccatgactgtcaaaagtcctaatcagggaaaagggaaagccaccatcctgtccagattaggcagcctggtcagtggagagagctgataagaagaaccaggatgaaaattgctgaagagcatctcaaacacaattagaacacaggtgcaactaattctccacaaatgcctttgagatgtacattgcctatcaattgcaactttattttcaggacagttatgattaagtcaatttaaacctatagttatcc

SEQ ID NO: 133123 - DNA, 104 bp, Homo sapiens
gcagggaataggatgaaaatgaacaactttaccctctcatacttcaacaagctccagaaaactgaatctgctttgtaagtagcttcagttaatgaggattatta

SEQ ID NO: 133124 - DNA, 121 bp, Homo sapiens
agagagaactcagtctaattcagggatccaacattctccttgaattaaggagcgagaatcaaggttttaggaaagacaaggcggctgaagtttgccgggcagtgcactgaagaggacagag

SEQ ID NO: 133125 - DNA, 428 bp, Homo sapiens
tctcactttctagtacagtatctaacttatttgggtttattttctgcttccttctcctactagaatgcaagtttttgcaagaaggaagattgtctcttttatgtcactaaaatctatgagagtatccctagagcctgtaacagttcctgacatattgtatgtatcacatacaatagatgaagatggtcagtaaacacttgctgaggacaaagaagtgtcgaacacttggctgggcacagtggcgcacacttataatcccaggactttgggaggcttaggtgggtgaatcacctgaggtcaggagtttgagaccagcctggccaacacgttgaaaccccgtctctactaaaaatataaaaattagctgggtgtggtggtgcatgcctataatcccagctactcagaaggctgaggcaggagaattgctt

SEQ ID NO: 133126 - DNA, 819 bp, Homo sapiens
gaggaataagacccaaatgaatgaacccccatcagtcattcgtatcccccagctgatgaggatttcagcagttgtgctgacaccttgatcttgggctagccaccctccccttgctctgccatggagcttggtcaccttgtaccatggtcaaaataatggtgctctctttcaaaagccatccttagatttccagctaatagtgtgtagaaaagagaaaacataattttttagtaccccaaattctaggttatctactgcactgaatgatctaaaatatcaagtaggcgctttcagcaaagctgttagaaatataaatagaaaaaataggaaagattatttgtgggaccattcaaactaagactgttgttgttctcattattattgttgtttttaaaggacactgtccatatattgcaagacatgttgcccactgcccttcacctatgggattatataaacgcaatcctattttttaaatagttgtgcagaaaatcgagaagggagctaccttaactgtgtattcagttcttgagtgacaaagacaggcgtgagagagagagtcccttgcttccaaatcacccctcctttgcctcacccttttcaggacaaaccgactaccagaaatgaatctaacccatgtggtcactacaggatttatctgggcatttgctgaacctgctcgcaatttatttttatttcttccgatagacatggatttggcacaggggagtgaattctttttgaagcagcagatgtgcctggtacacccgtttgctgtaaccatttgtgctgtggttgaaaaaaatttttttaagagtg

SEQ ID NO: 133127 - DNA, 419 bp, Homo sapiens
tagaacaagcaaaaagcacaatgagtgtgaaagggctctggccctcaagtctggctgcacgttggaatcacctggtgagcttaaaaatactggcacctagatgccaccccagagattctgatttaattagtctggggtgcagtctaggcatcaacatttttaagagttttccaggtgtttctacatatgcaatgaagtttgaaaaccactgggctagggcagtacttctcaaactttaattagtatagaagttacctggggatttttgtaaaaaatatagaccctgattcagtaggtctggggtgaggcctgagattcagcatttctcataagttctaataagatgatgtttctgggccatgggccttgcttagcagcaagaatccagaaaatgtagtgattgctgtggctactgttag

SEQ ID NO: 133128 - DNA, 454 bp, Homo sapiens
ctgttagcagaagtaaatagccatcatcacaatagctggtctttatcaatgcgtagcatgtaccacgtgcacggtgtgcgttgacctttattcctggtgataactgcatgtggtaggtgctatcatcctcctgattttaaagacaggttaaggccggtcgcagtggctcacgcctgtaatcccagcactttgggaggctgagagatcatgccactgcactccatcctgggcaacagagcaagactctgtctcaaaataaataaataaagagagattaagtaacctgcccacagtcatgcaactggcagctgggatgcaaagctaggtcacttgcatttttgcccttccttgctgcctcttgcagccaaaaggggacttgaaacccaggtccctgtgcaggagggagccatgaggcttgggaggctgagcgtggctgctgcgacacagctctgtg

SEQ ID NO: 133129 - DNA, 269 bp, Homo sapiens
catcattatccattagacacttagagggaaaatgactgcatttgggtttggggataaaagggccaccatttcctcccacaaaggcaggtgtctttctctcagaacacgtggttattaaatattgctgttattaatattgtgaaacgacatcagactcaaacccttctcccagcagaacaggagaaggaggctggctcccctcccctgatctgtttctcctaggctgaccggaggggtgtcccgtcccccgctttccctcgacggttctg

SEQ ID NO: 133130 - DNA, 840 bp, Homo sapiens
agcaatagaacctggtttctatgaaaaataagaaccattaaacatttcagtctcatcgaactcaaccaaatcaagccaggcaattttttgagaatttaaggtcagaatcccaatatcttaactacatttcccaatctaaaaaaaagtgccaggactgaagcaacttttaaaagaaaggaaactggctgggtgagatggcttgtgcctgtaatcctagcactttgggaggctgaggcaggaggatcacttgagctcaagagtttgagaccagcctagccaacatggtgaaaccccatctccaataaaaatacaaaaattagccaggcatggtgacaaacacctgtatttccagctactcaggagaccgaggcagaagaattgcttgaacctggaaggcggaggttgcagtgagctgagatggtgccactgcactccagcctgggcgacagagtgagactctgtctaaaaaaaaattaattaataaataaaaataaaagaaaggaaacagtaaactttgctcatgttgattatgttttctagcactttcataaatttgaaaatttatgtgcaatgaatccaagattgccaattgagaagtaattgctatttgacactactgttgggtgatctagacgaagactatttcatgatacgctgaagcgctgcattcatatgtattccttcatgttctaaaacaactgtgcatgtcctccaaatagtcttaacatttagtagactttgaaactactcacctatcaaatttttgcttaaaaaacagattgccggccaggtgctgtgcctcctcatgcctgtaatcccagcactttgggaggccaaggc

SEQ ID NO: 133131 - DNA, 503 bp, Homo sapiens
gtaacattgctgaaaaacagagacaaagaaaagaaagatgcggtatattaaaaagagcaataataactgacaaatgacaccacagaagacaaaagaatatactatatggttcaaagaaacaattgtcacctaaagttctgtatgattaaaattgaaaatgaaatatcctttaaaaaatgaaatattcttaacattaaaggtgaaataaagatatttgcagacaagcaaaaattgagagaattcagcagccgcagattgcattaaagaaatactaaggacttttcttcaggagagaggaatattacttttgacagctgcttggagattgtaggaaggaatgaagcggtaaggttaacatgtgggaacctctaaatgaatattaaaggcatggtacagaaatgagaaagagaggaggtaaacagaacccagtgaataagtttacaacagtttaaacacagcacatatccactttcaatgccttcatttccaggaacatatttttt

SEQ ID NO: 133132 - DNA, 384 bp, Homo sapiens
ccccctttaaattcctctagcctagtggctccaaacctttttgagtatgagggttcatttttatcatcagaaaccttctggaagcttcacataacaacaggtgtgctttgagtaactgttttaaagaaaattcgaggacagaacctactcctaatccagtcatgcttcgaaatgaagttctgtcttgtcatcaaaacagcatcagtgtaactctgagagcaggccttacctgtatgtgtgtgacacctggaatttgacctttgtgctgcctccagttgggagcctcctgtcatccctactgcctcccttttctgaaaccttacctggcttaatccaagaccgtctccctcaggaaccattcatcattttaacaccttatattcc

SEQ ID NO: 133133 - DNA, 1138 bp, Homo sapiens
cacttttctaagtcttaagagtacaaaagagtatgagatagaagaatatgatacgtgagagagatactgtggggacgggctcatgaaatcctcgctgaggaagtgaaattaagctgaaatctgatttacaagaaagagccaaccatgtgaatatcaaaggaaagaatatcctaggcagagggaagagctcttagagacctatagtgagaataagcttgatatatttgagggactaagagaaggtaagtggcttaatgcctggtggggaaagaggaatgccatacaatgagggtaggaagtaagcagaggcttacttacattacacagcagagtgtgttttcatcagaatgttataagaagctgttctgagggttttaaacaaagaggtgacctaaatattttacattttgtaaatcctttggtacaggagataagtgggcacaagtgaggaatgatgtttgtacagcagtgatagtaatggagttggactggcaaggatggatttgagatacattttgaacttagatggtaagacttgcttggtactttgaatgcggacattggagttaaagagcagaatcagagatagcttagattctttgacctaagcaaaatgacagataagtagtgccagttactaagatggctgaggatttggagagaaaaatgaagcattttgttgtgctaatttcagatatgcctacgagacatcccaggtagagctgttaatgaggcacttatcgtcctgaggtcaaagagtaggactgaatataaagatttgggcatcattggttttaagtggaatgtaaagcatgtgactgggagagtatgtggtaaacaatggaaggaagccccagaaaagccagccagaggaagaagagccagcaaaggaaatgaagaggtctttgtgatagaagaaaaccagcagagaggtgtcatggaagctaagaagaaaatgatttttagaagagagtgctcagctgtccttttatgaaaaagcaacctatacccaaaacttagttttaaaagcccaaattacaagattttggactctgtaatattccctatgtacttcaaacatgtagtgagaaaagaatgttgaaaattagcttagtgccacagagtggtagaggccttt

SEQ ID NO: 133134 - DNA, 794 bp, Homo sapiens
atgtatgccttgttgcacatctcaacccttgaaatcagataggacaccaccaccttcatatcccacattttctccttgaagtacttttaatcacagtgacctgcaaaaacatagcttcatagagatacattatcaaagggaatgtcacgtgcgtgatcgtactttgaagctgaactgtctcgagcgagtagttcacgcggtgtcctgcagatactgcggtggccgtttccctcaaatgtcagatatccatttggcgcccttctgagttatctgcagtgccccggggtgcctcagctcagtttgggggtggttaggctgaagacatttgctaacaagtcctgttgttgaattagttccaactcaggttcagaggctttttagagctggaaacactggcagagtcaaagttcatgggaggtgattaaccaaaccagatattagggaaccagaagggcgacattttccactgataggcaaaagtccaaaaaccccacagtgtcagggctgtttgccaagtcagcaagtctgtgaagatcgcttccaagctggttctgttactgccagcgccccctggcgatgctactcaaggcttacttgagaaccatcagcagctaggaaggaggacaagtctactaagcggggaggggggaggaatagcattaggagatatacctaatgctaaatgacaagttaatgggtgcagcacaccaacatggcacatgtatacatatgtaacaaacctgcacattgtgcacatgtaccctaaaacttaaagtataataataaataaaatt

SEQ ID NO: 133135 - DNA, 387 bp, Homo sapiens
tgttcaaatccccattctgccacttactgtgtgaccctggacaagtcacttcccatctctgagccatgttcttcaggctaagtactggatatgggtgataggcattgagaaatcagggaggttatgtagttagaaggttatgcaccctttcagagaagggtgggaaggtcctgcccaggcatagaatctggaggagaaaagaatgtagggtgtgtgggagagtctggagatgggcgttacccccagaggtaggaggtgctgagggcgattccctcccactcatccttcggggctctgctagggtggcacctcctcccagaccctcccaggttccctggtgcctgtgttgagagtctctgccttgggtttggtcgcctctctgcccat

SEQ ID NO: 133136 - DNA, 442 bp, Homo sapiens
agcagctctgtggtaggagagtgagcctagaagatgaccccatgcagcctagtggccctcagagggcagaatccagacataggcctgctgcctccatgcccacaggcgctcctgcagcatgcacagcttagaagcaccaggtttgatatgaggagagggatccttatccacatctccttgaagcacacaacagtcagaaaactgtaggcaaggatcaaggcctcgtgcagggacagggcagggtcttccccaggccccgtgtcttgggaaggaggaaagccggggctgggtgagatgaggctcggcctgagggagttcatctggaccagagggctgcttgcagcccatctcaacaaagactcgctgctcctcactgctcggtgtcgtgcaggtgtgccactgcgagccgggcgggcagcccagccccataggtagtgggcag

SEQ ID NO: 133137 - DNA, 326 bp, Homo sapiens
tcctgacctcaagtgatccgcccacgttggcctcccaaagtgctgggattacaggtgtgagccactgcacccagcccggatgagtgttcttaaattggctcagtgggctgctccccaaaccctcaggcctgggtcagccctggatcccaggggaggtcatgccactccagatacttaggccctccttgtggaggatgtcgaaaggcacacatacatgatttgtggcatctgatgtcatctttccccagagtatctgcttagcctgaaaagtatgtcacctttttcacttattatcagttctatttcttaatttggtagacactgtg

SEQ ID NO: 133138 - DNA, 299 bp, Homo sapiens
acgtcaagggaccctcccaaagtgctgggattacaggtgtgagccacccgcacttggcctgtatttgtatttaggacattagactagggttggcaaacattttctgtaaagagccagagagtaaatattttcagctttatgggccattagtcatagccattcagctctgcctttagagcaggaaagtagccgtggacaatatataaatgggcatgaccaggtttgacctgcaggcgaccatgcattaaattgcaagaaaacatctcaggcacaattatgctaagaagttacagtgagat

SEQ ID NO: 133139 - DNA, 416 bp, Homo sapiens
gctgaacttgcaacatgtgagaacattttgtgcaaaggagacaacctggagctccagaggacctacactcagtgaatgggcttggtcctacatccaaatatacatgaggacatgcagagaaatgttcaagtatataggtatcatttttgtggttccctattttaacttatttaaaaatgtagtaacagtatttttaacataggcaaaaggagagaaaataatgtatttccatatactcaaactaggttaaacagttacaaagatttttgacacatttgcttcatctatcccatattttatttctctctcaagtattttaatgcaaattcttgaaaacaatcacccctacagacgtcagcagacatctgcagaaatattttaagccagcttttgattgctgaccaacctgtggtaca

SEQ ID NO: 133140 - DNA, 655 bp, Homo sapiens
cgccgagcctcggagagcaggggctttgcttttccggctgaggtgttcaataaacatctcttaaacaaaggagtgcgcaagtgagataatataagggggatgcccaactatacaacaaagagttgccaaacatttctctggagcaaataaatggtgtgatggatggaactaactggatcaccaacctgtgagagatggctggttcactggccttggcctcctcgggccatgacattaattcactggctccaccctccaccctgttctatggccctgggcgtgacttgctcttgccccttgccttctgtttggatcctgccaatgaggactcctagcaggagatgggggctctcatatttaactgaaaggctcagctccacgcagcgtttctgtctccagcccacacagcacgatgagataaagactagaggctgctcactgctgagagtggaccatccagctcatttggtcacataatttccagccagccaccttatgggcaagattttggctcacctgtaagctattagctggaaaatactggcttcatgaaatggcttggaagatttggaggcaacctaaatgtccatcaacagatgaatggataaagaacaacagggtgactaaagtcaataataatttaattatacattta

SEQ ID NO: 133141 - DNA, 6848 bp, Homo sapiens
agtccgcctgctactcggtcccggcgctgggctgaggggaggggttgtcttaaaagtctctccttccccctgtaggggcggccggcgagtcccagtgagagcggagggtgccagaggtagggggccgagaaacaaagttcccggggcttcctccggggccgcggtcggggctgcgcgtttgaccgcccccctcctcgcgaaggcaatggcttccaaactcctgcgcgcggtcatcctcgggccgcccggctcgggcaagggcaccgtgtgccagaggatcgcccagaactttggtctccagcatctctccagcggccacttcttgcgggagaacatcaaggccagcaccgaagttggtgagatggcaaagcagtatatagagaaaagtcttttggttccagaccatgtgatcacacgcctaatgatgtccgagttggagaacaggcgtggccagcactggctccttgatggttttcctaggacattaggacaagccgaagccctggacaaaatctgtgaagtggatctagtgatcagtttgaatattccatttgaaacacttaaagatcgtctcagccgccgttggattcaccctcctagcggaagggtatataacctggacttcaatccacctcatgtacatggtattgatgacgtcactggtgaaccgttagtccagcaggaggatgataaacccgaagcagttgctgccaggctaagacagtacaaagacgtggcaaagccagtcattgaattatacaagagccgaggagtgctccaccaattttccggaacggagacgaacaaaatctggccctacgtttacacacttttctcaaacaagatcacacctattcagtccaaagaagcatattgaccctgcccaatggaagaaccaggaagatgtggtcattcattcaatagtgtgtgtagtattggtgctgtgtccaaattagaagctagctgaggtagcttgcagcatcttttctagttgaaatggtgaactgataggaaaacaaatgagtagaaagagttcatgaagaggccctcctctgcctttcaaaaggctggtcacctacacatgtttaaggtgtctctgcacatgtctcaagcccatcacaagaaagcaagtacagtgtggatttcaaatggtgtgtaacttcagctccagctggtttttgacagctgttgctgtggtaatatttttgacatgtgatggtgatagtctctggttctccccatccccacaaaggctgttgaaccacagcaccaggaagcctgagaatgaatcctgagggctctagcccaggctttgtcccaggctttctggtgtgtgccctcctggtaacagtgaaattgaagctacttactcatagtggttgtttctctggtcttgagtgactgtgtccacagttcatttttttccggtaggaataactccttttctacatccacgctccatagagtctctccttttcagacatcctgggatgaaagaatttggcttttttttttctttttttttttggacatctgttttcactcttaggcttttaaacaatagttattgcttttatccctctcagattctaataactgagagcgatggggctatattgaatctctgtatgcactgagaactgagctatgaagaggatcttattaaactgctggtctgactttatggattgacactgttcctttcttttattgtgaaaaaaaaaaaaaaccctgaaagtcttgggaaccccctaaagtcttttgggaatcctcaaaaagcatgggaagttaagtatttagctacataaatgttgtaagatcatatcttatgtatagaagtaataagaccatttggaattactggactaattgaatagttaaggtttctattcgggacaataaaatgtattttgaaagtgctgctaactattgatgctgacagtgtttcactcctatgagtgacccaaacatattataaatatgtggtaaagggaatggagcctgtggggttgagcagaatgttgtactagctgtgcctggactgagtataacagctttatgattatgagaaaacaaattctttattttttttttctgttccaaagattcatcctatggggtggccataaagtctagaattagatactaatattttgtcattcattataacatatcaataaaccatttgttaaaagatttgcctggtttccagacttggtggccaccttgaataattcttgctgtcttctgggaaggatgatgaaatttattcctgctgccttaaaaatatgtatcccttcttcacccatcatgactgtccccagtgagtgtcctttactattcttgggagtgactcctgtctaacttttcatactggcgagaagaaaagaagcctattttaacactttagtggtgttgaaacacattacttactttctgaagatgtcccagtgaatcctctgtcaattcactgccatatgtaatctatatgataaggaatgcatcttccttctaagtactgcccaaactcttgccagctcctctcccattgtcccttcatgtgaatatttcttggctaccttagtggaaatatagatcagttttctccccatccatcctctcaaacataatgagattgtttactttttagatttatgcagtgaaaatgcccagtcaggtctgaatcgtcagtgcattatattgactctgagcactttagaatttagagttgcaattgaatgccagctgtggagatggggtgcatatcagatatataaataaagctcaggtttgctagggaaccaggtatagagaaaaataagtctgatatgaggaaaattgcacaatttagagtagttatgccgtagagaaaatttccacaaactaggaaatgtagagagttattctatagaatactcaaaagaggaaagtatgtgatttttggaaacaggaaaatcttcaaacttctttcttcacttccctttgtgtttagctgaccctccaatgtgatcattgcctttggagtttgggagaggtacgggaagtggcctgatccctgcttccatacttcactcctccatccatccttccctccctcttcccctccagctaaatggacaattctagccaacattgagtcactcaataagtctcaacagtgggtgtgtttgctgagattgtccagcggttgagcagtttggtctcacctccctcgctagttgagaccaaaaagagacaaataactttttcatggtctttgaaacataatgcttatttcgtggtcaatggctttaaaaaaatctgtttcttgttttcttcaacaaactcactagttttcccttaaatgatattgtaaaaattaaagtaatcttgaaaatgttttgacaaaagtaaaattaaagggacatcttttaaaacttgttttgtttttttttttctattgccacacatgaccgttccttcacctttaagcaaagagagtggttcagatggtttctaagatgccaacctgacctcgcattctgtcattctacccagctcttaattcaatttgcttccattatcctaacaggcttctttcttacttagaacttggaaaggctgctgtatttaataccctccaacactaacgcagacttaagataggtactgtttattgaaaacctactgagtgaaatgtgcggttttaggaccttcataaacatctcatttaatctttctagcatcctgtgaaacagccatgatttcacgttgataaacaaagaagacaggggtcccagggatgtgaagcatcttgcccaggcttctgctgctggtgaccagtgtagccaggactccaacccaggttttcctgactcagaagactgagctttttcctggatgttattaatagctaattgtgtccaagcaaccaagggccttgagtctgcttggttctgcttatggcctcacatcaagaaatggagctagtccatgtctgtagtcccaatgctttgggaagccatgatgggaaggttgtcggaggccaaaagttcaagaccaggctgggcaatatcacaagactccatctctacggaaaagtaaaaaattagccagtcatggtggtgtacacttatggtcctagttactcaggagacttaggcaggaggattgcttgatcctaggaattcgaggctgcagtgagctatgattgcacctctgcacccaagcctgggcgacacagcgagaccctctctcttaaaaaaaaaaaatagcagagctcaccaaagtgatgttcacctttttatgacattcctttttcttagcttaagaaaagaaagctgctagatgagagtcttagttttcctgcataagacctcctttatgaatagaataaaagactgtcaaagtaggctgggcttgggcccaggctaatctatgaaggaagcaagctcgtgttccttacctatccttttggtgtccattggattgtgccccgaagtggcctttacccttgagccgtccccagccatggtgctcacacataggcttttgagctccttggagctatccagatcctgctcacttttccttcctgagatcagaacaaatcacccccttactcccactccaaacaaggccttgatgataaactaatccttcctaaaatgctggtaggtaaacaagcaatgatgaagcattgaacacaggttaactcctgacttttgtaccattgtctattccattacacattaacatgactctgaatgccagatccaaacctttgcccaccatctgcttgtcgtgcaacagttgaggcagtaaccaggggagattcacttcctgtcttgtccttccccagggatcacccccctgctgccctctagcagccaaactcagatgagttccattgttaccctaggtgtgcccatctctttggtagggaaggagaaaggtaagaatagccatcagtgaggaaggattcttggagcgaggagccactgtggtttttcctgctatttaagatgttgagaccggataactttagaaagatacctgcacaaacccataaatagtgcttttataaagtttagttcaccggaacctgagttcagtatttgacattagctttttgtccaaagagttgaagcctgctggaggtctttgctcaaataataaataccacatatttccaagtgtgttcaggtataggcactaggtactgtctgtttacttcatgttaggcacattacatgcattggctaatcaaatcctcatcaattacatatgtaataatctaaacttgcctccttgtattataaatggaaataatcctgtttatttaaacgggttttcatgtacctgtagggattaggaaactcaaatggcctttttaatacctttccctagtttgagctccctgttctctttaacagataaaacaacatatttgcttcagcctggaatctgtttttggtgctttggtgcagagacaggaaatgggcactcagagtcacactggtagttgcacactgtatctacagagggcgtgtctcatctgtactctgctgggttacaggatttcagtaggtatttgtgtccacctgagaattctgtttattacctttcatttgacagtgtctttcctttctgcagttgattttgctagagaggcaattcataaggtgaggtcctgttcatagtatgacttgctttctcaatatctccttcaatttttagtaactcttggtctatttggtgtctttaaaaaaaataacctagtaataaagacttcttttaatgtggaaatgtggtctggtagtaagttatttctttccacatgtaactgacccaatctggtttccaaatgagaagtgtgcaggccccagaggttgagaagccatatttcaactgtgaaaaaaatctgcttcctgcatctgttgaaatatagttgttcatacttgccatcccttatctttcttgtaacaatttgcacagttcttgccagaataaatgccattatctgtatgtttcagggagttccccaatttgatcatttttgtgtgtgtgtggtgtgtgtgtgagagagagagatactgcagtaaaacatttctaaaggatgaaagctcttgtatggcatagatatgaattccttcctctggtaataattaggttattcccagaagcacagtgtcattctttaaataaaagctttcctgtttaaagcttttcaaaggagcagaccaccttgaagattccccctagggttgatatgtgtctaattcattttataaaaattattcttgtcttcattttaaagctttggctatatagtcagaaatgtcctaaataacaaactattttgtatttaatttagggaagactaaagggaagaaaaatgaaaactcagtctttatgtaagctccaaggatattagggcttaaagggcttttctagttttatgagaatttgtactactgatttttatatattcctgtttttgagatgaacagatctctggggaaattgttgagttacaatggcatttcactgtgatccctctcaagctcagatcagttctataacccaatgacaacctgtctctttggtttactgtcctgtgaaatgtcagctcaagtttcccagaagtcgtgtgtttatgatgagtcagagtgcttttcctcggtgggacagttgctggccctcttaattttggtgtatgtgcttccaagtatctaaacctccagtctgatctgtatatgctatcctaactgttaattgtattattgattatgttgattatcttgcttgaaggttcatacttttcaatttgatagaaataaagtttttttctgcttatagctagcgaa

SEQ ID NO: 133142 - DNA, 6794 bp, Homo sapiens
agtccgcctgctactcggtcccggcgctgggctgaggggaggggttgtcttaaaagtctctccttccccctgtaggggcggccggcgagtcccagtgagagcggagggtgccagaggtagggggccgagaaacaaagttcccggggcttcctccggggccgcggtcggggctgcgcgtttgaccgcccccctcctcgcgaaggcaatggcttccaaactcctgcgcgcggtcatcctcgggccgcccggctcgggcaagggcaccgtgtgccagaggatcgcccagaactttggtctccagcatctctccagcggccacttcttgcgggagaacatcaaggccagcaccgaagttggtgagatggcaaagcagtatatagagaaaagtcttttggttccagaccatgtgatcacacgcctaatgatgtccgagttggagaacaggcgtggccagcactggctccttgatggttttcctaggacattaggacaagccgaagccctggacaaaatctgtgaagtggatctagtgatcagtttgaatattccatttgaaacacttaaagatcgtctcagccgccgttggattcaccctcctagcggaagggtatataacctggacttcaatccacctcatgtacatggtattgatgacgtcactggtgaaccgttagtccagcaggaggatgataaacccgaagcagttgctgccaggctaagacagtacaaagacgtggcaaagccagtcattgaattatacaagagccgaggagtgctccaccaattttccggaacggagacgaacaaaatctggccctacgtttacacacttttctcaaacaagatcacacctattcagtccaaagaagcatattgaccctgcccaatggaagaaccaggaagatgtggtcattcattcaatagtgtgtgtagtattggtgctgtgtccaaattagaagctagctgaggtagcttgcagcatcttttctagttgaaatggtgaactgataggaaaacaaatgagtagaaagagttcatgaagaggccctcctctgcctttcaaaaggctggtcacctacacatgtttaaggtgtctctgcacatgtctcaagcccatcacaagaaagcaagtacagtgtggatttcaaatggtgtgtaacttcagctccagctggtttttgacagctgttgctgtggtaatatttttgacatgtgatggtgatagtctctggttctccccatccccacaaaggctgttgaaccacagcaccaggaagcctgagaatgaatcctgagggctctagcccaggctttgtcccaggctttctggtgtgtgccctcctggtaacagtgaaattgaagctacttactcatagtggttgtttctctggtcttgagtgactgtgtccacagttcatttttttccggtaggaataactccttttctacatccacgctccatagagtctctccttttcagacatcctgggatgaaagaatttggcttttttttttctttttttttttggacatctgttttcactcttaggcttttaaacaatagttattgcttttatccctctcagattctaataactgagagcgatggggctatattgaatctctgtatgcactgagaactgagctatgaagaggatcttattaaactgctggtctgactttatggattgacactgttcctttcttttattgtgaaaaaaaaaaaaaaccctgaaagtcttgggaaccccctaaagtcttttgggaatcctcaaaaagcatgggaagttaagtatttagctacataaatgttgtaagatcatatcttatgtatagaagtaataagaccatttggaattactggactaattgaatagttaaggtttctattcgggacaataaaatgtattttgaaagtgctgctaactattgatgctgacagtgtttcactcctatgagtgacccaaacatattataaatatgtggtaaagggaatggagcctgtggggttgagcagaatgttgtactagctgtgcctggactgagtataacagctttatgattatgagaaaacaaattctttattttttttttctgttccaaagattcatcctatggggtggccataaagtctagaattagatactaatattttgtcattcattataacatatcaataaaccatttgttaaaagatttgcctggtttccagacttggtggccaccttgaataattcttgctgtcttctgggaaggatgatgaaatttattcctgctgccttaaaaatatgtatcccttcttcacccatcatgactgtccccagtgagtgtcctttactattcttgggagtgactcctgtctaacttttcatactggcgagaagaaaagaagcctattttaacactttagtggtgttgaaacacattacttactttctgaagatgtcccagtgaatcctctgtcaattcactgccatatgtaatctatatgataaggaatgcatcttccttctaagtactgcccaaactcttgccagctcctctcccattgtcccttcatgtgaatatttcttggctaccttagtggaaatatagatcagttttctccccatccatcctctcaaacataatgagattgtttactttttagatttatgcagtgaaaatgcccagtcaggtctgaatcgtcagtgcattatattgactctgagcactttagaatttagagttgcaattgaatgccagctgtggagatggggtgcatatcagatatataaataaagctcaggtttgctagggaaccaggtatagagaaaaataagtctgatatgaggaaaattgcacaatttagagtagttatgccgtagagaaaatttccacaaactaggaaatgtagagagttattctatagaatactcaaaagaggaaagtatgtgatttttggaaacaggaaaatcttcaaacttctttcttcacttccctttgtgtttagctgaccctccaatgtgatcattgcctttggagtttgggagaggtacgggaagtggcctgatccctgcttccatacttcactcctccatccatccttccctccctcttcccctccagctaaatggacaattctagccaacattgagtcactcaataagtctcaacagtgggtgtgtttgctgagattgtccagcggttgagcagtttggtctcacctccctcgctagttgagaccaaaaagagacaaataactttttcatggtctttgaaacataatgcttatttcgtggtcaatggctttaaaaaaatctgtttcttgttttcttcaacaaactcactagttttcccttaaatgatattgtaaaaattaaagtaatcttgaaaatgttttgacaaaagtaaaattaaagggacatcttttaaaacttgttttgtttttttttttctattgccacacatgaccgttccttcacctttaagcaaagagagtggttcagatggtttctaagatgccaacctgacctcgcattctgtcattctacccagctcttaattcaatttgcttccattatcctaacaggcttctttcttacttagaacttggaaaggctgctgtatttaataccctccaacactaacgcagacttaagataggtactgtttattgaaaacctactgagtgaaatgtgcggttttaggaccttcataaacatctcatttaatctttctagcatcctgtgaaacagccatgatttcacgttgataaacaaagaagacaggggtcccagggatgtgaagcatcttgcccaggcttctgctgctggtgaccagtgtagccaggactccaacccaggttttcctgactcagaagactgagctttttcctggatgttattaatagctaattgtgtccaagcaaccaagggccttgagtctgcttggttctgcttatggcctcacatcaagaaatggagctagtccatgtctgtagtcccaatgctttgggaagccatgatgggaaggttgtcggaggccaaaagttcaagaccaggctgggcaatatcacaagactccatctctacggaaaagtaaaaaattagccagtcatggtggtgtacacttatggtcctagttactcaggagacttaggcaggaggattgcttgatcctaggaattcgaggctgcagtgagctatgattgcacctctgcacccaagcctgggcgacacagcgagaccctctctcttaaaaaaaaaaaatagcagagctcaccaaagtgatgttcacctttttatgacattcctttttcttagcttaagaaaagaaagctgctagatgagagtcttagttttcctgcataagacctcctttatgaatagaataaaagactgtcaaagtaggctgggcttgggcccaggctaatctatgaaggaagcaagctcgtgttccttacctatccttttggtgtccattggattgtgccccgaagtggcctttacccttgagccgtccccagccatggtgctcacacataggcttttgagctccttggagctatccagatcctgctcacttttccttcctgagatcagaacaaatcacccccttactcccactccaaacaaggccttgatgataaactaatccttcctaaaatgctggtaggtaaacaagcaatgatgaagcattgaacacaggttaactcctgacttttgtaccattgtctattccattacacattaacatgactctgaatgccagatccaaacctttgcccaccatctgcttgtcgtgcaacagttgaggcagtaaccaggggagattcacttcctgtcttgtccttccccagggatcacccccctgctgccctctagcagccaaactcagatgagttccattgttaccctaggtgtgcccatctctttggtagggaaggagaaaggtaagaatagccatcagtgaggaaggattcttggagcgaggagccactgtggtttttcctgctatttaagatgttgagaccggataactttagaaagatacctgcacaaacccataaatagtgcttttataaagtttagttcaccggaacctgagttcagtatttgacattagctttttgtccaaagagttgaagcctgctggaggtctttgctcaaataataaataccacatatttccaagtgtgttcaggtataggcactaggtactgtctgtttacttcatgttaggcacattacatgcattggctaatcaaatcctcatcaattacatatgtaataatctaaacttgcctccttgtattataaatggaaataatcctgtttatttaaacgggttttcatgtacctgtagggattaggaaactcaaatggcctttttaatacctttccctagtttgagctccctgttctctttaacagatacaggaaatgggcactcagagtcacactggtagttgcacactgtatctacagagggcgtgtctcatctgtactctgctgggttacaggatttcagtaggtatttgtgtccacctgagaattctgtttattacctttcatttgacagtgtctttcctttctgcagttgattttgctagagaggcaattcataaggtgaggtcctgttcatagtatgacttgctttctcaatatctccttcaatttttagtaactcttggtctatttggtgtctttaaaaaaaataacctagtaataaagacttcttttaatgtggaaatgtggtctggtagtaagttatttctttccacatgtaactgacccaatctggtttccaaatgagaagtgtgcaggccccagaggttgagaagccatatttcaactgtgaaaaaaatctgcttcctgcatctgttgaaatatagttgttcatacttgccatcccttatctttcttgtaacaatttgcacagttcttgccagaataaatgccattatctgtatgtttcagggagttccccaatttgatcatttttgtgtgtgtgtggtgtgtgtgtgagagagagagatactgcagtaaaacatttctaaaggatgaaagctcttgtatggcatagatatgaattccttcctctggtaataattaggttattcccagaagcacagtgtcattctttaaataaaagctttcctgtttaaagcttttcaaaggagcagaccaccttgaagattccccctagggttgatatgtgtctaattcattttataaaaattattcttgtcttcattttaaagctttggctatatagtcagaaatgtcctaaataacaaactattttgtatttaatttagggaagactaaagggaagaaaaatgaaaactcagtctttatgtaagctccaaggatattagggcttaaagggcttttctagttttatgagaatttgtactactgatttttatatattcctgtttttgagatgaacagatctctggggaaattgttgagttacaatggcatttcactgtgatccctctcaagctcagatcagttctataacccaatgacaacctgtctctttggtttactgtcctgtgaaatgtcagctcaagtttcccagaagtcgtgtgtttatgatgagtcagagtgcttttcctcggtgggacagttgctggccctcttaattttggtgtatgtgcttccaagtatctaaacctccagtctgatctgtatatgctatcctaactgttaattgtattattgattatgttgattatcttgcttgaaggttcatacttttcaatttgatagaaataaagtttttttctgcttatagctagcgaa

SEQ ID NO: 133143 - DNA, 7007 bp, Homo sapiens
  misc_feature (185)..(186): n is a, c, g, or t
  misc_feature (223)..(224): n is a, c, g, or t
agcggagccgccggggaggggacgagacgcagaccacacgttgcccacgtgcgaggaccgggcaggggctcagcccctaggccgcccggtgcgtggggctggcgggggctggctttgagtcacccccgcttgtgccagcttccccggctcggcggagactggcttggggatgcctggccgcccgnnccccttctcggacgcggcgtggggagcgagctggagnnaaggatgaaggggcggccggcgagtcccagtgagagcggagggtgccagaggtagggggccgagaaacaaagttcccggggcttcctccggggccgcggtcggggctgcgcgtttgaccgcccccctcctcgcgaaggcaatggcttccaaactcctgcgcgcggtcatcctcgggccgcccggctcgggcaagggcaccgtgtgccagaggatcgcccagaactttggtctccagcatctctccagcggccacttcttgcgggagaacatcaaggccagcaccgaagttggtgagatggcaaagcagtatatagagaaaagtcttttggttccagaccatgtgatcacacgcctaatgatgtccgagttggagaacaggcgtggccagcactggctccttgatggttttcctaggacattaggacaagccgaagccctggacaaaatctgtgaagtggatctagtgatcagtttgaatattccatttgaaacacttaaagatcgtctcagccgccgttggattcaccctcctagcggaagggtatataacctggacttcaatccacctcatgtacatggtattgatgacgtcactggtgaaccgttagtccagcaggaggatgataaacccgaagcagttgctgccaggctaagacagtacaaagacgtggcaaagccagtcattgaattatacaagagccgaggagtgctccaccaattttccggaacggagacgaacaaaatctggccctacgtttacacacttttctcaaacaagatcacacctattcagtccaaagaagcatattgaccctgcccaatggaagaaccaggaagatgtggtcattcattcaatagtgtgtgtagtattggtgctgtgtccaaattagaagctagctgaggtagcttgcagcatcttttctagttgaaatggtgaactgataggaaaacaaatgagtagaaagagttcatgaagaggccctcctctgcctttcaaaaggctggtcacctacacatgtttaaggtgtctctgcacatgtctcaagcccatcacaagaaagcaagtacagtgtggatttcaaatggtgtgtaacttcagctccagctggtttttgacagctgttgctgtggtaatatttttgacatgtgatggtgatagtctctggttctccccatccccacaaaggctgttgaaccacagcaccaggaagcctgagaatgaatcctgagggctctagcccaggctttgtcccaggctttctggtgtgtgccctcctggtaacagtgaaattgaagctacttactcatagtggttgtttctctggtcttgagtgactgtgtccacagttcatttttttccggtaggaataactccttttctacatccacgctccatagagtctctccttttcagacatcctgggatgaaagaatttggcttttttttttctttttttttttggacatctgttttcactcttaggcttttaaacaatagttattgcttttatccctctcagattctaataactgagagcgatggggctatattgaatctctgtatgcactgagaactgagctatgaagaggatcttattaaactgctggtctgactttatggattgacactgttcctttcttttattgtgaaaaaaaaaaaaaaccctgaaagtcttgggaaccccctaaagtcttttgggaatcctcaaaaagcatgggaagttaagtatttagctacataaatgttgtaagatcatatcttatgtatagaagtaataagaccatttggaattactggactaattgaatagttaaggtttctattcgggacaataaaatgtattttgaaagtgctgctaactattgatgctgacagtgtttcactcctatgagtgacccaaacatattataaatatgtggtaaagggaatggagcctgtggggttgagcagaatgttgtactagctgtgcctggactgagtataacagctttatgattatgagaaaacaaattctttattttttttttctgttccaaagattcatcctatggggtggccataaagtctagaattagatactaatattttgtcattcattataacatatcaataaaccatttgttaaaagatttgcctggtttccagacttggtggccaccttgaataattcttgctgtcttctgggaaggatgatgaaatttattcctgctgccttaaaaatatgtatcccttcttcacccatcatgactgtccccagtgagtgtcctttactattcttgggagtgactcctgtctaacttttcatactggcgagaagaaaagaagcctattttaacactttagtggtgttgaaacacattacttactttctgaagatgtcccagtgaatcctctgtcaattcactgccatatgtaatctatatgataaggaatgcatcttccttctaagtactgcccaaactcttgccagctcctctcccattgtcccttcatgtgaatatttcttggctaccttagtggaaatatagatcagttttctccccatccatcctctcaaacataatgagattgtttactttttagatttatgcagtgaaaatgcccagtcaggtctgaatcgtcagtgcattatattgactctgagcactttagaatttagagttgcaattgaatgccagctgtggagatggggtgcatatcagatatataaataaagctcaggtttgctagggaaccaggtatagagaaaaataagtctgatatgaggaaaattgcacaatttagagtagttatgccgtagagaaaatttccacaaactaggaaatgtagagagttattctatagaatactcaaaagaggaaagtatgtgatttttggaaacaggaaaatcttcaaacttctttcttcacttccctttgtgtttagctgaccctccaatgtgatcattgcctttggagtttgggagaggtacgggaagtggcctgatccctgcttccatacttcactcctccatccatccttccctccctcttcccctccagctaaatggacaattctagccaacattgagtcactcaataagtctcaacagtgggtgtgtttgctgagattgtccagcggttgagcagtttggtctcacctccctcgctagttgagaccaaaaagagacaaataactttttcatggtctttgaaacataatgcttatttcgtggtcaatggctttaaaaaaatctgtttcttgttttcttcaacaaactcactagttttcccttaaatgatattgtaaaaattaaagtaatcttgaaaatgttttgacaaaagtaaaattaaagggacatcttttaaaacttgttttgtttttttttttctattgccacacatgaccgttccttcacctttaagcaaagagagtggttcagatggtttctaagatgccaacctgacctcgcattctgtcattctacccagctcttaattcaatttgcttccattatcctaacaggcttctttcttacttagaacttggaaaggctgctgtatttaataccctccaacactaacgcagacttaagataggtactgtttattgaaaacctactgagtgaaatgtgcggttttaggaccttcataaacatctcatttaatctttctagcatcctgtgaaacagccatgatttcacgttgataaacaaagaagacaggggtcccagggatgtgaagcatcttgcccaggcttctgctgctggtgaccagtgtagccaggactccaacccaggttttcctgactcagaagactgagctttttcctggatgttattaatagctaattgtgtccaagcaaccaagggccttgagtctgcttggttctgcttatggcctcacatcaagaaatggagctagtccatgtctgtagtcccaatgctttgggaagccatgatgggaaggttgtcggaggccaaaagttcaagaccaggctgggcaatatcacaagactccatctctacggaaaagtaaaaaattagccagtcatggtggtgtacacttatggtcctagttactcaggagacttaggcaggaggattgcttgatcctaggaattcgaggctgcagtgagctatgattgcacctctgcacccaagcctgggcgacacagcgagaccctctctcttaaaaaaaaaaaatagcagagctcaccaaagtgatgttcacctttttatgacattcctttttcttagcttaagaaaagaaagctgctagatgagagtcttagttttcctgcataagacctcctttatgaatagaataaaagactgtcaaagtaggctgggcttgggcccaggctaatctatgaaggaagcaagctcgtgttccttacctatccttttggtgtccattggattgtgccccgaagtggcctttacccttgagccgtccccagccatggtgctcacacataggcttttgagctccttggagctatccagatcctgctcacttttccttcctgagatcagaacaaatcacccccttactcccactccaaacaaggccttgatgataaactaatccttcctaaaatgctggtaggtaaacaagcaatgatgaagcattgaacacaggttaactcctgacttttgtaccattgtctattccattacacattaacatgactctgaatgccagatccaaacctttgcccaccatctgcttgtcgtgcaacagttgaggcagtaaccaggggagattcacttcctgtcttgtccttccccagggatcacccccctgctgccctctagcagccaaactcagatgagttccattgttaccctaggtgtgcccatctctttggtagggaaggagaaaggtaagaatagccatcagtgaggaaggattcttggagcgaggagccactgtggtttttcctgctatttaagatgttgagaccggataactttagaaagatacctgcacaaacccataaatagtgcttttataaagtttagttcaccggaacctgagttcagtatttgacattagctttttgtccaaagagttgaagcctgctggaggtctttgctcaaataataaataccacatatttccaagtgtgttcaggtataggcactaggtactgtctgtttacttcatgttaggcacattacatgcattggctaatcaaatcctcatcaattacatatgtaataatctaaacttgcctccttgtattataaatggaaataatcctgtttatttaaacgggttttcatgtacctgtagggattaggaaactcaaatggcctttttaatacctttccctagtttgagctccctgttctctttaacagataaaacaacatatttgcttcagcctggaatctgtttttggtgctttggtgcagagacaggaaatgggcactcagagtcacactggtagttgcacactgtatctacagagggcgtgtctcatctgtactctgctgggttacaggatttcagtaggtatttgtgtccacctgagaattctgtttattacctttcatttgacagtgtctttcctttctgcagttgattttgctagagaggcaattcataaggtgaggtcctgttcatagtatgacttgctttctcaatatctccttcaatttttagtaactcttggtctatttggtgtctttaaaaaaaataacctagtaataaagacttcttttaatgtggaaatgtggtctggtagtaagttatttctttccacatgtaactgacccaatctggtttccaaatgagaagtgtgcaggccccagaggttgagaagccatatttcaactgtgaaaaaaatctgcttcctgcatctgttgaaatatagttgttcatacttgccatcccttatctttcttgtaacaatttgcacagttcttgccagaataaatgccattatctgtatgtttcagggagttccccaatttgatcatttttgtgtgtgtgtggtgtgtgtgtgagagagagagatactgcagtaaaacatttctaaaggatgaaagctcttgtatggcatagatatgaattccttcctctggtaataattaggttattcccagaagcacagtgtcattctttaaataaaagctttcctgtttaaagcttttcaaaggagcagaccaccttgaagattccccctagggttgatatgtgtctaattcattttataaaaattattcttgtcttcattttaaagctttggctatatagtcagaaatgtcctaaataacaaactattttgtatttaatttagggaagactaaagggaagaaaaatgaaaactcagtctttatgtaagctccaaggatattagggcttaaagggcttttctagttttatgagaatttgtactactgatttttatatattcctgtttttgagatgaacagatctctggggaaattgttgagttacaatggcatttcactgtgatccctctcaagctcagatcagttctataacccaatgacaacctgtctctttggtttactgtcctgtgaaatgtcagctcaagtttcccagaagtcgtgtgtttatgatgagtcagagtgcttttcctcggtgggacagttgctggccctcttaattttggtgtatgtgcttccaagtatctaaacctccagtctgatctgtatatgctatcctaactgttaattgtattattgattatgttgattatcttgcttgaaggttcatacttttcaatttgatagaaataaagtttttttctgcttatagctagcgaa

SEQ ID NO: 133144 - DNA, 6639 bp, Homo sapiens
gcggggccgcgccccccggaacctgtggggcgggggggctcgcagcctcgcgcctctccagcccctccacgcagcctcgggcctcggggcagagccctgggtggctttgaaaggcctgtctgttcgttgtcgccttctaagaagttggtgagatggcaaagcagtatatagagaaaagtcttttggttccagaccatgtgatcacacgcctaatgatgtccgagttggagaacaggcgtggccagcactggctccttgatggttttcctaggacattaggacaagccgaagccctggacaaaatctgtgaagtggatctagtgatcagtttgaatattccatttgaaacacttaaagatcgtctcagccgccgttggattcaccctcctagcggaagggtatataacctggacttcaatccacctcatgtacatggtattgatgacgtcactggtgaaccgttagtccagcaggaggatgataaacccgaagcagttgctgccaggctaagacagtacaaagacgtggcaaagccagtcattgaattatacaagagccgaggagtgctccaccaattttccggaacggagacgaacaaaatctggccctacgtttacacacttttctcaaacaagatcacacctattcagtccaaagaagcatattgaccctgcccaatggaagaaccaggaagatgtggtcattcattcaatagtgtgtgtagtattggtgctgtgtccaaattagaagctagctgaggtagcttgcagcatcttttctagttgaaatggtgaactgataggaaaacaaatgagtagaaagagttcatgaagaggccctcctctgcctttcaaaaggctggtcacctacacatgtttaaggtgtctctgcacatgtctcaagcccatcacaagaaagcaagtacagtgtggatttcaaatggtgtgtaacttcagctccagctggtttttgacagctgttgctgtggtaatatttttgacatgtgatggtgatagtctctggttctccccatccccacaaaggctgttgaaccacagcaccaggaagcctgagaatgaatcctgagggctctagcccaggctttgtcccaggctttctggtgtgtgccctcctggtaacagtgaaattgaagctacttactcatagtggttgtttctctggtcttgagtgactgtgtccacagttcatttttttccggtaggaataactccttttctacatccacgctccatagagtctctccttttcagacatcctgggatgaaagaatttggcttttttttttctttttttttttggacatctgttttcactcttaggcttttaaacaatagttattgcttttatccctctcagattctaataactgagagcgatggggctatattgaatctctgtatgcactgagaactgagctatgaagaggatcttattaaactgctggtctgactttatggattgacactgttcctttcttttattgtgaaaaaaaaaaaaaaccctgaaagtcttgggaaccccctaaagtcttttgggaatcctcaaaaagcatgggaagttaagtatttagctacataaatgttgtaagatcatatcttatgtatagaagtaataagaccatttggaattactggactaattgaatagttaaggtttctattcgggacaataaaatgtattttgaaagtgctgctaactattgatgctgacagtgtttcactcctatgagtgacccaaacatattataaatatgtggtaaagggaatggagcctgtggggttgagcagaatgttgtactagctgtgcctggactgagtataacagctttatgattatgagaaaacaaattctttattttttttttctgttccaaagattcatcctatggggtggccataaagtctagaattagatactaatattttgtcattcattataacatatcaataaaccatttgttaaaagatttgcctggtttccagacttggtggccaccttgaataattcttgctgtcttctgggaaggatgatgaaatttattcctgctgccttaaaaatatgtatcccttcttcacccatcatgactgtccccagtgagtgtcctttactattcttgggagtgactcctgtctaacttttcatactggcgagaagaaaagaagcctattttaacactttagtggtgttgaaacacattacttactttctgaagatgtcccagtgaatcctctgtcaattcactgccatatgtaatctatatgataaggaatgcatcttccttctaagtactgcccaaactcttgccagctcctctcccattgtcccttcatgtgaatatttcttggctaccttagtggaaatatagatcagttttctccccatccatcctctcaaacataatgagattgtttactttttagatttatgcagtgaaaatgcccagtcaggtctgaatcgtcagtgcattatattgactctgagcactttagaatttagagttgcaattgaatgccagctgtggagatggggtgcatatcagatatataaataaagctcaggtttgctagggaaccaggtatagagaaaaataagtctgatatgaggaaaattgcacaatttagagtagttatgccgtagagaaaatttccacaaactaggaaatgtagagagttattctatagaatactcaaaagaggaaagtatgtgatttttggaaacaggaaaatcttcaaacttctttcttcacttccctttgtgtttagctgaccctccaatgtgatcattgcctttggagtttgggagaggtacgggaagtggcctgatccctgcttccatacttcactcctccatccatccttccctccctcttcccctccagctaaatggacaattctagccaacattgagtcactcaataagtctcaacagtgggtgtgtttgctgagattgtccagcggttgagcagtttggtctcacctccctcgctagttgagaccaaaaagagacaaataactttttcatggtctttgaaacataatgcttatttcgtggtcaatggctttaaaaaaatctgtttcttgttttcttcaacaaactcactagttttcccttaaatgatattgtaaaaattaaagtaatcttgaaaatgttttgacaaaagtaaaattaaagggacatcttttaaaacttgttttgtttttttttttctattgccacacatgaccgttccttcacctttaagcaaagagagtggttcagatggtttctaagatgccaacctgacctcgcattctgtcattctacccagctcttaattcaatttgcttccattatcctaacaggcttctttcttacttagaacttggaaaggctgctgtatttaataccctccaacactaacgcagacttaagataggtactgtttattgaaaacctactgagtgaaatgtgcggttttaggaccttcataaacatctcatttaatctttctagcatcctgtgaaacagccatgatttcacgttgataaacaaagaagacaggggtcccagggatgtgaagcatcttgcccaggcttctgctgctggtgaccagtgtagccaggactccaacccaggttttcctgactcagaagactgagctttttcctggatgttattaatagctaattgtgtccaagcaaccaagggccttgagtctgcttggttctgcttatggcctcacatcaagaaatggagctagtccatgtctgtagtcccaatgctttgggaagccatgatgggaaggttgtcggaggccaaaagttcaagaccaggctgggcaatatcacaagactccatctctacggaaaagtaaaaaattagccagtcatggtggtgtacacttatggtcctagttactcaggagacttaggcaggaggattgcttgatcctaggaattcgaggctgcagtgagctatgattgcacctctgcacccaagcctgggcgacacagcgagaccctctctcttaaaaaaaaaaaatagcagagctcaccaaagtgatgttcacctttttatgacattcctttttcttagcttaagaaaagaaagctgctagatgagagtcttagttttcctgcataagacctcctttatgaatagaataaaagactgtcaaagtaggctgggcttgggcccaggctaatctatgaaggaagcaagctcgtgttccttacctatccttttggtgtccattggattgtgccccgaagtggcctttacccttgagccgtccccagccatggtgctcacacataggcttttgagctccttggagctatccagatcctgctcacttttccttcctgagatcagaacaaatcacccccttactcccactccaaacaaggccttgatgataaactaatccttcctaaaatgctggtaggtaaacaagcaatgatgaagcattgaacacaggttaactcctgacttttgtaccattgtctattccattacacattaacatgactctgaatgccagatccaaacctttgcccaccatctgcttgtcgtgcaacagttgaggcagtaaccaggggagattcacttcctgtcttgtccttccccagggatcacccccctgctgccctctagcagccaaactcagatgagttccattgttaccctaggtgtgcccatctctttggtagggaaggagaaaggtaagaatagccatcagtgaggaaggattcttggagcgaggagccactgtggtttttcctgctatttaagatgttgagaccggataactttagaaagatacctgcacaaacccataaatagtgcttttataaagtttagttcaccggaacctgagttcagtatttgacattagctttttgtccaaagagttgaagcctgctggaggtctttgctcaaataataaataccacatatttccaagtgtgttcaggtataggcactaggtactgtctgtttacttcatgttaggcacattacatgcattggctaatcaaatcctcatcaattacatatgtaataatctaaacttgcctccttgtattataaatggaaataatcctgtttatttaaacgggttttcatgtacctgtagggattaggaaactcaaatggcctttttaatacctttccctagtttgagctccctgttctctttaacagataaaacaacatatttgcttcagcctggaatctgtttttggtgctttggtgcagagacaggaaatgggcactcagagtcacactggtagttgcacactgtatctacagagggcgtgtctcatctgtactctgctgggttacaggatttcagtaggtatttgtgtccacctgagaattctgtttattacctttcatttgacagtgtctttcctttctgcagttgattttgctagagaggcaattcataaggtgaggtcctgttcatagtatgacttgctttctcaatatctccttcaatttttagtaactcttggtctatttggtgtctttaaaaaaaataacctagtaataaagacttcttttaatgtggaaatgtggtctggtagtaagttatttctttccacatgtaactgacccaatctggtttccaaatgagaagtgtgcaggccccagaggttgagaagccatatttcaactgtgaaaaaaatctgcttcctgcatctgttgaaatatagttgttcatacttgccatcccttatctttcttgtaacaatttgcacagttcttgccagaataaatgccattatctgtatgtttcagggagttccccaatttgatcatttttgtgtgtgtgtggtgtgtgtgtgagagagagagatactgcagtaaaacatttctaaaggatgaaagctcttgtatggcatagatatgaattccttcctctggtaataattaggttattcccagaagcacagtgtcattctttaaataaaagctttcctgtttaaagcttttcaaaggagcagaccaccttgaagattccccctagggttgatatgtgtctaattcattttataaaaattattcttgtcttcattttaaagctttggctatatagtcagaaatgtcctaaataacaaactattttgtatttaatttagggaagactaaagggaagaaaaatgaaaactcagtctttatgtaagctccaaggatattagggcttaaagggcttttctagttttatgagaatttgtactactgatttttatatattcctgtttttgagatgaacagatctctggggaaattgttgagttacaatggcatttcactgtgatccctctcaagctcagatcagttctataacccaatgacaacctgtctctttggtttactgtcctgtgaaatgtcagctcaagtttcccagaagtcgtgtgtttatgatgagtcagagtgcttttcctcggtgggacagttgctggccctcttaattttggtgtatgtgcttccaagtatctaaacctccagtctgatctgtatatgctatcctaactgttaattgtattattgattatgttgattatcttgcttgaaggttcatacttttcaatttgatagaaataaagtttttttctgcttatagctagcgaa

SEQ ID NO: 133145 - DNA, 6586 bp, Homo sapiens
cagtccaggcatgaagaggataatgagcttaacatacctgtgagaagtttcaggtggaggtatctggtggccttcggcacagcaagtgaagttggtgagatggcaaagcagtatatagagaaaagtcttttggttccagaccatgtgatcacacgcctaatgatgtccgagttggagaacaggcgtggccagcactggctccttgatggttttcctaggacattaggacaagccgaagccctggacaaaatctgtgaagtggatctagtgatcagtttgaatattccatttgaaacacttaaagatcgtctcagccgccgttggattcaccctcctagcggaagggtatataacctggacttcaatccacctcatgtacatggtattgatgacgtcactggtgaaccgttagtccagcaggaggatgataaacccgaagcagttgctgccaggctaagacagtacaaagacgtggcaaagccagtcattgaattatacaagagccgaggagtgctccaccaattttccggaacggagacgaacaaaatctggccctacgtttacacacttttctcaaacaagatcacacctattcagtccaaagaagcatattgaccctgcccaatggaagaaccaggaagatgtggtcattcattcaatagtgtgtgtagtattggtgctgtgtccaaattagaagctagctgaggtagcttgcagcatcttttctagttgaaatggtgaactgataggaaaacaaatgagtagaaagagttcatgaagaggccctcctctgcctttcaaaaggctggtcacctacacatgtttaaggtgtctctgcacatgtctcaagcccatcacaagaaagcaagtacagtgtggatttcaaatggtgtgtaacttcagctccagctggtttttgacagctgttgctgtggtaatatttttgacatgtgatggtgatagtctctggttctccccatccccacaaaggctgttgaaccacagcaccaggaagcctgagaatgaatcctgagggctctagcccaggctttgtcccaggctttctggtgtgtgccctcctggtaacagtgaaattgaagctacttactcatagtggttgtttctctggtcttgagtgactgtgtccacagttcatttttttccggtaggaataactccttttctacatccacgctccatagagtctctccttttcagacatcctgggatgaaagaatttggcttttttttttctttttttttttggacatctgttttcactcttaggcttttaaacaatagttattgcttttatccctctcagattctaataactgagagcgatggggctatattgaatctctgtatgcactgagaactgagctatgaagaggatcttattaaactgctggtctgactttatggattgacactgttcctttcttttattgtgaaaaaaaaaaaaaaccctgaaagtcttgggaaccccctaaagtcttttgggaatcctcaaaaagcatgggaagttaagtatttagctacataaatgttgtaagatcatatcttatgtatagaagtaataagaccatttggaattactggactaattgaatagttaaggtttctattcgggacaataaaatgtattttgaaagtgctgctaactattgatgctgacagtgtttcactcctatgagtgacccaaacatattataaatatgtggtaaagggaatggagcctgtggggttgagcagaatgttgtactagctgtgcctggactgagtataacagctttatgattatgagaaaacaaattctttattttttttttctgttccaaagattcatcctatggggtggccataaagtctagaattagatactaatattttgtcattcattataacatatcaataaaccatttgttaaaagatttgcctggtttccagacttggtggccaccttgaataattcttgctgtcttctgggaaggatgatgaaatttattcctgctgccttaaaaatatgtatcccttcttcacccatcatgactgtccccagtgagtgtcctttactattcttgggagtgactcctgtctaacttttcatactggcgagaagaaaagaagcctattttaacactttagtggtgttgaaacacattacttactttctgaagatgtcccagtgaatcctctgtcaattcactgccatatgtaatctatatgataaggaatgcatcttccttctaagtactgcccaaactcttgccagctcctctcccattgtcccttcatgtgaatatttcttggctaccttagtggaaatatagatcagttttctccccatccatcctctcaaacataatgagattgtttactttttagatttatgcagtgaaaatgcccagtcaggtctgaatcgtcagtgcattatattgactctgagcactttagaatttagagttgcaattgaatgccagctgtggagatggggtgcatatcagatatataaataaagctcaggtttgctagggaaccaggtatagagaaaaataagtctgatatgaggaaaattgcacaatttagagtagttatgccgtagagaaaatttccacaaactaggaaatgtagagagttattctatagaatactcaaaagaggaaagtatgtgatttttggaaacaggaaaatcttcaaacttctttcttcacttccctttgtgtttagctgaccctccaatgtgatcattgcctttggagtttgggagaggtacgggaagtggcctgatccctgcttccatacttcactcctccatccatccttccctccctcttcccctccagctaaatggacaattctagccaacattgagtcactcaataagtctcaacagtgggtgtgtttgctgagattgtccagcggttgagcagtttggtctcacctccctcgctagttgagaccaaaaagagacaaataactttttcatggtctttgaaacataatgcttatttcgtggtcaatggctttaaaaaaatctgtttcttgttttcttcaacaaactcactagttttcccttaaatgatattgtaaaaattaaagtaatcttgaaaatgttttgacaaaagtaaaattaaagggacatcttttaaaacttgttttgtttttttttttctattgccacacatgaccgttccttcacctttaagcaaagagagtggttcagatggtttctaagatgccaacctgacctcgcattctgtcattctacccagctcttaattcaatttgcttccattatcctaacaggcttctttcttacttagaacttggaaaggctgctgtatttaataccctccaacactaacgcagacttaagataggtactgtttattgaaaacctactgagtgaaatgtgcggttttaggaccttcataaacatctcatttaatctttctagcatcctgtgaaacagccatgatttcacgttgataaacaaagaagacaggggtcccagggatgtgaagcatcttgcccaggcttctgctgctggtgaccagtgtagccaggactccaacccaggttttcctgactcagaagactgagctttttcctggatgttattaatagctaattgtgtccaagcaaccaagggccttgagtctgcttggttctgcttatggcctcacatcaagaaatggagctagtccatgtctgtagtcccaatgctttgggaagccatgatgggaaggttgtcggaggccaaaagttcaagaccaggctgggcaatatcacaagactccatctctacggaaaagtaaaaaattagccagtcatggtggtgtacacttatggtcctagttactcaggagacttaggcaggaggattgcttgatcctaggaattcgaggctgcagtgagctatgattgcacctctgcacccaagcctgggcgacacagcgagaccctctctcttaaaaaaaaaaaatagcagagctcaccaaagtgatgttcacctttttatgacattcctttttcttagcttaagaaaagaaagctgctagatgagagtcttagttttcctgcataagacctcctttatgaatagaataaaagactgtcaaagtaggctgggcttgggcccaggctaatctatgaaggaagcaagctcgtgttccttacctatccttttggtgtccattggattgtgccccgaagtggcctttacccttgagccgtccccagccatggtgctcacacataggcttttgagctccttggagctatccagatcctgctcacttttccttcctgagatcagaacaaatcacccccttactcccactccaaacaaggccttgatgataaactaatccttcctaaaatgctggtaggtaaacaagcaatgatgaagcattgaacacaggttaactcctgacttttgtaccattgtctattccattacacattaacatgactctgaatgccagatccaaacctttgcccaccatctgcttgtcgtgcaacagttgaggcagtaaccaggggagattcacttcctgtcttgtccttccccagggatcacccccctgctgccctctagcagccaaactcagatgagttccattgttaccctaggtgtgcccatctctttggtagggaaggagaaaggtaagaatagccatcagtgaggaaggattcttggagcgaggagccactgtggtttttcctgctatttaagatgttgagaccggataactttagaaagatacctgcacaaacccataaatagtgcttttataaagtttagttcaccggaacctgagttcagtatttgacattagctttttgtccaaagagttgaagcctgctggaggtctttgctcaaataataaataccacatatttccaagtgtgttcaggtataggcactaggtactgtctgtttacttcatgttaggcacattacatgcattggctaatcaaatcctcatcaattacatatgtaataatctaaacttgcctccttgtattataaatggaaataatcctgtttatttaaacgggttttcatgtacctgtagggattaggaaactcaaatggcctttttaatacctttccctagtttgagctccctgttctctttaacagataaaacaacatatttgcttcagcctggaatctgtttttggtgctttggtgcagagacaggaaatgggcactcagagtcacactggtagttgcacactgtatctacagagggcgtgtctcatctgtactctgctgggttacaggatttcagtaggtatttgtgtccacctgagaattctgtttattacctttcatttgacagtgtctttcctttctgcagttgattttgctagagaggcaattcataaggtgaggtcctgttcatagtatgacttgctttctcaatatctccttcaatttttagtaactcttggtctatttggtgtctttaaaaaaaataacctagtaataaagacttcttttaatgtggaaatgtggtctggtagtaagttatttctttccacatgtaactgacccaatctggtttccaaatgagaagtgtgcaggccccagaggttgagaagccatatttcaactgtgaaaaaaatctgcttcctgcatctgttgaaatatagttgttcatacttgccatcccttatctttcttgtaacaatttgcacagttcttgccagaataaatgccattatctgtatgtttcagggagttccccaatttgatcatttttgtgtgtgtgtggtgtgtgtgtgagagagagagatactgcagtaaaacatttctaaaggatgaaagctcttgtatggcatagatatgaattccttcctctggtaataattaggttattcccagaagcacagtgtcattctttaaataaaagctttcctgtttaaagcttttcaaaggagcagaccaccttgaagattccccctagggttgatatgtgtctaattcattttataaaaattattcttgtcttcattttaaagctttggctatatagtcagaaatgtcctaaataacaaactattttgtatttaatttagggaagactaaagggaagaaaaatgaaaactcagtctttatgtaagctccaaggatattagggcttaaagggcttttctagttttatgagaatttgtactactgatttttatatattcctgtttttgagatgaacagatctctggggaaattgttgagttacaatggcatttcactgtgatccctctcaagctcagatcagttctataacccaatgacaacctgtctctttggtttactgtcctgtgaaatgtcagctcaagtttcccagaagtcgtgtgtttatgatgagtcagagtgcttttcctcggtgggacagttgctggccctcttaattttggtgtatgtgcttccaagtatctaaacctccagtctgatctgtatatgctatcctaactgttaattgtattattgattatgttgattatcttgcttgaaggttcatacttttcaatttgatagaaataaagtttttttctgcttatagctagcgaa

SEQ ID NO: 133146 - DNA, 6954 bp, Homo sapiens
  misc_feature (185)..(186): n is a, c, g, or t
  misc_feature (223)..(224): n is a, c, g, or t
agcggagccgccggggaggggacgagacgcagaccacacgttgcccacgtgcgaggaccgggcaggggctcagcccctaggccgcccggtgcgtggggctggcgggggctggctttgagtcacccccgcttgtgccagcttccccggctcggcggagactggcttggggatgcctggccgcccgnnccccttctcggacgcggcgtggggagcgagctggagnnaaggatgaaggggcggccggcgagtcccagtgagagcggagggtgccagaggtagggggccgagaaacaaagttcccggggcttcctccggggccgcggtcggggctgcgcgtttgaccgcccccctcctcgcgaaggcaatggcttccaaactcctgcgcgcggtcatcctcgggccgcccggctcgggcaagggcaccgtgtgccagaggatcgcccagaactttggtctccagcatctctccagcggccacttcttgcgggagaacatcaaggccagcaccgaagttggtgagatggcaaagcagtatatagagaaaagtcttttggttccagaccatgtgatcacacgcctaatgatgtccgagttggagaacaggcgtggccagcactggctccttgatggttttcctaggacattaggacaagccgaagccctggacaaaatatcgtctcagccgccgttggattcaccctcctagcggaagggtatataacctggacttcaatccacctcatgtacatggtattgatgacgtcactggtgaaccgttagtccagcaggaggatgataaacccgaagcagttgctgccaggctaagacagtacaaagacgtggcaaagccagtcattgaattatacaagagccgaggagtgctccaccaattttccggaacggagacgaacaaaatctggccctacgtttacacacttttctcaaacaagatcacacctattcagtccaaagaagcatattgaccctgcccaatggaagaaccaggaagatgtggtcattcattcaatagtgtgtgtagtattggtgctgtgtccaaattagaagctagctgaggtagcttgcagcatcttttctagttgaaatggtgaactgataggaaaacaaatgagtagaaagagttcatgaagaggccctcctctgcctttcaaaaggctggtcacctacacatgtttaaggtgtctctgcacatgtctcaagcccatcacaagaaagcaagtacagtgtggatttcaaatggtgtgtaacttcagctccagctggtttttgacagctgttgctgtggtaatatttttgacatgtgatggtgatagtctctggttctccccatccccacaaaggctgttgaaccacagcaccaggaagcctgagaatgaatcctgagggctctagcccaggctttgtcccaggctttctggtgtgtgccctcctggtaacagtgaaattgaagctacttactcatagtggttgtttctctggtcttgagtgactgtgtccacagttcatttttttccggtaggaataactccttttctacatccacgctccatagagtctctccttttcagacatcctgggatgaaagaatttggcttttttttttctttttttttttggacatctgttttcactcttaggcttttaaacaatagttattgcttttatccctctcagattctaataactgagagcgatggggctatattgaatctctgtatgcactgagaactgagctatgaagaggatcttattaaactgctggtctgactttatggattgacactgttcctttcttttattgtgaaaaaaaaaaaaaaccctgaaagtcttgggaaccccctaaagtcttttgggaatcctcaaaaagcatgggaagttaagtatttagctacataaatgttgtaagatcatatcttatgtatagaagtaataagaccatttggaattactggactaattgaatagttaaggtttctattcgggacaataaaatgtattttgaaagtgctgctaactattgatgctgacagtgtttcactcctatgagtgacccaaacatattataaatatgtggtaaagggaatggagcctgtggggttgagcagaatgttgtactagctgtgcctggactgagtataacagctttatgattatgagaaaacaaattctttattttttttttctgttccaaagattcatcctatggggtggccataaagtctagaattagatactaatattttgtcattcattataacatatcaataaaccatttgttaaaagatttgcctggtttccagacttggtggccaccttgaataattcttgctgtcttctgggaaggatgatgaaatttattcctgctgccttaaaaatatgtatcccttcttcacccatcatgactgtccccagtgagtgtcctttactattcttgggagtgactcctgtctaacttttcatactggcgagaagaaaagaagcctattttaacactttagtggtgttgaaacacattacttactttctgaagatgtcccagtgaatcctctgtcaattcactgccatatgtaatctatatgataaggaatgcatcttccttctaagtactgcccaaactcttgccagctcctctcccattgtcccttcatgtgaatatttcttggctaccttagtggaaatatagatcagttttctccccatccatcctctcaaacataatgagattgtttactttttagatttatgcagtgaaaatgcccagtcaggtctgaatcgtcagtgcattatattgactctgagcactttagaatttagagttgcaattgaatgccagctgtggagatggggtgcatatcagatatataaataaagctcaggtttgctagggaaccaggtatagagaaaaataagtctgatatgaggaaaattgcacaatttagagtagttatgccgtagagaaaatttccacaaactaggaaatgtagagagttattctatagaatactcaaaagaggaaagtatgtgatttttggaaacaggaaaatcttcaaacttctttcttcacttccctttgtgtttagctgaccctccaatgtgatcattgcctttggagtttgggagaggtacgggaagtggcctgatccctgcttccatacttcactcctccatccatccttccctccctcttcccctccagctaaatggacaattctagccaacattgagtcactcaataagtctcaacagtgggtgtgtttgctgagattgtccagcggttgagcagtttggtctcacctccctcgctagttgagaccaaaaagagacaaataactttttcatggtctttgaaacataatgcttatttcgtggtcaatggctttaaaaaaatctgtttcttgttttcttcaacaaactcactagttttcccttaaatgatattgtaaaaattaaagtaatcttgaaaatgttttgacaaaagtaaaattaaagggacatcttttaaaacttgttttgtttttttttttctattgccacacatgaccgttccttcacctttaagcaaagagagtggttcagatggtttctaagatgccaacctgacctcgcattctgtcattctacccagctcttaattcaatttgcttccattatcctaacaggcttctttcttacttagaacttggaaaggctgctgtatttaataccctccaacactaacgcagacttaagataggtactgtttattgaaaacctactgagtgaaatgtgcggttttaggaccttcataaacatctcatttaatctttctagcatcctgtgaaacagccatgatttcacgttgataaacaaagaagacaggggtcccagggatgtgaagcatcttgcccaggcttctgctgctggtgaccagtgtagccaggactccaacccaggttttcctgactcagaagactgagctttttcctggatgttattaatagctaattgtgtccaagcaaccaagggccttgagtctgcttggttctgcttatggcctcacatcaagaaatggagctagtccatgtctgtagtcccaatgctttgggaagccatgatgggaaggttgtcggaggccaaaagttcaagaccaggctgggcaatatcacaagactccatctctacggaaaagtaaaaaattagccagtcatggtggtgtacacttatggtcctagttactcaggagacttaggcaggaggattgcttgatcctaggaattcgaggctgcagtgagctatgattgcacctctgcacccaagcctgggcgacacagcgagaccctctctcttaaaaaaaaaaaatagcagagctcaccaaagtgatgttcacctttttatgacattcctttttcttagcttaagaaaagaaagctgctagatgagagtcttagttttcctgcataagacctcctttatgaatagaataaaagactgtcaaagtaggctgggcttgggcccaggctaatctatgaaggaagcaagctcgtgttccttacctatccttttggtgtccattggattgtgccccgaagtggcctttacccttgagccgtccccagccatggtgctcacacataggcttttgagctccttggagctatccagatcctgctcacttttccttcctgagatcagaacaaatcacccccttactcccactccaaacaaggccttgatgataaactaatccttcctaaaatgctggtaggtaaacaagcaatgatgaagcattgaacacaggttaactcctgacttttgtaccattgtctattccattacacattaacatgactctgaatgccagatccaaacctttgcccaccatctgcttgtcgtgcaacagttgaggcagtaaccaggggagattcacttcctgtcttgtccttccccagggatcacccccctgctgccctctagcagccaaactcagatgagttccattgttaccctaggtgtgcccatctctttggtagggaaggagaaaggtaagaatagccatcagtgaggaaggattcttggagcgaggagccactgtggtttttcctgctatttaagatgttgagaccggataactttagaaagatacctgcacaaacccataaatagtgcttttataaagtttagttcaccggaacctgagttcagtatttgacattagctttttgtccaaagagttgaagcctgctggaggtctttgctcaaataataaataccacatatttccaagtgtgttcaggtataggcactaggtactgtctgtttacttcatgttaggcacattacatgcattggctaatcaaatcctcatcaattacatatgtaataatctaaacttgcctccttgtattataaatggaaataatcctgtttatttaaacgggttttcatgtacctgtagggattaggaaactcaaatggcctttttaatacctttccctagtttgagctccctgttctctttaacagataaaacaacatatttgcttcagcctggaatctgtttttggtgctttggtgcagagacaggaaatgggcactcagagtcacactggtagttgcacactgtatctacagagggcgtgtctcatctgtactctgctgggttacaggatttcagtaggtatttgtgtccacctgagaattctgtttattacctttcatttgacagtgtctttcctttctgcagttgattttgctagagaggcaattcataaggtgaggtcctgttcatagtatgacttgctttctcaatatctccttcaatttttagtaactcttggtctatttggtgtctttaaaaaaaataacctagtaataaagacttcttttaatgtggaaatgtggtctggtagtaagttatttctttccacatgtaactgacccaatctggtttccaaatgagaagtgtgcaggccccagaggttgagaagccatatttcaactgtgaaaaaaatctgcttcctgcatctgttgaaatatagttgttcatacttgccatcccttatctttcttgtaacaatttgcacagttcttgccagaataaatgccattatctgtatgtttcagggagttccccaatttgatcatttttgtgtgtgtgtggtgtgtgtgtgagagagagagatactgcagtaaaacatttctaaaggatgaaagctcttgtatggcatagatatgaattccttcctctggtaataattaggttattcccagaagcacagtgtcattctttaaataaaagctttcctgtttaaagcttttcaaaggagcagaccaccttgaagattccccctagggttgatatgtgtctaattcattttataaaaattattcttgtcttcattttaaagctttggctatatagtcagaaatgtcctaaataacaaactattttgtatttaatttagggaagactaaagggaagaaaaatgaaaactcagtctttatgtaagctccaaggatattagggcttaaagggcttttctagttttatgagaatttgtactactgatttttatatattcctgtttttgagatgaacagatctctggggaaattgttgagttacaatggcatttcactgtgatccctctcaagctcagatcagttctataacccaatgacaacctgtctctttggtttactgtcctgtgaaatgtcagctcaagtttcccagaagtcgtgtgtttatgatgagtcagagtgcttttcctcggtgggacagttgctggccctcttaattttggtgtatgtgcttccaagtatctaaacctccagtctgatctgtatatgctatcctaactgttaattgtattattgattatgttgattatcttgcttgaaggttcatacttttcaatttgatagaaataaagtttttttctgcttatagctagcgaa

SEQ ID NO: 133147 - DNA, 6586 bp, Homo sapiens
gcggggccgcgccccccggaacctgtggggcgggggggctcgcagcctcgcgcctctccagcccctccacgcagcctcgggcctcggggcagagccctgggtggctttgaaaggcctgtctgttcgttgtcgccttctaagaagttggtgagatggcaaagcagtatatagagaaaagtcttttggttccagaccatgtgatcacacgcctaatgatgtccgagttggagaacaggcgtggccagcactggctccttgatggttttcctaggacattaggacaagccgaagccctggacaaaatatcgtctcagccgccgttggattcaccctcctagcggaagggtatataacctggacttcaatccacctcatgtacatggtattgatgacgtcactggtgaaccgttagtccagcaggaggatgataaacccgaagcagttgctgccaggctaagacagtacaaagacgtggcaaagccagtcattgaattatacaagagccgaggagtgctccaccaattttccggaacggagacgaacaaaatctggccctacgtttacacacttttctcaaacaagatcacacctattcagtccaaagaagcatattgaccctgcccaatggaagaaccaggaagatgtggtcattcattcaatagtgtgtgtagtattggtgctgtgtccaaattagaagctagctgaggtagcttgcagcatcttttctagttgaaatggtgaactgataggaaaacaaatgagtagaaagagttcatgaagaggccctcctctgcctttcaaaaggctggtcacctacacatgtttaaggtgtctctgcacatgtctcaagcccatcacaagaaagcaagtacagtgtggatttcaaatggtgtgtaacttcagctccagctggtttttgacagctgttgctgtggtaatatttttgacatgtgatggtgatagtctctggttctccccatccccacaaaggctgttgaaccacagcaccaggaagcctgagaatgaatcctgagggctctagcccaggctttgtcccaggctttctggtgtgtgccctcctggtaacagtgaaattgaagctacttactcatagtggttgtttctctggtcttgagtgactgtgtccacagttcatttttttccggtaggaataactccttttctacatccacgctccatagagtctctccttttcagacatcctgggatgaaagaatttggcttttttttttctttttttttttggacatctgttttcactcttaggcttttaaacaatagttattgcttttatccctctcagattctaataactgagagcgatggggctatattgaatctctgtatgcactgagaactgagctatgaagaggatcttattaaactgctggtctgactttatggattgacactgttcctttcttttattgtgaaaaaaaaaaaaaaccctgaaagtcttgggaaccccctaaagtcttttgggaatcctcaaaaagcatgggaagttaagtatttagctacataaatgttgtaagatcatatcttatgtatagaagtaataagaccatttggaattactggactaattgaatagttaaggtttctattcgggacaataaaatgtattttgaaagtgctgctaactattgatgctgacagtgtttcactcctatgagtgacccaaacatattataaatatgtggtaaagggaatggagcctgtggggttgagcagaatgttgtactagctgtgcctggactgagtataacagctttatgattatgagaaaacaaattctttattttttttttctgttccaaagattcatcctatggggtggccataaagtctagaattagatactaatattttgtcattcattataacatatcaataaaccatttgttaaaagatttgcctggtttccagacttggtggccaccttgaataattcttgctgtcttctgggaaggatgatgaaatttattcctgctgccttaaaaatatgtatcccttcttcacccatcatgactgtccccagtgagtgtcctttactattcttgggagtgactcctgtctaacttttcatactggcgagaagaaaagaagcctattttaacactttagtggtgttgaaacacattacttactttctgaagatgtcccagtgaatcctctgtcaattcactgccatatgtaatctatatgataaggaatgcatcttccttctaagtactgcccaaactcttgccagctcctctcccattgtcccttcatgtgaatatttcttggctaccttagtggaaatatagatcagttttctccccatccatcctctcaaacataatgagattgtttactttttagatttatgcagtgaaaatgcccagtcaggtctgaatcgtcagtgcattatattgactctgagcactttagaatttagagttgcaattgaatgccagctgtggagatggggtgcatatcagatatataaataaagctcaggtttgctagggaaccaggtatagagaaaaataagtctgatatgaggaaaattgcacaatttagagtagttatgccgtagagaaaatttccacaaactaggaaatgtagagagttattctatagaatactcaaaagaggaaagtatgtgatttttggaaacaggaaaatcttcaaacttctttcttcacttccctttgtgtttagctgaccctccaatgtgatcattgcctttggagtttgggagaggtacgggaagtggcctgatccctgcttccatacttcactcctccatccatccttccctccctcttcccctccagctaaatggacaattctagccaacattgagtcactcaataagtctcaacagtgggtgtgtttgctgagattgtccagcggttgagcagtttggtctcacctccctcgctagttgagaccaaaaagagacaaataactttttcatggtctttgaaacataatgcttatttcgtggtcaatggctttaaaaaaatctgtttcttgttttcttcaacaaactcactagttttcccttaaatgatattgtaaaaattaaagtaatcttgaaaatgttttgacaaaagtaaaattaaagggacatcttttaaaacttgttttgtttttttttttctattgccacacatgaccgttccttcacctttaagcaaagagagtggttcagatggtttctaagatgccaacctgacctcgcattctgtcattctacccagctcttaattcaatttgcttccattatcctaacaggcttctttcttacttagaacttggaaaggctgctgtatttaataccctccaacactaacgcagacttaagataggtactgtttattgaaaacctactgagtgaaatgtgcggttttaggaccttcataaacatctcatttaatctttctagcatcctgtgaaacagccatgatttcacgttgataaacaaagaagacaggggtcccagggatgtgaagcatcttgcccaggcttctgctgctggtgaccagtgtagccaggactccaacccaggttttcctgactcagaagactgagctttttcctggatgttattaatagctaattgtgtccaagcaaccaagggccttgagtctgcttggttctgcttatggcctcacatcaagaaatggagctagtccatgtctgtagtcccaatgctttgggaagccatgatgggaaggttgtcggaggccaaaagttcaagaccaggctgggcaatatcacaagactccatctctacggaaaagtaaaaaattagccagtcatggtggtgtacacttatggtcctagttactcaggagacttaggcaggaggattgcttgatcctaggaattcgaggctgcagtgagctatgattgcacctctgcacccaagcctgggcgacacagcgagaccctctctcttaaaaaaaaaaaatagcagagctcaccaaagtgatgttcacctttttatgacattcctttttcttagcttaagaaaagaaagctgctagatgagagtcttagttttcctgcataagacctcctttatgaatagaataaaagactgtcaaagtaggctgggcttgggcccaggctaatctatgaaggaagcaagctcgtgttccttacctatccttttggtgtccattggattgtgccccgaagtggcctttacccttgagccgtccccagccatggtgctcacacataggcttttgagctccttggagctatccagatcctgctcacttttccttcctgagatcagaacaaatcacccccttactcccactccaaacaaggccttgatgataaactaatccttcctaaaatgctggtaggtaaacaagcaatgatgaagcattgaacacaggttaactcctgacttttgtaccattgtctattccattacacattaacatgactctgaatgccagatccaaacctttgcccaccatctgcttgtcgtgcaacagttgaggcagtaaccaggggagattcacttcctgtcttgtccttccccagggatcacccccctgctgccctctagcagccaaactcagatgagttccattgttaccctaggtgtgcccatctctttggtagggaaggagaaaggtaagaatagccatcagtgaggaaggattcttggagcgaggagccactgtggtttttcctgctatttaagatgttgagaccggataactttagaaagatacctgcacaaacccataaatagtgcttttataaagtttagttcaccggaacctgagttcagtatttgacattagctttttgtccaaagagttgaagcctgctggaggtctttgctcaaataataaataccacatatttccaagtgtgttcaggtataggcactaggtactgtctgtttacttcatgttaggcacattacatgcattggctaatcaaatcctcatcaattacatatgtaataatctaaacttgcctccttgtattataaatggaaataatcctgtttatttaaacgggttttcatgtacctgtagggattaggaaactcaaatggcctttttaatacctttccctagtttgagctccctgttctctttaacagataaaacaacatatttgcttcagcctggaatctgtttttggtgctttggtgcagagacaggaaatgggcactcagagtcacactggtagttgcacactgtatctacagagggcgtgtctcatctgtactctgctgggttacaggatttcagtaggtatttgtgtccacctgagaattctgtttattacctttcatttgacagtgtctttcctttctgcagttgattttgctagagaggcaattcataaggtgaggtcctgttcatagtatgacttgctttctcaatatctccttcaatttttagtaactcttggtctatttggtgtctttaaaaaaaataacctagtaataaagacttcttttaatgtggaaatgtggtctggtagtaagttatttctttccacatgtaactgacccaatctggtttccaaatgagaagtgtgcaggccccagaggttgagaagccatatttcaactgtgaaaaaaatctgcttcctgcatctgttgaaatatagttgttcatacttgccatcccttatctttcttgtaacaatttgcacagttcttgccagaataaatgccattatctgtatgtttcagggagttccccaatttgatcatttttgtgtgtgtgtggtgtgtgtgtgagagagagagatactgcagtaaaacatttctaaaggatgaaagctcttgtatggcatagatatgaattccttcctctggtaataattaggttattcccagaagcacagtgtcattctttaaataaaagctttcctgtttaaagcttttcaaaggagcagaccaccttgaagattccccctagggttgatatgtgtctaattcattttataaaaattattcttgtcttcattttaaagctttggctatatagtcagaaatgtcctaaataacaaactattttgtatttaatttagggaagactaaagggaagaaaaatgaaaactcagtctttatgtaagctccaaggatattagggcttaaagggcttttctagttttatgagaatttgtactactgatttttatatattcctgtttttgagatgaacagatctctggggaaattgttgagttacaatggcatttcactgtgatccctctcaagctcagatcagttctataacccaatgacaacctgtctctttggtttactgtcctgtgaaatgtcagctcaagtttcccagaagtcgtgtgtttatgatgagtcagagtgcttttcctcggtgggacagttgctggccctcttaattttggtgtatgtgcttccaagtatctaaacctccagtctgatctgtatatgctatcctaactgttaattgtattattgattatgttgattatcttgcttgaaggttcatacttttcaatttgatagaaataaagtttttttctgcttatagctagcgaa

SEQ ID NO: 133148 - DNA, 6233 bp, Homo sapiens
gggtgactctaaggatcccctgttacatggtattgatgacgtcactggtgaaccgttagtccagcaggaggatgataaacccgaagcagttgctgccaggctaagacagtacaaagacgtggcaaagccagtcattgaattatacaagagccgaggagtgctccaccaattttccggaacggagacgaacaaaatctggccctacgtttacacacttttctcaaacaagatcacacctattcagtccaaagaagcatattgaccctgcccaatggaagaaccaggaagatgtggtcattcattcaatagtgtgtgtagtattggtgctgtgtccaaattagaagctagctgaggtagcttgcagcatcttttctagttgaaatggtgaactgataggaaaacaaatgagtagaaagagttcatgaagaggccctcctctgcctttcaaaaggctggtcacctacacatgtttaaggtgtctctgcacatgtctcaagcccatcacaagaaagcaagtacagtgtggatttcaaatggtgtgtaacttcagctccagctggtttttgacagctgttgctgtggtaatatttttgacatgtgatggtgatagtctctggttctccccatccccacaaaggctgttgaaccacagcaccaggaagcctgagaatgaatcctgagggctctagcccaggctttgtcccaggctttctggtgtgtgccctcctggtaacagtgaaattgaagctacttactcatagtggttgtttctctggtcttgagtgactgtgtccacagttcatttttttccggtaggaataactccttttctacatccacgctccatagagtctctccttttcagacatcctgggatgaaagaatttggcttttttttttctttttttttttggacatctgttttcactcttaggcttttaaacaatagttattgcttttatccctctcagattctaataactgagagcgatggggctatattgaatctctgtatgcactgagaactgagctatgaagaggatcttattaaactgctggtctgactttatggattgacactgttcctttcttttattgtgaaaaaaaaaaaaaaccctgaaagtcttgggaaccccctaaagtcttttgggaatcctcaaaaagcatgggaagttaagtatttagctacataaatgttgtaagatcatatcttatgtatagaagtaataagaccatttggaattactggactaattgaatagttaaggtttctattcgggacaataaaatgtattttgaaagtgctgctaactattgatgctgacagtgtttcactcctatgagtgacccaaacatattataaatatgtggtaaagggaatggagcctgtggggttgagcagaatgttgtactagctgtgcctggactgagtataacagctttatgattatgagaaaacaaattctttattttttttttctgttccaaagattcatcctatggggtggccataaagtctagaattagatactaatattttgtcattcattataacatatcaataaaccatttgttaaaagatttgcctggtttccagacttggtggccaccttgaataattcttgctgtcttctgggaaggatgatgaaatttattcctgctgccttaaaaatatgtatcccttcttcacccatcatgactgtccccagtgagtgtcctttactattcttgggagtgactcctgtctaacttttcatactggcgagaagaaaagaagcctattttaacactttagtggtgttgaaacacattacttactttctgaagatgtcccagtgaatcctctgtcaattcactgccatatgtaatctatatgataaggaatgcatcttccttctaagtactgcccaaactcttgccagctcctctcccattgtcccttcatgtgaatatttcttggctaccttagtggaaatatagatcagttttctccccatccatcctctcaaacataatgagattgtttactttttagatttatgcagtgaaaatgcccagtcaggtctgaatcgtcagtgcattatattgactctgagcactttagaatttagagttgcaattgaatgccagctgtggagatggggtgcatatcagatatataaataaagctcaggtttgctagggaaccaggtatagagaaaaataagtctgatatgaggaaaattgcacaatttagagtagttatgccgtagagaaaatttccacaaactaggaaatgtagagagttattctatagaatactcaaaagaggaaagtatgtgatttttggaaacaggaaaatcttcaaacttctttcttcacttccctttgtgtttagctgaccctccaatgtgatcattgcctttggagtttgggagaggtacgggaagtggcctgatccctgcttccatacttcactcctccatccatccttccctccctcttcccctccagctaaatggacaattctagccaacattgagtcactcaataagtctcaacagtgggtgtgtttgctgagattgtccagcggttgagcagtttggtctcacctccctcgctagttgagaccaaaaagagacaaataactttttcatggtctttgaaacataatgcttatttcgtggtcaatggctttaaaaaaatctgtttcttgttttcttcaacaaactcactagttttcccttaaatgatattgtaaaaattaaagtaatcttgaaaatgttttgacaaaagtaaaattaaagggacatcttttaaaacttgttttgtttttttttttctattgccacacatgaccgttccttcacctttaagcaaagagagtggttcagatggtttctaagatgccaacctgacctcgcattctgtcattctacccagctcttaattcaatttgcttccattatcctaacaggcttctttcttacttagaacttggaaaggctgctgtatttaataccctccaacactaacgcagacttaagataggtactgtttattgaaaacctactgagtgaaatgtgcggttttaggaccttcataaacatctcatttaatctttctagcatcctgtgaaacagccatgatttcacgttgataaacaaagaagacaggggtcccagggatgtgaagcatcttgcccaggcttctgctgctggtgaccagtgtagccaggactccaacccaggttttcctgactcagaagactgagctttttcctggatgttattaatagctaattgtgtccaagcaaccaagggccttgagtctgcttggttctgcttatggcctcacatcaagaaatggagctagtccatgtctgtagtcccaatgctttgggaagccatgatgggaaggttgtcggaggccaaaagttcaagaccaggctgggcaatatcacaagactccatctctacggaaaagtaaaaaattagccagtcatggtggtgtacacttatggtcctagttactcaggagacttaggcaggaggattgcttgatcctaggaattcgaggctgcagtgagctatgattgcacctctgcacccaagcctgggcgacacagcgagaccctctctcttaaaaaaaaaaaatagcagagctcaccaaagtgatgttcacctttttatgacattcctttttcttagcttaagaaaagaaagctgctagatgagagtcttagttttcctgcataagacctcctttatgaatagaataaaagactgtcaaagtaggctgggcttgggcccaggctaatctatgaaggaagcaagctcgtgttccttacctatccttttggtgtccattggattgtgccccgaagtggcctttacccttgagccgtccccagccatggtgctcacacataggcttttgagctccttggagctatccagatcctgctcacttttccttcctgagatcagaacaaatcacccccttactcccactccaaacaaggccttgatgataaactaatccttcctaaaatgctggtaggtaaacaagcaatgatgaagcattgaacacaggttaactcctgacttttgtaccattgtctattccattacacattaacatgactctgaatgccagatccaaacctttgcccaccatctgcttgtcgtgcaacagttgaggcagtaaccaggggagattcacttcctgtcttgtccttccccagggatcacccccctgctgccctctagcagccaaactcagatgagttccattgttaccctaggtgtgcccatctctttggtagggaaggagaaaggtaagaatagccatcagtgaggaaggattcttggagcgaggagccactgtggtttttcctgctatttaagatgttgagaccggataactttagaaagatacctgcacaaacccataaatagtgcttttataaagtttagttcaccggaacctgagttcagtatttgacattagctttttgtccaaagagttgaagcctgctggaggtctttgctcaaataataaataccacatatttccaagtgtgttcaggtataggcactaggtactgtctgtttacttcatgttaggcacattacatgcattggctaatcaaatcctcatcaattacatatgtaataatctaaacttgcctccttgtattataaatggaaataatcctgtttatttaaacgggttttcatgtacctgtagggattaggaaactcaaatggcctttttaatacctttccctagtttgagctccctgttctctttaacagataaaacaacatatttgcttcagcctggaatctgtttttggtgctttggtgcagagacaggaaatgggcactcagagtcacactggtagttgcacactgtatctacagagggcgtgtctcatctgtactctgctgggttacaggatttcagtaggtatttgtgtccacctgagaattctgtttattacctttcatttgacagtgtctttcctttctgcagttgattttgctagagaggcaattcataaggtgaggtcctgttcatagtatgacttgctttctcaatatctccttcaatttttagtaactcttggtctatttggtgtctttaaaaaaaataacctagtaataaagacttcttttaatgtggaaatgtggtctggtagtaagttatttctttccacatgtaactgacccaatctggtttccaaatgagaagtgtgcaggccccagaggttgagaagccatatttcaactgtgaaaaaaatctgcttcctgcatctgttgaaatatagttgttcatacttgccatcccttatctttcttgtaacaatttgcacagttcttgccagaataaatgccattatctgtatgtttcagggagttccccaatttgatcatttttgtgtgtgtgtggtgtgtgtgtgagagagagagatactgcagtaaaacatttctaaaggatgaaagctcttgtatggcatagatatgaattccttcctctggtaataattaggttattcccagaagcacagtgtcattctttaaataaaagctttcctgtttaaagcttttcaaaggagcagaccaccttgaagattccccctagggttgatatgtgtctaattcattttataaaaattattcttgtcttcattttaaagctttggctatatagtcagaaatgtcctaaataacaaactattttgtatttaatttagggaagactaaagggaagaaaaatgaaaactcagtctttatgtaagctccaaggatattagggcttaaagggcttttctagttttatgagaatttgtactactgatttttatatattcctgtttttgagatgaacagatctctggggaaattgttgagttacaatggcatttcactgtgatccctctcaagctcagatcagttctataacccaatgacaacctgtctctttggtttactgtcctgtgaaatgtcagctcaagtttcccagaagtcgtgtgtttatgatgagtcagagtgcttttcctcggtgggacagttgctggccctcttaattttggtgtatgtgcttccaagtatctaaacctccagtctgatctgtatatgctatcctaactgttaattgtattattgattatgttgattatcttgcttgaaggttcatacttttcaatttgatagaaataaagtttttttctgcttatagctagcgaa

SEQ ID NO: 133149 - DNA, 5869 bp, Homo sapiens
ctaggtcgaggccggtgttaatcggccgaggggaaaacaaatgagtagaaagagttcatgaagaggccctcctctgcctttcaaaaggctggtcacctacacatgtttaaggtgtctctgcacatgtctcaagcccatcacaagaaagcaagtacagtgtggatttcaaatggtgtgtaacttcagctccagctggtttttgacagctgttgctgtggtaatatttttgacatgtgatggtgatagtctctggttctccccatccccacaaaggctgttgaaccacagcaccaggaagcctgagaatgaatcctgagggctctagcccaggctttgtcccaggctttctggtgtgtgccctcctggtaacagtgaaattgaagctacttactcatagtggttgtttctctggtcttgagtgactgtgtccacagttcatttttttccggtaggaataactccttttctacatccacgctccatagagtctctccttttcagacatcctgggatgaaagaatttggcttttttttttctttttttttttggacatctgttttcactcttaggcttttaaacaatagttattgcttttatccctctcagattctaataactgagagcgatggggctatattgaatctctgtatgcactgagaactgagctatgaagaggatcttattaaactgctggtctgactttatggattgacactgttcctttcttttattgtgaaaaaaaaaaaaaaccctgaaagtcttgggaaccccctaaagtcttttgggaatcctcaaaaagcatgggaagttaagtatttagctacataaatgttgtaagatcatatcttatgtatagaagtaataagaccatttggaattactggactaattgaatagttaaggtttctattcgggacaataaaatgtattttgaaagtgctgctaactattgatgctgacagtgtttcactcctatgagtgacccaaacatattataaatatgtggtaaagggaatggagcctgtggggttgagcagaatgttgtactagctgtgcctggactgagtataacagctttatgattatgagaaaacaaattctttattttttttttctgttccaaagattcatcctatggggtggccataaagtctagaattagatactaatattttgtcattcattataacatatcaataaaccatttgttaaaagatttgcctggtttccagacttggtggccaccttgaataattcttgctgtcttctgggaaggatgatgaaatttattcctgctgccttaaaaatatgtatcccttcttcacccatcatgactgtccccagtgagtgtcctttactattcttgggagtgactcctgtctaacttttcatactggcgagaagaaaagaagcctattttaacactttagtggtgttgaaacacattacttactttctgaagatgtcccagtgaatcctctgtcaattcactgccatatgtaatctatatgataaggaatgcatcttccttctaagtactgcccaaactcttgccagctcctctcccattgtcccttcatgtgaatatttcttggctaccttagtggaaatatagatcagttttctccccatccatcctctcaaacataatgagattgtttactttttagatttatgcagtgaaaatgcccagtcaggtctgaatcgtcagtgcattatattgactctgagcactttagaatttagagttgcaattgaatgccagctgtggagatggggtgcatatcagatatataaataaagctcaggtttgctagggaaccaggtatagagaaaaataagtctgatatgaggaaaattgcacaatttagagtagttatgccgtagagaaaatttccacaaactaggaaatgtagagagttattctatagaatactcaaaagaggaaagtatgtgatttttggaaacaggaaaatcttcaaacttctttcttcacttccctttgtgtttagctgaccctccaatgtgatcattgcctttggagtttgggagaggtacgggaagtggcctgatccctgcttccatacttcactcctccatccatccttccctccctcttcccctccagctaaatggacaattctagccaacattgagtcactcaataagtctcaacagtgggtgtgtttgctgagattgtccagcggttgagcagtttggtctcacctccctcgctagttgagaccaaaaagagacaaataactttttcatggtctttgaaacataatgcttatttcgtggtcaatggctttaaaaaaatctgtttcttgttttcttcaacaaactcactagttttcccttaaatgatattgtaaaaattaaagtaatcttgaaaatgttttgacaaaagtaaaattaaagggacatcttttaaaacttgttttgtttttttttttctattgccacacatgaccgttccttcacctttaagcaaagagagtggttcagatggtttctaagatgccaacctgacctcgcattctgtcattctacccagctcttaattcaatttgcttccattatcctaacaggcttctttcttacttagaacttggaaaggctgctgtatttaataccctccaacactaacgcagacttaagataggtactgtttattgaaaacctactgagtgaaatgtgcggttttaggaccttcataaacatctcatttaatctttctagcatcctgtgaaacagccatgatttcacgttgataaacaaagaagacaggggtcccagggatgtgaagcatcttgcccaggcttctgctgctggtgaccagtgtagccaggactccaacccaggttttcctgactcagaagactgagctttttcctggatgttattaatagctaattgtgtccaagcaaccaagggccttgagtctgcttggttctgcttatggcctcacatcaagaaatggagctagtccatgtctgtagtcccaatgctttgggaagccatgatgggaaggttgtcggaggccaaaagttcaagaccaggctgggcaatatcacaagactccatctctacggaaaagtaaaaaattagccagtcatggtggtgtacacttatggtcctagttactcaggagacttaggcaggaggattgcttgatcctaggaattcgaggctgcagtgagctatgattgcacctctgcacccaagcctgggcgacacagcgagaccctctctcttaaaaaaaaaaaatagcagagctcaccaaagtgatgttcacctttttatgacattcctttttcttagcttaagaaaagaaagctgctagatgagagtcttagttttcctgcataagacctcctttatgaatagaataaaagactgtcaaagtaggctgggcttgggcccaggctaatctatgaaggaagcaagctcgtgttccttacctatccttttggtgtccattggattgtgccccgaagtggcctttacccttgagccgtccccagccatggtgctcacacataggcttttgagctccttggagctatccagatcctgctcacttttccttcctgagatcagaacaaatcacccccttactcccactccaaacaaggccttgatgataaactaatccttcctaaaatgctggtaggtaaacaagcaatgatgaagcattgaacacaggttaactcctgacttttgtaccattgtctattccattacacattaacatgactctgaatgccagatccaaacctttgcccaccatctgcttgtcgtgcaacagttgaggcagtaaccaggggagattcacttcctgtcttgtccttccccagggatcacccccctgctgccctctagcagccaaactcagatgagttccattgttaccctaggtgtgcccatctctttggtagggaaggagaaaggtaagaatagccatcagtgaggaaggattcttggagcgaggagccactgtggtttttcctgctatttaagatgttgagaccggataactttagaaagatacctgcacaaacccataaatagtgcttttataaagtttagttcaccggaacctgagttcagtatttgacattagctttttgtccaaagagttgaagcctgctggaggtctttgctcaaataataaataccacatatttccaagtgtgttcaggtataggcactaggtactgtctgtttacttcatgttaggcacattacatgcattggctaatcaaatcctcatcaattacatatgtaataatctaaacttgcctccttgtattataaatggaaataatcctgtttatttaaacgggttttcatgtacctgtagggattaggaaactcaaatggcctttttaatacctttccctagtttgagctccctgttctctttaacagataaaacaacatatttgcttcagcctggaatctgtttttggtgctttggtgcagagacaggaaatgggcactcagagtcacactggtagttgcacactgtatctacagagggcgtgtctcatctgtactctgctgggttacaggatttcagtaggtatttgtgtccacctgagaattctgtttattacctttcatttgacagtgtctttcctttctgcagttgattttgctagagaggcaattcataaggtgaggtcctgttcatagtatgacttgctttctcaatatctccttcaatttttagtaactcttggtctatttggtgtctttaaaaaaaataacctagtaataaagacttcttttaatgtggaaatgtggtctggtagtaagttatttctttccacatgtaactgacccaatctggtttccaaatgagaagtgtgcaggccccagaggttgagaagccatatttcaactgtgaaaaaaatctgcttcctgcatctgttgaaatatagttgttcatacttgccatcccttatctttcttgtaacaatttgcacagttcttgccagaataaatgccattatctgtatgtttcagggagttccccaatttgatcatttttgtgtgtgtgtggtgtgtgtgtgagagagagagatactgcagtaaaacatttctaaaggatgaaagctcttgtatggcatagatatgaattccttcctctggtaataattaggttattcccagaagcacagtgtcattctttaaataaaagctttcctgtttaaagcttttcaaaggagcagaccaccttgaagattccccctagggttgatatgtgtctaattcattttataaaaattattcttgtcttcattttaaagctttggctatatagtcagaaatgtcctaaataacaaactattttgtatttaatttagggaagactaaagggaagaaaaatgaaaactcagtctttatgtaagctccaaggatattagggcttaaagggcttttctagttttatgagaatttgtactactgatttttatatattcctgtttttgagatgaacagatctctggggaaattgttgagttacaatggcatttcactgtgatccctctcaagctcagatcagttctataacccaatgacaacctgtctctttggtttactgtcctgtgaaatgtcagctcaagtttcccagaagtcgtgtgtttatgatgagtcagagtgcttttcctcggtgggacagttgctggccctcttaattttggtgtatgtgcttccaagtatctaaacctccagtctgatctgtatatgctatcctaactgttaattgtattattgattatgttgattatcttgcttgaaggttcatacttttcaatttgatagaaataaagtttttttctgcttatagctagcgaa

SEQ ID NO: 133150 - DNA, 3314 bp, Homo sapiens
agtccgcctgctactcggtcccggcgctgggctgaggggaggggttgtcttaaaagtctctccttccccctgtaggggcggccggcgagtcccagtgagagcggagggtgccagaggtagggggccgagaaacaaagttcccggggcttcctccggggccgcggtcggggctgcgcgtttgaccgcccccctcctcgcgaaggcaatggcttccaaactcctgcgcgcggtcatcctcgggccgcccggctcgggcaagggcaccgtgtgccagaggatcgcccagaactttggtctccagcatctctccagcggccacttcttgcgggagaacatcaaggccagcaccgaagttggtgagatggcaaagcagtatatagagaaaagtcttttggttccagaccatgtgatcacacgcctaatgatgtccgagttggagaacaggcgtggccagcactggctccttgatggttttcctaggacattaggacaagccgaagccctggacaaaatctgtgaagtggatctagtgatcagtttgaatattccatttgaaacacttaaagatcgtctcagccgccgttggattcaccctcctagcggaagggtatataacctggacttcaatccacctcatgtacatggtattgatgacgtcactggtgaaccgttagtccagcaggaggatgataaacccgaagcagttgctgccaggctaagacagtacaaagacgtggcaaagccagtcattgaattatacaagagccgaggagtgctccaccaattttccggaacggagacgaacaaaatctggccctacgtttacacacttttctcaaacaagatcacacctattcagtccaaagaagcatattgaccctgcccaatggaagaaccaggaagatgtggtcattcattcaatagtgtgtgtagtattggtgctgtgtccaaattagaagctagctgaggtagcttgcagcatcttttctagttgaaatggtgaactgataggaaaacaaatgagtagaaagagttcatgaagaggccctcctctgcctttcaaaaggctggtcacctacacatgtttaaggtgtctctgcacatgtctcaagcccatcacaagaaagcaagtacagtgtggatttcaaatggtgtgtaacttcagctccagctggtttttgacagctgttgctgtggtaatatttttgacatgtgatggtgatagtctctggttctccccatccccacaaaggctgttgaaccacagcaccaggaagcctgagaatgaatcctgagggctctagcccaggctttgtcccaggctttctggtgtgtgccctcctggtaacagtgaaattgaagctacttactcatagtggttgtttctctggtcttgagtgactgtgtccacagttcatttttttccggtaggaataactccttttctacatccacgctccatagagtctctccttttcagacatcctgggatgaaagaatttggcttttttttttctttttttttttggacatctgttttcactcttaggcttttaaacaatagttattgcttttatccctctcagattctaataactgagagcgatggggctatattgaatctctgtatgcactgagaactgagctatgaagaggatcttattaaactgctggtctgactttatggattgacactgttcctttcttttattgtgaaaaaaaaaaaaaaccctgaaagtcttgggaaccccctaaagtcttttgggaatcctcaaaaagcatgggaagttaagtatttagctacataaatgttgtaagatcatatcttatgtatagaagtaataagaccatttggaattactggactaattgaatagttaaggtttctattcgggacaataaaatgtattttgaaagtgctgctaactattgatgctgacagtgtttcactcctatgagtgacccaaacatattataaatatgtggtaaagggaatggagcctgtggggttgagcagaatgttgtactagctgtgcctggactgagtataacagctttatgattatgagaaaacaaattctttattttttttttctgttccaaagattcatcctatggggtggccataaagtctagaattagatactaatattttgtcattcattataacatatcaataaaccatttgttaaaagatttgcctggtttccagacttggtggccaccttgaataattcttgctgtcttctgggaaggatgatgaaatttattcctgctgccttaaaaatatgtatcccttcttcacccatcatgactgtccccagtgagtgtcctttactattcttgggagtgactcctgtctaacttttcatactggcgagaagaaaagaagcctattttaacactttagtggtgttgaaacacattacttactttctgaagatgtcccagtgaatcctctgtcaattcactgccatatgtaatctatatgataaggaatgcatcttccttctaagtactgcccaaactcttgccagctcctctcccattgtcccttcatgtgaatatttcttggctaccttagtggaaatatagatcagttttctccccatccatcctctcaaacataatgagattgtttactttttagatttatgcagtgaaaatgcccagtcaggtctgaatcgtcagtgcattatattgactctgagcactttagaatttagagttgcaattgaatgccagctgtggagatggggtgcatatcagatatataaataaagctcaggtttgctagggaaccaggtatagagaaaaataagtctgatatgaggaaaattgcacaatttagagtagttatgccgtagagaaaatttccacaaactaggaaatgtagagagttattctatagaatactcaaaagaggaaagtatgtgatttttggaaacaggaaaatcttcaaacttctttcttcacttccctttgtgtttagctgaccctccaatgtgatcattgcctttggagtttgggagaggtacgggaagtggcctgatccctgcttccatacttcactcctccatccatccttccctccctcttcccctccagctaaatggacaattctagccaacattgagtcactcaataagtctcaacagtgggtgtgtttgctgagattgtccagcggttgagcagtttggtctcacctccctcgctagttgagaccaaaaagagacaaataactttttcatggtctttgaaacataatgcttatttcgtgacatggcgtgagggatcctctagaacaccaccac

SEQ ID NO: 133151 - DNA, 2135 bp, Homo sapiens
  misc_feature (5)..(5): n is a, c, g, or t
cagantccaaacagtgcccagagtccaaacagtgcccagatccaaacctttgcccaccatctgcttgtcgtgcaacagttgaggcagtaaccaggggagattcacttcctgtcttgtccttccccagggatcacccccctgctgccctctagcagccaaactcagatgagttccattgttaccctaggtgtgcccatctctttggtagggaaggagaaaggtaagaatagccatcagtgaggaaggattcttggagcgaggagccactgtggtttttcctgctatttaagatgttgagaccggataactttagaaagatacctgcacaaacccataaatagtgcttttataaagtttagttcaccggaacctgagttcagtatttgacattagctttttgtccaaagagttgaagcctgctggaggtctttgctcaaataataaataccacatatttccaagtgtgttcaggtataggcactaggtactgtctgtttacttcatgttaggcacattacatgcattggctaatcaaatcctcatcaattacatatgtaataatctaaacttgcctccttgtattataaatggaaataatcctgtttatttaaacgggttttcatgtacctgtagggattaggaaactcaaatggcctttttaatacctttccctagtttgagctccctgttctctttaacagataaaacaacatatttgcttcagcctggaatctgtttttggtgctttggtgcagagacaggaaatgggcactcagagtcacactggtagttgcacactgtatctacagagggcgtgtctcatctgtactctgctgggttacaggatttcagtaggtatttgtgtccacctgagaattctgtttattacctttcatttgacagtgtctttcctttctgcagttgattttgctagagaggcaattcataaggtgaggtcctgttcatagtatgacttgctttctcaatatctccttcaatttttagtaactcttggtctatttggtgtctttaaaaaaaataacctagtaataaagacttcttttaatgtggaaatgtggtctggtagtaagttatttctttccacatgtaactgacccaatctggtttccaaatgagaagtgtgcaggccccagaggttgagaagccatatttcaactgtgaaaaaaatctgcttcctgcatctgttgaaatatagttgttcatacttgccatcccttatctttcttgtaacaatttgcacagttcttgccagaataaatgccattatctgtatgtttcagggagttccccaatttgatcatttttgtgtgtgtgtggtgtgtgtgtgagagagagagatactgcagtaaaacatttctaaaggatgaaagctcttgtatggcatagatatgaattccttcctctggtaataattaggttattcccagaagcacagtgtcattctttaaataaaagctttcctgtttaaagcttttcaaaggagcagaccaccttgaagattccccctagggttgatatgtgtctaattcattttataaaaattattcttgtcttcattttaaagctttggctatatagtcagaaatgtcctaaataacaaactattttgtatttaatttagggaagactaaagggaagaaaaatgaaaactcagtctttatgtaagctccaaggatattagggcttaaagggcttttctagttttatgagaatttgtactactgatttttatatattcctgtttttgagatgaacagatctctggggaaattgttgagttacaatggcatttcactgtgatccctctcaagctcagatcagttctataacccaatgacaacctgtctctttggtttactgtcctgtgaaatgtcagctcaagtttcccagaagtcgtgtgtttatgatgagtcagagtgcttttcctcggtgggacagttgctggccctcttaattttggtgtatgtgcttccaagtatctaaacctccagtctgatctgtatatgctatcctaactgttaattgtattattgattatgttgattatcttgcttgaaggttcatacttttcaatttgatagaaataaagtttttttctgcttatagctagcgaa

SEQ ID NO: 133152 - DNA, 2037 bp, Homo sapiens
  misc_feature (5)..(5): n is a, c, g, or t
cagantccaaacagtgcccagagtccaaacagtgccccccctgctgccctctagcagccaaactcagatgagttccattgttaccctaggtgtgcccatctctttggtagggaaggagaaaggtaagaatagccatcagtgaggaaggattcttggagcgaggagccactgtggtttttcctgctatttaagatgttgagaccggataactttagaaagatacctgcacaaacccataaatagtgcttttataaagtttagttcaccggaacctgagttcagtatttgacattagctttttgtccaaagagttgaagcctgctggaggtctttgctcaaataataaataccacatatttccaagtgtgttcaggtataggcactaggtactgtctgtttacttcatgttaggcacattacatgcattggctaatcaaatcctcatcaattacatatgtaataatctaaacttgcctccttgtattataaatggaaataatcctgtttatttaaacgggttttcatgtacctgtagggattaggaaactcaaatggcctttttaatacctttccctagtttgagctccctgttctctttaacagataaaacaacatatttgcttcagcctggaatctgtttttggtgctttggtgcagagacaggaaatgggcactcagagtcacactggtagttgcacactgtatctacagagggcgtgtctcatctgtactctgctgggttacaggatttcagtaggtatttgtgtccacctgagaattctgtttattacctttcatttgacagtgtctttcctttctgcagttgattttgctagagaggcaattcataaggtgaggtcctgttcatagtatgacttgctttctcaatatctccttcaatttttagtaactcttggtctatttggtgtctttaaaaaaaataacctagtaataaagacttcttttaatgtggaaatgtggtctggtagtaagttatttctttccacatgtaactgacccaatctggtttccaaatgagaagtgtgcaggccccagaggttgagaagccatatttcaactgtgaaaaaaatctgcttcctgcatctgttgaaatatagttgttcatacttgccatcccttatctttcttgtaacaatttgcacagttcttgccagaataaatgccattatctgtatgtttcagggagttccccaatttgatcatttttgtgtgtgtgtggtgtgtgtgtgagagagagagatactgcagtaaaacatttctaaaggatgaaagctcttgtatggcatagatatgaattccttcctctggtaataattaggttattcccagaagcacagtgtcattctttaaataaaagctttcctgtttaaagcttttcaaaggagcagaccaccttgaagattccccctagggttgatatgtgtctaattcattttataaaaattattcttgtcttcattttaaagctttggctatatagtcagaaatgtcctaaataacaaactattttgtatttaatttagggaagactaaagggaagaaaaatgaaaactcagtctttatgtaagctccaaggatattagggcttaaagggcttttctagttttatgagaatttgtactactgatttttatatattcctgtttttgagatgaacagatctctggggaaattgttgagttacaatggcatttcactgtgatccctctcaagctcagatcagttctataacccaatgacaacctgtctctttggtttactgtcctgtgaaatgtcagctcaagtttcccagaagtcgtgtgtttatgatgagtcagagtgcttttcctcggtgggacagttgctggccctcttaattttggtgtatgtgcttccaagtatctaaacctccagtctgatctgtatatgctatcctaactgttaattgtattattgattatgttgattatcttgcttgaaggttcatacttttcaatttgatagaaataaagtttttttctgcttatagctagcgaa

SEQ ID NO: 133153 - DNA, 1684 bp, Homo sapiens
agtccgcctgctactcggtcccggcgctgggctgaggggaggggttgtcttaaaagtctctccttccccctgtaggggcggccggcgagtcccagtgagagcggagggtgccagaggtagggggccgagaaacaaagttcccggggcttcctccggggccgcggtcggggctgcgcgtttgaccgcccccctcctcgcgaaggcaatggcttccaaactcctgcgcgcggtcatcctcgggccgcccggctcgggcaagggcaccgtgtgccagaggatcgcccagaactttggtctccagcatctctccagcggccacttcttgcgggagaacatcaaggccagcaccgaagttggtgagatggcaaagcagtatatagagaaaagtcttttggttccagaccatgtgatcacacgcctaatgatgtccgagttggagaacaggcgtggccagcactggctccttgatggttttcctaggacattaggacaagccgaagccctggacaaaatctgtgaagtggatctagtgatcagtttgaatattccatttgaaacacttaaagatcgtctcagccgccgttggattcaccctcctagcggaagggtatataacctggacttcaatccacctcatgtacatggtattgatgacgtcactggtgaaccgttagtccagcaggaggatgataaacccgaagcagttgctgccaggctaagacagtacaaagacgtggcaaagccagtcattgaattatacaagagccgaggagtgctccaccaattttccggaacggagacgaacaaaatctggccctacgtttacacacttttctcaaacaagatcacacctattcagtccaaagaagcatattgaccctgcccaatggaagaaccaggaagatgtggtcattcattcaatagtgtgtgtagtattggtgctgtgtccaaattagaagctagctgaggtagcttgcagcatcttttctagttgaaatggtgaactgataggaaaacaaatgagtagaaagagttcatgaagaggccctcctctgcctttcaaaaggctggtcacctacacatgtttaaggtgtctctgcacatgtctcaagcccatcacaagaaagcaagtacagtgtggatttcaaatggtgtgtaacttcagctccagctggtttttgacagctgttgctgtggtaatatttttgacatgtgatggtgatagtctctggttctccccatccccacaaaggctgttgaaccacagcaccaggaagcctgagaatgaatcctgagggctctagcccaggctttgtcccaggctttctggtgtgtgccctcctggtaacagtgaaattgaagctacttactcatagtggttgtttctctggtcttgagtgactgtgtccacagttcatttttttccggtaggaataactccttttctacatccacgctccatagagtctctccttttcagacatcctgggatgaaagaatttggcttttttttttctttttttttttggacatctgttttcactcttaggcttttaaacaatagttattgcttttatccctctcagattctaataactgagagcgatggggctatattgaatctctgtatgcactgagaactgagctatgaagaggatcttattaaactgctggtctgacttta

SEQ ID NO: 133154 - DNA, 2191 bp, Homo sapiens
agtccgcctgctactcggtcccggcgctgggctgaggggaggggttgtcttaaaagtctctccttccccctgtaggggcggccggcgagtcccagtgagagcggagggtgccagaggtagggggccgagaaacaaagttcccggggcttcctccggggccgcggtcggggctgcgcgtttgaccgcccccctcctcgcgaaggcaatggcttccaaactcctgcgcgcggtcatcctcgggccgcccggctcgggcaagggcaccgtgtgccagaggatcgcccagaactttggtctccagcatctctccagcggccacttcttgcgggagaacatcaaggccagcaccgaagttggtgagatggcaaagcagtatatagagaaaagtcttttggttccagaccatgtgatcacacgcctaatgatgtccgagttggagaacaggcgtggccagcactggctccttgatggttttcctaggacattaggacaagccgaagccctggacaaaatctgtgaagtggatctagtgatcagtttgaatattccatttgaaacacttaaagatcgtctcagccgccgttggattcaccctcctagcggaagggtatataacctggacttcaatccacctcatgtacatggtattgatgacgtcactggtgaaccgttagtccagcaggaggatgataaacccgaagcagttgctgccaggctaagacagtacaaagacgtggcaaagccagtcattgaattatacaagagccgaggagtgctccaccaattttccggaacggagacgaacaaaatctggccctacgtttacacacttttctcaaacaagatcacacctattcagtccaaagaagcatattgaccctgcccaatggaagaaccaggaagatgtggtcattcattcaatagtgtgtgtagtattggtgctgtgtccaaattagaagctagctgaggtagcttgcagcatcttttctagttgaaatggtgaactgataggaaaacaaatgagtagaaagagttcatgaagaggccctcctctgcctttcaaaaggctggtcacctacacatgtttaaggtgtctctgcacatgtctcaagcccatcacaagaaagcaagtacagtgtggatttcaaatggtgtgtaacttcagctccagctggtttttgacagctgttgctgtggtaatatttttgacatgtgatggtgatagtctctggttctccccatccccacaaaggctgttgaaccacagcaccaggaagcctgagaatgaatcctgagggctctagcccaggctttgtcccaggctttctggtgtgtgccctcctggtaacagtgaaattgaagctacttactcatagtggttgtttctctggtcttgagtgactgtgtccacagttcatttttttccggtaggaataactccttttctacatccacgctccatagagtctctccttttcagacatcctgggatgaaagaatttggcttttttttttctttttttttttggacatctgttttcactcttaggcttttaaacaatagttattgcttttatccctctcagattctaataactgagagcgatggggctatattgaatctctgtatgcactgagaactgagctatgaagaggatcttattaaactgctggtctgactttatggattgacactgttcctttcttttattgtgaaaaaaaaaaaaaaccctgaaagtcttgggaaccccctaaagtcttttgggaatcctcaaaaagcatgggaagttaagtatttagctacataaatgttgtaagatcatatcttatgtatagaagtaataagaccatttggaattactggactaattgaatagttaaggtttctattcgggacaataaaatgtattttgaaagtgctgctaactattgatgctgacagtgtttcactcctatgagtgacccaaacatattataaatatgtggtaaagggaatggagcctgtggggttgagcagaatgttgtactagctgtgcctggactgagtataacagctttatgattatgagaaaacaaattctttattttttttttctgttccaaagattcatcctatggggtggccataaagtctagaattagatactaatattttgtcattcattataacatatcaataaaccatttgtta

SEQ ID NO: 133155 - DNA, 6615 bp, Homo sapiens
agtccgcctgctactcggtcccggcgctgggctgaggggaggggttgtcttaaaagtctctccttccccctgtaggggcggccggcgagtcccagtgagagcggagggtgccagaggtagggggccgagaaacaaagttcccggggcttcctccggggccgcggtcggggctgcgcgtttgaccgcccccctcctcgcgaaggcaatggcttccaaactcctgcgcgcggtcatcctcgggccgcccggctcgggcaagggcaccgtgtgccagaggatcgcccagaactttggtctccagcatctctccagcggccacttcttgcgggagaacatcaaggccagcaccgaagttggtgagatggcaaagcagtatatagagaaaagtcttttggttccagaccatgtgatcacacgcctaatgatgtccgagttggagaacaggcgtggccagcactggctccttgatggttttcctaggacattaggacaagccgaagccctggacaaaatctgtgaagtggatctagtgatcagtttgaatattccatttgaaacacttaaagatcgtctcagccgccgttggattcaccctcctagcggaagggtatataacctggacttcaatccacctcatgtacatggtattgatgacgtcactggtgaaccgttagtccagcaggaggatgataaacccgaagcagttgctgccaggctaagacagtacaaagacgtggcaaagccagtcattgaattatacaagagccgaggagtgctccaccaattttccggaacggagacgaacaaaatctggccctacgtttacacacttttctcaaacaagatcacacctattcagtccaaagaagcatattgaccctgcccaatggaagaaccaggaagatgtggtcattcattcaatagtgtgtgtagtattggtgctgtgtccaaattagaagctagctgaggtagcttgcagcatcttttctagttgaaatggtgaactgataggaaaacaaatgagtagaaagagttcatgaagaggccctcctctgcctttcaaaaggctggtcacctacacatgtttaaggtgtctctgcacatgtctcaagcccatcacaagaaagcaagtacagtgtggatttcaaatggtgtgtaacttcagctccagctggtttttgacagctgttgctgtggtaatatttttgacatgtgatggtgatagtctctggttctccccatccccacaaaggctgttgaaccacagcaccaggaagcctgagaatgaatcctgagggctctagcccaggctttgtcccaggctttctggtgtgtgccctcctggtaacagtgaaattgaagctacttactcatagtggttgtttctctggtcttgagtgactgtgtccacagttcatttttttccggtaggaataactccttttctacatccacgctccatagagtctctccttttcagacatcctgggatgaaagaatttggcttttttttttctttttttttttggacatctgttttcactcttaggcttttaaacaatagttattgcttttatccctctcagattctaataactgagagcgatggggctatattgaatctctgtatgcactgagaactgagctatgaagaggatcttattaaactgctggtctgactttatggattgacactgttcctttcttttattgtgaaaaaaaaaaaaaaccctgaaagtcttgggaaccccctaaagtcttttgggaatcctcaaaaagcatgggaagttaagtatttagctacataaatgttgtaagatcatatcttatgtatagaagtaataagaccatttggaattactggactaattgaatagttaaggtttctattcgggacaataaaatgtattttgaaagtgctgctaactattgatgctgacagtgtttcactcctatgagtgacccaaacatattataaatatgtggtaaagggaatggagcctgtggggttgagcagaatgttgtactagctgtgcctggactgagtataacagctttatgattatgagaaaacaaattctttattttttttttctgttccaaagattcatcctatggggtggccataaagtctagaattagatactaatattttgtcattcattataacatatcaataaaccatttgttaaaagatttgcctggtttccagacttggtggccaccttgaataattcttgctgtcttctgggaaggatgatgaaatttattcctgctgccttaaaaatatgtatcccttcttcacccatcatgactgtccccagtgagtgtcctttactattcttgggagtgactcctgtctaacttttcatactggcgagaagaaaagaagcctattttaacactttagtggtgttgaaacacattacttactttctgaagatgtcccagtgaatcctctgtcaattcactgccatatgtaatctatatgataaggaatgcatcttccttctaagtactgcccaaactcttgccagctcctctcccattgtcccttcatgtgaatatttcttggctaccttagtggaaatatagatcagttttctccccatccatcctctcaaacataatgagattgtttactttttagatttatgcagtgaaaatgcccagtcaggtctgaatcgtcagtgcattatattgactctgagcactttagaatttagagttgcaattgaatgccagctgtggagatggggtgcatatcagatatataaataaagctcaggtttgctagggaaccaggtatagagaaaaataagtctgatatgaggaaaattgcacaatttagagtagttatgccgtagagaaaatttccacaaactaggaaatgtagagagttattctatagaatactcaaaagaggaaagtatgtgatttttggaaacaggaaaatcttcaaacttctttcttcacttccctttgtgtttagctgaccctccaatgtgatcattgcctttggagtttgggagaggtacgggaagtggcctgatccctgcttccatacttcactcctccatccatccttccctccctcttcccctccagctaaatggacaattctagccaacattgagtcactcaataagtctcaacagtgggtgtgtttgctgagattgtccagcggttgagcagtttggtctcacctccctcgctagttgagaccaaaaagagacaaataactttttcatggtctttgaaacataatgcttatttcgtggtcaatggctttaaaaaaatctgtttcttgttttcttcaacaaactcactagttttcccttaaatgatattgtaaaaattaaagtaatcttgaaaatgttttgacaaaagtaaaattaaagggacatcttttaaaacttgttttgtttttttttttctattgccacacatgaccgttccttcacctttaagcaaagagagtggttcagatggtttctaagatgccaacctgacctcgcattctgtcattctacccagctcttaattcaatttgcttccattatcctaacaggcttctttcttacttagaacttggaaaggctgctgtatttaataccctccaacactaacgcagacttaagataggtactgtttattgaaaacctactgagtgaaatgtgcggttttaggaccttcataaacatctcatttaatctttctagcatcctgtgaaacagccatgatttcacgttgataaacaaagaagacaggggtcccagggatgtgaagcatcttgcccaggcttctgctgctggtgaccagtgtagccaggactccaacccaggttttcctgactcagaagactgagctttttcctggatgttattaatagctaattgtgtccaagcaaccaagggccttgagtctgcttggttctgcttatggcctcacatcaagaaatggagctagtccatgtctgtagtcccaatgctttgggaagccatgatgggaaggttgtcggaggccaaaagttcaagaccaggctgggcaatatcacaagactccatctctacggaaaagtaaaaaattagccagtcatggtggtgtacacttatggtcctagttactcaggagacttaggcaggaggattgcttgatcctaggaattcgaggctgcagtgagctatgattgcacctctgcacccaagcctgggcgacacagcgagaccctctctcttaaaaaaaaaaaatagcagagctcaccaaagtgatgttcacctttttatgacattcctttttcttagcttaagaaaagaaagctgctagatgagagtcttagttttcctgcataagacctcctttatgaatagaataaaagactgtcaaagtaggctgggcttgggcccaggctaatctatgaaggaagcaagctcgtgttccttacctatccttttggtgtccattggattgtgccccgaagtggcctttacccttgagccgtccccagccatggtgctcacacataggcttttgagctccttggagctatccagatcctgctcacttttccttcctgagatcagaacaaatcacccccttactcccactccaaacaaggccttgatgataaactaatccttcctaaaatgctggtaggtaaacaagcaatgatgaagcattgaacacaggttaactcctgacttttgtaccattgtctattccattacacattaacatgactctgaatgccagatccaaacctttgcccaccatctgcttgtcgtgcaacagttgaggcagtaaccaggggagattcacttcctgtcttgtccttccccagggatcacccccctgctgccctctagcagccaaactcagatgagttccattgttaccctaggtgtgcccatctctttggtagggaaggagaaaggtaagaatagccatcagtgaggaaggattcttggagcgaggagccactgtggtttttcctgctatttaagatgttgagaccggataactttagaaagatacctgcacaaacccataaatagtgcttttataaagtttagttcaccggaacctgagttcagtatttgacattagctttttgtccaaagagttgaagcctgctggaggtctttgctcaaataataaataccacatatttccaagtgtgttcaggtataggcactaggtactgtctgtttacttcatgttaggcacattacatgcattggctaatcaaatcctcatcaattacatatgtaataatctaaacttgcctccttgtattataaatggaaataatcctgtttatttaaacgggttttcatgtacctgtagggattaggaaactcaaatggcctttttaatacctttccctagtttgagctccctgttctctttaacagataaaacaacatatttgcttcagcctggaatctgtttttggtgctttggtgcagagacaggaaatgggcactcagagtcacactggtagttgcacactgtatctacagagggcgtgtctcatctgtactctgctgggttacaggatttcagtaggtatttgtgtccacctgagaattctgtttattacctttcatttgacagtgtctttcctttctgcagttgattttgctagagaggcaattcataaggtgaggtcctgttcatagtatgacttgctttctcaatatctccttcaatttttagtaactcttggtctatttggtgtctttaaaaaaaataacctagtaataaagacttcttttaatgtggaaatgtggtctggtagtaagttatttctttccacatgtaactgacccaatctggtttccaaatgagaagtgtgcaggccccagaggttgagaagccatatttcaactgtgaaaaaaatctgcttcctgcatctgttgaaatatagttgttcatacttgccatcccttatctttcttgtaacaatttgcacagttcttgccagaataaatgccattatctgtatgtttcagggagttccccaatttgatcatttttgtgtgtgtgtggtgtgtgtgtgagagagagagatactgcagtaaaacatttctaaaggatgaaagctcttgtatggcatagatatgaattccttcctctggtaataattaggttattcccagaagcacagtgtcattctttaaataaaagctttcctgtttaaagcttttcaaaggagcagaccaccttgaagattccccctagggttgatatgtgtctaattcattttataaaaattattcttgtcttcattttaaagctttggctatatagtcagaaatgtcctaaataacaaactattttgtatttaatttagggaagactaaagggaagaaaaatgaaaatttcccagaagtcgtgtgtttatgatgagtcagagtgcttttcctcggtgggacagttgctggccctcttaattttggtgtatgtgcttccaagtatctaaacctccagtctgatctgtatatgctatcctaactgttaattgtattattgattatgttgattatcttgcttgaaggttcatacttttcaatttgatagaaataaagtttttttctgcttatagctagcgaa

SEQ ID NO: 133156 - DNA, 6785 bp, Homo sapiens
  misc_feature (6696)..(6698): n is a, c, g, or t
  misc_feature (6705)..(6705): n is a, c, g, or t
  misc_feature (6708)..(6708): n is a, c, g, or t
agtccgcctgctactcggtcccggcgctgggctgaggggaggggttgtcttaaaagtctctccttccccctgtaggggcggccggcgagtcccagtgagagcggagggtgccagaggtagggggccgagaaacaaagttcccggggcttcctccggggccgcggtcggggctgcgcgtttgaccgcccccctcctcgcgaaggcaatggcttccaaactcctgcgcgcggtcatcctcgggccgcccggctcgggcaagggcaccgtgtgccagaggatcgcccagaactttggtctccagcatctctccagcggccacttcttgcgggagaacatcaaggccagcaccgaagttggtgagatggcaaagcagtatatagagaaaagtcttttggttccagaccatgtgatcacacgcctaatgatgtccgagttggagaacaggcgtggccagcactggctccttgatggttttcctaggacattaggacaagccgaagccctggacaaaatctgtgaagtggatctagtgatcagtttgaatattccatttgaaacacttaaagatcgtctcagccgccgttggattcaccctcctagcggaagggtatataacctggacttcaatccacctcatgtacatggtattgatgacgtcactggtgaaccgttagtccagcaggaggatgataaacccgaagcagttgctgccaggctaagacagtacaaagacgtggcaaagccagtcattgaattatacaagagccgaggagtgctccaccaattttccggaacggagacgaacaaaatctggccctacgtttacacacttttctcaaacaagatcacacctattcagtccaaagaagcatattgaccctgcccaatggaagaaccaggaagatgtggtcattcattcaatagtgtgtgtagtattggtgctgtgtccaaattagaagctagctgaggtagcttgcagcatcttttctagttgaaatggtgaactgataggaaaacaaatgagtagaaagagttcatgaagaggccctcctctgcctttcaaaaggctggtcacctacacatgtttaaggtgtctctgcacatgtctcaagcccatcacaagaaagcaagtacagtgtggatttcaaatggtgtgtaacttcagctccagctggtttttgacagctgttgctgtggtaatatttttgacatgtgatggtgatagtctctggttctccccatccccacaaaggctgttgaaccacagcaccaggaagcctgagaatgaatcctgagggctctagcccaggctttgtcccaggctttctggtgtgtgccctcctggtaacagtgaaattgaagctacttactcatagtggttgtttctctggtcttgagtgactgtgtccacagttcatttttttccggtaggaataactccttttctacatccacgctccatagagtctctccttttcagacatcctgggatgaaagaatttggcttttttttttctttttttttttggacatctgttttcactcttaggcttttaaacaatagttattgcttttatccctctcagattctaataactgagagcgatggggctatattgaatctctgtatgcactgagaactgagctatgaagaggatcttattaaactgctggtctgactttatggattgacactgttcctttcttttattgtgaaaaaaaaaaaaaaccctgaaagtcttgggaaccccctaaagtcttttgggaatcctcaaaaagcatgggaagttaagtatttagctacataaatgttgtaagatcatatcttatgtatagaagtaataagaccatttggaattactggactaattgaatagttaaggtttctattcgggacaataaaatgtattttgaaagtgctgctaactattgatgctgacagtgtttcactcctatgagtgacccaaacatattataaatatgtggtaaagggaatggagcctgtggggttgagcagaatgttgtactagctgtgcctggactgagtataacagctttatgattatgagaaaacaaattctttattttttttttctgttccaaagattcatcctatggggtggccataaagtctagaattagatactaatattttgtcattcattataacatatcaataaaccatttgttaaaagatttgcctggtttccagacttggtggccaccttgaataattcttgctgtcttctgggaaggatgatgaaatttattcctgctgccttaaaaatatgtatcccttcttcacccatcatgactgtccccagtgagtgtcctttactattcttgggagtgactcctgtctaacttttcatactggcgagaagaaaagaagcctattttaacactttagtggtgttgaaacacattacttactttctgaagatgtcccagtgaatcctctgtcaattcactgccatatgtaatctatatgataaggaatgcatcttccttctaagtactgcccaaactcttgccagctcctctcccattgtcccttcatgtgaatatttcttggctaccttagtggaaatatagatcagttttctccccatccatcctctcaaacataatgagattgtttactttttagatttatgcagtgaaaatgcccagtcaggtctgaatcgtcagtgcattatattgactctgagcactttagaatttagagttgcaattgaatgccagctgtggagatggggtgcatatcagatatataaataaagctcaggtttgctagggaaccaggtatagagaaaaataagtctgatatgaggaaaattgcacaatttagagtagttatgccgtagagaaaatttccacaaactaggaaatgtagagagttattctatagaatactcaaaagaggaaagtatgtgatttttggaaacaggaaaatcttcaaacttctttcttcacttccctttgtgtttagctgaccctccaatgtgatcattgcctttggagtttgggagaggtacgggaagtggcctgatccctgcttccatacttcactcctccatccatccttccctccctcttcccctccagctaaatggacaattctagccaacattgagtcactcaataagtctcaacagtgggtgtgtttgctgagattgtccagcggttgagcagtttggtctcacctccctcgctagttgagaccaaaaagagacaaataactttttcatggtctttgaaacataatgcttatttcgtggtcaatggctttaaaaaaatctgtttcttgttttcttcaacaaactcactagttttcccttaaatgatattgtaaaaattaaagtaatcttgaaaatgttttgacaaaagtaaaattaaagggacatcttttaaaacttgttttgtttttttttttctattgccacacatgaccgttccttcacctttaagcaaagagagtggttcagatggtttctaagatgccaacctgacctcgcattctgtcattctacccagctcttaattcaatttgcttccattatcctaacaggcttctttcttacttagaacttggaaaggctgctgtatttaataccctccaacactaacgcagacttaagataggtactgtttattgaaaacctactgagtgaaatgtgcggttttaggaccttcataaacatctcatttaatctttctagcatcctgtgaaacagccatgatttcacgttgataaacaaagaagacaggggtcccagggatgtgaagcatcttgcccaggcttctgctgctggtgaccagtgtagccaggactccaacccaggttttcctgactcagaagactgagctttttcctggatgttattaatagctaattgtgtccaagcaaccaagggccttgagtctgcttggttctgcttatggcctcacatcaagaaatggagctagtccatgtctgtagtcccaatgctttgggaagccatgatgggaaggttgtcggaggccaaaagttcaagaccaggctgggcaatatcacaagactccatctctacggaaaagtaaaaaattagccagtcatggtggtgtacacttatggtcctagttactcaggagacttaggcaggaggattgcttgatcctaggaattcgaggctgcagtgagctatgattgcacctctgcacccaagcctgggcgacacagcgagaccctctctcttaaaaaaaaaaaatagcagagctcaccaaagtgatgttcacctttttatgacattcctttttcttagcttaagaaaagaaagctgctagatgagagtcttagttttcctgcataagacctcctttatgaatagaataaaagactgtcaaagtaggctgggcttgggcccaggctaatctatgaaggaagcaagctcgtgttccttacctatccttttggtgtccattggattgtgccccgaagtggcctttacccttgagccgtccccagccatggtgctcacacataggcttttgagctccttggagctatccagatcctgctcacttttccttcctgagatcagaacaaatcacccccttactcccactccaaacaaggccttgatgataaactaatccttcctaaaatgctggtaggtaaacaagcaatgatgaagcattgaacacaggttaactcctgacttttgtaccattgtctattccattacacattaacatgactctgaatgccagatccaaacctttgcccaccatctgcttgtcgtgcaacagttgaggcagtaaccaggggagattcacttcctgtcttgtccttccccagggatcacccccctgctgccctctagcagccaaactcagatgagttccattgttaccctaggtgtgcccatctctttggtagggaaggagaaaggtaagaatagccatcagtgaggaaggattcttggagcgaggagccactgtggtttttcctgctatttaagatgttgagaccggataactttagaaagatacctgcacaaacccataaatagtgcttttataaagtttagttcaccggaacctgagttcagtatttgacattagctttttgtccaaagagttgaagcctgctggaggtctttgctcaaataataaataccacatatttccaagtgtgttcaggtataggcactaggtactgtctgtttacttcatgttaggcacattacatgcattggctaatcaaatcctcatcaattacatatgtaataatctaaacttgcctccttgtattataaatggaaataatcctgtttatttaaacgggttttcatgtacctgtagggattaggaaactcaaatggcctttttaatacctttccctagtttgagctccctgttctctttaacagataaaacaacatatttgcttcagcctggaatctgtttttggtgctttggtgcagagacaggaaatgggcactcagagtcacactggtagttgcacactgtatctacagagggcgtgtctcatctgtactctgctgggttacaggatttcagtaggtatttgtgtccacctgagaattctgtttattacctttcatttgacagtgtctttcctttctgcagttgattttgctagagaggcaattcataaggtgaggtcctgttcatagtatgacttgctttctcaatatctccttcaatttttagtaactcttggtctatttggtgtctttaaaaaaaataacctagtaataaagacttcttttaatgtggaaatgtggtctggtagtaagttatttctttccacatgtaactgacccaatctggtttccaaatgagaagtgtgcaggccccagaggttgagaagccatatttcaactgtgaaaaaaatctgcttcctgcatctgttgaaatatagttgttcatacttgccatcccttatctttcttgtaacaatttgcacagttcttgccagaataaatgccattatctgtatgtttcagggagttccccaatttgatcatttttgtgtgtgtgtggtgtgtgtgtgagagagagagatactgcagtaaaacatttctaaaggatgaaagctcttgtatggcatagatatgaattccttcctctggtaataattaggttattcccagaagcacagtgtcattctttaaataaaagctttcctgtttaaagcttttcaaaggagcagaccaccttgaagattccccctagggttgatatgtgtctaattcattttataaaaattattcttgtcttcattttaaagctttggctatatagtcagaaatgtcctaaataacaaactattttgtatttaatttagggaagactaaagggaagaaaaatgaaaactcagtctttatgtaagctccaaggatattagggcttaaagggcttttctagttttatgagaatttgtactactgatttttatatattcctgtttttgagatgaacagatctctggggaaattgttgagttacaatggcatttcactgtgatccctctcaagctcagatcagttctataacccaatgacaacctgtctctttggtttactgtcctgtgaaatgtcagctcaagtttcccagaagtcgtgtgtttatgatgagtcagagtgcttttcctcggtgggacagttgctggccctcttaattggggtnnngttcagnttnaactcagttgttgttttgtatctaacggaaggtatgggaagggaatggcgaggggcatcatggagaaaaagttgggc

SEQ ID NO: 133157 - DNA, 213 bp, Homo sapiens
ttctggtttcatttagcattggaacctcagtgtatggtgcttggtatatggcagacactcaacactttagaataaataaattaataagtatacacatgcatgaatgtgtattcctacctgtgaactaaaaaagatacttcaaagctcttttgacgtgttgaatattgatataggagttaaaaagaaattatttaggcagatagtgaggataag

SEQ ID NO: 133158 - DNA, 832 bp, Homo sapiens
gtctggatattttcaactaacctgtgttgtgttccagcttattaatcctttcttttattggatccaagtagctattaaacccatgtattcttaatttcaatttgtatatttttcagttcttggttattttttacaaattcatgttctttggtgaaattctttaccttgccatccaagcgttgtacattttagtcactaagattttcagatctatttctgatgactctcctatctgggtcactttgaactctatttgtgtttgctgttttacatctttgtcctatttgttaggacagttgctaattttgtgtttgattactggatattgtatattggaaactgtaaaggctctaaatgatgtcttccaccagactagattcactctgtactctggaaagcagcagagagacacagcacctgtgatggattttaaatatgttccacaaattttcgatacccctccttttaaatgtgaagcctatttccatctgggactatacttagtgactcacttgtagtgaatagaatatggcacaagtgacaatatttttggtaggcataaaaaaacatagccttccttgctttcccttagatgacttgctctggagcaagttaactgtcatgtcataagaacatcaagcaatctatgcagagctctacatggtgaggcatcctgctaatagctatgtgaacaagccgttttaggctctgacccccagccctggtcagacctttggtgactacagcacctgccaacatcctgactgcaacctcatgagaaaacgtgaggtagaactcctgaactacacgacttcctacttatttacccaca

SEQ ID NO: 133159 - DNA, 401 bp, Homo sapiens
ttttcctgtgcttattggtcatttttataacttctttagaggaatgtttattcaagccttttgcctttttccaaattgggccatctttttattgttgatttataagagttcttcatatacctgtacattaaaggcttatcagacatgatttgcaaatattttttcccgttctgtaacttttttcactttaagtgtcctttgatacacaagagttttacattttaatgaagttttacatttacaatttatctatttcttttcttttgttgcttgtgcttttggtgtcatttctaagaatccactgccaaatccaaggtcatgggaatatcttaatttctccttccttttggaaggctatagatttttgatgaatatagacttaactagttgacagttttctt

SEQ ID NO: 133160 - DNA, 670 bp, Homo sapiens
ttagcatcttataaagaaaaatctgttttctcaaggctctatagtaatgatattttgtttaagtttgtccaatatggtatttagttcttcctattaaggaggagtctctaaacttcagtctgtgggccaaatctacctcctgtttctgtttaattattttattgggggggggtgatatttatcccctcaagcatttattctttatgttacaaacaatccaattatattattttagttatttttaaatgtccaatctaattattattgactgtagtcaccctgttgtgctatcaaatactaggtcttattcattctttctaactaatgtttttgtacccattaaccattcctttcccattccccatctcaccactacacttcgcagcctctggtaaccatccttctactctctgtgtccatgagttaaattgttttgatttttagatcccaaaaataaatgaaaacaagcgatgtttgtctttctgtgcctggcttatttcacttgacataatgatctccagttccatccatgttgttgcaaatggctggacctcattcttttttatggctgaataatactccattgtctataagtaccacattttttctttatccattcgtctgttgatggacatttaggctgcttccaaatcttggctattgtgatcag

SEQ ID NO: 133161 - DNA, 427 bp, Homo sapiens
aaccttaaaagttacattgcttagtgcctttcatatcaactcgtggacaaagctggctttaaatctcaggccagaattcagcccaatttaaacaagtgttagtgtgagtgtattgtgtctaagatagaaaagtgtttagtaagttcaacgttccccatgcttactgtccaaggcaatcccttcatcaaaattcctcactgcaccacagtctaatattgttagtggatgtacagggtcacagagcatatcttattggtctgtactaagataagaaccagagttttgttctagagctgtgaaatgaaattaaaaatactacacacaatgcaaggatatggaataggagcatcaaagctccccaaaaaagtggtctcggatgcatttgcagctatatagtttatttgagcattttatatttaacaagaaa

SEQ ID NO: 133162 - DNA, 273 bp, Homo sapiens
caggatgttgtatttcattatttttatatatagtcaaattgttctttacaattttaaacatttcttttcatgctgtcattatcaattgaattttgttttactaaaatgactaaataattttattcgagtaagtagaacctatggaaaaattatatcttttgatccttttcagcttttcttttacaggggcagttttaattatttgatttttccattggtcagaagtattagataatagacatttgataatttccagtgggtctctgctaagac

SEQ ID NO: 133163 - DNA, 427 bp, Homo sapiens
ttcaagtaggccttagtggttcctggatcccactatacccatttctacatcattcatgctccccttcttttagacacttctaacattctccaagctctttgaagctgaaaaccttgttcctatattactgcgaaaacagaagcaattagaagagaactttcacaagttcccactgtatccactctttcctgtacctatgtccctagattctctcctttcccattaaaacttcctaaggccaacccttccacctatgtactattaaaggacattgttctaacaattttctcattatttttcctcataaatgcttccctaaatttacttggattactctcacaatcatgcagcaaatgtgatgtaatttcttccatcttaaaaaacaaaacaatttatttctctcctcttccagtcaccactccatctc

SEQ ID NO: 133164 - DNA, 186 bp, Homo sapiens
atatcccaccctcctaaccacagaggttcaggctgcagtgcccttaaccacagcaggagcgtgctgcctccctctaagggagcaactgaaccccacttaaatcctcaactagagcagaaatcacactggaggccaggtgcggtggctcacgcctgtaatcccagcactttgggaggccgaggcagg

SEQ ID NO: 133165 - DNA, 475 bp, Homo sapiens
ctattcagcttgattaggacaaagccccacgcagcttagcctggtcaggaacaacggcgagcctctaccccgattgggagcagcaatgggccccgcctcactggatctgaagtgcagcagataccctgctggatccggaggggtgtaagtcagtggtggtgtctgcaacaacagcaatcagcatgtggtagatggcgagcgaaagctcagttcgaaccagaacaatacacggaccacatagtatgcagttgtaagatttaatataatgacaaacagagctcccatacaacaggaggggacccaaagggggttgcctttgccggctcaaatgcctgggtttatatcccaatcattgtccctccccctgtgctctcaggcaatagatgattggctatttctttacctcctgttttagcctaattagcattttagtgagctctctttactacctgattggtcaggtgtgagctaagtt

SEQ ID NO: 133166 - DNA, 486 bp, Homo sapiens
cgctcagagtactctagctatatggataaagccattcgacagcagcttagcctggtcaggaacaacggcgagcctctaccccgattgggagcagcaatgggccccgcctcactggatctgaagtgcagcagataccctgctggatccggaggggtgtaagtcagtggtggtgtctgcaacaacagcaatcagcatgtggtagatggcgagcgaaagctcagttcgaaccagaacaatacacggaccacatagtatgcagttgtaagatttaatataatgacaaacagagctcccatacaacaggaggggacccaaagggggttgcctttgccggctcaaatgcctgggtttatatcccaatcattgtccctccccctgtgctctcaggcaatagatgattggctatttctttacctcctgttttagcctaattagcattttagtgagctctctttactacctgattggtcaggtgtgagctaagtt

SEQ ID NO: 133167 - DNA, 667 bp, Homo sapiens
agtcacagagttgataatttgataatgtttatagacagtatttgaatattttgactcattatggttttaagggtgaattatgagatttacaatttctttgattttgccttttgaggcttaagttggccttgtgaggcaactcagttgcttgatataataaattagaagtgtttttaaaaatttaggggaacttaattgatggcttattactatgactataaaggattttaatccgctaaaattgaattaaataagtggaaggatgatttcaaattatgtaaaaattacttagtttataagtaaaatcaaaatcacaaagtgaacttaaagtcctaagaaaattatagtttcgtttgcaacttaaattaattaaatgttattttaatattcaaatacctatacatggttcctttctatgcacaaaagcctccacttcccactttaaaaacacatcaacacacatggtaaggaaaatcactatgcatatagaagcccaggatgcaacagcacttcctgtatagtaagaaatgtgtggtctttgtggggcataaggtaatgcaaactacataaaaatatgcaccacacgcaatgctgatccaggcagaccagcttccaggaactaaaataaaagcaaagaatcaacaactgaggcgataattaccaaaca

SEQ ID NO: 133168 - DNA, 349 bp, Homo sapiens
tttttttttggtggcaaaatatatataatacaaaattttccatttaacctcaacaaatgctttttgatccacctgtgacagcagggattctcaacccggggtctgggaaacctaaggtaactacaggcacacctgtctttgtcattttcaggggatcagggcagggcgggaggccacagctttcatctgactctaaactgtgagaaggcaagggggagtcagcgtgaccgcccacgctgggaacccggggagggctgtgggcctctccctgtcgcatctgagacctgcagaagcagcaatgttggctgccgaccatctgcagagctaggctctaatccctagtccccag

SEQ ID NO: 133169 - DNA, 171 bp, Homo sapiens
tgttaaaccatccttgcattactggtatgaaacccgcttgaccatggtggattatctttctgatatgccattggattcagttagccagtattctgttaaggatttttctatctatgttcatcagggatactgaactacagatcaatatctttttttgttatgtcctttcct

SEQ ID NO: 133170 - DNA, 852 bp, Homo sapiens
acctgttttgaccgcagaatatacttgtaggagtcagagttcttactagtggtaagacgatagtactggtttgaatttccattccacccttactagccttgtgattgtgggcaagttatttaatatctatgaacctcagttttactaatctataaaatgggaatattttccttataggattattataatgagataacatataaatatgctttttataatgcctatacattctagacactcaaaaaatgaaaaccaccattacttgttattgttatttctactactattatttttactactaccattgttatttttactattaatacaataatattctttctcattccttaattttagttgatacaaaattttttaaaaagtcatgatagtgaaaaacagcagtagtaggcatttctttggatagctagggtaaaaatggggacaaggtcgtgtttctatttataggaacaaacagaaccaagaacctgaatctgtgaggcagtattcattggtcatccaatatgtaagaaaatgttcatgtatcatattttattatgttttccgttacacactacttaaatgaagttgttaaattgtgtattacatatacacatagataaaacctaaagcaaactggaattgcttataaagtttctgatgatttgccttttccttattctttgatgttttataacaatgtatctcaaagcaattttttctttagctgtcttattttaaagctatgttaatgggtcaagatgaagggtaatttgttgtacaggctctctcatacaaaagaacatcctgtcattcatagcagcaaagtacctttgtgcaaagatcaactatcag

SEQ ID NO: 133171 - DNA, 633 bp, Homo sapiens
attgagacatttgtattacatatatatatatatgatagcattgactctggcagcaactctgctagagattatatatgtaaatctcaagtcttgaaacagtgttgtattttggtattggtattcacagccctacttgccacatgatggtagagcagagatttgcactttaactcaaaggcgagtgtgagagtgcttaaaacacctggttagtgcacctagaaaaattagattgatttcagaatggcacaatcataactgtggctctatttaaagtcaaattgcattctctcatgtatcctattttacattcttgtcattatctgaaaacttataaaggttaagtacccttaatctaaaaacccaaaatccaaaatgccctaaaatccacgattttttgagtgctgatgtggtgctcaaagaaaatgcttattggagcattttggattttggatttttggattagagttgctaaactattaaggagattagagatcctaaactattaagaatgtgtgtgtatatatatatgtgtatatatatatatatacacatatatatactattaaacattcttaataatatatgtatatacatatctctctctttctctcaaatattccaaaatctaaaaaa

SEQ ID NO: 133172 - DNA, 249 bp, Homo sapiens
atgcacatgtgtacttattccgcaccaggagggcccttgtgtcaatcaggaaactatattatctagattttattttcaatctggttgtatgttgataatgaacatctttcaatacttgctgtaataaatgaaaatacctaaaataattaagaataaattatgttcaaagtatacttaatactgcacataagcaattctactgaatacagcattgatagtgaaaaattccatttgccatttatggtgaaa

SEQ ID NO: 133173 - DNA, 344 bp, Homo sapiens
  misc_feature (9)..(9): n is a, c, g, or t
ttaaatcanaagtaaccattaaagtgatcttgtaaaaagtcctggtttacctggttatgctaaatctgggtcaaatataagaacaaaaccgtaaatggcattcatagctgaatatagtctcttaaattgtgatgagaacaatgcagatcaaatgttttttgtttattttttaaagtaaatttaaaccagaaattttggatttatttcttagagagaaaatcaggaaaatctttggtttctattcatttcttatgtacctcaaaatttaatcaatcaaaactttgaattttaagaaagagatgtcattaattcgttcaatggaccagcatattgacaactcttct

SEQ ID NO: 133174 - DNA, 771 bp, Homo sapiens
aaatgctacagagaggtgaaagagaagaaagattgagaaaagggactggaacccaacaggtaataaggaatggacccagggtcagaggaggaatggacccacggtcagaggagggcctctccatccctgaccaaaaatgaaacaagacacacaaactggggaatgaatgaaattacaaaccctgctgggtacacatcagaatgttttcagtctccattcagatggaaatttcctgtgggtctggaagcgggaagcagtaggaactgctaaaatgagatggtgaaatgcacattcctaaaggtataaagtgggcacaggaacacctgccacttatctacctcacaaagataaaacacaaattagattcctataaagtgctttgagttctctgccattgtaatagacccaatacctatctttcagccttcagagaacagttcttaacatttgctgaactctccagcattcctgggaggtagatattatcgttggatgaggaaacaaaggccacacagcaagtcaaaagccaaggcaagattagaacagggcctgccttctgtgtggggaagtccagttggctagattccttttgtgtcagtaacaggttctttgatctgtaatacagaagaggcttgtttctggggaggctgtgaaaatagatacattaatgaccacaaggttctctgaaacttaccaagggggttgtgggaaaaaaaggtgcagccagccagattctggaaacaacagaagaaattacaggaggccgagcac

SEQ ID NO: 133175 - DNA, 663 bp, Homo sapiens
ctccctccgcctaattctgcttccctcactaagcagatgccccaggaatctctagcacgcaaggtctgcaggtcttagactctgctttccagagaaactgacctaagacatggggtatttgggtggtatattctctgagcatatacatctctgaaattgcttttatgttggaacaatgacttggctggatttaccattctcagatcaccattcttcctttcaaaatattgtggctatggcgattaatccacactcttctagggtttcagaggaacagcctctggaagaagcctgattgatatgcttttgtaagcctttttcccctactgctttggtgctagcagggttttgaaatttattcttgtaactcaaaaatttcactgggatgtgtctccatgtgcgtttcttttatttaatgtggcctaaaatgtaatgatcatatttggtctgcacagttacttacttttcatctctgaaaagtattcttccagcacaggaatggatctcagcatatctattctgactgtttcggttgctttgggaaaacactccagttttagcttggttctccagtttttaatcttcagtccaccatcttctttctcaacatgtgatgtccttgtcccattcccctatacttcagaagcacactcctcccagtgt

SEQ ID NO: 133176 - DNA, 356 bp, Homo sapiens
acacaaacacacgagcacaaacacacatgcacacaaacacacacatacacatatgcacacaaacacaaacaacacatgagcacaacacatacaagcataaacacagatgcacacacatgcacaaacatgagcacaacacaaacatacaagcataaacacacagatgcacacacatgcacaaacacacacacaaacaacacacacacatgcacacacacaaacacacatgcaaacacacgaacacaagcacaaaacacaaacacatgcagaaacacacatacaagcagaaacacacatgcacacacatgcacaaacatatacacacaatcacacacaagcacacacaaacatatgca

SEQ ID NO: 133177 - DNA, 343 bp, Homo sapiens
gtgagggcaggtgagagtgtctgaggggtgtgtgtgcttgcacgggtgagtgcatatatgtgtgagagcaggtgagagtgtctgaggggtgtgcgtgcttgcacaggtgagtgcatgtatgtgtgagagcaggtgagactatctgcagggtgtatgtgcttgcacgggtgagtgctgcatctgtgtgacagcatgtgagtgtgcgtgtgtgagagcaggtgacagtgtctgaggggtacatgcactcacacgggtgagtgctgcatgtgtgagagcatgagtgtgagtgtgagcgcaggtgagagagtaggtgtgtgtgcgtgctcacacgtgagtgcatatg

SEQ ID NO: 133178 - DNA, 616 bp, Homo sapiens
gaagaaaaacaaactaaaaacccctaaaaaccttggggcatttggtcaagacctcagagaagtcatgccttcatagtggggctaaactatccttatagtaaaggctactcaacagactttataaagcttaaaaacaatcttcaaaaagatcaagctgatcttccagtaatgtaattgtttaccagaacaaagtgtagcactctttaaagaaagactacgaaatccatcattcaaaacataaaattaaccaaatgtggcattccgtaaaattactaatcatgtgaaaacaggaaaatatgattccatatccagtaaaataaatcagtcggtagaaacatactcaaaatgacagaggtgaaagaattagcaaacaacaatttaaaaacagctattgtaaatatgcataattatttaaagaaaaatatgaacactgaggataaaaatgacatatagagaaaaacataaatcataaattctaattctgaaaaataaaatatcttgaatgaaaaatcactgcatggaattaatagccaattagacaatgtagaagaaaaaatggggaacttgaaaacataaatgaaaactatccaaaatgaagtatatataggaaaaaaag

SEQ ID NO: 133179 - DNA, 295 bp, Homo sapiens
taccattagatatgcagcttcagggacttattttgtctcaccaatcctactttcctcgtcaataaagtgagaacgagagtgtctgccttgcatgcatcagaaactgtgaagatacaatcaagtaatacaagctgtacagaatgagataatgaagcctacattttaaaatatagcaggcatctaccaatcataacgcagtttcactttcattacgacgtttaactttttctgacaacaaccttatgaggtaggattataatgatgtttattttacatgtgatgaaagttgggttcc

SEQ ID NO: 133180 - DNA, 463 bp, Homo sapiens
tgtgtttatgtccatattcacaccgactgctttgaccacagtcccctcttctaggggtctgtccaagaattcccttcagggaagtcaccctgtgtgcctctcataacttgcaatgggggatgcccagccccgtggccacagcagacaggaccatgcattcatcagaagccaaggagatttgatctattggtagcctctcagtgggcagaaataaaaactttgcctaaaagacatgagttgattatattagactatagtatcctctcatttggagcatcagattggatacttggtatcagggggaaaagctgaaatacataagagagaagacagtattcagatctcccaaggcagtcaggggaagccacgagtgagcagccaggatgagtaagtcagagccatgccatagagaagttactctggtagagtgagattaggaagcggaagtgggaaaagcagagag

SEQ ID NO: 133181 - DNA, 331 bp, Homo sapiens
gagctgctgctatttttaaactcggactggcgacggtaggagggggactgagtgtttcgctggccaccccagggagggaaagtgtgtgcgcatgtgtgcatgcgtgtgtaaatgtgcatgtacacgcctcccccctcgcctgcgcagccaccacgaagggaggacctgcagaggcaagggcagcagcaccacctcctggacaaaggaggcaggaggtgggcacactgggctttattggctaaggaagtgggggtggggactgagcttgttccaaatggtgtacaaaagtggcggctgctattttcagcctcctggtgccgatgaatagcga

SEQ ID NO: 133182 - DNA, 401 bp, Homo sapiens
caagtgattctcctgcctcagtcacccaagtagttgagattacaggtgtctgccaccacgcccagctaatttttgtatttttagcggagactgggtttcatcatgttggccattctggtcttgaacttctgacctcaggtgatccacctgcctcggcctcccaaagtgctgggattatagacctgagccaccatgcccagcctaaaatatatttttaaggttaaagtgagcagttccggaaagttaataatatgtagttataggttggatggacctacaagccagtcagaatgattgcactgtgcctttgataatcattatcctaaaatgagaacttctaaggaaggctcttggttttctatgtacacctccttttcacatggtagctctctgtccccctc

SEQ ID NO: 133183 - DNA, 602 bp, Homo sapiens
aaaaaatacatgcagccggcccttcacgtctgcagatgcagaactcgcagatttggagggtcaactgagggacctgagcatctgcggatcttggtgtctgaggggggtcctggaaccatactcccgcggatatggagggacagctctgttattaagacttttaaatggtatagttattgcctttgcacagccttatcatatttcttgaaatgtggtgtcaagttgcaggagagcatacctttaggtgactgattattttttaacatggtaagatacacaacacaacgtttaccatttttaccatttataagtgaacaattcattggcattaattacactcacaatgctgtatactcactatctgtacctgaaatgtttccatcttcccaaatataaacactgtatcaattaaacagtaacttgcctggcccctggcaatcaccattctactttctgtttctattagtttgtctattctgtgtatctcctaggggaatcacagattatttgtccttctgtgcctggcttacttctcttaatataatgtcttcaagattcatccatgttgcagtgtgcttcgggggatctctagagcagccaga

SEQ ID NO: 133184 - DNA, 345 bp, Homo sapiens
gaacaggaaaggagagtcagcagtctgaagcctgggacagttttagaaagaaagaagggactttgaagtgtcatctagaccgagaagtgatacactgcaccctgctgtcctccacccataacatgtgattgtattttcatcatttcttttcatgactgttataatactctaagtattctcaggaagtattcaagatagaaggattttcattaacacccagaaagtgaactgtccttgttgtctagaaacaagagtctgtgacctttaattcttgcagacgtaaaaacacttcagctagaggtttttccagaaagatccacaccttggatggggaagagaattcag

SEQ ID NO: 133185 - DNA, 732 bp, Homo sapiens
ggaaaatgttatgttcacagagtggggaaggacttcttaacatggaaccaaagaaaagacataaggaacaattggataaatttaaccacctaataatttaaaacttctgtatatcataaagttaaaggacaagcaacagacttggagaaaatatgtatgatgcaaataacagacaataactatccagaatacatggaaaactcctacaaatgaataaggggaggataaaaggacataatagaaatggacaaaggctaatttagtaaattttaggaaaaatgcaaatgaccatttaaaaacacagagaggtgttcagccttaccagaaattatagaaatgcaaatgaaaactacatcagttaaattttttgcccattatgttagaaaaagtgatgctattcaagtgtctatgtaagtgtaaggaaataggcattctcatattttctggtagagtgtataaattgatacagccgcttggggatagttgcagttctcatcagttctaagtgctttgtaaattaaaaagatacaaattctgttgcatgtcagttccatttcttgttatctactgcataaaaatgcttgtatatgcacacaagaatgaggcatgtgcgaggatgttcatggcagcattatttataatagtgcaaaataaaacaacccaaatttagctctagcaagagaatagctaaatacactatggtacggtatacccatactattaaactgacca

SEQ ID NO: 133186 - DNA, 274 bp, Homo sapiens
gtaatttcgcaggcagaccctggtcacacactgcatatgtggtcacagccaaccccacagagacgccagaatacagagctgagctgcaggtgtttactggggattgtttgttgatggatagagtcaggccaggagtgtggggagccctgaggaagggagggccaggtgggttgcaggggtcctcagatcagaaggaagtatctacacatctttgcagtcatcgctgacaacgatcctagactgttgggaaagaaataaagtggggacctgggag

SEQ ID NO: 133187 - DNA, 469 bp, Homo sapiens
gccagtcacgagccagggtcataagatgtttacaattgagaaaacgtcttacaaatgcctaggaggacacactactacaacaatggaaggtccagatgtcctgatattgcatagcaatgtatgcttttaagatcgttatagtcgccaggcgcggtggctcatgcctgtaatcccagcactttgggaggccaaggagggtggatcacctgaggtcaggagttcgagaccagcctggtcaccatggccaccatggtggaaccccatctctactaaaaatacaaaaattagccgggcgtggtggcgggaacctgtaatcccagctacttgggaggctgaggcaggagaattgcatgaacccaggaggctgaggttgcagtgaactgagatcgcgccatcgcactccagcctgggcgatggggtgactaagaccccgtctgaaaaaaataaggaaatgaagactcctcttttc

SEQ ID NO: 133188 - DNA, 739 bp, Homo sapiens
gacgccagtcctggccctgctctccacaaaagcccaggaaactcctaacattgcttccaatcattaaaaactttcacaagagtcagtcattaacaccttccgcaagaggccttaggctcacctctccaaggagactgaaaatcagaaggaatacatttccagtggaattataaaggtcctaaattattacctgggtggtctttcttaagtcattttccagaggagaagccagctgccctctcttgacatagccatgtgaagatgctcaagtactgaagatcctaagcctgccaacaaacatgctgaataatacatccattgtgtgggctagaagtatgagtactatattgaataaatggcgacagcagaaatcattgtcttcttcctactcttgagtgaaaacagccagtctgtcactactaaatatgatgctagctgaagggatttctatagatgccctctatcaagttaaggtaattctcttctatccctaacttgctgagagttttatcaggactgaaattcaaattctgcctaacttttttttctgtgtcaattgatatgattacacaactgatacgatgaattacactgatcgatttcaaatattgacacactttgcatgtttgaaataaattctactgggaatgatgtataatactttatattcattatcggattcagtttgctgaagttgaaggttttagtcgaagaatttaatctaagttctgagagataa

SEQ ID NO: 133189 - DNA, 206 bp, Homo sapiens
cagccaaccactggctacccttgcctgacgactgagcctctccaacctcgcgtgtccagaactgggtttctgatctcccaccctgcccctctcccaccttcatcttaatgtgtctcagttaatgggaactctgttcttccactgcaaaggccagaaacaccggagattagaatcaccctggatttctctctttttttttttttttt

SEQ ID NO: 133190 - DNA, 396 bp, Homo sapiens
atgttccctctgtttgtgagttcagggaataaagtatttgtcaaagtcctcctagaacttcacagtcatatcatcacaatcaaagtagcaagataaagataggtagatataggagacgcagcactctgtgatgatctggtggttgatggcatctttctgctttatgattttttaaacaaaatttttccatacatcctattccataacctactttatgatttactaacatgtcataaatttatttttatattagtaaaaagagacctacagaaacattttaagggctgcataatattccattataaagatataaagtaacttatttaaccaatcagcatcttcataaattttctttttttgctccaccattttgctatcataaacactactgtgggg

SEQ ID NO: 133191 - DNA, 787 bp, Homo sapiens
tattatggttgtctacagtatccagtatagttacatgctgtacaggcttatagtctagaaacaatgagccataccatacagcctaggtgtgtcataggctataacatccaggtttgtgtgagtatactctgtgatgttcacgcaacatcaaaatcacctaagatcatatttctatcgcatttctatcaccatgtttattagtccgttctcgcattgctataaagaactatctgagactgggtaatttatgaagaaaagaggtttaattgacttacagttccttaggctgtacaagaagcctggctggggagatttcaggaaatttaaaaccatggcggaaggcgaaggggaagcaggcatgtcttatatgacctgagaaggaggaggagagtgcagggggaggtgctacacacttttaaacaaccagatctcgtgagaactcactaccacaagaacagcaagggacaactctgtccccatgatccagtcacctctcaccagacccctccaacactggggattacaattttacatgagatttgggtgaagacacaaatccaaaccatgtcgccatggttaagccacacatgactgtatataacctacttgtatccttgcatatactttaaataatctctagattacacattataatacctaatacaggccgggtgtggtggcccatgcttgtaatcccagcactttcagaggccaaggcaggtggatcacgaggtcaggagttcaagaccagcctggccaacacagtgaaaccccatctctactaaaa

SEQ ID NO: 133192 - DNA, 358 bp, Homo sapiens
tggggggatacaatcacataggttatatgcaaatactatgccattttatatcagggactagggcatctgcagattttggtgtccacggggatcctggaaccagtccaagggatgactgtatgttaggtgtagcagattgcatataaaaggttttcttggtttacagaataattgagatcttacagaggaaacacccagttcctcctattactaatatcttatattagtatgagacccatgttagaattaatgaaccaatattgatacattattgataattattcactaaataatacatcattatctcactaattgtaaaaaaaaaaaagccataattgattcagagttccctagtttt

SEQ ID NO: 133193 - DNA, 1649 bp, Homo sapiens
acatgtttgaattttcttcataattaaaaaaagagaaaaactggttgggatgatggaaacgttctgaaattagtgggatggatgccaaacatagtgaatatactaaaacccactgacttgtacattttaaaactggtaaatttcatgttatgtgaattatatctcagttaaataaaataaaataaatgataaccaatttctgaggagctaatcgagtggaaagagaggctttgcatactcagcatcttttacattatatgtttctcaggtctgttagcaaatatttcattgcccattctttttaaacacctgctctgtgtagggagcttgcctgattcccttatggatgagagtcaacactatgcctgcctgtttcccattttggttaggcggcagggaggaagattatcactgcactacatattattattggtatcctatggggtacaggacagtgtactaggtgtcaagggtcaggtgagccccaaaaaatctaaacaaggacttcacaatttaagagagaaagtaaagccaatggtcggccataggccaccatgcacaggcgtgtagaaatcagatgagagacaaggagctgggctagagtgatcataaacgagaatgaggagaatctcaatagttgggtttctaattggatgccgggtgggaaatggtggtactaaaaaggacttaaaattgatgtgaataaaatctatatttcccataaaaactgctgtagggtcttagccaaggtcccaaccaagcttacctgctgaaagtttaaaatataaattacaaatgcaattaacagaaatttataaacctgctgctcagtataaaggtttctaaaggttatatgtgtcctgtaaacaggataatattctaatcaaacataaacaatttaaagtcatttagatttaaacaaaatttggggagttatttattattattaacaaagggaaagtctgcgaggaaaattcttaaggattctgaaaagtagctatatctgcttttaaaagaagcgagttagaattatcttaatagaaggactatacctgaggaaaagagtaacaaagaaagctgaggaggccacgaaacaatggggcaaagacatcctcagaaaaagtacagcacagggctttataaatagcagctggtcaatcactagaaaaaaaatgagacagtgtcttgtgcacggtttagcaaaaaaactaaatgtgttatatagttgtgaagagaataaattggttacttattttaaacgctttattattaagatttaaataaccaaatgactgttgtaaacacgagtacactgaatcactaagttgaggactgcaaagaattgactccctgatcatggcttcaggtcctaatctagaccatatttaatcaattagcatcactgaaaattggtctgacactctcactgtattctgtcattattacctgacatcttggtcaaaaaatgtcatttttagaaagctggaggaattatgctggaacaaaaaaaatgcagagaagaaaaaaacaaaatacaaagcagagtaaacaaaaaatactaaacaaggtattaaaagaagatacattcttcttgatgaatcgttctttttttgtgtgttggtttgtttgttgttttgagacggagtctc

SEQ ID NO: 133194 - DNA, 665 bp, Homo sapiens
acatgtttgaattttcttcataattaaaaaaagagaaaaactggttgggatgatggaaacgttctgaaattagtgggatggatgccaaacatagtgaatatactaaaacccactgacttgtacattttaaaactggtaaatttcatgttatgtgaattatatctcagttaaataaaataaaataaatgataaccaatttctgaggagctaatcgagtggaaagagaggctttgcatactcagcatcttttacattatatgtttctcaggtctgttagcaaatatttcattgcccattctttttaaacacctgctctgtgtagggagcttgcctgattcccttatggatgagagtcaacactatgcctgcctgtttcccattttggttaggcggcagggaggaagattatcactgcactacatattattattggtatcctatggggtacaggacagtgtactaggtgtcaagggtcaggtgagccccaaaaaatctaaacaaggacttcacaatttaagagagaaagtaaagccaatggtcggccataggccaccatgcacaggctgaggcaggataatcactttgaacctgggagacggaagttgcagtgagccgagatcatgccactgcactccagcctcagtgacagactgagactctgtctc

SEQ ID NO: 133195 - DNA, 720 bp, Homo sapiens
gaatctcactctgtcgcccagggtggaatgtagtggtgcgatctcagctcactgcaacctctgcctcccaggttcaagcaattctcctgtctctgcctccctagtagctaggactactggtgtgcaccaccacacctggctaatttttgtatttttagtagagatgggatttccccatattgatccagggtgatctcgaactcttgacctcaggtgatccacctgcctcagcctcccaaagtgctgggattacaggtgtgagccactgtgtccagcctgtgtgttgctattttaagtaagatgatctcagaagaccctcttaagtcctaccaccctcacctctgcctgccttttccttcaattactaccctagttcttttttttccttcacagtcagacacttactcctgaccctctttccaacctaccactcgtaatggctcttcaatgacctctctcatgaaaccagaggactttgtccagtcttcattctgcttgatttctcagcagcatttggctctgcttttcattctcttcctaaaacactcctccatcggcttattgagtcccacagtgtcttgattttcttcctacctctctggagactatcatttttcttaactgactcattctcttcttcctggcctttaatgatggaattttaagtttcagtccttgactttttttttttaatgttcttacgtcatagctgatctcatt

SEQ ID NO: 133196 - DNA, 373 bp, Homo sapiens
ttttgcttttaacttgtgtctttatacttaatgtatatttcttgcagatagcatatcacattaatttttatccaattttacaatctctatcttaactgggtgacttagactttttacaggttgctctagagtttctagcatacacttttgacttattacagtttcccttcaagtgatgacgtactgcttgacattcagcataagaaccttacagtggggtatttccctcgctaccctcccaatctttgtattttcttattatacattttgcttttatgtatgttgtaagtcccatattatgttgttatgatatttcattaaatggtcaattatttcttaaggagatttaaataatacgagaaagatcttacac

SEQ ID NO: 133197 - DNA, 106 bp, Homo sapiens
cgagggagggagggaaaaaaaaggaacagggggatgagagtaaaaaacagcgagagaagaacacaaattctcagcatcagcaatgaaacaggagacagtgaatgga

SEQ ID NO: 133198 - DNA, 169 bp, Homo sapiens
ctcactctcatctgaccaacaggttcccctagcggtacataattagatccaaaatggtgcttctctttatcattttctctgctttctgagaaatggaattgtcattttggcaagaatttggcagaaattgtatttcagattttaatacaattgagaaaaaaccattcat

SEQ ID NO: 133199 - DNA, 336 bp, Homo sapiens
aaaaaatttaaatgctaacactaatcaattcaaggctgtagtatctatattaatatcagacgaagcaggttttagagcaatgatgtcaatccatcaaaagaatataacaattccaaaggtttatgatcttaataacagagttctaaaatacatgaaacaaaaactgatagcacttcaaggagaaataggcaaatgcacagttatgcttggggattgcaatatccatgtttcaataaatgataaaacaagtggacagatgattggtaaggatatagatgccttgggacaacacaatataccaacttgacctaatcgacatttatatgacattccacc

SEQ ID NO: 133200 - DNA, 761 bp, Homo sapiens
ttcttaaaaataaaaagagagtgggagactgttctagatgaaaagtgactaaagcgacatggcaacaagatgaaatatgtgatcactgattggttcctggatcaaaatatagaaaatataaaaaggaaaaccaccactaaaaagtaatcaaggacttactgggacaactggttaaattttaaggatgtaataacagtactgtagcgatgcagaacaactctttgttttaggaaatacatactaaaatacttacgactgtcatgtctacaataactccaaacagtccagcaaaaaacacaaaccaagacatacgtacacacacacatcatatacctacaaacatacacagaaagactaagaacaagggcaagcatgcactaacgtggtgagtttctcttctttatggtaatttcaacaaaatggtcatgtactggagttcataggacctcaaccttaatttcaacagttctccagtgtcactgacacacattcattttaagtgaaaccagcttgaaaagtgtctgcaagggctgatggttttaagagacaagaaggaggccgggcacagtggctcatgcctgtaatcccagcactttgggaggccaacgcgggtggatcacctgaggtaggagttcgagaccagcccgaccaacatggagaaaccccgtctctactaaaaatacaaaattagccgggtgtggtggtgcatgcctgtaatcccagctactcaggaggctgaggcaggagaatcacttgaaccc

SEQ ID NO: 133201 - DNA, 741 bp, Homo sapiens
tttccttttccccttccatattccacagctgtcctttctgctgcctcccggagggcaccctgtcctggacacaaggctttgtcctgtgctgtgggtcatgcttggtgggatcgcttatcagcgtgaaggaggcactgaggtccatcttcttcagaagtctgtccttccttcctccaggcagatgccggcatcacagtcctggttaactaaaaccctgtgtctgatgtcctgccctgggccttccttgtctcttttctgtccccacccagaccataagcactggggaagcacatctgtcttcctcgctgcagcctctggtgcctgtgtgtctgcgtgctgacaccgggcatggccaacgaacatgttgtcttgtcacggtgcacggtggctcctttgcccgtgcggccttctcagcagctgctgcttctcctctaggactgaccgcaagtctcagagcgcgccggctggtgttttgtcgccctcaggagtgtggccgaggcccaggtgtgggtttcccgtgcccgccgtgacctggcagtgagggtctgtgcttctgtcagtgccgttggcctgagacatgtctgtcctggagaccagcacgtgtgggtgccgactctcagagagccccttgctcacagcaccaaaccccttgctgtgtttttattattaagaaatagaaaacaaagggcataaccgacttaggactttggtgattttctggctgaaggttttttttttttt

SEQ ID NO: 133202 - DNA, 353 bp, Homo sapiens
gagtcagtacaggaaggtactccgaatgatgcctggttcatagtaagtactacgtgttggcttttatcaggggctcaggtgttcatcaggaacaatgacaagtcctcagctcagcctgtgagttgacatataaccccaatccacctgactctatgattgtttattgaattgtctgcctcccccatgacgcagttccacgagagcaggaatatcatctgtcctgtttatacctctgcctccgccaagtcagtgctcaattaccataactactaactgaatgaatagttagaccaaaaaaccaattcaaacttatttctgtccaaacaaaccatttttaaagcccctccccacca

SEQ ID NO: 133203 - DNA, 313 bp, Homo sapiens
tttctgtaaggacatatccttctttcgtttcccaggtggcttctttgacaggctcttcctacctacctacttcttcctcctcctcatcatcttcatcatcatcatcttcatcatcttcgtcgtcgtcgtcatcctcgtcctcataatctctttcttcttctatgcaacctttgtaatttatgtcagtatcacctggcgatgatttccttttatctttacccaagtgctctgtaccattttggaggagactgcatgtagtagctggtgggacttgtcctggacaaggatatgaatgtggcagagttaccaataa

SEQ ID NO: 133204 - DNA, 606 bp, Homo sapiens
attcgacatcctagaataatctttgactgcttccttcctccagctgccactagacacactgtcagcctaccctgctttttcaagcatcactgttttctgctctgtgtattgtcttatttctgtcttgggttcttcctccagcagttgctcgatgaaatcaaacccccttttctgtccctgccagtttattctcacctagctgctgggccccatccccaactccattccctgggatttcctctgcagagatgacagtaggccataaatgtggggtcggacacccatttcttacctgctgtattttttataaaacttccccataaagcaatttgaaaacatcagttttttatcaaaaggaaattaaagtatcagagtattatttttttatattgttttttctacacatatgaggattccctagtaaaaacaattataatgaacaagaagacatatttaaatattcagaagtattattacttgtactattttgattgctctacagtctgtcttcgagtaaattctgacaccttttaggcaaggagctgaatctttggcttttctgtatcaactcttctgtatgttattccatggttgtgctcattaaaa

SEQ ID NO: 133205 - DNA, 455 bp, Homo sapiens
atttccccaaatcagcaggctcatgtgacagtggtcaccagttggtactcctggatagcatctcctccttaggagaaacttccctttttatggctacctgtgtggaagtggatatgggggttcggttgggagagcactactctgagtcctctaagtctcaaaacacaggtcagcttgggcacaagatcaccacttggaaccctagtactcagagccctggtactcttcctccccatgagctataggcctgccttctcttttgcccagttgtacagggggcaactgttgtcttaaacatggcatactcacctgtgcgcacatacacacatgcaaacacgtacacttgtacacatgtgtcattcatgaacaaactcatgaattctcagagaaaatggagtcccaagttataaggaggaaaataaagtttttcctaaccattaaataatgtgtacgat

SEQ ID NO: 133206 - DNA, 848 bp, Homo sapiens
gtggacaggcttgggaacagccatgtggatgtagctgctttgtgcttcttcccatgcagatttgatttttctttccactttctcccttttaatgaatgaactaaaaatgaatttgaactacttgccaaccttagaaggtttgattttaaaatatattttcttctcaaatacacgaaccagtagcatcactttcaattccctactcccattctctgtccaaaaatacatatgccaatcttcaattttttttttgtagattgcatgtaaacgatggttggtttgtataaagataaatattactttagtaacaagcacatagtaacagcttaatttctttttgaattgttaggctgcacaaatcaatcatgtggtgccagctgaagactgcttttacaacaagacatatgttacaaatatattaatcttagcggcatatggcacctgagaccttgtaggaaggcgttgcaaaaaggacgatcatgccctattagctggctcacttcctaacttacattaattcgtgcattatggaacgtcaccaacacatgaaacaaaaagtagaaatggcactgctgagtaatcacaagccattgactaaagaaacttcagggaaggcggggcaatgagcattctttgaaccacttaattcaagaaataacaggctttgtttatttaagaggccagtctgtctgttttctgattgcattcttattgtgaaaatgccagagcatattacaatggataaaatgagaggaaaaaaagggcgatttaagtaggccaggaaagagtggtggtagatgtttgaatgcccccccttggaattaatcagtggtttataaacctgaaat

SEQ ID NO: 133207 - DNA, 575 bp, Homo sapiens
atccttagaaacaaccacttccaacttctcgcttttactttagtatatatatgtaccattatgtctggagtgtcctcatacagctatttctttgttacttacagatatatactgattttctgctgtgtagatgaaaacttaactgttacatacccccatctctactaaaaacacaaaaaatagtcgggcatgttggtgagcgcctgtaatcccagctactccagaggctgaggcaggagtattacttgaacttgggaggcggaggttgcagtgagccgagattggccactgcacttcagcctgcgtgacaggagggagaacaattgtccttcaaaaacaaaacaaagagcaaacaaaaacaaaacaagaacaaacaaccacaaaaaaaaacacatctgtgtcgagcagccgcctaggcgcctcgtgaaaaagacgtctgttctacgaacccatttcgcgtgaggacgccgcgggcgccccccacatgggatcacgggtgccaagagtggcccacgactggcttcctgaagagcactcccggcttaataaacagtgcgctgggtatccccccacaa

SEQ ID NO: 133208 - DNA, 398 bp, Homo sapiens
aaataataaagatcagaagaaataaatgaaattgagattagaaaaacaatagaaaagagcaacaaaactatagctggttttttaaaaagataaaattttaaaacttttagctagaattaaagagagaagtctcaaaaaataagaaatgaaagaggagacattacaactgatactacagaaatacaaaagaataagaggctactatgaataattatgtcaacaaattaataatgtagaagaaaatactaggcacatacaatctaccaaggtggaatcatgaaacagaaaatctaaacagaccaatagcaaccaataacaaataagagattgaatcagtaatgaaaagtctaccatcaaagaaaagcccaggacctgatgaccattctttctaaaactac

SEQ ID NO: 133209 - DNA, 429 bp, Homo sapiens
tacatcacaaacaagggagcaatgcaattgttatccttggttgtcaatgacaaaaataccagtaatatctctcagttgcattttcttttttcaacagttttcccatctataaaatttatatacaagaccttgcttaaaatttccacatttcacaactgatgatgggtctttcagataaacaaatctggggatggaatgaggttccttctggcttacttcctgccttccatgaataggcaaaactcaagacttcccccagtagtctccatggatagagctgctaaataattagaagggtcaaaacaacaaccgaaatgatataaacactttggaaaatggtatgttttttaccaaatatattatccaggtaaaaagttatcccatctggaaaaaactacaaaaacttttaaaagaggccaggcatgatgg

SEQ ID NO: 133210 - DNA, 432 bp, Homo sapiens
cattttatcatcattggcaaacgggaaaggcagcttcctcaacttgtgtttgtcttctaaaggaaaaaccaaagcaatatatagcaactgatgcttatccagaagagataactcagatgcacagaggcaaagagatgtggacatctaaataaacccagacactttgttcttcagaacttttaaacataggcattttctctctcggcgagagagtgagctgtgatcagttgtgtgtgtagccaggatgttgctaaagcaaactgactttatctgccttgcacgccttctcctctgctttggtgtcatgcctgtctcctttctaagaccagctaaccatacttggtttcttctgtcctctttaacatcttcatcttgctttattgtgcatgtgtatgatttgaggttctagatccttgaactggggagtgacaa

SEQ ID NO: 133211 - DNA, 451 bp, Homo sapiens
ggtcccataggacatgcttaattcctccagcacctaattgtgacatgtaaaatagttgtctagaagaaaagctcatcagaggcttggtgcccaagggttttattgggctggtcacataggcaccctctgcgtagcacataccaaaatccccagactcccaaaaggaaagcaggtgttccgaataaacatgtttgtaccttgtacagagtttaggaattgtgagccactcttatttatcattagggaaggttttatgtcaccgttgggaactgtttctcattccagtttctagctgcttagctagccaagacccatcctctcaagcaaccctttctaagaaccgcagtctccagcctgttactttaacttttttttttctgttaacacatttttcaactccattcactgatctttttcttctgcattcgtttgttttttgttttgttttgtt

SEQ ID NO: 133212 - DNA, 170 bp, Homo sapiens
tagcagggaccagcttgcaagcttgaagtgtgcagatggaacacagagcactccagccacccaggcagatatcagaggatgggccctcaggcactgattcctgtctgtcacctgggagaggctccctgaggccaggtggaaatcatacccggatgccaccagaatgatga

SEQ ID NO: 133213 - DNA, 319 bp, Homo sapiens
cggacgcgtgggtcgacccacgcgtccggcaaaacgagacagcgttaggggcgagaaaggaaagagggaggaggattgaaagggaggaaattgaagggagagacaggcaaactgtcagaaggggaagaaatgaggccaggagcattgttgggaggggggcctgggggagccctctgctctgcgtgccaaggccaatccctgaattgccgcagcaagaccgtgtgacctcacagttggctctttttccaccaaacgcatcggtggtgagcacaggaaccagaaaggcttgaaacaggcaagtggcacctggccctggaag

SEQ ID NO: 133214 - DNA, 579 bp, Homo sapiens
gggacctaaaggaagaggaaacaggctatacatgtatctggggaaagagcctttttgtgttctccacagcatagtggcttatacatagtaggcattaaatattgttttaatttttcttataaatctaaggttgagggataggacagctactttatataatttatatgttaatgtctatcttaaactcataacttaaaaaaaattctcaatgaacagatttgttttagaatttaaacttcaacatgttcattacacatttgaagctatgacttgtaagctctcttaattttcagtaaccaaatctataaatgtgcctacatccttactagttcttccttctagtatacaacttcagtggaagagatactgctgtctcttttcaaaacgagtttcttcttctgtgctccatttcaaagactttgctcattttttatatttattcttaccttttcttctactttttcttctttttaggttgcctccaatcaacatttaaacatgcttaagatcaaattctgtaaaacatacacaacctgtaacaacaaaggaacagaacttagcattaactgtgttccactc

SEQ ID NO: 133215 - DNA, 389 bp, Homo sapiens
tcccttaagctttgtgaaagcaaaaggaaagtgctgaaaataggagagacaaataatgaagtggttcgatggagtgtttagtgagaaatcaggctgttatcgggacttcaggtggcatgccagttgggtcaaaataaggagaagaaccaatgccaccgcaaccaagattccccgtactgagattgactttagttttgggtgaacagagagaaggctttacttatcttttcacttgaagtggaattttaagttctccagtggctcacaagaatgctcaggtgctgaattctgttgttcttctgtggttcttcgggaccttcccacagtttcacttgagactgatgtatccaactggagatgccagaaatgttgatagctgttggggtgga

SEQ ID NO: 133216 - DNA, 756 bp, Homo sapiens
gttcctcttcctgtgtttccctattacagaaaattatattcttactcatctagtcaccccgattagaaatctaagcatcatacttgatgtttctccttttacgcctgtatataatcaattccacaagactattcttcccctttaatatctcacatgtatttacctctcttttctgattctattagtttagaccagaaattgaaaagaccttttctgtaaaagtccagatagtaaatactttaggctttgcaggccatatagtctctgccacaaccactgtagctcaaaagcagccacatacaatatgtaaacaaattagtgtggctattttcccataaaactttatttgtagacactgaagtttcattttcatgtaattcatatatcataaaatcttcttttgattttttccttcagctatttaaaaaaaaatgtaacagtcatccttagcttccttccctacaaaaacaggctcacaggccatagtttgcccacctctgacttagaccaacattctcacctatgatatggcagtagtacttggtctccctccttctcatcttgcccactctggtctactcttcatgttgcagccagattgactttttaaaattgcaaattgggactgggtgtgcgtggcttacgcccataatcccagcactttgggaggccgaggtgggtggatcgcctgaagtcaggagtttgagaccagcctgatcaatgtggtgaaaccctgtctctactaaaaatacaaaa

SEQ ID NO: 133217 - DNA, 603 bp, Homo sapiens
agaactaaggaggagtgtgggaagaagaggaatggatggatggatgagatgagcggtatgtgtgtgtggggtggagtcgggagtcagtgaaggaggagggacatcaagttggggaaggcaggctagagatgcaggcagttctgggagggatgcagtggacagagggtagtggtggaggtagctccgactgatgtctctccactaccttcccagcatgacctctgggacagaggaccatgccaataaactcctctccatccgcagtctctagatactccctttactctctctactcactttccccggaacctggagatgctgccactcagttgctgtcctctccactgcaggctgtttattctcccaactccatgctcctcaggccaggcagtggactcagtgtcttccagctcattgcttctccaccctctggactctttgaggtcaagtaccatgctacagcccaccttgtcagttacctaccattctctacactcacccaggactttcacacttgcctctctccccgaagcccatcactgtcctgacctcctcagctcctattattttttttcctgttcttgacttcctcctggagatcct

SEQ ID NO: 133218 - DNA, 274 bp, Homo sapiens
cagaagctcaataaatatgaatggatcaattgcacagaggtaaattccccaaagtgtttactatctgtcaaaaggcaacaaggaaacagacaaactgaaaaaaatagtggttttactacatagttcatgttaattacaactagctttacatagtaaattccagtttacatagcatgtctacatataaagacagctataatacaagttgggttttaacaatagccccattttacagatgagcctgagtgaggtagagacttgcccgaaatagtca

SEQ ID NO: 133219 - DNA, 365 bp, Homo sapiens
ttatatgctgtctcacagtaggtgagagggggagcagaatgggacaggatcttactgaagtattccagcagtttggtgatttagcagagaatcagatgagcacaaggatttacttttaaggcctgcatgtgaaaaaaaagtaaactgacagttacctgtgttacacagctccaaattgtactaagtatataaaatccagtttcgtggattaaaaaccatttcactacaaagattcagcacaggagcagcgcctgaatcaatgcacacccaaggcaaacggttattctcctaaaaaactcaagaatggctttctacagaaataacatttttgacaaaaatactttctatttgaggacagcatatca

SEQ ID NO: 133220 - DNA, 580 bp, Homo sapiens
aagcaatccacagggtactgactgtgagagcaattactaacagtatctaaccccacgtgggaaagctttgctggatcctgaaggacaagtaagagttagccagggtaaacagggtaggcagggcattccaggcagaagaaacagatgtagatttagaggttcaagagagcatgatacatttaagagctgcaaatagtttagtgtgatcagaatttagaatatggaaagggatggtgaaaggtgagactggaaaattaaacagagttgaatccatgagaagctttttgggtcctgccgggaatgtagattatagtctaaaagcaatgggaaatgattgattttaagcaagactagcttggtgttagaggacagtaagagtgtaaaatgagatgttgtctgtgttgtataaagttcaattttacattagcaggaagaatagaatttgagtcatttattcagcatgtattactgagcacttcctatgtgcccagcacttttctaggtgcctgagttatttagttcctgaacaagtatctcaagaacattatggtgcttacatccctgtggaggcgaaaagaca

SEQ ID NO: 133221 - DNA, 378 bp, Homo sapiens
atgtgagcaaagtgtctacctgtgcttccagttctctacaccaaactcccaaagttcctgacatagacagaattactcagtctacaaataattactgagcacctcaagagacctctattctgacttctgtggggaaaaaagaacaggaaaaaatgactgggtctttgctcttgaagggcttaccacttgagtggtgatcagggacatacgccacccccaaccttcaaaagcaagttgtaaaagcatcatacaaataacaaaatacagactgaagaccatctataaacacaggggtaaccaatgtgcagttaatcagggaaggcttcccagggaagatgatctctgaactgagagctagtgccctcttgcacaacttcc

SEQ ID NO: 133222 - DNA, 302 bp, Homo sapiens
  misc_feature (16)..(16): n is a, c, g, or t
  misc_feature (37)..(37): n is a, c, g, or t
gctctgtttttaagtngcattttgagctcctcagatnataatatccaggaattatccagttacttaaaccaagttatttgctctatttggctacaggaaaatagccccattcctttttttattaaacatactctaataccatttggtctttcagttgcctctatctaattgcttttaagtattttttaagcatctcttttagattgaaaattctcagaaatcagggtcaaatgtttaaattatgtcataaaaagttaccaaaatactgcctatcttttttatcttcaaaccagtggcatagc

SEQ ID NO: 133223 - DNA, 265 bp, Homo sapiens
  misc_feature (16)..(16): n is a, c, g, or t
  misc_feature (37)..(37): n is a, c, g, or t
gctctgtttttaagtngcattttgagctcctcagatnataatatccaggaattatccagttacttaaaccaagttatttgctctatttggctacaggaaaatagccccattcctttttttattaaacatactctaataccatttggtctttcagttgcctctatctaattgcttttaagtattttttaagcatctcttttagattgaaaattctcagaaatcagggtcaaatgttgtatagactggggaagcgcggggggagata

SEQ ID NO: 133224 - DNA, 497 bp, Homo sapiens
ctcatccctgtcttcccagcacttagtgcagtgcctaagacatggccagcatcgggaaacatctgctctactgaaaaagctcacaacaacaggcacggtggctcacgtctgtaatcgcagcccttcgggaggccgaggtgggtggatcatgaggtcaggagatcgagaccatcctggctaacaagggaaactccgtctctactaaaattacaaataattagccgagtgtgatggtacgcgcctgtaatcccagctactcaggaggctgaggcaggagaatcgcttgaacctgggaggcagaggttgcagtgagcccagattgtgccactgcactccaggctgggcaacagagcaaaactctgtctcaaaaaaaaaaaaaaaaaaagagagagagagcgagcgagtgagagagagagagagagcaagctcacaaagacttgaagcaaggaggccagcaggaaaccagagggggctgagtgagcttcagacggttaatg

SEQ ID NO: 133225 - DNA, 221 bp, Homo sapiens
ctgggcagggatgccacataggcttgtcatggaagcttgcggggaggggagggctgactttgaggagcaccactagaaaggtaggtggggtcagattctagaaagccagggatgtcaggccagatcgctttcattgtctttcatgaaggaagtcattgaaggtttttgagcaagagaggctacgacacaaagctgttgtatagccagaaggtccaggtatg

SEQ ID NO: 133226 - DNA, 674 bp, Homo sapiens
tgaccatagcttgttctgtagctccgaagttggatccaagtaaataaagcaacataaaatcaaaattagtaagaaagcagtctctatttaaaaaagcagatggtcctaactgtgccaaattggtggtcacacagagataaattattttacctgactttatagcagttatttgactgtagaagtgagtattcctgaaaacaaaaagaattgcatagtcatcttaactttaataatcatattgtttatgataatggtattattttgaaactattaaaattgaaataaagcaaataaatagtgccatttgcaaccaactcaacccgagtgatgacatgaacatacaatggaagtaaaaagcttgcagttttgaatttgaattacatgaattcttaatgtagtttctctaaaaatacacacatcctagctcattccattgaaacatcctaaataaggcaaccagtccagtagtaataggttcacctagtacttagattgcaacttagtttctaatttattataaatagaagggctttttgataaaatggctgggttatagcctcaggcaagaaatacgcaagatgagcctggtacatcctgtcatactagaaagataggcaggttatcaaagactacttcaggtcttgtcagaaggacttaagagctaataaagggtt

SEQ ID NO: 133227 - DNA, 243 bp, Homo sapiens
ctcttctggtttacagcgctctgttttgcacagatattcagtgttcaggatcctcctctctcctgtgtgctcccatcctcccggcgtggcatctgggtataagggggcagtgggtaagctttatggctcagatgccattccctgcctgttgctggtcttcactcccacgtggtcgctcggaatttgtccccgggcattacggattatggtggaacctaccaaaatggggtgaacctgatttag

SEQ ID NO: 133228 - DNA, 436 bp, Homo sapiens
aacagtggactggaaagcagcttagccaggctggggctcaagagaccttggcagattctggaaccccagattccttccctagcattgtatacagccacaaatccaacttgtctgcgtttccttaaaataaaaccagtgaaagaaaggaaagaaaggcaggccctgctttcaaatccacagccccgcagtgttccccaatcctgcatttgttgggatttgaaatctgccctttgctccagtgtgatggcccacgccagcatggggagagtgtcaggcttgctcagggcctccctggccgccagcctcttactttgaattcactgccctccagctgcaggagggtctctgggctctggagcatcacacttggtgggcagaccttgccgctctcggtacctgcacacctgcacggctgctaaacctgcatgcagcactc

SEQ ID NO: 133229 - DNA, 520 bp, Homo sapiens
tcctgtctcagcctcctgagtagctgggattacaggcacccaccaccatgcctggctaatttttttgtatttttagtagagacggggtttcaccgtattggtcaggctggtctcaaactcctgacctcgtgatccacccacctcggcctcccaaagtgctggattataggcgtgagccactgtgccctgctggtttgcccttttaatgtcagtaatactgttttagcgattctagtgtaagtatatggatgcccaacagcatgatttttagtagtgaaaaattttaaactcttcagttgggaaacattgttataatgcatcatgttaaaattacagtagtgaagactatgtagtaatatgaaaaagtgcttttgctgtaacttgataagagtccaaatatttgaatagaattagtataacttagaataagaattaaaataacatgtataaaagaaaagcttcataggaatactcctaaatacaacaaaataaatgagaacttttaatatagagaaaagaa

SEQ ID NO: 133230 - DNA, 332 bp, Homo sapiens
aacaaaataaaaaatagaaaaattggacatcatcaaaatgaaaaacttttgtgcatcaaaggacactattaacaaaataaaaaggtaagcaacagaatgagagaaaatattttcagatcacatatctgataagagattaacatctagaatatatagagagctcctagagcctatattcattttttttagagaaaatccaaaggatgctgaaaagcagtttagaccttcttgccccaggtactcaccaaacctgaaccagtcaccctcggccttgagtgtatgtcagtggaagacttactgcccagagtgtctgcctgataggacatgggtag

SEQ ID NO: 133231 - DNA, 360 bp, Homo sapiens
gcctcccaaagtgctgggattacaggtgtgagctttataagctgttgataaggattacaagagaagaggaatttaatgtgatgggccctggttcctgagaaggtagatggggtataaaatcaaacactgatagaaggttggaagaaggacaggaagaggaatcgttttcctttgtaacaggaggaatgtcacaggagggaggaatggatgggtgcagacgtgggtgggattgcagtttcacataggaagttgaaggactttcaacccaatgccttctgttctctttatgaagaagtaggagacatcttctgaaagtgatgagtgaaatgtagttttgcttaatgggaagtaagaaggttc

SEQ ID NO: 133232 - DNA, 180 bp, Homo sapiens
tgctgggattacaggtatgagccaccatgcccagccagggactgagagacttctgaagatgtagacaaatctgagatgaacttctgtgatccccggggcctcccatctaatcagaaataggcaagaggttataactgtcatggaatatgggcagaacctctgaccagggcatcacggggc

SEQ ID NO: 133233 - DNA, 240 bp, Homo sapiens
gaacatcctcccacactccccatttgttgtcccagggaagtattaacaccccctttaagactctgttccttactatcacatttgggattaagttaaagaaaagaaaagaaaattttttaattaaagaaaaacaaaactaaaagactctgtcctttacaactcctctgcaaagccttactgagcatctaccacatgcttagcattgtgttaggcaccgaggatgcatggtagaattaaatg

SEQ ID NO: 133234 - DNA, 381 bp, Homo sapiens
tcgacgattacagccatgagctactgcgcccagcccacatgtaacttttctagtgattcaaacagccctgctttctagcattttctagaatgtaccaacttttgaaaaaaaaatttttttctcaggaaagaaatggacaacttagaagtgtaagcaagacccagaaacccagctaaggctgtgcggggaaatggggttctaaactctgagaaacctcatttcttttttttcatcagtagataccattattattcagccattgtctcgccattgcttgatactacttactgagtgaaagggtgaagagatcagcttaccacagttactgagtatgtattatgccaactcctgaactaggcaccaaggctatagaaacagaaa

SEQ ID NO: 133235 - DNA, 307 bp, Homo sapiens
agttcagctcaaagaacttatctgatgtaattaatgccttgtttgtatgtgcatcttccccttcaaagcccttttgcaactctgagcttgctttatcctcctaacattcccttgaagcaggtgaggtaaatgttaaacaagctgagctcttaatctcagaattttgaacttcagaaaccccatagtctagccttgcctgaggttttgaaggtggagaaacagaggcacagcttaacggattggattcactaagccaaacagctcatgaacttctttgagggtgacagacacaacttttacctcctgg

SEQ ID NO: 133236 - DNA, 690 bp, Homo sapiens
tgtggtggctcatgcctgtaatccaagcactttgggaggccaagtcaggcagatcacttgagcccagcagtttgagatcagtctgggaaacatgatgaaaactctgtctctaccccaaatacaaaaattagccagtctcataacctggtctcaaaaaagaaaaaaagaatattcattatggacattcagaagggttaaacacatgcaggatttggtgcctgaatggcaaagtgatgagagggattagagtgcctcactttgtgttgatgggattggccactagattgaggatatataaggaaggggaggagagggcggtagctgatagcctggagagaaaaggaaagaaccgtcaaaggattgggaatgctatctaggtggaaaagtaatggagtaaaggaatgagataattggaagggttggagattttgtctgaaactgtcacattgaagtttaagattttagaagtgaagtagatctggtttaggaaaagctatctgaggctgggcgccgtggcttatgcctataatcctaccactttgggaggctgaggcgggtggatcacctgaggtcgggagttcgagaccagtctgaccaacacggtgaaaccctgtctctactaaaaatgcaaaattagctgggtgtggtggcccatgcctgtaatcccagctactcgggaggctgagacag

SEQ ID NO: 133237 - DNA, 187 bp, Homo sapiens
ttgataaaggcatatggctactttatatttctatattggtcttccacttaatatttacaagagactcattttaactcccaatccactttatacatttcttcttttcccataaataccaacttattttatattagctatatcggttttaataatctataatgcatcactcaactattttacctcttta

SEQ ID NO: 133238 - DNA, 497 bp, Homo sapiens
ggcgtggtggtccatgcctgtaatcccagctactggggaggctgaggcaaaagaattgcttgaacctgggaggcggaggttgcactgaacccagatcatgctactgcactccagtctgggcgacagagcaagactctgtctcaaaataaataaataaataaataaaattttaaaaaaagataaaagattggaagaacgttgggatcaggttgtgaatggcctcgaactttagcaaaggagttgctgtgtgctgagggcagtgagcgagggttgcttggaaagatctgggctgcagagctaacaggagctgacaaaagcaggcagagggaccttgtaagaggggtccaggaggagacttcgaagcttctcacagggcagggctggagggctggagggcagagggcagaaaggcagagcccttgaggctcaggactgaggaacacaggcatgaggtgggggcatggtggctactccaggtacctgtgtgaatggaggag

SEQ ID NO: 133239 - DNA, 440 bp, Homo sapiens
gaagagggagggtgcagagagatctggggagaggaacccacctcttccaggtgccaggcactggcacatgaatggtggagggagattggaccccaagccctgcgtgcattcagtcattctgctcagtgaagtgtggacagaatttgtttgatgggagggtagaattgttctcaaagggcttgtgacacaggaggaagacgtccacgttcaggacatgtctagttcctacccatccgtgatgtgtgcataatggtcatccctcttttataattattttgtaaaatctgatgatgcggttttgggcagggctgctggaactggggcatattgtcaaggaagtctatgccaaagacgaacagttttcatcgtgggggcatagaattttcacacatcttctggaatagatcatctaaactcttttactctcaggttttctgtat

SEQ ID NO: 133240 - DNA, 394 bp, Homo sapiens
ttttcttttcttttttttttctgttccctgaagagctgccccatgaggacctggcctcattcattattctcttttggtcttgcatcttcaaatttttcctccacagctgggccttgccccctgcctacaaacacagtctagtctctctaatcacctctccccaaatccttccctcaacttactctctcacaaacttctcaaacatgccgcctttttaacatctactgatttctcagctctttttctacaagaacttcaagcattttttaacattaaatatttcttaatacttgttccataatctccccaatcagttaacactgtactgttaacataaaaaagaacaaatagaagtaatacatatataagattagaaaatgttctaggaagtata

SEQ ID NO: 133241 - DNA, 795 bp, Homo sapiens
gctggcgtggacgtttgtggtggggcgtgttggtccgcgctctcagaactgtgctgggaaggatggtagggcgactggggctcacctccgcaccgttgtaggacccggggtagggttttgagcccgtgggagctgccccacgcggcctcgtcctgccaacggtcggatggcggagacgaaggacgcagcgcagatgttggtgaccttcaaggatgtggctgtgacctttacccgggaggagtggagacagctggacctggcccagaggaccctgtaccgagaggtgatgctggagacctgtgggcttctggtttcactagggcatcgggttcccaaaccagagttggtccacctgctagagcatgggcaggagctgtggatagtgaagagaggcctctcacatgctacctgtgcaggtgacagagcacaagttcataccagagagccaaccacttacccgccagtcttatctgagcgggcctttctccggggaagcctgactctggaatcttcaacctcaagtgattcgaggttggggagagctagggatgaggaagggcttttggaaatgcagaaaggtaaagtgacaccggagacagacctccacaaggagacccatcttgggaaagtgagccttgaaggtgaaggtttggggacagatgatggtctgcactccagggcattacaagagtggttatcagcagatgttctccatgaatgtgactcacagcaaccagggaaagacgccttgattcatgcagggacaaacccctacaaatgcaagcagtgtgggaa

SEQ ID NO: 133242 - DNA, 766 bp, Homo sapiens
gcagtatctgcctcccctttgagccctgcacggaagtcagcccaaaggagacctagttgattcagacctggatctctctgcacattgactagagactgagtgacaggttctgatcctatgcgacaacacaaggccaatagcattacttctgtttgactttccagatgttggtgaccttcaaggatgtggctgtgacctttacccgggaggagtggagacagctggacctggcccagaggaccctgtaccgagaggtgatgctggagacctgtgggcttctggtttcactagggcatcgggttcccaaaccagagttggtccacctgctagagcatgggcaggagctgtggatagtgaagagaggcctctcacatgctacctgtgcaggtgacagagcacaagttcataccagagagccaaccacttacccgccagtcttatctgagcgggcctttctccggggaagcctgactctggaatcttcaacctcaagtgattcgaggttggggagagctagggatgaggaagggcttttggaaatgcagaaaggtaaagtgacaccggagacagacctccacaaggagacccatcttgggaaagtgagccttgaaggtgaaggtttggggacagatgatggtctgcactccagggcattacaagagtggttatcagcagatgttctccatgaatgtgactcacagcaaccagggaaagacgccttgattcatgcagggacaaacccctacaaatgcaagcagtgtgggaa

SEQ ID NO: 133243 - DNA, 467 bp, Homo sapiens
aaataacatcctggatacgtcaattatggaggcttgggatgttaaaaggccaatatttttcagttgttccaaaaagttatgagcgtgagcttaaagtgaattctctgggttaatttttattgaagacaagttgaggaaataattttctttcactttactctgcctttttacccctaagcaatgaaacctgtttttgagcctcactctgaagaactccaatagcaagtttcaattttataattgaaatttctatacccaacctaaggataaattgatttgggtaaatgaacttgctccctcaaaccattttgatttttaataccttttcattttccttgtacactgttcagatataaataaaccaagtataagactgtttaaatgtcaatcatcaaaaaaagataaatctcacattccttgtctttagtttccaatgatttacatgccatactagattattacatctt

SEQ ID NO: 133244 - DNA, 445 bp, Homo sapiens
acagggtttcactatgttgtctaggctggtcttaaactccaggtcccaagcaatcctcccacctcaggctcccaaaatgttgggattacaggcatgagccactggccctggccaaaaagaggtttatttggctcacggttctgcaggctgtacaagaagcacagtgccagcatctgcttgtggtgagggcctgagactgcttccactcactgcagaagggacagaggcctagcgtgtgcagatcacatggcgagagagaagcaggaaagaggggaaggaagtgccaggctctttttcacaaccagctctcaggggaactcttgtgggaactcacagagaggactgcaccaagacattcctgaggggttggccctcatgacccaaacaccacccattaggccccacctccaacattgggatgcaaatttctctttattttttagag

SEQ ID NO: 133245 - DNA, 349 bp, Homo sapiens
gagcttcctgagaggctgaaggacactttagaaatgtcagcaggagagacccacttcccttttaacccatggagtcaggaggagaggaaagaaaagaggttcacctcaggctgctcagaaggaaggtgttccaggaaggccagaaaagggaggctgctctggaaaaacaaagaagagcttggcaggtcctagaacggaggagaagttagaccctgggaatccaagatgctgcaacgtcaggcagctggtccccagcaaggctggcacgtggaaacctcacggagaaaagtgattcataaccaaagcagggctcccacagcgacgctgagcagacacagaactatttttc

SEQ ID NO: 133246 - DNA, 246 bp, Homo sapiens
ttacaggagagagccaccgtgcctgtctacagaagccataaaaaatgtttttaagttttctcttccattaaaaaaaaaaacaaaattcaagcactaacataagctaagtatcaccactatttcacacttagcacttttctgctaggaagctaaactggaatttattctagattttacagatattcttttaaatataacctatctatgtgccagatatttaaaatcagatagtgcatgctaggattg

SEQ ID NO: 133247 - DNA, 339 bp, Homo sapiens
tcagcatccagagtagctgggattacaggtgtgcaccaccacacctggctaattttttgtgttttttagtagagacggggtttctccatgttggtcaggctggtctcaaactctcgacctcaggtgatctgcccgcctcggcctcccaaagtgctgggattacaggcttgagccaccgtgcccagccgtctgttctttgattatttcatgcttgcatgttttgtctcctctgttcattcttaagaccatttgggtaccacttcttaagggcccctttcttattttccatggggcttggcactcagtagttcagttggcttatttttccgcggctgccgt

SEQ ID NO: 133248 - DNA, 1153 bp, Homo sapiens
ttttggtggttcttacagacttgagatggggcttgtcttaaggaaacaaggtgccctgaatctaaagactgactaaaggtggtagaacttaagctatttaggtgatcctgaaaccaacagggacagttatggtattgactagtgggaacttttaagagccataagactggagaagtcaaatgctgaccaattatatcaaacccacctggggaacaaactaagtcaaaattactagggtggctaaaagctgagaaatgaactaggtggcagttaggactgctgaacaaacccatctcaccatagcagagaaatattagaatacacctagagccatgtaaagattcaggagtgctaaaagcatgaattcccctccttccctccaccacccccaaaataagcttctgcctgaatgaaggtaactgggaatctgcaatttttttctttcctgcacaaataaccacttccccttattcaaataaaataaaggatatatctagaaatctgatcatttttaaatatttccagaagtggtctagtttagaactaaggctggttagaccggggcaatgttccaggagtacagaaaggatcttccagggtcttctagataaggaatgtccttcaaatttctacaagaaagtctgcagcatactgcctttcaagattaatggacaggatgatttggttatggttttacttgatgggtggacgtaagttccactaagaggtagactttccactaagatcaaagcttctgttatctaatttataattctaagttagctggggctctgtactaataagattttgaaagacttagtacccacatatcacaattaagctactctcttcctagtatgcagataacaatcaagataatactcagaaattctgtcaaggcttggcactagtcaaaaggattaaggatgtatacagggagaagcatatgtaggcagtgcgataaagataaaaagccatgttgcaacagtaaactggtatcttctgggactaaggacagcatattaacagctaaatgtacttcactctgcttagagctttagtaatacttcagatattgttatagagcagaaaaacaaaaactgccttatttgtgaccttctataattgccctacccaaaattaaaatgaccaa

SEQ ID NO: 133249 - DNA, 698 bp, Homo sapiens
agttgaaagaatattataacgtagtttcttgattgtataaaagtgttctgatgtgacctctgtggaatatggctataacagttaaatatagttggcttcaaatgggaataggaaataggaatctaaagcagataaatcagtgaagaaatcagtggattccaataactatccaagccttcctctgtggctggaagattgaccacactataaagaaagtaatgatttgttattcttgctaaatcattctaagagccttcacaaatacactattcataatgctcaaaaccttacagtttaatgcagctttcccatttgtgatttagaatacttgacaactattttatcaaaattttatgttcttttatgtttttttttacctgagaattttactgtttccaccttgtaacttctgttacaagtaatttctatgttcctactgtactaaacagccctaagtttgcattttgatagattatgatttctatcatgcctattaccatgataccgagagggaagatatgtaccaaaaccctctatttcatatgctcagaacttaaatccattattttgcctataaaacctctatttataaaaggaaaataaaaactgagtttttctttaccttatttaagagtgagattaggttcagaggcaagaattccctataggaatccaacaacatgctttttcctttaaaa

SEQ ID NO: 133250 - DNA, 697 bp, Homo sapiens
tatttattttaaattcttatagtaatctgtttcagaaatatatctattattctattgatgggcatttaggttcttctcaattcttagttgtgtcagcactacatttagtatacctttctccttgtgctcgcattagggtatgtgtgcacattttaatcttattaaatatttgatattgacagattgctcttctgtggatttgtgccatataagcacttggtattttctgttttttagttactgccagtctgataagtatcaaatgctgtttgtgtgtgtgtatgtgtgttttaaaaatacatttctgtaataaccagtacagctgagaatttcttcatttggccacccttgttttctatttgatgaattacctattcatattttgtgtccattttcctgatggatcatttgtcttttctcttactgatttgtgtatgtgtgtgtgcttgtattttgtatattactactttgccaagtatatattttggtaattgaattctagttgaattccattatagttggagaacataatttacatgattttaggtgattccattttagatgctttgttggttcatcacttataattttttgtctttttagtggttgctttagagtttttaatacaattactaccacattctacattaaagtaatattatactacttcatctgtattacaagaaccttaggccag

SEQ ID NO: 133251 - DNA, 715 bp, Homo sapiens
gttgccaaattcttccctatagagattatagcattttatatcccaccagcaatggttaagttcctatttcctcacagcctcaccaacagagtaattgtcaaactttagagtttttactggtctaaaggtaagaaatggtatcttagtgtagttttaatttgcatttgcctcatgaaagtgaagctgaatgtattttcatatgtttaagagccagttcatattatttttctgaatcatctgtttaaatttttttgcctatttttctattgggattttagagtttttaattggttatctaagacttctttatatattaggaatattagcctattacctgtagtttatgttccaagtatttcctccctgcttatcatttgtctttggactttacttacgatgttttttgccatgcagaagtttttcatttttatgtaacagatttgtcaatattttctttcaatgaatctagagtttgagtcatatatataaagtctttctcaatacctaagttataaggaaattaatatatgttttctttcactctttgtatcatttcatactttacatttagaacttaggtctacttgaggtgtacgcatatgtttggtgtgcagaattgatccagatatatcattttccaaatagctatctagttatctcaacattatttatcaaaaagtgcatttttcctctagtcttctgagataaccccttt

SEQ ID NO: 133252 - DNA, 936 bp, Homo sapiens
atcttggctcactgcaacctctgcctcctggattcaagtgattctcctgcctcagcctcctgagtagccgggactacaggcatgggccaccgtgcctggctaatttttgtatttttagtagagctagggtttcgccatgtgggccaggctggtctcaaactgctgacctcaagtgatctgcctgccttagcctcccaaagtgctgggattacaggcatgtgccaccatgcccagcctgctttccacatttataacctgcttctttacctttacaatgatccagcaggataggtaggagagggattctttgctccgattaccagatgggaaaatcaaggtcctaagtgaccgaccaccacatgtgctgaggtcctttgggcaggggggtgcaggatccctgcatccacttctggtgctctttgtatcatcttcccccatccctgtatctgcagagcagaggcacatggctcattggttctgagtagaaatcttggagtcaggtttgaactgagcctcagttttactactactagctgtatgactttccacatgttactttctcttaatgagcctcagttttgcctcctgcaaaatgggcctagcaaaagcagggtgcctttagtctcagctactcaggaggctgaggtgggtggatcccttgagccccaagagtttgagaccagcctggataatgtagcaagagctcaaaattaaaaaaataaaataaaataaagatgcagtacatgtaatctgcttagaatattgcctggtatataagagctcagaaatcttagctactaatattatttggcagataagtttccctgtcataatcttttcttctctgtaagatcctttctctgtgtctggagaacccacgccacatttctctcctagtttctggtgactctttggtgtttttggctcatggctgca

SEQ ID NO: 133253 - DNA, 273 bp, Homo sapiens
ttgtttaagcattaattttcttttagtagtttccaatggtttaattaactcttaaagtgaagttgataagagaattggaaaattactgaactaagaaaaatgttgtctttcaactgctatttatggctgccagttacattttttgtgggagataattatcatttgaacctggaaggggttattagtgaacatatactatgggtattatcttagtcttgctgggctgctatgccaaaatagcatagactgggtggcttcaataacaaacattta

SEQ ID NO: 133254 - DNA, 745 bp, Homo sapiens
gtgtttgatatgaaagccctgaacaaggtgtaaatgtattcccatctctgtcattacaaacaccatagctttctgctacctgtgtgccctttgccacatcttttatgtttttgatcttgttgttgaattccaggctgtctggggagcctgatattgagaaattacccactttttgcgttttcctggagattgaagtcatgtgaagtgtttccactggtgcttttccaaattcatctcaagagactggagtcaggctgtttcttcatggcataaatctgctttgggactccttcctcttggtttcattacttttccccgccttgcatcagtgaagtgaatctgtcacatttgttgtggaagtctttagcttgagtcttagacagtatctttctcagtaggaacagccttatacagagagtgcactttcaaatctggactgactctttttatttttcatttttatttttcctgctggctcccttccacctcccccctggactgactgtaatatatcttagcttttaaaacactttatacttttatgaaactctataaagtttggcttaggtgggtttatcttataaatgtgcataaggctgctattaaatttagaggactattggtttgtaactactgttaagaaattattattaaataatacctacttgataggattgatttgtgtatttgcattctaaaagtgtatgaggaatatttttgtacatcttattttatttggtgatat

SEQ ID NO: 133255 - DNA, 170 bp, Homo sapiens
ggcacctggcccagccctggcgggcacagtgatcagcatttatacgtccaagaggctgaatgcctgagtggtgatggtccccctgcgatccaggatggggacacaaaaggctgctcggagattgtcatttcagagagggaaaacggaggccacagagggaagcgatacct

SEQ ID NO: 133256 - DNA, 179 bp, Homo sapiens
ggcctggtttaactttctcactgagttcttcctgcttggcctccttctctgccactttcttcttggctttcagggatctcttcagctcattcttgctcagttttggcttgctgccatccactttcacctcagccccctgtaccactgccacctttccagaaggctccacccaaaagtcc

SEQ ID NO: 133257 - DNA, 202 bp, Homo sapiens
cagatacttgacttaaaaataaactgtatcagataacagttatccaatgatgactgttatgcatatttagggtatttttgatagactgagtcaagctgtttataattcacacagtgtattattatctagaacaagataatatactgtcccaagacctgcctgtttttattctatgttaaggactttgtatggatttgttaga

SEQ ID NO: 133258 - DNA, 741 bp, Homo sapiens
cgccgcggcggcggaggcaaaaagctgcaaaagccgcggtgtgggggcagaaagccgcagcgggagaaagtctcactccaaattcccttgcttcagtaagcttctctaggccaatgttccttcggcattacccattttcttcctgtgaatgcaaatcacataaacatggaagtacatttgaccattttaattgtttaacattccatgtcacacgaccttccacaatagaatcaatgtattaaaatgtgttaacgaccacacattttacacaaatgccatgaatccttaaggtgttccaatttataaaatatgtctgcaaatcatactttatgatgctttgtattctgtcggtaattggatgtcatatatttaaattctattaaactgcttattaaaatgtccagtgcctcttttcttgcatggccacaaatattgtcactttaaatcagcacctttcaaagttagtttcatgacgactcaagatactttaaactattttagaaagtctcaaaataattcaaaaataattcatttagttaacatattttgtaaatatacatattctatgtattaatttaaatttggaataagtcaaggaagagatataaaatgtctttaaaaggtattacaactgtaagtaatcaaagaaggaaaaacaaacaaacagaataaactgttaaagggccagaatactaggaagaacttaaaaagtagtaagcaatacatacttcctcacctata

SEQ ID NO: 133259 - DNA, 425 bp, Homo sapiens
gaatttaagtagaacagcgttttttatgggcaggttagtcagctaatggataagagacttgaaattactcttttgggattagcaaatagaagggaaaaacatgataagggccagagccaatacaaggataagaactgcaaatacttgaaacaagaaaggacaagtatgaggacaacgcttaagagaacagaaggtctttgataaacctctgcctcctgtatggcaatgttaacaaatggaaagatacaattttgagggtggtaggactaagaagtccaagaatctaaacacggtatccatgggagaaaaataagaaagttagacatgattttcttctgtagaaggccatataaagcacaaaatttttttaaaaagaaaaactcaaatttctttttaacagtggataattttaatccttccctcca

SEQ ID NO: 133260 - DNA, 672 bp, Homo sapiens
gaaatagtgacttcagcatggtctttttttttttaagtgtaaatatatctaaaggtaggaaaaaactcaacaggatctatacatttgtatgtgtctgcctacagggtgattttcttttctcatttttgctcctgtgcattttcagttttctgtaatgaacgaatattatttgtgtcatttaaaaatggagattggctgggcatggtagcttacgcctgtgatcccagtactttgggaggctgaagctggaagattacttgagcccagaaatttgagaccagcctgggcaacatagggagaccctatctctaccaaaaaaaaaaaaaaaaaaaaacaaaaaaacatttttgtgtgggcgccgcccttggcccccttggaaaaaagctttttaaaaaccattcggtgttgggggcgcggggggcccccaagttgtggttatggtaggaaacacttgggcccaaacgtagggtttgctccaagaggaaaaaactcgcgggtcacacgacaaagtgggtcggggatttctcccccattataaaaaaaagccccgcggggaaaccccacagcttttcttgaaaaaaattccagaatgggggtctccggagagcacaatcacgggggtctctttcacacagaggtttcccacagggaactccgcttttcaaattagcc

SEQ ID NO: 133261 - DNA, 463 bp, Homo sapiens
tgacagagtgagaccctgtttccgcctaaaaattcaggcaatgtggtagttagaaatggatgtcagagtaacttgtaatcatcaagaatatcaaggtaagaaaaatgagtcttaactgtgaggagttctctcctgaagttttacataaaacccttctaatttgagggacaaatcacagcttctgtcagcttttcttgccttcctttaaatgccatgggaaatgcagtgaccacagtttctgcctctgttatacagtaaacccatgacattgtctgattcaaccaagcatgaatcgaaaatactgtacaatagtctcaggatttgaaacctgtggatacagagcaccaactgcattagctaaggtctttgatggatcctgtgcagatgctgatttgagcccaatccttatcagtgctctttgaagactggaaggttttttgtttgtatttttttttttagacgg

SEQ ID NO: 133262 - DNA, 289 bp, Homo sapiens
ccctcttcaggaggtgacagggccaccaagacggtgtcttacaggactacccccagtggtttgcaaataatgcccctgaaaaagtctcagaacgggatggaaaatggggacgccggctctgagaaggatgagaggcactttggaaatgggtcccatcagcctggcttggatttgaatgatcatgttggagagcaagatatgggtgaatgtgacgtgaatcacgctacactggcggagaacgggctcggctctgctctgaccaacgggggattgaacctgcacagtccag

SEQ ID NO: 133263 - DNA, 539 bp, Homo sapiens
tatgtccagagcttggcactgtgcatggcagattataggcacccaataagtatttgtaaaatgagtgcaagagacagtgagtgaataagtacatcaatggatcaggaaatgagtggattaatggataaatgaatggcatgatgactgactgatgaatatgcatttaggtgtcgtatgaaggaagaagtaagtacataaatggataagtgaatgagtgagttatggattaaatggataaaggaataaaaaaaatcaggtaatgagtcaaagaaggggtaaatgactaatagagatagggctactacatagaagcccttggtccaggaacttttgggtgaagacagttgacttccaggctgtgggttggcaagttgactgtaattcagctcattcattctctaccctgacctcacacatcctgaggtcatctgaaaaatcaagcctagtccatggaaagtactcagtaccccaaagaggcatttattcatgtgggcaaagaaacaacctgtcagaatctgactaggcctgaaagaggccat

SEQ ID NO: 133264 - DNA, 248 bp, Homo sapiens
ctgccctggcccatggcataagccatctttgcacattattttcaaactgtgaaaataatgccagagaaaggaagcacccatttgggcttctcatttttcagcctccccagctcctgagggcccctgcctgatttgcattcttagctaaatttgcataacagaacacaccagaacttccctggaccaactgtggtaagcgggcaagttttgtttttgttttgtttgggtttttcatctcctgccatgtc

SEQ ID NO: 133265 - DNA, 927 bp, Homo sapiens
taatcttgtatcctgtaaccttgataatgcatttattagttcatagtgttttttgcttcttttgttcttttctggtaaatgccttaggattttctttttctcccgactccccgccttcctcctcttctttttcttctgccttaggattttctttttcttctttctcctccttctcttcctcctcctcctcctcctcttctttcttctttcttcttcttcttctcttctttgtttttaaattgagacaggggctcactctgttgcccaggctggagtacagtgatgcaatcttaactcactgtagtctcaaactcctgggctcaagtgatcctcccacctcagcttcccaagtagccaggactacaggtgtgcaccatcatgcctggctaatttttatatgttttgtagagattgggtcttgctatgttgctcgggctggtcttgaactcctatcttcaagcgatcttctcacttcagcctccccacatgttgggattacaggcctgagctactgtgccaagctgaattttctacatgcatgattatgtcacatgtgaccataggtaattttacttcttccttttctatctgcttttttcccttgccttatttcctctggctgggacctccaataccgtttttaatagaaatgtgagagccacttcgtttgtttctgagtatagtgagaaagtttggtcttttaccattgcccagcttgaagtttcctatagtttatctataggtgatctttatcacgttgaggaagttctcttctctttctagtttgccgagagtttctatcattcatggatgttgcattttgtcaaatatttttctgcatccattgagataaatatatacattttaccatttattctattaattgatgttctaatgctaaaataaaccttttatttcttgcaaaaa

SEQ ID NO: 133266 - DNA, 334 bp, Homo sapiens
ggtaccagtgccacactaaccctcacctccaggggacctgaaccctcctgctgcttcaaagcccccctcttatataaaattatcccaattccatgaaacagtcaccctggccctggtgtcagacaggctagaccagtattgcctccacaaacctcaggttttttcatctatagcatagggatagtagcagtacttgtagggttgttgaaagaattaaataaatacatgcacataagcattttgcacagggcgtagtacttaagcaaagctcaataatattagtagcaattttttttttgagacaaagtctcactctgttgcccaagctggagtg

SEQ ID NO: 133267 - DNA, 633 bp, Homo sapiens
cacggtggctcacgcctgtaatcgcagcactttgggaggtgggcagatcacaaggtcaggagtttgagaccagcgtggtcaacatggtgaaaccccatctctactaaaaatacaacaaattagcggggcatggtggcacgcacctgtaatcctagctacttgggaggctaaggcaggagaattgcctgaacccaggaggcggaggttgcagtgagctgagatccgccactgcactccagcctgggcaactaagactgtgtgtcggaaaaaattaattaattaaatttaatttaaaaattagcagggtacggtggtgtgcgcctgtggtcccagacacttgggaggctgaaaggggaggatcgcttgagcccagaaggtcaaggctgcctgagccgtgattgcgccatacgatcgtgagccactgcactcctgcaccaccgcactccagcttgggtgacataacgggaccctgtctcaaaaaaaaaaaaatttaaaaaaaggccaggcacagtggctcaagcctataatcccagcactttgggaggctgaggtgggcagatagtctgaggtcaggagttcgagaccagcctggccaacatggtgaaaccccatctctactaaaaatacaaaaaa

SEQ ID NO: 133268 - DNA, 413 bp, Homo sapiens
cgaaggtagaggccctcttatcacagcaacaatcatcacttaagtcaaagacataaaattaagggataccttagtttcatcacagaaccagtccaaatgtgtttgtttgcattctcaacatttcagtaacctctagggagtatttcttctaacaattatgggtggaattgggcagttcccctttacaagatatgttttatgtactgccacctttgtgcagctcaaccgatttggaatttgcccagctaaccacattccggcaaaagctgcagctaattgaagatcttcaacgaattcagctaattaagaccaaacacaccctttcatttgaaggtacatttgacagtacctaatacaaggaaaagagctcctttgtcattcatgtatatccaacccagcagtggttctgcagg

SEQ ID NO: 133269 - DNA, 513 bp, Homo sapiens
cgctcactgcaacctccgcctcctgggttcaagcgattctcctgcctcagtctcctgagtagctgggattacagcgtgcgccaccacacccagctaatttgagtattattagtagagatggagtttcaccatgttggtcaggctggcctcgaactcctgacctcgtgatctgcccgccatggcctctgaaagtgctgggattacaggcgtgagccaccggtgcccgatccggctttccctctgttacataacatattcaagcttctaaacattacctttagactttccaaattctggcctccttacatccatttacctttccaatatatctcctgttactttttgtagtagattttcccatttaataatacaacactgcttttaatctccctgccatgcagtttcacacccacaggggtttacttatattggttattttcatgtaatgcctcacctttgttcacatgattcaagaattaagtatcagtttttccagacgtcaccctatggtag

SEQ ID NO: 133270 - DNA, 266 bp, Homo sapiens
ccaagcagtgggacagaggaacatttccgactcaacagctactaactgaacatggagcaattctagggagccctacaagaccctatcaaaagtgtccacatcaggctaggcatgatggctcaggcctgtaatcccagctgctctggaggctgaggcaggagaactgcttgaacccgggaggtagagattgcaagatcattccactgcactccagcctgggcaacagagtgagactccatctcaaaaaaaaaaaaaaaaaaaaaaaa

SEQ ID NO: 133271 - DNA, 565 bp, Homo sapiens
tgatgtctttgctcaaatagcaatgtatgcttctcctattttatagctgcagatagatatgatacaaacacctggcttcactgtgtactttattttacttacttacttatttatttatttattcgagatggagtcttgctctgtcacccaggctggagtgcagtggcaggatcttggctcactccgcctcctgggttcaggcaattctcctgcctcagcctcttgagtagctgcggttacaggcgcctgccaccacacctggctaatttttgtatttttagtagagatgaggtttcaccatgttggccaggctggtcttgaactcctgacatcaggtgatccgcctaccttggcctcccaaagtgctgggattacaggtatgagccactgtgcctggcttcactgtgtactttaaagctccccttttctccatccacttgctgaattgcctccatacagtctgagggtcttgctataatccattctctacctgggctgcagtaagcattgaaagtatatattaattagcggttattttccccgatatgtacttagggctttctat

SEQ ID NO: 133272 - DNA, 628 bp, Homo sapiens
agccccagaaattgtctaagctttaggtcccacaaaacctagatcagctccctgataattgatcaatataattaactaatatatatgaaaggaatacagactgtaagcaagagaagttttttgtaggctaagcagtctctaagtcccaggaatgagagtacatgggaacgtcatctcagagaacaggagccccatatgtgaactttgtgtggaactttaattgaatgagctcaatggagaatttaggcggatgaaaattcaagttgatcttcactcacctactaaatgatcagcttgctatgtgtgatgtatcaatttatttgtgacaagatcagacaatttggagaatgagacaggttcaaattttggcttcacctcttataattgagttcactcattccctctgagcctattttgtttacaaaaagggggttgataataataatagctaatttaatagggctaatggggtgctatagtgaaatgatagatatgaaaaatgctctgaagatagaaaatgctgcacagatgttagtagctatacaaagctaacaaatagtatactcatcgtttatattaatagaatgactaaaaggtcattctgctggagaaggagtcagtcgacttt

SEQ ID NO: 133273 - DNA, 400 bp, Homo sapiens
agtattaccattccaggtgagataattcttcattgttgtgtttattgcatgatacttagtatccttggaccccagcggtaaatgtcaataccaacctgaatgtattacagcaaccaagaatttcccacacatttccaaatgttaggttgaggtggtatggagtatctggttgagaagcactgggttagatcagtgtttagcttattactattatgtaaatggtagtcatagttaagccatgtagtataccaaggtttacaaccactgttttccctttcttgtacatttttctgttgtccctgaaattaattgtctttatcttttgtttagtgttctctgtacctactactaactgcaaactctcttctggttgtctgtttctcctttatttgctttcata

SEQ ID NO: 133274 - DNA, 319 bp, Homo sapiens
  misc_feature (15)..(16): n is a, c, g, or t
ctgaagggtgccctnnttggtgggtcagtatccaatgcatttctccagaactgggttccatcttcatttcaccaagcccacataagtggctgaacatcacaaccccagccatactgagcctgggcccacgatagggatgaaatatactaggttattaataatgctctttaaagtctgagagacccctaagaatactagcttgtctacactgtttactgaaaatatatggactaatatcgtagacttgattcactgggttacacagcctcattttggctacataaccagtgagacataaaacacccctcagtaaactttt

SEQ ID NO: 133275 - DNA, 741 bp, Homo sapiens
aattattattccaaaatgattttgctttccatttacccacaaggacctgacccaaaaggtatttagttttcaaatgagcatacaaataattcaaaacaaaacaagctcttaacaacaacaacaaaaccttatttaaaatccctggaaggcatctagtgagagcagtatgtgactgacgtggtaaattaggcctgctggagaaaaaaatcaagacaaaatatggattcattgttattttgaaaggcagccatctttccaagagaatgtgtacaccacattttattaagaaattacatctttccccatattttccttttctctttcacatgctggcaatggcaagcaggttgagcagatgtgataaaagaattaataccagtcttgggaacacgtagacgaaatatttcttttgaaatacctacctttaaattccattagttcaatctgatactgaaagagcctggattagggaaatgatttacacagcacaggttgtttgtccagacttagagcccttttgtaatatgaaaaacgtgaagatgaatttaatatttctccaatgaattggcacagggtttaaaatcttgctttgactgagataattgcgtttgttttagtgttaataaattcacctcggtgagaatttttctttttttttcttctagattcattcatagctgctacacattcatctctatataaaacctactctcccctctgaaaaagcagcataaccagtca

SEQ ID NO: 133276 - DNA, 674 bp, Homo sapiens
tatctttcattggaaaaaccagggtggttcagtgagttaaggacaatatagcatggactgggctgccagtctagcatttgtttccaaattcattcatgttcttttggagtatcttcatctcctctcattttcccatcttctgccctttactattctgggaaaatggcaaaaaagcttcacatgtgtccacaaaatgacaatttgtatgtttataaggaattcagtattctgtatcagttactttttccaaataaatccaaatatttaacatttaaaaaaatgcaatctaaagtataccaaactgtaacttacctagtaaatgagattagaaactattgtcagggtcatcgtagtgaattattattattattattttttgaggcagagtcttgtgctgttgcccaggctggagcacagtggtatgatctcagttcactgcaccctccacctcctgggctcaagctattctcccacctcagccgcctgagtagctgacactataggcaccaccatgccctggctaattttttaaaaacttttgtgtagagatagatagggtttcaccatgttgcttaggctggtctcaaactcctggactcaagggatccaccactttggtctcccaagtgctgggattaccacaatctagtacaactttatcacttctgatggct

SEQ ID NO: 133277 - DNA, 590 bp, Homo sapiens
gctatgtctcgtggatactgacgcagagttcggctatgctctatcactacccatctttgttgctcgggttgttcaacgacacacagctgccactaggagcctttacagctactcttgggtccctgtgacttgcaccatctttgtgggttcctttgagcacctccttaggctctggcaccacaagatgctcaattcctcctatatactccctgctcggccctacgattctgccatttctcaagggagccctggttccctttgttggagaatagtgttagaaaccaagaaaccaggggccgggcacggtggcttacacctgtaatcccagcacttcaggaggccgaggggggtagaccatgaggtcaggagatcaagactaatcctggctaacacgatgaaaccccatctctacgaaaaatacaaaaaaattagccaggcacagtggcaggcgcctgtagtcccagctactggggaggctgaggtgggcagatcacctgaggtcaggagtttgagagcagtctggccaatgtggttgaacccagtctcttgtaacgatacaaaaattagcggggtgtggtggcgggcgcctg

SEQ ID NO: 133278 - DNA, 449 bp, Homo sapiens
gtggaggttgcagtgagtcgagatagtgccactgccctccagcctgggcgacacagcgagactctgtctcaaaaaaaaaaaaaaaaaaaaaaaacttaagggaatcctgtgggaagtttctcttgtttgggtcatctattagtctgctggggactgtgctaatgcccataaagactgagagtactggtgttagtgatgttggaagattatctggattggattgacaattctttattataggatgaataaacttaaaaatcaatatgaggcttatgaatataaaactgtaataaagagaaacagggatcctatggacttagcagaaaactgtgcccctaatatagtttaattactcagagaaagttacagaaaccaatgtgatcagtgcgctaaagggtctattattgaaatattatggaagatttctattaaatgtcagaaaaaagtaa

SEQ ID NO: 133279 - DNA, 678 bp, Homo sapiens
ggtagcccagctggaatttgaacccagacagcatgtgggttcagagtgttttcatttttaactactctgctatattaccctctctagttttcagtattcatattagcacctcagccttccccagatgactacaaatcccatacatatgtgtatacacacatacccagggtcattcatgaaatctgaaacttcgggtgttcaatttgactttatagaaccttctacctctcctggctgatagtatctctttctcatttcacaaattaaacttcctataacactaccttaaacatgccacccctgctcaaaatactctggtggcttcctacgatctataagatgaaagctaacttccttagcttgccattcaaggcccttcacagtctttccagtcttactgtttattctatccctacttgagcacaaagcatttttttctttgatcatgcatagtccttctttcttcatttttttaagtgtacaattcagtggattttagtatattcagtgttatgcaaccatctccactatctaatgccagaacattttcatctctgctatctaatgccagaacattagaaaccctgtaccgcatagtggccattcccaattcacccttcctcttatcccctagcaaccaccaatctattttctgtctttacgaattagctattctgg

SEQ ID NO: 133280 - DNA, 189 bp, Homo sapiens
gtgtgtagttctcactaatggatgggatgagtcaacccaaccatccactctacctagggaagtgtaactgggaaacattcagagagaacctagaggccagagagtgacacagaaacagagaagtacaaatacacaggagaaagggctgtgaagcagtaaaagccatgagaaagaagacaagaaaggcaa

SEQ ID NO: 133281 - DNA, 851 bp, Homo sapiens
gttcccagatttggctctgatgaggagaaaggaaatgttcatctctgaatctgcgcttctacattgacccaccgaaaattggcttaattttaagggaaaatagagaacctggcttagtgcagccaactcctgttattcaggaaatgaggatgtgagaaatggagtctggggagaataaataagtattgtaagctttctgcaaaggctcatctcgcctgggtgttcttgccacacatagagagggtttagagggcctctgaattgagaaggaattcctagaaaacctgaggctcgctcctaaaagaagcagccatattctcctttgctgtctagagtcttagttgttgctgttattattgttgttgttaccattaatggtgggctgactgctggatactttgctacaagtgatttaatttaatcctcgaattgtcaaagctgagattcttacttcaaagcccatgctgctttcactctagcgtgcccccaattgtctattaacagagagataggagttgttataacagccctagagttctggtattctgaacttggatttttctcttttgccatttgagtagtgacaaactccttcaagtaatctaccttcttcctctcttcattcattgcattaacgcctccgaagtgctcttcttggacagacactgggaagatgatggtgtgttgtatcacaccttttaataagccacattttattcagggaaagtggggagcttttttgtggtttgcaaacctgatattaacattgtcctgaccagaaaatgtcaaaacttgcccacccacccagttgtgtttaggcttctaaaaataatgttattcctccatactca

SEQ ID NO: 133282 - DNA, 775 bp, Homo sapiens
cgtctcctctctatgcccctgggggatcctcgccagtacgtcggctcagctcgatggttcgaatcctggccccgccaccttctagtcccgcgaccttgggcaagtcgctctacctttccgaactttagtttcctgtaaaacaaaaacaataatgactgctgtttattgtggcaggcactgcgttacattctttatgggaattagctcgtttaaactacacagtaacattttttagtgagaactgctacagacacactatagaaaataaaggcagctgggcgcggtgtctcacgcctgtaatcccagcactttgggagaccgaggtgggtggatcgcctgaggtcaggagttcgaaaccagcctggccaatatggtgaaactctgtctctactaaaaatacaaaaattagccgggcgtgatggcatgcgcttgtaatcccagctactcgggagactgaggcagaagaatcgcttgcacccgggaggcggtggttgcagtgagccgagatcatgccactgcactccagcctgggcgagactccgtcgcacacacaccacaaacacacaccacaccaacctttcccccccctcgccccccaaacatccttcatcaaccaccctctgggccccggccccccacgccacgacacactggcccaaccgtcccagacacccggccccacaagggggggctcccaccataaacacccgggcccgccctctgacaacccaaggcccccggcacgggctaaacacgaccacggcccgtaatcccc

SEQ ID NO: 133283 - DNA, 147 bp, Homo sapiens
tttttccagtctgatctcactcacacctttaacactgtcaccaggatcttcataactcaaaagtacagtcctgtgatttctgtttttgaagtctttcagtgggttatcattacttatatgagaaatttataagtccttaatatgaca

SEQ ID NO: 133284 - DNA, 811 bp, Homo sapiens
atcatacaacttttaatagcctgtagaggatctgtttggtttgttactgtttaaagaaaaatgttttgttacaaaaattatcttcattaaaatagtcaacatattctccctctgggagatttcaagttttttttttttcgtttttgtttttaatgagatggttactgtgacacttttatttttaaatgtgttctattttatgcccagtggtacttatatttcttctttctttaatagagttagaatgtatatgtgttcctgtaaaatatgaatgcccatttcttatgaaaatcgtttatatcccaattatgaagagttttaaaaattaaacattcacaataagatttgttaaaaacatcttaacaaaagatgtttgggaagtagttagtcatacatgagagtagaaaagtgtatattgttccaaagttcaaaggcttttatgtgccatgttaagaagtttagatttagcttgtggtctttcaagactttaaacaatcttaatatttataaaatcgtggctattttagaaataccttaatattgataaaattgtggttataagacactaagacatataaaatgtaaatattgtatgatgattatttgactaaatatgagctatggcggggggaagcttcttaatgaaaatgttatctcagtgtctattcagattttaacatatagattaattctttttttctttatttttccacactatacagatgtatagactaattctttttaggaatgtatttttgccatttccctcattctgtcactttattaaatagtaatttaatttgactttttt

SEQ ID NO: 133285 - DNA, 491 bp, Homo sapiens
aaaacatttgaggtagaaaaagttcatattaatacttagatgcatgtttgggctcagaaatacttttgaactctgtagagaattaatatggtagctaacttaaacaggtcttaaatttcatctaataaatacttgagttacctttatgtgccatctcagtatgctaagtgctaggcttcaacccttttcatctggagaaaagtaacttacctttctgcttgtgatgggcctctgtgccccaacctcatcccaattcatgaataaactgatatttactctgtggtccctgactgatgtttcacattcctgactattgtttaacaatctgattctgggccgggcgcagtggctcacgcctgtaatcccagctctcagggaggcaagaggcgggaggatagcttgagcccaggagttcgagacctgcctgggcaatatagcgagaccccgttctccagaaaaaggaaaaaaaaaaaaagacaaaaaaaaaataa

SEQ ID NO: 133286 - DNA, 486 bp, Homo sapiens
gctggcagggagggatttccaccccgcattggtaagagagaagagcaagatgcgcttgcacattgcacctgtgcacacttgctcatctgtaattgtgggtacagggacaaaggtgtgtgcagacacactgcaggtcacaaagactgcatagaggcatagagtgaaagtgggtacagaaaaggggaggagtaggaagaaaagaaacaaggaatcacaggacacggcagctcgtgtctgtaatcccagcactctgagaggctgaggtgggaggatcacttgagcccaggagttcgagaccaacctgggcaacatcgtgagaccctggctctgctaaaaactaaagccagatgtgatggcttgtgactgtagtcctagctactggggaggctgaggcaggaggatccctcgagctcaggagggcaaggccaccatgattgtgccactacactccagcttagatgacagaatgagaccctgtctcaaaaa

SEQ ID NO: 133287 - DNA, 236 bp, Homo sapiens
cagagttacagctcagaccttctgttcccaagtttaatgtttcccgcaacttatgtataaacaagctatgaggcagaaactcatttaatacttggcctgacctaataaatattgatgagcttaaagaaactatgttttggagactcttacgtaggattagaaaattttggagagtgtgagatcttttctagtattaagggctatctaggtgttatgggttaggttaattttttttc

SEQ ID NO: 133288 - DNA, 244 bp, Homo sapiens
acagcttgttcatttcttatagataatctggcctttatcagaagctactgactgattaaaacagtctctttcagctatatgttccttttcttcgaattttgcctccctatattttttcccaagagagtctgattggacaacggagtccaccgtctcctccagcttcagagaagggacctgtctttgtcctgctctccttaatgctgctttctgccgacagaaccttcttcagttttttggtatc

SEQ ID NO: 133289 - DNA, 313 bp, Homo sapiens
actgcactccagcttgggcgacagagcaaaaacttcggttttaaaaataaatatttgatttatcaaaggtacaatttcacattcaaaaatctagttctggccgggcgcggtggctcacacctgtaatccgaagtaaatgtttccctccttgggtttgattcatttgctagagcagctcgcagaactgagggaaacatttacttcggtttaccggtttatcataaaggatgttacagccctggtgtggtggctcacgcctgtaatcccagcactttgggaggccgaggcgggcggatcacgaggtcaggcaatc

SEQ ID NO: 133290 - DNA, 684 bp, Homo sapiens
cacacttgtcagatttatctaactctcacaccattgtcatcacttccgcctgcccctcaggaacctaaattgatacctctgcctatcatggaaaatctaaactcttcagtcttgcattcaaagttctcctgcaactacctgccccagcctccatcatctttccaatctgacctctccttgcttcacactgtagaagcaggtactcttggagctgacagtcatcaaaaagatggtgcatatccaactctcacatgtcaaagatggggaaactgaagcccagagaagtgaggtgaatattcccaaggccacacacagtccttccactgtggctaagacgacatgctttccattccacacacaacttgctcctctggtcctaagccatggggcgaggtgagtagaactggtacccagaaaacagtatggcatgggataaatggtagataaagcaatgttgagaattaaaaactccaatgtgcttacaacacatagcgttctcagcaagtgaactttatatagaatttgccaccctcatagtagggaattcactaaagctgggaatgaatgtgcaaatgtttgtttgctttgttttgtttaccacagaagcgaaatttgtgacaatctttttcaacctaaattgaataaatgattcaggacaagaaatgattaccagatgtgtcaggg

SEQ ID NO: 133291 - DNA, 617 bp, Homo sapiens
gaaatcctccctgccatctccaccctttcccaaatacctgattttatagcaaagtcaatgagagaattaaaagctgtttctaggctgctgacataaagttattgccaagctctattctttggtttagttcatgtgtaagcatgaagaaaagaccctctcacatacctacttaggcaacaaaagcaacatttttaaaaattaatttgcccaggctgggcgtggtgggattacaggtatgagccaccgtgcccggccgtaatgctattgccttgttttattgttgtcataaatttatcactatctaaaataatcttgtttatttgtatgtaactttttctccccgtatctagaacataaaccccatgaggacaggaatctgtcctttcttcttctttaatgtggtatcctcagtccctagcacttagtatgtgctccatgaatatttgttaaacagatagatactgtcattaatgggattcctgaatttattcattctccagacatgcattgctcacttactttgttccttacaaaacattgggaacagatctcgtgggcaaatacacgtatagacatggcagtgggcatggtaccccatgacgtgctaaacgaggaag

SEQ ID NO: 133292 - DNA, 391 bp, Homo sapiens
aggcgtgagccactgtgcctgcctaggcgttatgttcttaaaaatagagaagcggaaggattacatattattgggtggcagaataaagtttttctgttataccataattgtctcaatttttggaattactctttaatttagctttaagaaaaaatactggtattatttccttgaaatattatgaattagctgttctgagaattcctcacggctcttttcagtcttgacctcctggacttaagtgatcctcttgcctcaggctctcaaatagctgggactgtaggcatgtgccaacacgcctcgctaattttttaagtattttgtagagacagggttgtgccacgttgcccaggctggtctcgaactcctgagctcaagcgatttgcctgcc

SEQ ID NO: 133293 - DNA, 354 bp, Homo sapiens
ctgaccctaatgtcccaccagatgagatttccaagtacggaggagaaaaaacttaacaagccattctgcacgtaagcttatccttaacacataagggagaacaggcaaagaaaatgccaaaagatttcaaaggtgtcactactacctttaaaaggaaaacagagaaatgtgagttaaataactggtgtcagctgggtgtggtggctcacgcctgtaatcccaacactttggggggctgcggtgggtggatcacctgaggtaaggagttcaagaccagcctggccaacatggtaaaaccctgtctctactaaaaatacaaaaaattagtcgggtgtggtggctcacgcatataat

SEQ ID NO: 133294 - DNA, 231 bp, Homo sapiens
ttggtgtctccctcatcatgatgacaaagtcagggcacctaaaaacgaactcagagccttcttcctaaactagctacatcccagaatcctgtatttctctcaaaaggaccatcaattggccaggtgcccggacgtgacatccatcacgtcttctgataagcacacaccaaggacccgctcatgccaggccctgtgctgccagaagaagcacacggggaattctacagaaca

SEQ ID NO: 133295 - DNA, 430 bp, Homo sapiens
tatatgacaggggcctgcatcaaaaactgtttggaattagatattagtcttttcatgcttttcactagtgagactaaagtactcctacagagctcagcttacatatgagaaaatataatacatattatcaaatataaaaggagattgctgaataactgttatccatatctaccacggacagaacaagaagatattggctcactctacagcacaaatttgggttagatgtaagaatgaatattctataaacaagatatcctaaaatattttgaaaaactggctagatatggtttgcttgagtttttctcctccatgctatccaattcctattctgccacttcggagcattggtctcaagctcagaacacaaccacctcttcccccttttcactcttttcctccctagtcttcattttctttaagccttccc

SEQ ID NO: 133296 - DNA, 299 bp, Homo sapiens
gcagatggtttctcgagggaatgcagtgcggccctcaacagaccccatcctcccctcctggcctccagacatggatccctgactccatcctccccttgaggctccacagagctctgaccccatcctcccctcctggtctccctccagacacagatccctgaccccatcccccactcccagcctccagacgtggagccctggctggggaactctgtgtgctcccagcctctgaaggtttctgggcttacctggctcctgtctcatcccagtccccctgagtagccacggaggtggggtcc

SEQ ID NO: 133297 - DNA, 732 bp, Homo sapiens
cagagaccctgcctaccaattctcgaaagcaccatctcccgggtggctgcaccctggtaacccgctgcctccaggcagaccaccagtctttacaaaagagccaccatcctggtgggtggcaacagcacctacctgcatgtacttctccaggttaaaactgtgagaaacaacttgctttctgaaggaagttaaaaagccatctgctatttgtctaacagtactttcttcagacagatactgtaaaggttaacctcagcccactcttaaatcgatgctcacaaaactccaaattgttagtcgtagttaatgaacttttataaaaatcaggcattcttaaataagatcacaaattcaattcaaatatagtacttatgtcttgttgcagtaattgtcaagatgaaacattctggattcctgtggcatttgtgaatgtgtatagcaagaaagaaatggttaaggaaaataatagtaattgtaatgttaaaacctcaggggcctaatgagtggaaagtctgtatctattcattgataataattgtctaattacaaccgattaaacatacaaatcacccacattttatatgagacagcactcacagaaatattgccgtggtttgcctactagcgttttcctctctttccccttcagctataaattgtgctattttggggtagcagacggcattctgggaaatgtcgaggaacatagtaactagttggtaggggatgaga

SEQ ID NO: 133298 - DNA, 270 bp, Homo sapiens
ctcaattgcactactagaaccataggtagacagtaatctaaaacaacttttaaaaatttccaaataagttatttatccagaacacttccaagttccagataaagcttaaaatgctttacaagaaagttcaaagcttaaaatgctttacgccctttattattcttcaaaatgaaggttttagaccggaaatattatttttcagttctggtagaagggaaaaaccaggctaaatcacttggtagaagttatttgttaatagaaggaggaata

SEQ ID NO: 133299 - DNA, 362 bp, Homo sapiens
ttggcgcagtggctcacgcctgtaatcccagcactttgggaggccgaggcagacggatcacctgaggtcaggagtttgagaccagcctggtcaacatggggaaatctcatctctactgaaaatacaaacattagccgggcatggtagcgcgcgcctgtaattcccgctactcgggagactgaggcaggagaattgcttgaacccgggaggcggaggttgcagtgagccaagatcacaccactgccctccagcctgggcaacagagtgagactccgtctcaaacaacaacaacaaaatgcctcttgaaacagtcaagccttttgacaccaaggaaatcatcttagctgtgattggtttggaaa

SEQ ID NO: 133300 - DNA, 453 bp, Homo sapiens
ctgatggggaaatgactcaatgtcctttacctgaaaatccctaggcagggatttcctgcgtgcagagtcctaaggatgcctgctaggtcagtggaactttcataaactattctgatttagtgtgaaaggcaagcgggctaggccccaagctggaacgccatttctctgtcttctagacccaaattttatccttctggttgttgaagaacaacacaaattgatatcacagcctttccaggcattttactgggaagttaggacactgactggaaaagagcaggccctaagaattggaacgggaatcactgggtggattgtgatgcagatgagaaactggaacctcaaattccacatcatcttccttttgctgttgaaagccagtgctcttttcccacctgagtggatcagcctccccttgtggaagactttgtaatgttctcattgaggcaatta

SEQ ID NO: 133301 - DNA, 380 bp, Homo sapiens
  misc_feature (59)..(59): n is a, c, g, or t
  misc_feature (107)..(107): n is a, c, g, or t
tgtggtaagtatctaaggttatataagttagtcaagcttttacatagttgagtgggctngaatgagaaagtaaagaccctctatttctaattcatttataccactanacaaaactcattcagttctttatttcagatggaactagaagcattacgctctatttatgaaggagatgaaagtttccgggaattaagtccagtttcttttcaatataggataggtgaaaatggtgatcccaaagccttcttaatagagatttcctggacagaaacatatccccaaacacctccaattctatctatgaacgctttttttttaacaacaccattgtgagtagtgtcttgcttttacttgtttttcattttaactcttttgttatt

SEQ ID NO: 133302 - DNA, 282 bp, Homo sapiens
ccagacacagttgcctggactggtgtgtctcctgggctgtatttcatcggcatttgggccttgaaggtttggagctgaagttcctgtcagaactttgggctgaatcccagactttatggacagtaattttctcgcagggcctctttcctaactcactttcttcaagcgatccttgaggccagaactctcacttgtgggcttgcttcctcatgtggaaagatgctgtagtatttagaggggtgggtcattggttctcagagtgtggtctgagaagcctggagt

SEQ ID NO: 133303 - DNA, 257 bp, Homo sapiens
ctggcccccagcacatcccatggcctggcagcaggtggtttctgcctggagggctcagccatcaaaagatttcaagatgtatattttgtaaggcaaagcctatactcatagactttgtgaaggacctggttggggagacaggagaaaaaatggatgggaaaaaagtagtaagcagttttactgtgtgagatattagtgggcgagataacattgaagcagtgcttgattaaataccaaatgaagttccaatggtagct

SEQ ID NO: 133304 - DNA, 683 bp, Homo sapiens
ggattttaattaaatttgttgcttaagttatctgtctataccagaaaaggagagaatgattaacctaaagccaaagaaaattctaattcccaatttatattaccccttagttcttcccaaagcattttctccacccccaacttaaaaaaagaaaccttttagaaacctatatattaataaaatatctctaatatggattaaagttgatatgattcgttttttgcttaatttgctttcagttcatttattcaatatatatctctgtgcatatgatatcctggactctcttctagactctgtattacagctagtcagacaatttcttgcctctgtggagcttacattctagcaacagacagattataagccaataaatgtataagaacaggtagcaataagtcatgaagaaaaatgaagcatggtgaggaaactgggagacaatgaagtatggtgtttttgtttttatgtactcagagggaaggttactcttcccttcatgatccatgcaaagatctaggggaaaggtgttctttcccacagggaatacatacagaggatacctattcatataatttaattttgaatagtacagaacagagagttgaagacagaaagtcttattcattgctacaaaacccatgtttcgattatggtcctttactggtatgtagcatatacacaga

SEQ ID NO: 133305 - DNA, 623 bp, Homo sapiens
gcagggccaggtttcttaaacccatagcagtcctgcaatgagctctttttaatcagcaccgaaagtctagattaatgccaatatagcttttattacttctgctgttgattcccaaaccccaccaacattttattgtgaaacatttcacaagtacagaaaagtttcaagaattgttcagtgaacatttgtatataccatacctagattctatacttaatgtatttgttgtatttgccttctcatataaggcagatccttttctctatccatccaattttttttttaatgcttttcaaaataacttgtagacaccagtgtggttcaaccctaaacacttcctggaattgattttatattaagaatgctttccattgcaagtgacagtaatccaactcaaaggatttaagtaaaaaaatggaatgtattggcttatttggctggaaaggatattggggagatagacttataggaagagttgctggaactagtgccttagggactggagccaagactctgctatcagaacagttaactctgtctatgctgtctctcgtctgcttctcactacctggttgcgcattctcctacgaatatatcttccccaaggcagggaagatggttac

SEQ ID NO: 133306 - DNA, 275 bp, Homo sapiens
ctgcaacaggaataggtttattcaaagacctgacccggcccacgctatacgcagcatctcaccccaggtacagcagtggaagccaatctcctgtggccaggttgtagttctattccagttgtctcagttgtcagagcctatgatttccccagatgtctcctatacctgccccctcttgcctcgctagttacacaactgatctctttgtcacagtgccacacagcacagtacagcttgtctctctagagcacagcaaacaactcttgcatacacac

SEQ ID NO: 133307 - DNA, 696 bp, Homo sapiens
tacactaagaaaagataaagtagttgttaaagataaaaaacagcaatcaatgaactagtaaactaaaataaaagtagaactctgtaactaagagctggttgtttgcaataaaagagataagttgctagctaacttaaagattgaatggagctaacgtgcatactcaaaaactaagaggggaaaacaccacagataaagagaaaatataagaatcgaaatggactattttgcttgaccccaaaaatatatttgaacacttgtatgatccagaaaattttcttaaaaattacagtttatcagaactgaatgtagaaaacataaattaatccagcagtacttaaagtgcggtctgtgaggttaaaactattttcatcgtaatactaagatgttatttgccttttttgcttttattctctctcaaggatacagtggagttttccaaggctgcatgatgtgtgatgtctcagtaaattcagtgtattagcagatatgagaaacagccggacgtttctcattaaatttttctttgttttggaaaatatagttatttttaataaaaatgttatttatgttacatgttatgggtttatagtaataaattttttaaataaatttaaacaatatttagccattagatattttcaaataaattttgttttatatatttttaaattaactaaatatttaaatattaaa

SEQ ID NO: 133308 - DNA, 273 bp, Homo sapiens
ggaatccggacagtccctgagggggtcctggctcgtggttccctttgctgtttttttgttcatttatttgttactagacattggcactgctgcttctgatggatcctctcaccctgcctgctgctgtttacaccggaaatccctgtgctactcaagctgtctttagtgtggggcgtgaacgaacccctcgcgttccggagggaacaggctcctcttcagtcctccctgatggggcctgggcaacaacctggcagtcgtccccactccggggca

SEQ ID NO: 133309 - DNA, 251 bp, Homo sapiens
tagaggatccccgctacccaggcgcactcctcatggggcccagctgtcctccctggagaagaggaggtcggggggcacgcaggggcctagcctgctctgcaggatgggatgggtaactggggacaggccttgcaagccagcggacccctggtcctcaagcagaatcaatggccggccagaggctttttgttctgctccacctccaccgcggtcacacgattaacccaagtcaatagaagtgcgcctgggtg

SEQ ID NO: 133310 - DNA, 348 bp, Homo sapiens
cccccattctaatttaatcattcctcctcttctgttccataataattaggagagacttccttatatggggaagtttcccatacattccttttgcttctctagttaaaaacttccagggcaccatatctcctacactttagagtttgattcccttagtgtggtgttcaagccctttatcccctgggcctcagcttgtttttcaagtctcatctcccatcactactgtccttctaccaaccttggtgccttgctttatagaagatctctcaattccatatacaggcttttgtcattcaagtactgtgccttggcatatactattccttcctcccatccctgcttcatcag

SEQ ID NO: 133311 - DNA, 192 bp, Homo sapiens
ttgaaataacttcccagaagtaggattaatgggttagtgttgctggtaacttattgatacacattgtcagtttaccctccaaaaacattataccaatttccatttgtattaacagttcatgagtgaatcttataatatttaatcctggccgggcgcggtggctcatgcctgtaattttagcactctgggagg

SEQ ID NO: 133312 - DNA, 152 bp, Homo sapiens
ctatgttgcccaggatggtctcaaactcctcgtatcaaatgactctcctgcctcagccccctggatagctgagattacagaagcatgccaccacactcaacgccttttttaatttaaagtctattttgttggatatcagtatagccatccct

SEQ ID NO: 133313 - DNA, 271 bp, Homo sapiens
atttcttcatccaaatgccgagaacctaataagtggtaaaaatgaacagacatagtccccttatggtgactttttgtcttctattttttatctgcttttaattttaacattaaaaattttaatttaaaaggaagccataatgtattatcttgctcatttaattaattacagaagttaacaatgagaaaggaatgaaagaaagtcaaggtagggtcagggtaagttaggttatactgcagaaacaaccttacagttttcatggccgattaca

SEQ ID NO: 133314 - DNA, 412 bp, Homo sapiens
agccttcagctaagagggcatgagaatcagtagataaatgcctctgtctcctgtcctttgggaagtcaattctcaggcatatttaacatactttcttaggggttcaaggctggattgagtctcagtttcccacaataactccttctacttttttcttctttacttctgcttcttggtatcacctcctaaataaactaaactgcttggaagtcctgctcttagcctctacttttaggggagtccaaaccagctaatagcagagaggcagcttagttttggtcatgtcagtaattagaaagaaagcaggtgggaaaaaacagctttaacagagatgattggagagttgactgtgtatgtattaatagatctatatatgtatgtgtatgcatgtgtttgcataatgcatgctcac

SEQ ID NO: 133315 - DNA, 390 bp, Homo sapiens
aagagagggaaacatctgtgaaggcaatacttttgttttgttgtcactgtgtccccagtgcctaaaacacattgtggatgcttggtaaacagtttctgaatgagtgactcattctagccagctgagtggggtcgggaaaagagggacagggcacctctttctcagagctgtacctgctggcggggcattttgtctcagtcacactccatagcagccttggggtgttggcactgtgcctgttttatagagggcatcgtgaggctcagagaggttaagtgacttgctgagggtcacacagcagggagcggtggatatgaggtttgagcccagatctaatcagctggtcctcttcatgctgcccaggtatctccactgggcatggggtgagga

SEQ ID NO: 133316 - DNA, 443 bp, Homo sapiens
attacgcagtctcaggtacctttttatcagctgcatgaaaacagactaatagagacagtttgacctttttgtttccaatttggatggctttttgtctttcttttggctaagtgctctggttaggacttccagaactatgttgaatagaagcagtacaagtggacattcttgtcttgttctagttcttagaggaaaggccttcagttgttctccattcagtatgatgttagctgtgggtttgtcatatatggtctttgttgaggccatatataaacattattatgtccatttaagacaaatagatattgaacatttttatccctccaggataaaaatgcttaaccaactaggcatggaaggacataataaatggggcctttttatgttgagcatttttatcctgaagagatgttaaattttatcaaagttttttctatgtctat

SEQ ID NO: 133317 - DNA, 718 bp, Homo sapiens
catgcattcaactggttattaggcagctctacctgaatatcccagagacacctaaaacctcagcttcttcccaactcaaggcatcctccttccaacctgtttgtccttctttgtgtcttaccttagtgaatgaccccagtcaaagcagaaacccgggttacacccttaattcttttctctcctccatcacccatgcagtcaccaagtcccatcattttgacctcctaaccttgtaattcgccggctctgtctcccaaagtgctgggattacaggcgtcagccaccggcccagcccccatagaatcttttcagaggttatcctacttggtttctgatagcatttggcactgttgaccactccctcctccttaaaccacttccatgacactgcactttccttgtttttcttctacttccttagtaattctttttttactttccagcctgggcgacagagcaagactccatctcacatacacaacaaataaataaattaattaataaaaagagtgtatcataggatcatgtaggaagggtaaatatgtttcatgaaatgcttcagtttgtatcgtatgtgaactggatcccgaggaaatagtatctcttttgcagatacctcacatccccaaaatgctgaaatacacattgaaaggttttaagcttgagattcacagggtatatttaacgttttacaaagatgactttggttgctctagat

SEQ ID NO: 133318 - DNA, 416 bp, Homo sapiens
aagtgcggggacaagatcaaaagagtatacattggcacccggctacagcaagtgactcctgctttattaattagtcatagcttctccaagctaatttactctgatagggcaaaaacattctgaaatataaaaacagcaaattataactcaactacaagcctttactgtttgctttcttcaactttcagtttaaacctttgcattatgttacaagctaaatgtcccttcagttttctaaaccttagggcacaaaagctattttacatttttttcaaagacattaatcatacagtcaaatgaccatttttattctctaaaatcgggtaaactttcattgatactgttcttttaaaaagtcagtgtattggcaatgtaatttaaaagtgcagttgctattaaaatgtgcaagctcgttc

SEQ ID NO: 133319 - DNA, 547 bp, Homo sapiens
catttcaacagggtcattcaactatgttctattaaaatactaacttcattgtgagtgtccagatatgatgagttgtgccaattggaagtgagtgatagaatttcatcaggtttgtgggtggaactcagatgtactcactcctcagacttaccttcttccaggctcctttttttctaccactataagtctaagaaaccatggatccttcaaagccagtatttccaaagtgtgtgcagggagataacacttttcaaaacggattttctggtcagtccatggtaacacccaacatattggatatgcttatcctggaaattcataatgcatacgttttgtgggggttgaattgtatatcccccacaaaaagatatgttggagtctgagtgatgtgaacagcagacatttactgtctcagagttctggagggaagaaatccaagatcaaggtgtcagcaggttgcttccttctgagggctgtgagggaagggtctgttccaggcctctctccttggctagtgcttgatcatcttctccctgtgtgtcctcac

SEQ ID NO: 133320 - DNA, 463 bp, Homo sapiens
gtttgacatgacatttctgatacctaaaagtgttcatatactaacttctctctaataagacttgtttttctactctcagattttaaaaatgattttcccagaaacaaatgaagtgttgttagctagttgactggttgtttggcattgtctttccatcaaaattttttttttcatttaaattttgatccatagagtaaaagatgagcctccattattttgtatttcactagtgctctaaaacttagcaaagcacttacgtggtggagcaagactccctggctttctggggaaagattaatgtttggtgtggcttcaatattagggtagttactatagcttttacccatatatctataatagtataatttaaaatggtatttttgataacagtaatttcatataactaagcaaaatgaattatgccccatggcagctaagaaaagctttattgctatttagaaac

SEQ ID NO: 133321 - DNA, 368 bp, Homo sapiens
ctggggtaagtttcccttgttcctcaagtaagacaggatatactttgcaataatctaaaaaatctagatgtgacctggacaaagagagagagacaaagtataaaatgctttcttagggataactcatactcttggtgacaagaaatgttaatggtgtcctgaaaccttttggtcagtgattgctccattatgtgggaaaaacataggaaaataaacataggaaaaacaaaggaaaataaaagactcatagtacttcaataaaagttgtcaccaaatcccaagaaaatgattgcattggaaggaatattctttttgttttaattgatagtattttaggaagtagctaacacttgttcttatttcctagc

SEQ ID NO: 133322 - DNA, 342 bp, Homo sapiens
atggtttcccagctctggaattaggactatgacccaagaccagctggggcctcagacagaggaaggccaggaggggaggaggatctgtgccaggaactgccagctcacatgccgtctcggggttgcaagttatcacttaagcccatttctgagctatgggggccttacctactaaagaaatggcaagttctggcaacggactcctgaaggaagaagcactgcctggaaaaaatgctctcaccacgaaagctccctgcggctgggagaaaggcagagggaacagggagcaccttccctggctggccacagcacgaggctgtgttccaggaagagcaacagcaa

SEQ ID NO: 133323 - DNA, 249 bp, Homo sapiens
tcagaagctcttttagcatggatcctacctgccacctttaaggtgacatcattcaggtgacccccaggctgctggtgactatattcttggatgaagtcattgaatgagatgtctgcatggaacttgtgtgggtatgggtgttccccattgacattcagttgataaactgcctgactatggatcttgtagtgttgatttgggtccaggctcttctcctcagtacccacaccactgtcagtggtatggttg

SEQ ID NO: 133324 - DNA, 304 bp, Homo sapiens
aattggatgctgtctgatatttccaaaaggataccatgcttgatgagatcaaaggaggagaggatgactcagaaaagacccagaagagctcacagtgctcttagcaggatgcttagtgacatggagtcctctgacagcaatagtgcttggagacatttttacacctatggccacaggcacatgcatacacacacaccccaccaccacaacaaaacctgctgcacagatggttcttccttaactgagcaaagtgtaagaatgaactttgagccaggcacggtggctcatttctgtaatcccagca

SEQ ID NO: 133325 - DNA, 487 bp, Homo sapiens
  misc_feature (193)..(193): n is a, c, g, or t
gcacacagaccacatgtacagcatgcacacacatacgtgcacgaaagtatacacacgtactcactgcacacgctcactgcacatgcactcacggcacacacactgcatgtacacacatctgcacggtactgcaggcatgtgcactcactgcatacatgtactcatactgcatgcacaggccctcactgcacancagcgaccatgcgtgtacacacatccacacagtacatacaggcatgtactccgaacacctgcacacactgtacacgtgctcatgtacacatgcactcaccacacatgacactgtgcacacacaacatacacccccacacagtgtacacacacaccatacacccccacacatacacaccatacacccccagtgtacacacacacacaccatacacccccacacagtatacacacacacacaccatacacccccacagtgtacacacacacacatacacccccacacagtatacac

SEQ ID NO: 133326 - DNA, 308 bp, Homo sapiens
aaaactggtgtttgcttctaggattctctagcctttgcattttgttttagcggcgaaaagcctagaagggggcctgggcagtcagtgctgtcctagttctttgcttgactcccccagactgtgtggcatgttgggggaccctatgcctgaagggggtggaatgaaagaaagatagcagatcaatagctgggactcccacctattgaattccatgtggcagttccaaaggtttgcatttaccaacacggatggatcaccaagatgacagattggggtggtgggggagggtagcaagacaaagggaaaca

SEQ ID NO: 133327 - DNA, 277 bp, Homo sapiens
ctgggcgactcccctcggcccccgccccgcgcgctctgtggccgcgccccggccccgcccctgccagcgctactccagccaaccagaggccgattgatctgcataactcggcgcgccccgcccccgccccgcccagctctcgcggtcagaatggtctctacgccgccacgacgtggcgggaaggaaaaggcgccaaaatggagggggaggggcgcggggcgtgaggggaggcgggagctgggtgtagggccgcgagggaggaaggatggggaggggc

SEQ ID NO: 133328 - DNA, 727 bp, Homo sapiens
caaaaaaaaaaaaaaaaaatatgttccagtataaatgttgggtagattcctaagtgtggaatttgagggtcaaaaaggtatgtatttaattttgttagattttgccaaattggcttcctataaggactatatccatttacactcccaccaaccgcatatggacttaggagccaggaggtctgggttaaatcctggctctgccacttgacagccatggggactgagcctgtgtcctcatctggaacctgagaataagactgtggttccaggaaggccatataaagtgtgccacaggctggtcaccacgaactcttctcaccaccacctctcctcaccaccacctctcctcaccaccacctctcctgccttttctcaccaccacctctcctgcctcttctcagtgtccttccctccagaactagggtccttgatagtcttccaggcccatagtaacgcacagagttgtcataaggcccaagggaaagaatgtgtgtgaagtgctctaccaaaaatgtgggaagggctgtcaggacacgaaatgtcatttccgtcttctgacttccctgccagtgaaagctgctttcggtactggaggttccgtctgtgaccaagggcaaagctcagctaactgcctcaccccagcgtcatagctaaattttggtctccttcatcacaggaactgacttgatgcatgatgcaatcaacccacaggttctcagtacaccac

SEQ ID NO: 133329 - DNA, 491 bp, Homo sapiens
ccttcccagtagctgagactactcgtgtgcaccactacgcccacctaggctctgatcctaacttgctataagctacttgtgtggcctataacctatagctgtttttttgagatgtagtcttgctctgtcacccaggctggagtgcagtggtgcaatcctggctcactgcaacctctgcctcccaggttcaagtgattctcctgcctcagcctcccaagtagctgggattacagtcacccaccaccacgctcagctaatttttgtatttttagtagagacagggtttcaccatgttggccaggctggtctcaaactcctgacctcaaatgatccacccacctcggcctcccaaagttctgggattacaggtgtgagccaccattctggcccctataacctatagctttctaaaccaaacgaacaaaaactctatctcatatataccttcttttggattttctttctttttgaagcaaaagtgaaatatccct

SEQ ID NO: 133330 - DNA, 746 bp, Homo sapiens
ggtcatgggggatggagcatgggtgtcaggcgtggcggagttgccagcgggtagacaggaagtcactgggactcccttggtgtccttatcagggtgggtgacatctctggggctgtggggaaaccccggagcctagaggtcaggctgtcatcctgcagatccccctctctctgacactccttctcccttctggtaccccaaccctgtctgtactcaagcaggagactcgtagggcagagcaggcctgcaggcccatgggtgcggcaggtggcatcgactgttgggaatttgccatggggaagaggggcaagagggagctgggactgggaatgccagtggggtctgggctggtcttcaggaatggatctgggctgtggccagcagataacccttctttactgccttggggagtcagagagggctccagtccagacctggatccacctctgctcccatctgaccacctgtccacatccctgtttcacctcttgcatctcatctctacctcagctcttttgttcagccacagaatcaagctggcctcctcctccttgctccttaaacaccaatccctggtctcaggggatgtcccaaaggccgctttccccactatattcagtccgtgcacaggtgtcccttcccagagagcatctaagctgcccatcccacctccatcactctttcccctttcctggcttatttttgttccataattcttaccactggatttatttatttatttgaga

SEQ ID NO: 133331 - DNA, 709 bp, Homo sapiens
gtgtgaaaggaaagtttgtgttttagtcaagccaaggtttgaatcttgctctacccagtggtgattatgtgccctaacttcagaacttcagtttcttttataaaatggaaacaaatctacatacgagtttgtgcctgatcttgagttaactgtatgtttaatgtatttagtgctgctaaatatatatatatgcgtgtgtgtgtgtgtatatatatatatattttttgacggaatctcactctgtcgttcagggtagagtgtagtggtgcgatctgggctcactgtaacctctgcctccccatttcaagcaagtctcctgtctcagcctgtggagtagctgggagtacaagcatgcaccaccctgcccagctaatttttgtattttttagtagagacagggtttcaccatgttggccaggttagtcttgaatgcctgacctaaggtgatccacctgcctcagcctcccagagtactgggataacaggcatgagccaccatacctggctgctaagtatattttttgaagactcaccatatgtgttaagtggtttggtaaaatataaaattcatttctaagcaagggaatccagattttttttccccctctagggctctgtttagaaaggacagggttgaaatctaacccagaagattaggctagtggcaaccatatgtaatctctaactccaccattttagtagatgagga

SEQ ID NO: 133332 - DNA, 461 bp, Homo sapiens
cctagaggatccccgcgacccaggcgcactcctcccggatcagtttgaagtcaatcccagacatcctatcatttcagccatcaatattttaataatgtatctctgaaaaataactcttttaaaaacattcaccataatgtcatcacacctaaaaatatcacaaagaaaattaataggcagaactattgttgaaacttctcaaccaccccttacaattgtctcatctaccactaactgccaacacttcaggaaagagtgttctagaagatgagggggaggtaggaaaataattcaacataatcccttctcctctcatctctttccctaagccagtcaagactttcacgttgtgtaccctttcttttgttctgaagcaatatgcattttggatatttacataattgcaacaagaattgggtatcctgttttcttcccttggcattatactattagcccccatt

SEQ ID NO: 133333 - DNA, 213 bp, Homo sapiens
tgtggtaatcattggaaaagtggcaagagagaaccttccagagtgatggaaaattctagtttttaatctaggtggtaatcatgcaggtgaatacattcatgtaaaaattcacctacctctggaactagagagtgatggtgtttacaaaatactgtgagtgtattaaatgccattgaattttatactttaaaatggttaaaatggtacacttaa

SEQ ID NO: 133334 - DNA, 283 bp, Homo sapiens
ggctcttagcaagcagtgcttacaaagttaggaaatatttgtaaaatgctgccatggtataatgtgaagcgctcaaacaagtcagggctaatgatgcactgagaattatttctaaattgagggcataaagagttacagttcttcgattttaaaaagcaaagtgacttttaatgcatcaaatcttactgtagccagagtactgtaacttagtttccatcagaatggaaataagtagttactgagcaagcagctggatgagccctatgcttgatgatacatattg

SEQ ID NO: 133335 - DNA, 664 bp, Homo sapiens
tgaaagaattaaaagtaaaaataaaacttgttagccttacagtcagaacatgtgggtaaataaatatgaaaagagcgaatagttaagctggcttaagaaagagatttaattgatagaaaaattaaacttttataggagagtctgggtaaatttaaccagtaagtaaaaacttaaagtccaatctcaacatatataaaggaatctgtataaactatatttgaaacctggatgtatgtgctcttcaaaaagttattagataagttttagatatcataaatattatcagaccagaaatggtgtatggaactcacagatatctaagaagacaagaggtgggatctcaaaaatcatgctctgatttccctaaaggatcagaagatctcagaatttatggagcagtatctcctcaaatcagaaagtaaaggatgcacacaaagaggaatctggaaaacctcccctttatcactggatggctatataaacgttcttaccaaaaatctgagaagacattcagggagatcagcttcgtctacttcaagcattattaggtggtcttcaaagtcttaggtgcattgaagaaatattttttaacgtattattgaaatggtatttgaatggaatattttgtaaaaataaagcacaaaaaaagcagatagataggaga

SEQ ID NO: 133336 - DNA, 268 bp, Homo sapiens
cattattccattctatctacttttgagtatgtttgaaaatttccattatagaactttgtttaaaaagagagaacaagaacatgttggcttagcaacagaaaagcatacatatgttcagctaaagacatgaacaagaatgttcttaacagcactatttataacagccccaaactggaaacaacccaaatgtccattaacagaagaatgaataaatagccgggcatggttcttagtgcctgtaatcccagctactggggaggctaaggat

SEQ ID NO: 133337 - DNA, 485 bp, Homo sapiens
gtccagagcaagccgaaactttcagtgaacatcctaaggcaatctgtattgaaccaggttcactccaaaaacccagttggggccatttctcaaggagctcagaacaacccgaggaatggattcatgggctgtcctaaagtagccttactcacaggtatcagagaattcacttgcttctaggcccttggattgctttaattctttcaattttcttttgttcaacaacataaaaaatatattctacttattgcaatttttacatgtcacattctgaatattatcctgtaccagtggcttcttggttgttatataacttgtttggtaaagttatgctgacagctttaatgaggcgatgtcatgtgatgcacgaatttcccctggtgctgaatgtggacattagcaactcagtatcgtgtgttagggcagtggagaatcagggtgtatctaataaattccttcatggagctctcatgccattaagcaga

SEQ ID NO: 133338 - DNA, 408 bp, Homo sapiens
tacaaatgagtggttccatcatttcatgagctcttatttaatataaaaaccctgcaaaatatatgttacctactttttcttaaatctattatttacaggccgggtgtggtggctgatcacgccactcccagcactttgggaggccaacgcgggcagatcatgaggtcaacagatcgagaccatcctggccaacatggtgaaaccctgtctctactaaaatacaaaaatcagtaatcccagctactcgggaggctgagacaggagaatcgcttgaacccaggaggcagaagttgcagtgagctgagattgtgccgagattgcgccactgcactccagcctggtgacagagcgagactccatctcaaaaaaaaaaaaatctattatttgtaaaggcacaaaacaagtctc

SEQ ID NO: 133339 - DNA, 461 bp, Homo sapiens
cccaaagtccatcaactgatgagtggttaaacaaaatgtcatatatatacaatggaatctgtaaaaaggaatgcagtactgatacatggtttctggatgaaccttgaaaacattatgctgagtgaaagaatccagttgcaaaaggtcatttattgtatggtcccatttatatgaaatggccagaataggcaaatctatagaaacagaaagtaagttcccaggtgctggggggagtggagaatggagaatgactgctaataggtactgggttgattttgtgggaagatgaaaatgttctgaaaatagatggtggtgatgattgcacaactctataatatatgaaccagccatttaattgtatatttttaaagggtgaatttccctacttgcttcagcaacatatatactaaaagggtgaattttatagtatgtgaattatatctcaataaagctgttaaaaa

SEQ ID NO: 133340 - DNA, 208 bp, Homo sapiens
ccgatcgtttcatgtgtgctgatggtcttgtcatgccacataaactaatgaaagcagaaactatgcccactggcttctgggtgagttggggaaaggaactgcccttctttgctgagtactcatcaggtgctatgttcagtgccaggcatttcatgttcaacatctcatttactctgtgaagactcataactgtaaattctcctcaaca

SEQ ID NO: 133341 - DNA, 330 bp, Homo sapiens
ggctatctctacatctaacagaaaacactggaaatcccatttgctgttgctaggttacctttttcccatgatggtaattcttttttaaaatcctaagtttttcattaatgtacgcccattagagaaaaattagcaaatagaagaagaaaggtatgtaattctctcatctcagtataatagttcacattttatcatgcacttcttttctgttatgtttacctgtgggtatggaaggatgtatacaatgtaaccacacatctgtatacatgtggttacatacacacacacacatgagatcataccttaactattggttagtaccttgctttt

SEQ ID NO: 133342 - DNA, 486 bp, Homo sapiens
gccttctaataaaccaatggtctatgtttaagcacacaaagggagtctattacatactagttgaactacttgttttttccccctgaatctccagaactatgtcctgtgtcctctctaggtctccattacttccacttacctgttttcagaagcccagccctgttgcttagtgctgtgataatagttcttaattgaatacctataatgctagacataccacaagccttgtcacaaatagaatggtgacaatgcctgcaaaaattcttttatgtaggagaaaaagcaggaatttaaataggaaacttgaacttttaatcaatttgctgctattactaaaattagtctttacatagtgctctattagggggaagcagaatgatttttatatgatgaatcttttatcctttgtaagttgagtgaacttcctggattgatataattagagggcctgtcattatgcctggcatgggaacctgcatttcaagc

SEQ ID NO: 133343 - DNA, 648 bp, Homo sapiens
cggacacaagcggctggacgtgaagaggaacacaccggcgggagaacacagaacaccaaccctctctttagtcaccctggaggcctcggagaaggcggtttcggtgatccgtgaagagaccccgagtctgttacatcccggagaatgacaagagagcgagtacctgggtgacgtttacgttctgggatttcgggagatgcggttttctgcacgccaggggccaagcctgagacgtagatggacggcagggataggagctctctccgcgccacaaacgcccctgctcatacctgggttccttgattttcctgcctatataaccgagcctcccatggccgggctctgagctctcattctgcggactgggacaaaggggttaactgtgatgcgctttgtataaccccaggattctgcacttgcccaagggcgaggcgcaaatcaaaaactacgcacaactgaacaccgagatcaggtgagtcctgagtgtctcacgacataaaatccttacgattttaacaagagttgtatttgtgctagcactgttaactgacaaacgcatgccagatcccatctgtctttaaagctcaatgtgtgacgttagacacgtcgttttgctcttcaactttcttatttggaaaaaaaaaaaaa

SEQ ID NO: 133344 - DNA, 970 bp, Homo sapiens
gacagagcaggttgtgtctgtgtcaagcccttgctggaggagagatgggacttgagctcagcctgggaaaagccaggttaaagtgagccgccctttgcccatgccctctccccgtgttgttcatttaggtcgtgcttccacacatcatcttccctttcaggaccactcaggctgtgaatgagtggagtgactgaaatagttgggagccattgaggaaaagccggagagagaggccacgagaactagcattttggggttacttagcacacgtcccattacttatcacacatagaggtctcaaaaacatcaccacaggcctgcctgaccctcctgtggcttggttgtcccttaaaggaaggacacagcagatcctttgagacatctccatcttcccattttcctccacctgggatttgtggtccttgagcactctggatgcagatccattggagaggggatgggtcctcagatgcagtctggtggcgtcatcttgtcttttccagactcctggccagcgacttgttgacttcctcctgggacccagtgactgagggaaatagagccagccaggatgggagaaatgggaagcacgtggcatttactccatgaaagaaaggccacaagcccttctcagccagcagtcccaaggcatcagttaccagttgtaatggatctcaaatggtgctaattactccatccctgggaaaatagaaaatagtcactcagggccgggcgtggtggctcacgcctgtaatcctagcaccttgggaggccaaggtgggcggatcacctgaggtcggaagttcaagaccagcctgaccaacatggagaaaccccatctctactaaaaatacaaaattagttgggcgtggtggcacatgcctgtaatcccagctacttgtgaggctgaggcaggacaatcgcttgaaccggggaagcaggctatggtgtgccgagatcacgccattgc

SEQ ID NO: 133345 - DNA, 1073 bp, Homo sapiens
caggatgttccttttcatatttaagacaagcactcttgcatacaaattacatagctgtgggctgaatgaagatgctaccattgctgtacttctacacaggttcttttcatgtaatgaaatcagaagggatggcttttccatttcaagcttctgttaataagtagtcttagaattgcctttgtgtactgtagccaacaccccaactcatatatttttataatctttgtgatgcagaataaattctgaaactttccacctcctaattaaatatagaaatactgaaaacaataaagcaccatgtattcactatggacatatgtcacattttgtcactttcttgcactcttgtaatccctctctaaagctcatgttaaactcatgttctttattttcttctcagatgattcctttggcactgcatgtaacagtacaggaatttcttcctttcgtacttccaacaaatacttttttgtctcttaacagatgtgaaccataatgctgttctttagaaagcaaaggatgaagtgcacagcagtgttttctatataaagctaatgggtcataaggggaaatatgggttatttccagcttgttaattgtcttaatacatttttcctaagaattctattgtgcctctgtggttatatgcaccaatattgataatcttacagcgtgccataaataaggatttttatattatctttgctaaatattttaagtttttgttttgggaattgaaaaaatcttttgtgcatctatggtatgtgatacgtatactaatggataaatcctgtttcacacaaagattaattgggtaacatttttctttcctagttttctgaagtcagtggtcatgttgtgtgttggtgattgaaaatatgctgtttaggctgggcgccttggctcactcctgtaatcccagcactttgggaggccgaggcacacggatcacctgaggtcaggagttcgagaccagcctggccaacatggtgaaaccctgtctctactaaaaatacaaaaattagctaggcgtggtggcacacgtctgtaatcccagttacttgggaggctga

SEQ ID NO: 133346 - DNA, 288 bp, Homo sapiens
  misc_feature (17)..(17): n is a, c, g, or t
gtcagactctagagagnatcccgcacccaggcgcacttctccagcaattggggaggggatagagagtgctaccccagacatgatattctgcattattcaggccacacctgatattgtgtgcacgtactcagagaggtatctagacagctccaggactctcaaggattaaatggccagcttgagtcagtaccacaacctggaggccttcagtctctgagaagagaagactaggcatagaggctggggaagcaggtgttcacttcggggccccagaagtgcgcctgggtg

SEQ ID NO: 133347 - DNA, 175 bp, Homo sapiens
tggggccaattaacatacaattttccacttcttatgttaccaagaaggacattatacatacacacacaatcactcatactcatatccctctcctaatcccatcattgtatgaaatgtgatagcccataaagggaaatcctaatcaaaaagctaacaaagagcaaaatatatttct

SEQ ID NO: 133348 - DNA, 450 bp, Homo sapiens
cattaagtggaaaagcaggcaggtttaaattggactgcagagttatcacaggtagagaaacaaaattagtttataagaaaataaaaaagaaagcactccttattactcacccacatccctcaccttcccctgtgccagcgttggccctgggcttactaggatgtttaaaggccgacaagaagaaatcctcatctacagccttagcacttaatgtgggtaaatgtcaactgttggtacccaggtgttgaatagcgtctgcctttacttttaagcaataagacaagataggctgaatacttgtgggtgactattgctttgctcaagtgaataccaaaatgactctgaacacatgagaaacataataattctttcgaaatgtcctgactgaagcacctcattttagattacaaaatggatttcatacatttcagctagaaagaaagaaagaaa

SEQ ID NO: 133349 - DNA, 522 bp, Homo sapiens
tataagtaggatgtactttattgcctaagatttgactccatgggagctctgactgattctttctgttgaccactgaggctactaagtggggagaagttgtagccagcttggtccctgaccaaggggagataccaactctgaacattgtttctgccaagctgggagtggcacagtttcttctacagactcttgctcttctccacctccagccctgggtctacatattcccctggtgtcctcaagtccagagtctctccttggatcttgcacagatgggaagatgtgggagaactgaggtccagcagttttgtgtgcagactttgacccagtcaccccattgtcagtgccatgctttgttctgccttctgcaacccctggtactttcaaattctgagtggcttcaggttcctgcagatatgttggctcacttttctagaatatcccctctataggagtgtaggctgtggctgccaggaaaccctacttcatgtattttttatgttttaaaaaaattttgaggcc

SEQ ID NO: 133350 - DNA, 534 bp, Homo sapiens
tacgtcgaggcggaatgtcatgctaacatggctagtggtcagtttgtatcatgcacgtctgtggactggtaaaaacccctgggcgacaatcataaaaaagcattccataacttggatggaaccagttaaatttctggaaggaggcagtatagcatggattatcggaagccctgtgtcttcattgtcggtttctttctccctgctacttcctagctgtgggacttcggacatgtcgcccaatcggtcgcaatagttcctccttcttagtattgctgtgctgatgagcaagatgaaacatatcaggcttatagccctgtgcctagccctgctacacatcaataaaatggcaacgtctgtcttcatcattagtagtaataataaaaacaacacactcaggatctctctacctaccctgcagatttatgggttggaggtgccttccaaagaagaccatctctgaggtccatctaatgtagggactttctagaacgttatacctaggctttctcttcctctgggatgcagagaaatgca

SEQ ID NO: 133351 - DNA, 164 bp, Homo sapiens
catcccagctgcagaccggggcctctcctgaattggcacctcacctttccttgtcctcatgggaagctcacacaagccacgagcaggtctcatgctccttggtttacaggtaaaaagcagagaccacaaaagtgacttcctcatggcctctcagtgataatggg

SEQ ID NO: 133352 - DNA, 763 bp, Homo sapiens
gctattagtattactagttatttttttgagatggagtctcgctctgtttcccatgctggagtgcagtgcatgatctcggatcactgcaacctcccaggttcaagcgattctcctgccgcagccttctgagtagctgggattacaggtgcccaccaccacgcctggctaattttgtgtttttagtggagacggggtttcaccatgttgtccaggctggtctcgaacccctgacctcaagtgatctgcccacctcggcctcccagagtgctgggattggcctcctaaagtgctgggattacaggcatgagccactattcccagcctattcctctttttaatagtaatttataattaacctactaaaaatgaatattgcttgaacattaaaaaccagcttgggataaagctaggaaaattgcacagtgacttatcatttgactcatttttaatgtaccgtttttatagtagggtatcggaatgactagggagaagtctttcttagacagttatttgggacagaacctgagaatgagtgatctcatacgtacaaaaatatgaattttgtgccttactcatggcaaaaatgttgtaggaattggggcataaaaagtgtgtttaatttttttttcttttaagcctatttcttttttgaggatatgattggctactttctatatccttcttcctgctaaacagcttttgaattattttgctaatttgtcgttaagttttacttcctgttgcctaaggacagtttagaaat

SEQ ID NO: 133353 - DNA, 552 bp, Homo sapiens
gatccatttgatgctttcctttttacttacccagagactataacttggagacagaacttatggtacaacacatggaagtgtctcatgagagtgcttaccagatacagacaataatttaaacatttctattctggagacacacctttgaattctgtgtttgaatatgtgttataagcaacatgttccacatttacccaaagattcccaaatcctgaaacttattacataatagaactgaactaattttaaacctacctccacagaaagctgaagatagtcataagatccatgcctaggatgtacacacatacctgtactccctcatccagaagcagaatgatcctcaaaatgtgaattttgagagtgaaataatgagaaacagggggaggggcagagtctgctgtatttaagtcggtatagcatattgacatcttagatgttctcaaagggggttatgtttccaaaatactatgaagacctcgatatagtgaagtctcacctctgacgtggtcatttggtattttaaaatttttgcccttcacattcaaaagt

SEQ ID NO: 133354 - DNA, 658 bp, Homo sapiens
tggcgccattgcactccagcctgggcaatagagtgagactccatcttaaaaaaaaaaaaaaaaagaaaaattgtcacttaattagttatgaaataaaatcctttcggattccttagttacttgtcttcagccagaatacacctctcctccaaggaagtagggaaagaaataatccaagattaatgtgtttttgtttggcctagacattgcttttttaaaatgtgagccaacatttttagtatcaggggatcttgtctaatagttcagactgttgaaaaaaggaagatctggcaatatactaagtctgtgtttttgtgtggcagaaagaggctattgctgagcaaatggctgcctacattagacaaggcatgcttttccttgctcaccatagttacatcaatccctgttttcttcttaaccttgaggccactgtttatagcaccatttgtcatttctcttgcactgtaatttttttcttttgagacaggatctctcgcccaagccagagtgcagtggcaccattacagtcactgtaacctcaaattcctaggctcaggagaatcgcttgaacctgggaggcagaggttatagtgaaccgagatggcgccattgcactccagcctgggcaatagagtgaacctccatcttaaaaaaaaaa

SEQ ID NO: 133355 - DNA, 470 bp, Homo sapiens
cgtctgctgcttcgatgacctgctgtcatcgtgttgcctcccctacgtctggcagtgcgcggtctaacctgttgaaccccatacttgactgcgtgatcgcgcggattgcgatcattccccattatctacgtgattccgctgtggtgcggttcttgcggcctctcggtagtgaggtctcatttgttctcctggtcttcactgtatgctgtctgctatgcttgggtccctgccttttatttctttatgggtgattttcatctgattgccttgctgcacaggtacaaagcaacagatctgcagaatgaaaacagctggggaaccctgagtggggtgagagtagaatggaggaggtggtggtatcttcttaagggggtactcatggtggaagggtcttcgtttttcttggggaggattccctttgtgctgtccaaggagacttccttacaccatgggctttggacatgcttggt

SEQ ID NO: 133356 - DNA, 320 bp, Homo sapiens
tctctcaagatctcctgggtcaggggtcaacttctcacctgtacttcagccaatgtatcctcctatgcttgggtccctgccttttatttctttatgggtgattttcatctgattgccttgctgcacaggtacaaagcaacagatctgcagaatgaaaacagctggggaaccctgagtggggtgagagtagaatggaggaggtggtggtatcttcttaagggggtactcatggtggaagggtcttcgtttttcttggggaggattccctttgtgctgtccaaggagacttccttacaccatgggctttggacatgcttggt

SEQ ID NO: 133357 - DNA, 269 bp, Homo sapiens
accaacaaacccaacaaacataatcctttatgttgtatattctaaaatttaaaaactcaagtaacagaaactaccctttgtgttttgcccactcactgccatcccccttacctctcctgtggaacttctgtgatcttttcagatatttatcaacatcccatttcagagagcccacttatcttgtttactgtgactctcctagttttcaagacatagattgaaatctattctcaaatatatatcttacatcacttattgcttgtattagg

SEQ ID NO: 133358 - DNA, 167 bp, Homo sapiens
gtctatagcttatgtcaaattgtcacacaaattgtgatccaaaaaataaccatacctcatgttttattgagcacatagtgtatgttaggcactgtgctaagtccttacatatattaattcatgtaacacaataacctttaatttttaatttttgtgggtacacagta

SEQ ID NO: 133359 - DNA, 395 bp, Homo sapiens
ctctttttgatagagtcagatcccccacccccgacttccaaagagcccctccgccccatgtatcttgtgcagtggagtctgtgcattgctaacctgccccaggggtctgctgtgcccacagtctttattcttcagcgttcccccacatccgctccccaagttaacttactgcccctaaccccctcctcaagccctcattgcttctgtaagggagggtctcacagccctgccccagcccaggcccctaaccccctcctcaagccctcattgcttctgtaagggagggtctcacagccctgccccagcccaggcagggtgaggaccgccttgccctcctgtgcacttcactcttcgacctttctctccctgccccgctcttccggccatgccttgca

SEQ ID NO: 133360 - DNA, 108 bp, Homo sapiens
agcaagttttccaagtaatattttaagtatctgtggggttttttttcttttgtttggtttttttaaataatgaggaaaaagtaattccccagagggaaaactttttta

SEQ ID NO: 133361 - DNA, 748 bp, Homo sapiens
gtgatgtgagatgcaagaactttgtgcctgataattgttgtccctctgagtcctgtaggatgcctatatttttgaaagcaaaaggagtaatgcctgctaaactttgcctttttcttctttacagactcactagctgagtttttcacattgcctgccagtagacactttggctgacctcaaagggcagccagctggacacagattttcaggaaggcacagagcagttctgatccttgcctagcacttcccttgagcttttataaatggaacttgatatgcctatcctggaggactttgcaaccgggtaaaactaaagaccacacatacaaatctgccatacgtgtttagagactcctgacagagtttctatttcatgactcacttgggaaatatggagcacctttgtaatatgctgggtctggagccagaaaggatgtgaagggaatctgagacactgtcctctgacaggtgtttctgctactatgtgtttgctaacgtattggtggtagtcacgcggaaaagtgtgccatgctccagtaagtttgtgaaagtctgtgtaatattaagttaaacaagtttcttcagagcctttatttgctgttgttcatagtgaattgctaagtattaagggagctcaaatgactctaaaatcatttttttattggagcatcttgtgggactactttcctttagaatacattttcacaaaccctggtaaaaatgctttagcacgtaggctcagggataa

SEQ ID NO: 133362 - DNA, 149 bp, Homo sapiens
gatgactgtgtattctccgacttctgctaagaaagatcccctatgaaacacatttttgaatctctgtctgcctgaatatcaaatagtccctcagagtctcctctcactcaggatgatttgtcccatggggccctttcagattatctaac

SEQ ID NO: 133363 - DNA, 741 bp, Homo sapiens
ctaaaaagagaaataagagagcaaactatatatgtatgctttatatgtgtcagtgtgcaaggaattgtgcaagactatatgagagatgtatgtacatcaaagatgatatttgatagaagatatgcaaaactttgtatgtgagacagaaggaaacagtcctaaaggaaagacactctcaaaacttcattccctaacaaagcgaattgtagctttgaaccatgtctctttaattagagttgctgttgatatgaataatcaaaggtcttgatcatgctattattggctttgatgcaataaatagaatggtaatatttttgtgagatgggaggttgtatagtaaaacacttgtgttccgaggctgaacagtttgctgaggcgctgtaagattattgtgaagggcataaatacttagtaactttgccccctaccccaatttagaatttctgtaagagaaagaaaagtagtgttaaaggaagaaaaaaagctatgctcgactgggttgtagtgattggattatgcaatattgatttactgtcataaattgtgcacaaccagattttgctgactgttgtaagttgagcttataacgtgtcagaaatccaaatctgttttatttctaatatgtgagtagaatttaaattaattcaacagcaatggcctctgtgttcttttcagtaatgagaagtatcatttacatcaccactctgttctttggataaataaattttttaaaaaataagg

SEQ ID NO: 133364 - DNA, 229 bp, Homo sapiens
aggaggttttcttcaaaataaaaggccctggagacattaaaaggaaactcataaaaaattcatctctgagtagtaattgcatcataaaaagtattgagttggtgtgcagatgcaaattgggccgtatgaattaatgatgtaaacagttggaatgagggtgcacattcagaaaatgtcctacaccgtcttcttcagtgtgtgaggcgaagttgggccaggtggcactgtg

SEQ ID NO: 133365 - DNA, 1780 bp, Homo sapiens
  misc_feature (71)..(71): n is a, c, g, or t
  misc_feature (443)..(443): n is a, c, g, or t
  misc_feature (576)..(576): n is a, c, g, or t
  misc_feature (825)..(825): n is a, c, g, or t
cgtaatacgtgctcattccatcttcaatggaacaaatgaatgttgctgcatcgagcatctgtttactcacntcttcattctctaaccactctattgattctttatcttgacccgcaagcatacttacgtctcatcttggtgacaaagagccctcccgtggcccaggcacctcgctgaactgctctcttatttttaaccgcactgactttgcccactcaacacttcaactctgggcttttggtcctccaggcatcttgctgaaactactctcttgaaggccgccagtgagttcctacaaagtgttactgtctgtctgaaatccctaaaatttccaacaatttaaaattgttctcccctttaacattttcttcttgattgcccgcatttctgagcgaggcataatgatgtatgcaggggctggatgccatggggcctggggtttntggtaaaatgtcggtaaagtaaccacacagcaaaagggatagtatggccctcatcttaatctctgctgattatttatgaatgggcacgggtgggggttcattatatctgcacttttgagtgtgtatggtttantttaggtcgtctcactctgtcgcccaggctggagtgcagtggtgccatctcggctcactgcaaccttcgcctctgggttcaagtgattctcctgcctcagccttccaagtagctgggagtacaagcatatgccaccacgcccggctaatttttgtgtttttagtagggatggggtttcccatgttggccaggctggtctcgaacttatgacctcaggtgatcctcctgccttggcctcccaaagtgctnggattataggcatgagccactgcacctggcctgtgtattgtttgaaaatttttatgaaaccaaaaacaaacaagtttgctttcatccttgggcattgatggcgtccgacttgcccagtggcctcctgcctccttgctgctgctttgccggagttcaccttcctcctgcttctcccgggctctgcctttgccctcctttctctctctgcagtctctcttggctacttccgccctgccaggatttcagtgatcattcctgtgtctctaattcccacagccctcaattgtctccccgggtccctggtcctgagtttctaatgatctgccgacatcccctggatatgccctgtgtactctctgtctcacacctgacccttttgtatatatacagttcttacttgtccttcaagatcttgcttgagtgccacttcctccaggaagcccttgctgatttctcagtcagatgtcatttctcccacttcattattcttaaatgacttcagcatggtctgaccttattacttagattttgtattctagttttgtgggaactgttcctggaatactagggttgtgttttccagagatccaacatgttgtgggaccttgtacactggaggcaattcatactttgtagaccagttatgatggtaaatggaaaaatctgaaaaaaaaaaagctgagaaaaatggttccaccaaagtattcaaaattgcttttcatatttcagaattgacatataagagtaaaaagaaagtaacccaaactgcagtggtgctgtggggctagcataaaatgttaatcaggtaaataggaactcaaaggaaatttaccaaattgagctcatttacatgtgtaattacccatctgtgatcattctactgttctatttattctgtctttctcctcccacactgggttaaaaatactttgtattaaagattttcttcataacc

SEQ ID NO: 133366 - DNA, 549 bp, Homo sapiens
cgtggctcccctctcagaagctgggctcagctgggaagtgacccgaggtccccggccagggactggggagcttgagtgggacaccagggtcccagagctctgtccctgggatgggacgaatgtattaggacctcgaaggaatcttcagccctgttggaattcatgcctcttggaggtgagaccttttccacagacagttaacaccgacacaggtgctcgaggaaacagagctgcattttaggcgtgattctcaccatacctccatgtttgggtttttcaccaggcaaggggcttgcgaaagacacagcgaagctccggttcactcgcagccaccgcctctgggggacttggtgggctctctcctgctgggctctgtcagggctctgtccagtgctggccgaggcctccccatgtgcagggcactgccctgtagcctccccggtcccccagaaaaaccgcaccggcttggccaccaccccagaagccaggaagccaagagcagctcaggcctaccagctcccgccaggctcccctcttcctactcctgcc

SEQ ID NO: 133367 - DNA, 878 bp, Homo sapiens
aaagataaaaacatttgccatcttcctatacaaattataagctgtctgaaattattagaaggggatgtaatataggaagtgtattgtgacaaagctaatttttcaaacttttggggatattgtactgaaaacaaaaataagcactaatcaatgtcctcagacttacctctaggataaaataaaattttagttggactacttcatggaatttccctcattactcttaacttttttttttctttgagacggagtctcgccctgtcgcccaggctggagtgcagtggcatgatctcggctcactgcaagctccgcctcctgggttcacgccattctcctgcctcagcctcccgagtagctgggactacaggcgcctgtcaccacgcccggctaatttttttgtatttttagtagagacggggtttcaccgtgttggccaggatggtctcgatctcctgacctcgtgatccgcccgcctcagcctcccaaagtgctgggattacaggcgtgattactcttaacttttaagccgggagaaatgggaaattgagaactcctgaatagagagagagagaaagaaagagaaagaaggagagagggagagagagagagaaagagagagagagtgtgtgtgtgtccttgttttgatgcgcttttacctgggttacctttccgtgacagttctgagctttgtcacatgggtgtttcctgctcataagtgcatggcgctcgctgtagatagggacagtctacactggaggtttcagaagttaaaccaattcatgagtcaaaggggctcacagaggacgaagagcatctcatttattctaaacaagtgattgctcttttttttccttattagtgagatgtatgttttttca

SEQ ID NO: 133368 - DNA, 280 bp, Homo sapiens
cgatagtgcacacgggagagtgccccgacttcaacttttcgctcaaatttacaaatgaaattagggttcaagtatgaacaatttttttaacgactaagaatgaggacttttccataatctctcagcactttggaataaagaatagattcactctcagtaatgatttgcgactgacattttgagtagcataaattatatttcacacataatgaaaataaataatgcctttaaaatataaatgataagtgtcattttatggtctcagaaatcctgtatgttc

SEQ ID NO: 133369 - DNA, 381 bp, Homo sapiens
ctgagaaaacagtcaagctactcgcgacaatattcctgagcagtgaaacgggtgaacagagagcgagcaagcaggggctgagaatcagtgagaggaaaaatcaaggaacaaaaccggagagtctggtccagcattaagaaaacggagcaaaggaagagggtgaaacgcgaggggagggaagaccgagagtcggcagagaccgtggtgccgcgaggttcagagcagggctgggtccaggaagagtcagacctcggcagcccagcgagcttcccatttctggctaaagccagcgaagaaaacggccctggggagcagacaatgagccaccgccccagggccgactgtcatctcagcgctgagatgacagtcggccttggggaa

SEQ ID NO: 133370 - DNA, 944 bp, Homo sapiens
gagctaatcatgtggccagagatgtggcaagtctgtttatgaccaggaaggtgagactgcgatggactggatagtgggataggaagatttctccaaagagagaagagagttgttattaatagaagaagtgagaatagtgatgctgggcagacaaaacacatacacaacaccaacagctatctgctactgcatccgaaaagattctttatctgcagccacagagccctgaacaaccagcctttccggcttccttttgttgccaattccctcacacgtattattccaacccaaggcttcagggaggctgtttttaccacagttcagtgacaaatcctaccagagccttccatataccagtgaatgtccttggttatacttgtctcgttctgaatttagaaatccatctctgtgtcactgccttcattaggacctttcgtctcctccctggattcttctggtaccctcatttcttgtctcctacttcctgttgtctcctaattattcaccttctactttttttgttagaggttccagacagtttcaagaaaaatacttaatgctgggcaaggtgcttctcccttcctctctaagttccatagaacaggggacattttgcttctctgttgctatggactgagtgttttgtgtcttccccaaatttttatgtcaaaatcctaatcctaatgtgatggtatttgggcatgaggcctttgggaggtgattaggtcagtagggtggagctcttatgatggaattagtgtccttataagaagagacaggagagagattacttcctctctttctctgccatgtgaggatacagcaaggtatctgtctgcaaaccaggaaaaggaccttcgccaggaactgaatgtattggtgcactgagcttggacttcccagattctagaactgtgagaaataaatttctgatatttaagcca

SEQ ID NO: 133371 - DNA, 427 bp, Homo sapiens
aacccagacgtactatatgattctatttatatgaaattctagaacatgcaaactatagtgacagaaggcagatcagtggatgccttggcatgggtgagaaccggagggaattacaaaggggcataagaaaacttgaaggtgataatttcagtatcttaattgtagtcatggtttctcaagtatatgcatatacaaaaaatttatcaaattgtacaccttacatgtgcagtttatatcaattatacctcaggaaagctgttttttaaaaaaaaaaaaaaagaaaaaaaccttagtaaatttgtaaggattagaggatgcattacataatagagttaacatctgaaattaatggaactgtttttctaaaaccttttaattattgaaacaaaaacaaatgtggttttttttgggcaccagttataggctt

SEQ ID NO: 133372 - DNA, 422 bp, Homo sapiens
gatccatgaagagagggagagtcataggaaaatgttttgtgcttcgattgggtcggggcatcaagaacggcttttgagtaaggatgtgatttgggctgtgcttcaagatggtgacatggctgcaccttgtacgcagattggacaggcagccaaggacaaggcgtcagacgtgggctggtgggcaccaacgtgggggtagaatccaccttgcctgtgggtttcttagcctggactgggagaagtgagactagagacctgaagggtgagactagaggcctgaaaggggccaagagagctgcatcctcccagctgatcccctggctggagcctgagcagacgggaggagcaggaaggcagatgcacccaagactgcaagacatggaaaagggctcaggctccctctcccattgaagaaaaggtag

SEQ ID NO: 133373 - DNA, 650 bp, Homo sapiens
gatgtggctcacatctgtaatcccagcaggattatagtctcgggaggctgaggtgggcggatgcttgagcccggaaggtcaagaccagcctgggtgccatggtgaaaccccatctctacagaaagatacaaaaactagctgggtgtggtggcaccacctgtagtccccgctacttaggaggctggggtgggaggatgcttgagcccaggagccagactggtctcaaactcctggcctcaagggatcttcccaccttggaccccaaagtgctgggatacaggtgtgagccaccatgcctggcttcatatttatttcaggaaagctttattgattatatccttaaatactttaaatatatatttttaaattgtgataaaagatacataaaagttgccatcttatccatttttaagtgtacagttcagtgccactaagtacttttcatattacaacttttgccaccacccatttctagaactttttcatcttccctttgactgaaactgcatatccattaaacaataattctacatttctccctcccccaagtccctggcaaccacccctctactttttgtctctatgaatttgatgactctacataccttatgtaagtggaatcatataatacctatcttcttatgactggt

SEQ ID NO: 133374 - DNA, 692 bp, Homo sapiens
agatgcaaaagacaacatgcagaaagagtgaacacaactcagtgactaatggggcatgcaggatcaggaagagctaaaagtcaaatgacattcatatcctggagaatgaggtgcccccatcaagttaatccattaattaatcaaacattcaggacctggagccattcactctctaacatattctttggctgtattaatatggccattaattcctgaacaacaagcagaaggaaacagtacttaaaaccatggttgagagcacttagtttttcttctctgacgatgtgcaaatcggcagttgcacttttaaaaaaagcctttcatataaatctgggcaccatcctgaatgcatcagtcctattaacagcatgctagttttggagaattgctacaaacccagcctgaggtgaatggcagctgctcttctctggtcagggctacttaaagaagtggcaagtccaaagccatttagaaactgaaaagtggccttctgataaataaaacgacacttctgaagctgaacatcaaggaaagaactttgtgctgacggagaactacagaagctttcctatgggaggctggcatgcagatgtcaccgtggggctttgttgattatgaaactggaagccatagcagtaagtgggtgcatgggggcaaccaaaagcaggaggatggccttgcctgtgtctgta

SEQ ID NO: 133375 - DNA, 689 bp, Homo sapiens
gaaagttctgattttttgcaagaagaatattttttatgtagtagttgtataaacttaataatttaaaaaccctcaaagaatgaggacaggaagccaaattccagattgagtttaattttctttgaccagcctctttgtctcctttctagagacttcttcattacaatacccaaccaagaatgtttaaaacttttcaaagataatgcatatgtgagttaattggtatagctaaaattatgaaatcattgataatgaagtataagacagtatatgacggcggctaagtgcgtagaccctgaagccaggatgttgggtttgaatcttgacttccttgttgtatgacctctctatgccttagtttcctcatttataaatttggggtactgatagtacctgtctctaggttgttgtgagacctaaatgaattttcatctgtgtagtccttagaacagtagctggcacgtagtaagtaatataaaggttactattattgttattgtatcctgacacttagaaaaactggtggtagattgttatatatacatccagacttttttctatatatgtgtgtaaacatttacatacacttacacagatacaggcacgttcacaggagtaagtatatttttattaaaattggattatactatttctatttttttgtaatcttttacactcaacaccatata

SEQ ID NO: 133376 - DNA, 271 bp, Homo sapiens
gccccctcctcttataaataagaccacataccaatctataggttttgcccctaataaaggaaatcagccattgatttacaccaacagatggcaatgttgctcagtctgtagaattacgaactgagactccttagattaagtttcctttatcgtaccagctaaatgctaactgaagcactggcagcaactctgttccccagatgaaatcccaagtttcttcccagcacctcctgagatgtgcttctttattccattgttcagcactccccgg

SEQ ID NO: 133377 - DNA, 546 bp, Homo sapiens
agctgggactacaggcgcccgccactacgcccggctaattttttgtatttttagtagagacggggtttcaccatgttggccaggctgatcttgaactcctgacctcaagtgatctgcctgtgttggcctcccaaagtgctgggattacaggcatgagccactgtgcccagcttttttttttttatgttgcccaggctagagtgcagtagctattcacaggcacaatcctactactaatcagcatgggagttttgacctgctctgttaacaacctgtgttggttcacccttccttaggcaatctggtggtcgcccgttcccaggagtcaccatactgatgctgaacttagtgcggacacctgattggcgtagcgcactacagcctagaactcctgggctcaagcgatcctcctgcctcagcctcctggtatctggaactacaggcacacgctgcacccagcaagttttcagtattcttaaactgaaatatcccctgccactaaaatatagaaaaccaaaaaaagagttcacattaaaacaagaatga

SEQ ID NO: 133378 - DNA, 434 bp, Homo sapiens
gtagggtacaagaagcttttgtaactgtaaagagggagggaggtagctacgttggtctattttccagttcctggttccaactatacctaaagctttaactgcactttctatccttgcagtaatatgacaaaggcccccagatcttaatcataaacttttcattttctataatgcagtctctacaaagtagtgcctaaaacattccagcactctaccctaccttttacccagctagctctaagtcttccttcaggtcccagcttaaacaccacttcctcccggaaacccttcatgactactcagaatatcttatatcatccagtggcactccacacctcaccatactcagtaaatgttattactgccctgttggactgtaaacaccaaagagtaagaacaacttttgttcactactttgttcctactgcctagca

SEQ ID NO: 133379 - DNA, 489 bp, Homo sapiens
taactccttttcacaggggcatcaaataaggcagtaatgagccaatctgaataataagtttgaaagtcatgttaccattttctgaggataagagagcaaattgccccacatggaatagcagaaggaaccttttctcctttcctttccccttgaaaaagacacgtgtctcctaaaaggggaaggagggactaggaagccaaactggcaactacaggatgaaaactcgtcctcctggcatgctcagtgttgttgttcttcaggcttttctgtctgtccagagggaaacctacgccaagaatttcatcttgccttttctttcagtagatctggcatgaatttcctggcttacaggtaccttttgaaatgtgaggatcaagtataaattgcattttttttttttaagagacacgctctcactctgtcacccagcctggagtacagtggtgtgatcctagctcagtgcagctgcaaacccctgggctcaaacaa

SEQ ID NO: 133380 - DNA, 309 bp, Homo sapiens
tagatcatgccacgctggcctcacacctcttcctggccatggttttctggggctcttcagttactttcattacttgcctggctttttgtaggcgtttgactttggcctaaataattctctgactttagatcaagttctatgtggcagtctttgagagccttaacacatattgatacatattttgtgatttggtagcaaatcttgacctcaattagtttgcatgttctttctgcaacacacaccttatactctcctgattaaaacacttagaggaatttcctcctcagaccattggtgttacttttcatg

SEQ ID NO: 133381 - DNA, 338 bp, Homo sapiens
gctgcgttcgactgtaccccaacatcaggaagggatggctcaacctgggaggggtctggaagtcactaagaactatttagtaaaaaacatttctgtttcctggtatacatgatcaccttaaaactgacgctgcgaaatgccagcttccatctgcacgccttggctcctgcctggccctcattgcgaggcccgcgggagtggctgcctccctccccctgctccgcacagagtcctgcatgggaccagcagctcctgtctcacttccgcacttggggtttcagccctcggagaagagcagccgcgtggttcccctcacgcagacatgcttgagctttccg

SEQ ID NO: 133382 - DNA, 272 bp, Homo sapiens
ctcctgtgtgccagactctgttttagatactagacatacagtagggaacaaaacagcaaagctgcccttgtggggtttacattctggtttgggagacagatagtagatctgtagtgggatgtcagtggcagtaattgctaagaagaaaaattgctggacgtggtggctcaagcctaattgtaacactttggttttattttattttattttttttgagacagagtctcactctgtcgtccaggccgtctctgctcattgcaacctccgcctcc

SEQ ID NO: 133383 - DNA, 362 bp, Homo sapiens
agatgcatagggtctgggtcaagggctggcttccctgatgaagggacacctgaactgagactgggagggagtatgctcccaacagatggaagagaaagcagagggcctgaggcaggaaggggcttgtgttggacaagcccagtggggcctgtgattcacagtgagtctggaggaggagcagggagagccaggccacgcaggaccttgtgggacaaagtaaggttggggtctttatctcaagggcaggggagacccctgaaggtttctggcagaggaatgacatgctcatttttatattccaaaaagaccactctgccattataagaagccatattggatgtagagacgggtcgggggtctag

SEQ ID NO: 133384 - DNA, 634 bp, Homo sapiens
ggatcatagatgatactggttaaaatgctcaaaaagcctctggatcatccgagacagactcacagttcttggtcctcttcctccaggcctcattgtcttactgcttccatgttaaagcacccagacccttgtccagaacttttatagcaagataaaagatcccttccctgagcaacttcctcctgctttgggacacatcttccctcagggcacaatctgtcagacactcgctcgcctggcctgctgtctcccctcccggcctgatgttggatttcagtaggttgcagctaatgttgaatatatttcagatgctgtaccctctctgtgaactatgaagacatgattagcagatacaattagctactttagcattaaaaaaaaatcaaaagatctagattttagttattgccctgttggttattactacattggcttctgcaatagtttatttctaaagcaggaagagagtggaaaatgggtagacctgagaatacagcatttcttttttcttctgaaggaaagaaacccagcactctttcaaaagctgtgaaagcattctcatgatctggtagatcccatctgtgcgtttttcagtgacatacttcaagtacacgagctgccgtcaaaggaccta

SEQ ID NO: 133385 - DNA, 206 bp, Homo sapiens
aggtccttccagggagaaccagagttcaattgaccaggctgacccaatccctttattattattaccattagcctctgctgatttaaccaaaattagcttccaagcagccctggctgaagggggaattaattaacaggcattagttgtggttgttattaatagagaagagaatgaaataaaaacgttggagggggttggctggctag

SEQ ID NO: 133386 - DNA, 517 bp, Homo sapiens
cttagtcaacagagaccaaccccatatataaacataactaatttatatattcataaacagagcacagtttctgcttggtttcctttgattcttgtttgtcctttgatcttcagccatcagacctgggtagggagccagtgccccaccggatttctttgtctggttccactggggcgtaatgagtaccctttatccccttccatctcattaggcagaattcttcccctagatcctggaatggttatggaggcaagttttaagacctctagcactgccctagcttactttagccaagatggagtaatttacagcccattaggcccttaaaatttggcttgcttctgtgttctcctggagtttcccagctccttctaaagaggtttcaggaggctgggtgcagtagctaacatctgtaatcccaacactttgggaggccaagacgggtggatcacttcaggtcaggagttcaagaccagcctgggcaacatagtgaaaccctgtatctactaaaaaaaaa

SEQ ID NO: 133387 - DNA, 1129 bp, Homo sapiens
agtttgtcacttttagacatgccctaacaagaaatgctaacaggagatcttcaagttaactgaaaagatactaaaccaacagtatgaaagcatatgaaagtatacatctcactgctaaaagcaaacatgaaaacaaacatggaatattgcaatactgaaatctgtggcacgtaaatctcattgaacactagtatataaattaaaagacaaaaatagtatgagtaactacaacaaccacagaaatttgttaatagaaacaatatagaaagaagtaaaatctgaaatcaattacatacattggtgaggaagaggggggagaagtgtagagattctgaatatgaatgaagttgttactagctttaaaaagcctgctatgactacataatatttgatgcaaacccgatagtaaccaaaataaaaagtatagtaaataaacaaaaaaaagaaaaaaatcaaagcattctactacaatcatcaaatcacaaagacaacaaacaagagaaaaacaggagaaacagaaagcaaatagaaaacaatgaataaaatggaaacaattaagtacttaattattaaaaattattactttaaatttttaataattaagggctctcagtagacatggaatggctgaaatggataataaaaacaacactcaactatacgctatctacaagagactctaacatttaaggacacacgtaggctaaaagtgaagggattgagaaagatattccatgcaaactataaccaaaagagagcagggtggctatctatatcagacaaaatagactttaagtcgacaactgtcaaaagagacaaagaaggcattatataatagtaaaagggtcaattcaatagaaagatacaacaactaaaaatacatatgcacccaacatcaaagcaccttaaaatatacagtgaacattgacagatttgaaggaagaaatagatatcgatacaatatagaaggagactttgatacatcactctctataatgtacaggtcatccagacagaatgccaacagcaaatattgatagaattggaggaagaaatagatatcaatacaatacagaaggagactttgatacgtcactgtctataatgtactggtcatccggacagaata

SEQ ID NO: 133388 - DNA, 421 bp, Homo sapiens
ttcaggaggatccctcataggtcgcagggtagtgtattacgtgcctcagtgtcttggtgtgatatacacttagtaaagtcaggcctgctaggtggggtcaccggggtgctccaggcaaatatcatccccctctcccaaggtaagggccctgccaggcaatggagagtatttctccaacacaccatgtttccaatatctgtcagagaaaagacctgattcaacttgtatccagtgatttgaaagctaaacccaaatctcaatgtcattctgacaatatttctattaaataaaatcctctgtttccttgggggcttttaaaatcaatctgccacaaaaagcttccgaacaagttaataacgcagacgtgctgactcacactccccagcaagcactcctccatgaagaatcaacggactttgtt

SEQ ID NO: 133389 - DNA, 243 bp, Homo sapiens
cagagcagggacaggaggagcaaggtgaaaagaatggctaaaaccacagggcagacaggcatgggctccatccagccctctagtctctgagctggtctcttcctctggaaagggacctgatcatagcacctcttccatagggctgtgacaatagacgacacaatgcagaaagcgctcagagaacagcagaccctcaacaaatggtgatggatgtcgattgttagtttttgagtgttgagtgat

SEQ ID NO: 133390 - DNA, 198 bp, Homo sapiens
atcatctgactcttctaagtagagcgtatctttaactttttattttcagttcaatttcaaagtgtctactaaaacagagttctacccatcacatttactgtgagaactagtcttatttctggcattacatattatattttgtattagttttcaagttcaagaccagcctggacaacatggagaaaccctgtctatact

SEQ ID NO: 133391 - DNA, 651 bp, Homo sapiens
  misc_feature (368)..(368): n is a, c, g, or t
  misc_feature (371)..(371): n is a, c, g, or t
  misc_feature (376)..(376): n is a, c, g, or t
tccctttccggcggtgacgacctacgcacacgagaacatgcctctcgcaaaggatctccttcatccctctccagaagaggagaagaggaaacacaagaagaaacgcctggtgcagagccccaattcctacttcatggatgtgaaatgcccaggatgctataaaatcaccacggtctttagccatgcacaaacggtagttttgtgtgttggctgctccactgtcctctgccagcctacaggaggaaaagcaaggcttacagaaggatgttccttcaggaggaagcagcactaaaagcactctgagatcaagatgagtgggaaaccatctcaataaacacatttgggattaaaaaaaaaaaaacaaaaanaancacanaaaaacttttgggggccgccgggcccccctggagagtcgtttttttagagcccattgcggtggggcagcggggggcccccacatgtagggttacactgtacacaatttgggcacaacgcggtgtcccccaaaaggagaacacccggggcacaagacacacaacggcgcggtggaattcttccacactataaaaaaaaaagcgcccgggggggaaacacgggcggttcttggacacaatctcccaagggggcgatcggggagccaaagcgcggcca

SEQ ID NO: 133392 - DNA, 381 bp, Homo sapiens
cagattactgtgcccatttttcagatgagaatactgaggccatgagaactgcttcatggaccctctgagtttagccagggtggccccctgttggtacacccatatcccagaaacagagctacccgttcttctcgggcctttccagtttctacctcagatttatgtacctggagagggaagaaaccccaactggtactccctgaggaagattcagctcaaatgcacatgtagtgagcatctctttggtgccaggtccagtgatagacggcttgttatgattaaaagagcactagctttctagctttctaaactcaatctctggctaccttataaatgctgtgttatcttgcccaagaagcgtgatctctctgctgagcctaa

SEQ ID NO: 133393 - DNA, 206 bp, Homo sapiens
cagggtaatgcttgcctcatagaacaagttaaaaaatatttcctcttctaacgtttgaaagagttggagaaagattgaggtaaattccactttaaatatttgctagaattcaccagtgaggtcatctagtcctagacattttctttgttgggaggtttttgagttctgactcgatctgttattacagatctgttcagattttccat

SEQ ID NO: 133394 - DNA, 168 bp, Homo sapiens
atatacaattattatttgtcaattttaaaaaaatagaggctgggaacggtggctcacgcctataataagtaatagtgcactggacatttcaaaattgccaaaaatgtagatatttttaaccataaaacaatgataagtatgtgaggtgatagcttttaaattggcatg

SEQ ID NO: 133395 - DNA, 559 bp, Homo sapiens
aatggcaaatagtgctatgtcttagcccaggtccagggctgtgtggaagtgatatgggaggggtacagggatgggtagagaaaggcagggtccctgacaagggctccacccttgtgcctgagcccacggacctaggtgaggacaggcactcctgtttccttgcccaaatgttgcattttccaagtccaccctggcccgtcacgcccccaatcctgtgcctataaaaaccccaagaccttagcgggcacatacactaatagctggacatcaagaggaacacactggcagaagcacacacaagtggctggacatcgacaggaacacactggcagaagaacacatagacgctgacagaccatcaacagcagaatgacgcagagggtggtcggaggagagcctggctgctgagcggcccgactccaggggaagaccaccttcccactccatcccccttctgactccccatctatctgctgagagccacctccagcattcaataaaaccttgcactcattctctaagcccacacatgatacaatttttctggtgcactagggca

SEQ ID NO: 133396 - DNA, 808 bp, Homo sapiens
ccatttgaggggatgccagtgaaatcaatgcatctaatgtccttgttcatttagaaaattgcacaaatagctgagacccagagatatactgagcatctttgaaggttataatcaaatagaccttgaacagtgtgatctgacattactgacttctcttgggtaaacagtaatggttgcaaaagataaattcagatgaatattatatagccaaatgacatttatgtaattctcttaagttctctatatcaaaaacagtttcagacctgacagtttcccccagtgcatatcaaatgtaagattcaccccaccataaaaactagagaggcaaaagtactgtatcaattcccatttgttcatttgttccttcaaataaatgagttctaactctgtcccagcccccacgtgtgcaatgatgagtaaaagtatacttctctgcactggcagagcccagactggagagtctataaaatcaaataatgctaatcttttaaactgaagctgaggtgctttgagagcatatgatagcaggatttgtcctggggaacagaccactgagttgatatttgaaggattaggagctaatcctaggaaagagagcaaagagtttgttgtgtgcaaggccccaggggtagcaggagaacggcaagtactgtttaggaagaaggtcaacatataataggtgggaaataagaggacgcatgtagatgcagatggaattggggaggtaagggccagatcacagagttgtgtaggttatgtaaagaaatttagttctgattccaaggtcagtgggaggagttgtaaggag

SEQ ID NO: 133397 - DNA, 220 bp, Homo sapiens
ccaccttgtgcggtgatgagctgatctcttggcggtgccccccaccgacaccccacatcccaagcagcccagggagtgatatcaggcagggctggaatggaacttcagatgtctcttcccagcctgagacccgagcccactgccttcccaggggccaggtagctgggacagcattcacccttgcacctcgtttctccgtctttgaaacggtcatgataac

SEQ ID NO: 133398 - DNA, 379 bp, Homo sapiens
taaacgtaacttcattatattagaacactgtctgtatatgtttaaccttcattttaaatatttattgtgtgtatatgtgtgtgtgcgtgcgcgcgtgcccacatgctagaatcatgtgcttcactgtggaacatcatactcaaagctaaaccaagcccaaatcataactaaggaatagaacttcctcaaaatatgacacttcactaggagacttgtgtgcattttgagcaacatgttaaatgttgaaaggaggggggaatcatggtgaagcactttccaagtcaagcctgaggcgctactagattttcccagacagaagctgggggttaggtagcctggaaatactttctcaaatatttgtcagtaaaataggaaaata

SEQ ID NO: 133399 - DNA, 886 bp, Homo sapiens
cagaacatttctgagcctgctggagtgtgtgtcctgtgtatgtcgccgctccttttagtgatgatctttaatgatcctttatctttctgtactttttttcctactaattctttatacttgtatgctttgccttctcttaagcgaaattaaatttacaagcttaatattgacttagcacaaatttgtcagtcttactggaaaatgagttaaatacactgggacccagaaatgaaaacaacttatttttgtatgtacatgtggcgaaactacaacccagggaaacaagtgtgcagtctcgcaaaactatcatgactagcaaggttgatctgagagtaactttttactctagtcaaatggcaaatatctatgttctacttcttacatcttaattttgcacaaatagagattcattgttttgttaggcttatctcatttaaaggtaacttagaatttgaaatgctgaagctgtttcacagtatagtagacaataagcacttccgctgttttcccgtggttttagttttttcctctgaatttaagtaacttttattttcttgagtttgtttctatacaggtctaattaagataattatttttaaattatatctacttataaacaagaatttgaggtgaatagaagaggtgcttcaaaataaaaaatgggtgaatatatgcctttgttagtaaagttctgaaactgtagaccactattcttattttcagctttgatcatgatttgaatatattataaagtttataattctatagaaaaataaatcagaagtcccagcagccaccaacatgggttggttctttttataggataaccgtgccttgtatatcattaatgaactaactaaagctgctgttgataatgggatgataa

SEQ ID NO: 133400 - DNA, 258 bp, Homo sapiens
taacttagattcttagctcctcctttcctccctccttccaacattattgaatatttgctctatgttagggactcttttggtctccagaaatagagcagagagcagcttcctgagtggtgtgcttgttcgcatgtttttttaagggtctagttttattcattccacaaatatttagctgaattttttttttttgagacagagtcttgctctgtcacccaggctggagtgcagtggtgcggtctcagctcactgcaattt

SEQ ID NO: 133401 - DNA, 135 bp, Homo sapiens
gtacccaacatgatagtggacagttaaaaatgactaaaggtaaccatcattccttattattagatgagaaaaagccattagggaaaaggatagaaaagaagttaatttattttgtcctaccaattacagaaaatg

SEQ ID NO: 133402 - DNA, 323 bp, Homo sapiens
ggcccctgagtagctgggattacaggcatgcgccaccacgctccgctaattttgtatttttagttgagatggtgtttctccatgttggtcaggctggtcttgaactcctgacctcaggtgatccacccacctcggcctcccaaagtgctgggatcacaggcatgagccaccgcgcttggcctctttttctttttttttaatgattattctccctattccggtgggaaataatttttatttttcagtctttcctttactctctgttttctgccttaattacaaattttttcctattaaattctcttccttttttccatttttct

SEQ ID NO: 133403 - DNA, 450 bp, Homo sapiens
cagggcacactctggtatctcagctctggtccccaacccattttcttacactctgactccagtgtcttctttcaaacacaacagtgagtttagaagaccttcaatgcacccctttctcttaactcctgggttctaaactagatgccaggtttggactcctttccctgtctcagagaggatctgagagtgcaaggcctctgtcaccacaggggccggagctccaactctggctctgacacttatctgccttgggacgttgggcccattccttcaactctctgaacttctgcatattcacatttaaaatggaggaagtatagtaggtccctataatcccagctactcaggaggctgaggtgggaggatcccttgagcccaggagttcaagactgcagtgagctacaagtgtgcctgtgaacagccaccagtactccagccagagtgatgcca

SEQ ID NO: 133404 - DNA, 621 bp, Homo sapiens
cattttatactagacttcattcttgtctctcatgcttcttgggttacttaatggtttatgctagccctgaaagctatcagtaaaaatttcatgcttatatcaaagaattaaatctgatcctttaatatctgatattttgccagtacttctagtgataagggatttttggaagtcagtcacagaatttaaaaataaattctagtctttcctcagctatttgatactcatccctgttcctgcaaaagacatgatcacattattttttatggctatggggacaaataggccaagtactcattgccaagcatttttgtaagtatgcatgcttatatttggtccagaaacaatgcattctagattggtttagaattactggtagcttattttacagcaaggaaaagcagctgagcaagaatttgctgtctttagaacagtttgtgaaatatgatataagggtgttttcatttcctattccctattctctctctactctgctcctctgaccccattcattgaaaggcagctgccttattttacatgaaggtgtgcaatgcctcagatttctttcagcttgcacccctgatctcggtctgagcacatggtgaagctctacggaaagtt

SEQ ID NO: 133405 - DNA, 560 bp, Homo sapiens
tgctcctcgggagcagaactgtgcctttgtcacatctgtgtccccagcacctagcacagtatcttacacatagtacacaaccagtaaatgtgttaaaggaataagtgagagagtgaataaaatgcaagcttatgtgtgtgcaggacacacaacataatgaattttgaaggagcaggtattgagtatccatcctcaccactgctcttagtgcggactctggaagatgccatagaacatgctggaagaggccacacagaccattatataggagaggaaactgagatcttgggtgcttcagaaactccccatttcacacatggaattagtagcaaagtctagaatttaagggtcttaggactcagtcctgtgtccactctactttcctagttagaatcctaagcaattgtatttcgctaacaattcagggaaaagggcaaaaagaaagctggagggttttacaaccaagtagagcagttgagcaccatttcctacatcaaattgcttcttccccaaaaagcaggcctcttaaatgccaggagttacatttgctgatattctaa

SEQ ID NO: 133406 - DNA, 513 bp, Homo sapiens
  misc_feature (23)..(24): n is a, c, g, or t
  misc_feature (35)..(35): n is a, c, g, or t
  misc_feature (37)..(37): n is a, c, g, or t
  misc_feature (170)..(170): n is a, c, g, or t
ttggcttggagaagggtgcactnngttcccaggcngnaatgcagggcacaaactcagctcactgaagcctcaaactgccgggctcaagcaaacctcccaccccagcctcccaagtagccgggaccacaggcgcacaccaccacacccagccaatcttttaaaattctttngtagaggcagagtcttatcatgttgcacaggccggtctcaaactcctgggctcaatcctcccgcctcggcctcccaaagtgcaaggattacaggtgtgagctagtgatcctggcttgcagctttaaacagtatagccagggaagacctcactgaggaggtgacctcggatcagggtttgagggagccgagggagtgtttacccaggaaagtccccgtttagcattgacactgtggactgaaaataccatgtccccaaaaacccttcagtcctgggtaaactgggatggctggccaccctaagagtgggtcatgtggctctcttaggaaaaggcactccaggca

SEQ ID NO: 133407 - DNA, 129 bp, Homo sapiens
taacatattataaatattttcctactgtgtgtcatgtgagctccagtgtttttaccaattcacacatgtagagaggaaccttccccccaccataaaccagtaaactagcaaaaatcagtagtctgtaat

SEQ ID NO: 133408 - DNA, 744 bp, Homo sapiens
taaaatttatactacttctcctataaatctcccctataaagattatttttattggtgggattacaggcatgagccaccatgcctggccaatgctgacaagttttaaaacatcagatgaaacagtgttcaaaatataattatttatgaaaataattgtcttttactattccagaacttaaaacagaatttgatagtaatttgaaaaaccagccaggtgtggtggctcacacctgtcatcccagcattttgggaggccgaggtgggtggatcacttgaggcctggagttcgagaccagcctggccaatgtggcgaaacccaaaaactaaaaatacaaaaaatgagctgggcacagctgtgtgaacctgtaattccagctactcaggaggctgaggcatgacaatcacttgaatatgggaagcagaggttgcagtgagccgagaatgcgccactgcactctagcctgggtgacactaagactctaaaaaaaaaaagaaaaaaagtaaagaaaaaactgtgctattcactggaactttgatttgggagaggaaataaggcttgcaggaaacagctatctttcggccaattctcaactgcctgtgtaagagcataatcacaacccactctcacacctgaatgctttctgcatgttttccttaaatttcccagcatacttgctggttctgagatgttcttgacattgcaaaagtccaggtcatggacatagtttacattctagttccaaa

SEQ ID NO: 133409 - DNA, 577 bp, Homo sapiens
caaagggatgccttccggtactactaactcaattcagttcattcatcatcagcatacatgtaattcatatatagcacaactgtcaagttacggaatataatgctgacaagttgtgttttttttttttttttttgagatggagtctcactctgtcacccgggctggagtgcagtggcgtgatctcggcttactgtaacctccacctcgaggattcaggaggctgaggcatgacaatcacttgaatatgggaagcagaggttgcagtgagccgagaatgcgccactgcactctagcctgggtgacactaagactctaaaaaaaaaaagaaaaaaagtaaagaaaaaactgtgctattcactggaactttgatttgggagaggaaataaggcttgcaggaaacagctatctttcggccaattctcaactgcctgtgtaagagcataatcacaacccactctcacacctgaatgctttctgcatgttttccttaaatttcccagcatacttgctggttctgagatgttcttgacattgcaaaagtccaggtcatggacatagtttacattctagttccaaa

SEQ ID NO: 133410 - DNA, 496 bp, Homo sapiens
ttctgcacaggggaggttgtttagatatccagacccgctggagacagtaaggagtaattttatattttatgctatcaggttaaactttgaattcataggtgagaaccttgtaaaaatttagagtactgagttagagaaagacccctatataaacacagtggattcataaacccagaaaatatcctctaatccctattgttgaattagaatttaaatatgggggagagccaagatggctgactagaaggagctagcgtgcactgctctcacggacagaagaaatagtggtgagtaaaccctagacctttaactggaacattcaggtggacacattgcgattcatcaaggaaacaacccacgaatgaaagagaggaatgagacaagacaaccacccacctgggatggcatagagccagaggaggcccccatacctcggaaaaatgatgagtgagtgacagtccccaggaacccacacttctaccatggacttttgcaa

SEQ ID NO: 133411 - DNA, 415 bp, Homo sapiens
ctgagtctctctgtggggggctgcagaccccgctctccactagggcctggctgacccatctcacctcttcaggtggccctctcaaccatttgctggccgcctagcacctggaaacatgcccttagacccttttccagttccctaactatggctcttgcatggtttctcatcgtttatatttcccaggcaaaaacaggacactaagcttctgtgtccccaaactgcggaaaacacacactgagttctaagtggtctccttgaggccctttttgacattcttcagatgaaggggagggggtagagagcacaccccaaggaaccctcccattttcactctgaccagtggagctttaacccttttgtaaccctcaattgcaacctggcatttggcaactgcctgttcttttttcccagc

SEQ ID NO: 133412 - DNA, 453 bp, Homo sapiens
tcctctgtgttcccatagagcctaccgctatctctatcaaagcactagttatattgctgtagttatttgtttacctcctgtattcccaactagactctcaacatctcaagggcaagaacgatgttgtacttacctttgaatttcctttaccaagaatagtacttggctcacagtaagtgcttaataaacatctgatgaataaatgaatgattgctctatctatcctgttggtggtagagaattaatccaaaaaatatattgctaatggtgcaatttcaggcatattacaggctggtaaaagagaaattttgaaaccaagagacctgccctacttctatcaatcatctcataaaagtatctacatgaaaggctgctcttgagctggtagctaatgttcctggaaaaactccctggcaggttacccagggagattagtttaaagggaggttgtta

SEQ ID NO: 133413 - DNA, 695 bp, Homo sapiens
gaggaggattgtctgagccaggcagttgaggctgcaatgagctgtgattgtgccaccgcactccagcctgggtgacagagtgagactctgtctcagaaacaaacaaacaaaaaaaagtggaggcagcaagggaaagttaaatagttttcatttcatttctattatgtagcacataaaaggtggatccagggctaaaatgcaccagtacctaaaggatctactcaattcaccaacctgggtagtgccacttctagttcaaaggttctcccaatcaagatatggaagaaacatgtccctctgtactatgtgtcaagcacagtttcatcatttcagactgcaaatgtttgagccaacaactgagcatcactgctgaaaagttctttctaggcagcaccttttttggtaagaaaaatctcagcagttcgtaagtgactttaacttgccatactgtattttaaagacgtatctgaacaattaaaaacactgtattgcaaattgaaatttctcttgcctagttgcaaattttattgccacaaatggggtccctaagaagcactgtcaactttattggcgacttgttgctccctgattgtgagtcatcctcaataaagtaattcagggatcatctcctcagtggaggaaaaaggaacacgggcagaaacaacacaatggggtgagaggaaaatcccagaagg

SEQ ID NO: 133414 - DNA, 245 bp, Homo sapiens
tttcctttgggctgtgttaagtttcagatgtttgttagactttgaggtataaacatgtagaccattgaagatgtgagtctggagttccggtatagattaggtctcaatattctatttgggggtcacacattttatctttaaagaattccatgtattttcagaataagaagttagtttgatagaataaagaacctgtggtaatttgattcgaatgatgaaaaaaatttaaatcaaactttcttttc

SEQ ID NO: 133415 - DNA, 231 bp, Homo sapiens
gactcgtattatctgtttaaaccacacagctaccctgtgatggcaatatctatcttaagtccttttttcacagatgaggaaattgaggctcagagagatgacatctcttgtccaaagtcgtagctaataaatagtaaactggaaaatggaggcgcagccccagggctgcctcccactaaagcccattctcgcaactctttcactgtcgactctgttgctttctctttccca

SEQ ID NO: 133416 - DNA, 459 bp, Homo sapiens
ctgacacaagtcaaaaaattcagatttagaaagggaaacaatggcttgtagttttaccgatttgtttccgatacataacaacgctgacgttctttaaccatcttctaagtttagttctcaagctctaggttagggtaccactaacgaagcttccaccttacccgtgaacagagctggtagcaactaaacggaaaacgctgtgaagactacatctacgtttagctacctaatgtccatgccgcaccgacctcctaaagggaattcttaataatgggagactgaaatatccagggagggtgaggtagtagaaaactgtttagactgtcaaaaatctggcattggctaatcctgcctgttactccgggcctcggtttccccatctacaaaactgatgtaaggtagggggattgacttaaacaatttctaaagtccttatggctatagtaatccagaaactca

SEQ ID NO: 133417 - DNA, 328 bp, Homo sapiens
tttctcttacgaaattagcccccccatttatagtaacagtagtcgttagcaactaaacggaaaacgctgtgaagactacatctacgtttagctacctaatgtccatgccgcaccgacctcctaaagggaattcttaataatgggagactgaaatatccagggagggtgaggtagtagaaaactgtttagactgtcaaaaatctggcattggctaatcctgcctgttactccgggcctcggtttccccatctacaaaactgatgtaaggtagggggattgacttaaacaatttctaaagtccttatggctatagtaatccagaaactca

SEQ ID NO: 133418 - DNA, 188 bp, Homo sapiens
gctaatgggagctgggagaaggagtaatgaattcaacattataaggagcttggtgttaaaatcagttcagatacatagtgtgagtatggcactgggacacagggataggacatgcttaaatgggcagatgcatggtgatgactctgtgagtcttagggatgaataattcccaggaggaggcccatgat

SEQ ID NO: 133419 - DNA, 706 bp, Homo sapiens
atttcattttggttgttgaaacatgtacatatattacctattcaaaaagttaaattaaggtcaggtgcagtggctcatgcccgtaatcccagtactttgggaggttgaggtaggaggatcactttaccccaggagttggagaccagcctgggcaatatagtgagacctcctttctacaaaaagtttacaggtgtgagccactgcacccaacccaacgctatcctttctatgtaactcactagaggacagccccagggagtggaccagcaaagaccgcatgagccataccccagtgacacaggctcccaaacccggccatgtatcacaatcagaatctggggggagtacggtcagggatctgtgtcttttaaagtcctccaggtaattcagtcagttactgacctgtccttgtcaatgcttcccagtgaagagagtacaggctacatgtcccaggtacatatcccttccctttagacagcagtcatcactgacgtcttctgagtaccagtgctgtgccagacactgaggcattctacgtgttactgtaaggcaaacagcatcccggcagggcaggcctcgccaatgtgctcactgagctcggtgtcctctggagtgactgacttattcaatgtcatattgctggtaaatgtcagaactaggatctgaatgcagtcataaactccctgagcctctgttttcttctctg

SEQ ID NO: 133420 - DNA, 1911 bp, Homo sapiens
gataaatatctccaggttgaggaagaaggttgcacatatcgggtgctcaataaatatttgtcgaatgaatgaatgagtgaatggccccagtgtgtggggcttgggaagtgattggatataggcagagaaaaggaacaagtcaaaaataattcagaaatcaagaacaagcaagttgccttgatatacttcattcctacacttggcaaactttagtgattaaggaaacaatgttttaaaaaaagttttggtgatgagacattcaggaagatctatcaataaatagcaaacctggtcctttttaagacactgtgtataaaaaaattccaaaaagattaaaatcagtgcagaaaccaaagaaccatttttttctatatcatattgatcatttcaagtggaactgttagctatcttagaaaaattgtggttctcaattggttttgcctctatctctgaaccaccattcctaaaggaaaacattcaaccagaaaatttcagcacatcacaatctctctgaagattaagaagtctctgtgaaggactgaatgtataaattgaaaaatttttgctgtcacatttaggtaaaagagaaatcgttcttcatatccccttcctttccatctgtagctcacctatgtcaactttcctctcagaagtgaaataaaattaaagctatgacactgagtgtcagtcatggagggacacgttccccacttagcctttgctgaagtgtttccagagacaactgtctaatgccaggtccccacttagtgggctgcacttttctactcatttgcacataatccagaagtcacattttgggttcacagtttccactggggtaacctcattaggcctggccacctctgtgcttcttgtgaagtctctgatttgaaggattagtatcctttccagactgtgtgggttgactttcacccatctggagttgcttggaacaaagataactacctcaactccttgtcatgaaagcaaaaaaaaaatagcattagagttctgagaacaggatgtcattacgggttgtgccttgtcagctacaggtaagatatttgagtggctcctcaagcctccccaactccctctccaacctcgctacacagtcttcccaggtctggtatttgacctccagactgccgcccagaaagcaactcagagctcagcaacaccatgatgatgaaacacaaatatgtgggcccccaactttggagactccactggttgcttttgtgcagctctttctatatatgactttcaaaatggcagccaaccctctcaactgttggttgatctgaatatgtaaagttcagccttcaaacccagcaaacagtcagctataggatagagttcaggtgctggggaatgaccacggttggctgctacgttgggaaccctggtgacatcatatatggacctgggaatgtaaagaaacgtaggaaatctgaatttatgacttttctaatctctctatcgggatccttttttggaatcaagatgattttccttctaaaaggtcattttattacagtaatgggcagggtagacatacctcactagcgtactctcaaaatttcttgcatgcatatgctttctccggcatgcatatgctttctactacaatgtgaacaagcctacgaaagctagcctaatggaggatgagagaccacgtggaggagagctgaagtgccccagccagcagctagcctacacccacagctattttgcttgtgttccactcgtcctatttgcataatattgttctttaagttaacccattcttaatttattgttttaatcttaagcaataatattcaagaactaatgagttttgtgtattcattatatttttccataatatatattatactaataaatgcccattcaaattttagtttgagt

SEQ ID NO: 133421 - DNA, 1005 bp, Homo sapiens
aggaggttgaggctgcagtgagctgtgatcatgccactgcactccagcctgggcaatagcatgagaccttgtctcaaaaaacaaacaaaaagaaaacacattccacttttggatgcacatgggcagcagtcgaaggcgggcagcagtcgaaggcaagcagcagtggttgtgtgtgcctcagaaaaaaatgtagcccttagaactgcccagcaccttgccaggcacagtggctcatgcctgaactttgtgaggccaaggcgggtggattgcctgagcccaggagtttgagacaagcctgggcaacatggtgaaaccccatctctactaaaatacaaaaaagtatctgggccttgctgcgtgcacctataatcccagctactcctgatgctgaggccagagaatcgcttgaaaccaggaggcagaggttgcatgaaaccaggaggcagaggttgcagcgagccaagatcgtaccacagcactccagcctgggtgccagagtgagagtctgtctccaaaacaaacaaacaaaatttgcccaggcagggcttaagagtattggtagaaatgcagtttgaggctgggcgtggtggcttacgcctgtaatcccagcactttgggaggccaaagtgggccagactacctgggtcgggagttcaagaccatcctggccaacatggtgaaaccctgtctctacttaaataccaaaattagccatcaatggtgggcgcctgtaatcccagctactcaggggctgaggcaggagactcgcttgaaacccggaggcagaggctgcagtgagccgagatcatgccactgcactccagcctgggcgacagagcaagactccgtctccaaaaaaaaaaaaaaagagaaaagaaaaaagaaatgcagtttgaaactttacatctgtcctgccaagtagaaaattccttgagttgaacaggctatagagatggtggcactgggccgggtgcgatctcagctcacaatcactagtgaattcgc

SEQ ID NO: 133422 - DNA, 419 bp, Homo sapiens
tgaagtgactaaatctagctaattaacatatgcagtacctcaatccttatcctttcctgtggtgagaatacttgaaatgtactctgttagcaatattccagaatacaatccactgttactaactttagtcactgtgttgtacaatagatcttttgaacttcttcctcctatttgagtgaaattttgtatcctttaaccaacatctccccagcaccccatctccatcccaacctctggtaattgctgctctagtcttttgatttgaaataatttccctgaggtctttaacttgagaagatggagttttaaaaacaataatgcttatattacttttgttttgtttgttattttacatattgcaatatagtgtttgttgcaaatataaatgagtatactgtaataaaaattcttcacctctc

SEQ ID NO: 133423 - DNA, 522 bp, Homo sapiens
tactaaattgataaagattttttaaaattttaatagaactaaagagaaaatatttctatatactgatgttaggagtatgcagtttaggccaggcatggaggctcacacctataatcccacccagcactttgggaggccaaggtgtgtggacacttgaggtcaggagttcgagaccagcctgaccaacatggtgaaaccctgtctctactaaaaatgcaaaattacctgagtatggtggtgcacacttgtaatcccaactacttaaggaggctgaggcaggagaatcacttgaacccgggaggtggaggctgcagtgagccaagatcgcgccattgcattccagcttgggcgacaagagcgaaactctgtctcaaaaaaaaaaaaaaaataggattaaatttaaccatgagcaaggcttaactatcagaataaatgttttgataaagaaaagtgactgaaaaacattacagaatctaagcaaaatgtcattaagggagccaccatccagtaacacaaatggga

SEQ ID NO: 133424 - DNA, 373 bp, Homo sapiens
cgaaatattggccatggctgttccttggggaaaaaccaccgccaagcaaacccaaaaaatggccaatcgctggttcctcggaggaaatatcttaaaatctcagcagcttaaccagtaaatgtttatttcctatcacctctctatctgattctggcagagagggctcctccatctgaaacgcatggcctccatgagactgaagcaagatctccctggccagagcccagtcacatggccccaacttggggggctgaggaactcagaggagtgcacgatgtttggagagcacttgctttctctgccacagtgattcaccatatgctcatcaatattgattgagcaactattacataaattggatgctttttggtag

SEQ ID NO: 133425 - DNA, 312 bp, Homo sapiens
atatttccaccgaggccacctgtggcttctgggtaccctattggacagcatagatagagaatatttccatcattccagaaggttctatgggacggcactggtctagacagagcatggtgactgggtgggggatgctgcccagagatcctacctggctgtaaatccaggcctgaggtcatgcccacagcagggccctccacacagcctcagtcaagtccctcctcccctctttgggattccgccagatctccctcctggcacagccagccccttcctccccactgtttcacgaggccactcctggggttctct

SEQ ID NO: 133426 - DNA, 661 bp, Homo sapiens
tggcaacccgctagggtccccttccacagtgtggaagctttgttcttttgcactttgcaataaatcttgctactgctcactctttgggtccacgctgcttttatgagctgtaacactcaccgcgaagatctgcagcttcactcttgagaccacgagcccagcgggaggaatgaataactccagacgcgctgccttaagagctgtaacactcactgcaaaggtctgcagcttcactcctgagccagcgagaccacgaacccaccagaaggaaaaaactccgaacacatctgaacatcagaagggacagactccagacgtgccaacttaagagctgtaacactcaccgcgagagtccgcggcttcattcttgaagtcagtgagaccaagaacccaccaattctggacacaaagtcactagagtcaatccagttattgggcaagaaagatttcaaaagctctggtaggggacagggagtctattaataaatggcagtctccatagccggcacttttatatttttgcaacaaatctgtaaaatatttatttttctcctgactttgaggaaagtaaggctcacaaaagttatgggacttgtgtctgatcatacagctagtggcaggagaatgaaattcaagttcaaaggcatttactatggtagat

SEQ ID NO: 133427 - DNA, 1132 bp, Homo sapiens
ctttaagtctaaaaacgtctgtttccatggagagcattttaaaatgtggtgtctgcatttctgcctcctccttttggtttctaattgctcatcgatgcaggaattgattctggttatcggaaatgcgaagcacagaaggacgcagggtaggaactggagctcctcccttttccttccctctgcccctgaattctcctgctgtctcgggaggttcgtagctgagtgtggggtccagtctctccctgtgcgtctgacatcacccccacagcgcttttgaatctgagagctgtagggttccgtggtgctctcagtctcgtggtttgctttcttctcccaacggtgtatcccgggggtctctgggccagcgtgtgatgaggagtagcacttgagtgcctgtatatggggtgggttctgcctttcccacttcacaggtgaggacgctgagcacagatgggcaacgtcacctgcgccgggtgccagctccgcttggagcccgccctctgcgtcacctgctgtgtctgtcgagctccttccagtggcggcagcgtgctccacagtggagtttgaagttcaggggtacaagaagaaaactcccccgcctcccctgaccagggccagcctcttccaggcaggcctgtaggtggctggctttcgctgtttcacatggggctgcaggccctgagcacatgtgtgggagggggcggggcctctggggtctccctggcctcccaggctgagcggtcaggcaggcgtgaaggggcctgggctaatgctgcccacactgtcctcccagccagaggcaccggtggcctttctgcctctttcctgtttgattcctgcctctctctgaggctcagagaggtgcagcagcccgtccagggtcacacagtgagccagtgctgagccgcttcagcatccaggagtcctctgactcctggtcagaggttttcagcccacatggtgctgttttacctaagccttaaaaaaaaagtttttcttttgatgacaaagccaaggtgatatatgcagattacaaggaattgaaatcctctccatgataagcaatgtttgtcctgccaaaacagttctctgtgtgcgtgagtctgagtgtgcatgtgagtgtgtatgtgta

SEQ ID NO: 133428 - DNA, 484 bp, Homo sapiens
aggatgcaaagtccctggaagaccctcttgtaggtggagatattcaatagattggttcaatgacagtcttgctgtgactgcaggtattggggacagcaccctgcttctaggaagaccagggcaggaaatatctagaacagctgtattaatagatgtgcaaggcagagcatcacctctctctctagcagaagtccctcagctgctcttccctggacccagggagagaagactttggtatgtgaaggtggaaggtgagaaggtggtatgaggaatggagaacaggttgcatggctcccctcgacctctcacactttccagaagaagaggacatatctataacaggctcacagtagatacaggcattttctcgtcagtcctgccccatgtctttccagccataaggatgtctcagaatggcttggggcttctagtccagagcctacgatctagagcacctgctctgggtcatccctgtccttccacc

SEQ ID NO: 133429 - DNA, 460 bp, Homo sapiens
ttctccacagggcttaacaaaagctacaatggacaagttgttaaacctcataatctttgggaaaactttgatagactactttattttctataaatagaacaaaagagaaatatttagcaaatatcaaatgttctttattttgaccccttccctacctcccagccattggattttatctaaaaatgtttaataaaatgctttgttcagtcctatttcttctttttccacctataatcaataagactgttgcccatgtatttctggagctagaaggaaaaggacctcttgtgtaaggggtgttttgtactaaatgaatattattgttttttcttggcagagtcaatttgggtattgccccaactactctgatgaataatttgtagagtgatacaactggattttgttgcaacacctactgagagttacccctattttaatttgcgtgggaatgatgccacag

SEQ ID NO: 133430 - DNA, 381 bp, Homo sapiens
ccgggctctgccatccccagcatgtcactctcccctccgagtgctggggctgaaggtaaagagaggacttccagttcaaattcgatcacgtggtacgcaggcgcaacaggcagactgatgctcgtgaccttgtcggaggactgaatccggagcgcggcctcacgtgacagaagggcaagggagcttttgtaggcccttcttctaagggcactaatcccattcatgggggctccaccctcatgacctcatgacctcccaaaggccccacctcctaacaccattatcttggggttagggtttcaacatatgaatttgaggggacacagccattccatctgtgaccgtcctcaatcagccttctccctgcagggctgcaaatga

SEQ ID NO: 133431 - DNA, 391 bp, Homo sapiens
ctcttcccttttatacaggaaggtccctcaggtatctgaagacagttttatccctccttctgcctcaaggactctccaggccaacaagttgtgtctcactagcaggtcctcctcagtgaacccttcaccatcccatggttctttctcgtatttttgaatgtggagaatcagagctttgaaccctcctgtgtactcttccaccagcaacccatgccttgcactttctccttcagggtctgtcttactgcacagggctcctgattccctagactcaggtcttggtaggccagagtctaggttttggctgagactccttctaagacctcattagggacattcagttcactgacggacaccaatccttccaacctagatgttctgggctggcttc

SEQ ID NO: 133432 - DNA, 459 bp, Homo sapiens
ggctggagtgtgcccaagggggacttgatcttattctgggtgttttagcccaagcagaaatcaatgcagggttttctgccacctgcttattttgtttccagtcaagcaaaacaaggggcttatctccctcacagatcagcatatgagatatgcttcagatatgtttgcctgtcagactcataaacacaacaagatatgccagctgcaatgaagagaagccctgtttcagttcgtggattacagactgcaacatccatcagcatcaagacaaacaccttcaaactactgtccttggcgtccagcctaacagatctgaggaatgtgataaaggaacactggattcccaaggtctgctcaggtttccttccataacaagaagtagccaaatacagctgaacaggcctggtaagtaaaggagaagcctccttccttgaaacactttgctgtattctcaagaac

SEQ ID NO: 133433 - DNA, 357 bp, Homo sapiens
ttgcttccttaagacagataatatgccttatattttaaacttatatgtgtgtgtttattcaataattctaaatctcaggtcatatttaccctctccatgaaaatgtctgctaattttaaaaattagctgattttttacagttgtaaaaaatataatggtactatctatgagactgcgtttagtcaaaatgtgaagagttcatgcccatgcttgaataagtctagggaattggtaattttatcaacattttattttttaattgtggtgatgaataatgaattgtcaaccctggaaactttatagtagctaaagggccatcaatattgctggatgcaaagttaaaccaacttttacaga

SEQ ID NO: 133434 - DNA, 484 bp, Homo sapiens
ggcaatgccacagccatctgctcagacaagacaggcacgctgaccaccaatcgcatgacagtggtacaggcctatgtcggcgacgtccactataaagagatccccgaccccagctccatcaacaccaagaccatggagctgctgatcaatgccatcgccatcaacagcgcctacaccaccaagattctgcccccagagaaggagggcgccctgcctcggcaggtgggcaacaagacggagtgcggcctgctgggcttcgtgctggacctgaagcaggactacgagcccgtgcgcagccagatgccagaggagaagttgtacaaagtgtacaccttcaactccgtgcgcaagtccatgagcactgtcatcaagctgcccgacgagagcttccgcatgtacagcaagggggcttctgagatcgtgctcaagaagtgctgcaaaatcctcaatggggcgggagagcctcgtgtcttccggccccgcg

SEQ ID NO: 133435 - DNA, 345 bp, Homo sapiens
agagcagtcctgtgatgtgactcagtttccagggcttaacttttcccattggcataatgaattggggagctcctgaaattttattttattttcacaattttgatttgcattcaaaccaaatcaaatgtgcattcagggaggttttgaagtgacttgcccaagatcatctggtcagtgtggcagggatgggagaggagcccaggtcagactgactcccaagtcagcactcagggaggtaaagcacccacccaaatttgcagagctagggactggggaagcctgcgacaaaactcctatcttctgtctccagaccttctggtactgtgtttccccaagagaaaggat

SEQ ID NO: 133436 - DNA, 594 bp, Homo sapiens
ttcttgaagataacgtgaaccccaatatggcatcatcctcttctacctatccatagaacctccttgattctacttctttgttttgtctttgcagctttagtcaacagaggctgttcccacagttcctcatccttccctcagttatctatttctgtagctctgggtcctgaattacagcattttctaaccctttgatttggctctcttctgctctgaaaagcattggctctttcacagttactgtacagtatccccactgtggcattttctgactcccatgctgggccatctcatcccccatcaacaaatcaccttgctaccacatggccttttggtaactgacttttatgtagaataacatacatgtagaatgtgtgagagaacaatgcaggcaggagcctggctttgctctgcactgaatatttagcactagcatagttctctgctgtacaaataggaagtcaataatacttgttgaattaataaatatttatacagtgcaatttaattaattccaagtttggcatcttctaaaattcacataggaattttcaatgtggccaaaagccccacatttcatagcaaaatcatgac

SEQ ID NO: 133437 - DNA, 201 bp, Homo sapiens
tgatgggtgtgtggtgctgtctcatcgtggctctactgtgcagtgttgagcatcttttctcatcgtggctccagggtgtgatgtcgagcacctcttcacgtgctcattgccatcagcgtatcctcctgatgaaatgagtattcttgcctttcagccgtttcctaataggactgtttgttttttaatgttgagttttgagag

SEQ ID NO: 133438 - DNA, 223 bp, Homo sapiens
ttgtctacaggaggcatcttcctccttgtgaccttggtgacagtctgtgcctgctggaaaccctccaaaaggaaacagaagaagctagaaaagcaaaactccctggaatacatggatcagaatgatgaccgcctgaaaccagaagcagacaccctccctcgaagtggtgagcaggaacggaagaaccccatggcactctatatcctgaaggacaaggtgagcg

SEQ ID NO: 133439 - DNA, 353 bp, Homo sapiens
gctcttcacagagtccaactgcagcttagagctgcagaggctgcaaggggtggtggaaagaccactggactagaatgaggatatctgagttctaatttccagtctgtaaaccaagaggttggataactttacctctcaaggtctttccagctgcaaaattccttaagatacaaaacaaaactgttaactgctgctgagcatgacagaggtgagacatgaacctcccaggggaggcgaggcatcacaagcgccatcctgaggtcagtccaacacatttaacttatttcaccccataatgctgcaaattctgcttagttcctgtatttcttcagggacaaggagaaaaacattct

SEQ ID NO: 133440 - DNA, 666 bp, Homo sapiens
aggaagcatggcagagtctgcttctggggaggcctcaggaagcatccaatgatggcggaaggagaagggggagcagcatttcacttggctagagaaaggggaggtgccacacacttttaaatgacctgatctcatgagaactcacttactatcatgagaactgctccaaggggaaaatccgcccccatgatccaatcacctcccaccaggcccaacctccaacattggggattaaaatttgacatgagatttgggtgggaacacagatccaaaccatatcactgatgtttaaagaacattttcagatattcttctaaatgccttacttttaatcctcacaataaccctatgaggtacttttacttatatctgggatttttttttttttttttttttttttggagatagagtctcgctcatcacccaggctggagtgcagtggtgcaatcttggctcactgcaagctctgcctcctgggttcacgccattctgcctcagcctcctgagtagctgggactacaggcgcccgccaccacgcccggctaattttttgtatttttagtagagacggggtttcactgtgttagccacgatggtctcgatctcctgacctcgtgtccgcccgccttggcctcccaaagtgctgggattacaggcttgagccac

SEQ ID NO: 133441 - DNA, 407 bp, Homo sapiens
cagggatgagcagcagccgaggggttttaaacactgagcggctcagtcagatagacttttccataggtgcctggcaacagtatgggaggcagagaggccggtagaggctgttgtggtcttccaggaggaattgtgctggtggtggggaagcacctttggtgactggcagtgccggccattgcaaggtctcagcctcaggcagcttttggtctagtaagtgctcctttcccaatcactgaccacgtgccgacccctacattggttaacactgaatctgcacagcagccctgggagtacctgtagccacctgacagactctagaacagtgctacccaacagaaatatagtgtgagccacttatggagtttaaaattttccaggcaccagagttcgaaagctataaaaag

SEQ ID NO: 133442 - DNA, 925 bp, Homo sapiens
caataagaaaacaatacaaagagatacactaaagaacactataaataaatcaatatggaaggcaggagaaagaaaatagaaaatgaaaaggagaaataacaaacagaaaacaagaaataaagtagcaaatataattatatttaatgtagattgtctaaatatacaactttggcagagtggatcaaaaagcatgacccagctatatactgtctataagaagcttatttacaatataatgataaaggcagattgaaagtaaaaggatggaaaaagatgtataatacaagcattaatcacgacgaaataggaaaagctctattatatcagataaagtagactgcaaagaaaagaaagttaccacagacagaaaaggacattatataatgataaatgggtcagtacaccaaaaggacatagcactcctaaaatgtgtttgcactaagtaacagagcagcaaagtatgtgaatcaagatctgatagaactgaaaggagaaatatgcaaattcacaattacagacgtcaacatccctctctcaacaactgatagtacaactagccagaaaatcagcaaggatatagaaaagctcaacaatatcatcaaccaacagggtctaatcaacgtgtatagaatactctactcaacaagagcagaatatacctcaagaatttagaaaaatgggtcctggtagtggctatgagaaaaaaaatatagaaaaagaaaagcaaaataaacccaaaccaagcaaaaggagatgcgtaataaagataagagcagaaatcaatgaaattgaaaacagcaaaacaatagagaaaatcaatgaaacacagagcttgctctttgaaatcatcaataaaattgacaaatctctatcaagattggcaaagaaagaaaaagataaaattaccaatatcagaaatgaaata

SEQ ID NO: 133443 - DNA, 388 bp, Homo sapiens
agggaaagaaattttgatgactttcctcatgtaaaaagggctatgatgccacctggagtggcagcttctcttactgcatcttctggtgcagggacagtggggtctgaaggagatggccatcccctctcccggaaccccatgcctccctcacccaagcacgcagccagcatagccctgagctggtgaccctacccctgctgcccagggagagagcgacttccatcagagatgaagacagcagtgaagagagtgaccaagagccaagggtgctggggaaagctgggcaaggagggggctgccccgtccctcccagccacacgctcacgtgcagagagatgcatattgtactccagagccccttgagcaggcaccccaacgacaccgcagc

SEQ ID NO: 133444 - DNA, 295 bp, Homo sapiens
agggactgttccctgaaggatagtagagctgatgtgaggattaaacaagctattgcatgtaaagtgctcaatacgatgcctaccctactcgaagtcccaatgcatatgagctattaagaatgagatactggccgggcatggtggctcacgcctataatcccaacactttgggaagccgaggcagttggatcacttggggtcaggagttcgagaccagcttggccaacatggggaaaccccgtctctactaaaaatacaaaaaaattagccgggcatggtggtgcatgcctggact

SEQ ID NO: 133445 - DNA, 646 bp, Homo sapiens
atcactatcaactcttgcccaattattgtgaccacctgtctcatcttacctggcttttcctggacaatctgcttctctcatgactagctatatcattctcctactccttcagcttgataaaaaaggacttgctgcttcttgctccccaggaccactccctgttatcctatcactaaaaaatcgcttgggagtcacattactcactgaaaccattccttctgcaacatctaccaacctccagaacaccctcctatttcccctacccaataacttcaattctgcttgctcccaaattcagccattattctcaatgacttcaacaaagatgctcaagaactttctacaccctgaccttcaaaaactcctaagaccttcatctgcacttcagctagccacaaagaaacaaaacagagccatcaactgaaaagtgctaggccgggtgtggtggctcacgtctgtaatcccaacactttaggaggccaaagcaggtggatcacttgaggtcaggagttcgacaccagccctggccaacatggtgaaaccctgtctcctttaaaaatacagaaaattagccggacatggcggctcatgccttaatcccagctacttgggtggttgaggcaggagaatcacttgaacctgggag

SEQ ID NO: 133446 - DNA, 761 bp, Homo sapiens
gaacgccataatagtctggcttttaattttgcctctaagaaatcagttattttatttctttttgttttttgggccataagtgataatcatttcactctcagagttgttctttaggaagacttctctaatagcagagtgatgggtgaatttaaagtaggcagttggtggtagagaaagattctgtcagttaggaggagactgtgatgttacttttcctgtgatatgatgagtacttttttacctgaagagtagcaaaggaggagcttaagtttcactttaaactcagtataaaaattagatttcctctctgcaacatttagagattattgaatagtaggttaacaaatgtctttgagtggctgctgtgtgaagagcagtaactacagtagatgctagggctacatagaaacacagcaatggtggccatgtgtggttgttcatgcctgtaatccaagcacattgggaggccgaggcaggcggatcgcttgagctcaggagtttgagaccagccttggcaacatggcaaaaccctgcctctacaaaaaaatacaaaaattactcaggcgtcttggcatgcgcctgtagtcccagctatttgggaggcggaggcaggagaatcacttgagctggggaggcagaggttgcagtgagccaagatgacgtcactacactccagctgggttacagggcaagactttgtctcaattaccaacaacccacaacaccaaacacttttttggcgccctctgcccctaaaaaat

SEQ ID NO: 133447 - DNA, 120 bp, Homo sapiens
ctgtcctgttaccgcacattataaatacaaggcagaactagtgacatgatctgaatttgtatttccatccaaatctcgtgctgaaatataatccccaatgttgcaggaagggctggatgg

SEQ ID NO: 133448 - DNA, 263 bp, Homo sapiens
caaaactcaaaactaaaactaaagaatcctccgggatccataatggaaaggcagaataagaaacctggtatgtttcaggctatcggatgattttttagtgcaagaacgaacgttttaaaaggtgcccgagcagagattacagacagcctcgattaatgacacaggatcactcagcatttgagctggatgaattgtccttagtgatccttgaattgtgtcccttattttacagataatggattagaggcccaggaactcaaaat

SEQ ID NO: 133449 - DNA, 682 bp, Homo sapiens
caacagataaatgaaacaaaaagctgattctttgaaaagataaataaaatcaacagaccattctattgattgggaagatccaaataagctcaattataaaacgggagatattacaactgacaccacagaaatacaaaagatcattcaagggtactatgaacacctttacgttcataaactagaaaacctagaggagatggataaatttctgaaaagatacaaccctcctagcttaaatcaggaagaattaggaagcctgaacagaccaataacaagcagtgagatttaatgataatttaaaaattatcaacaacaacaaaaaaaaatccaggaccagacagtttcacagctgaattctatcagacattcaaagaagaattggtaccaattctactgacactattccacgagatagagaaagagggaatcctccctaaatcattctatgaagccagtatcaccctaataccaaaaccaggaaagaacataaaaaaaaaagaaaacagaaaaaaaaacgatgtgtggggcgcgctgggggccccgcgagaaaaaagtttttaaaaaccattgcggttgggggccgcggggcccacataggttaggtggacccgggggccaaaaagcgggtgccaaaggagaacaccgggccaggaacaggggcctggattcccccccaatagag

SEQ ID NO: 133450 - DNA, 211 bp, Homo sapiens
gggaggtgggagatgctttcctagtatcccaatgagcttctatgaccttgtgatagtagtaaggtcgtcccttcatatcttcaggggattggttccaggagttttggggatactgaaatctggatgcccaagtcccttgtataacatggagtagtattggtgtgtaacctacacacatcgtcttgtatacagtctgtacagtcacacgcag

SEQ ID NO: 133451 - DNA, 277 bp, Homo sapiens
cctgtgtcctgaatggtattgcctaggttttcttctcgggtttttatggttttgggtctaacatttaagtctttaaagatatatatgttcttaaaaaggcataatgccttacatttttggtccattgatttttgacatgggtgtcaggcaattcaatggagaaagaagagtcattccaatcaatggttttggaatgactaggtatccacatataaaagaattaaggtggacacctgcctcataccatacacaaaaattactgcaaaatgaatcacag

SEQ ID NO: 133452 - DNA, 211 bp, Homo sapiens
gctgaatggtcgctgagacagagatggaagccaggacaagggagcccaccgggcccagataggtacagagagcagaggctcctgttctgtcctcgccacccacgagggtgacactgcttgtaaatggtggctgtgctctcccagcaagtaaaaagcacaactaaatccacactgcacacagacgcagacagaaagccttcaagtagctctg

SEQ ID NO: 133453 - DNA, 669 bp, Homo sapiens
tggccttccttagctcttgtacccatatatcatactagtcaacatctatcttgcttactgtctgccccctcccacatcagaatttgagctcctaagggttttgaaagagtctctgctggttttattcccagctctatccccagcacccggcatggtgtctggcacaaagtaggagtatactacttttgtcaaagacataaataaaggtcaagttgaagtcaactccatctgtggtcagggctgccctgccctcaccttctgtttcactgaatgtgtttcctcccctctcacccatctggtatgcattgccacacaggggccagtgagttcttaccagcagcctgcaccagatgtacacgggtggcatctctctccagcaataggccccatgccctgaagaagcttacaacctacagtgtactaatatttgcaatctgctggtatttttaacatgggtttacagagtataaaccccagggaaggccacagaccctggcttccagtaatctgagagcagtttccagcacctcataccctgaatggaaccagcccaagggccctcaacttcacacagaagatgtgggagcaggcctcagccattccaaagaggcttttcctcagtacctactaggcctaaacacaaccaccccaatcagctctggcagggca

SEQ ID NO: 133454 - DNA, 541 bp, Homo sapiens
ggcacctgatggcagttttcccaatattgcgaaattaagtttgattattttgttaaggtagtgtccaccagatctctccattttaaagacatccttttctctaattactcagtggactgtagagtgatgctttgaaactgaataactaacactccctaactcagtgatttagcacccgttgattttttttttttgcctgaatcaaatattattatagtagttttaaatggtgattttccatttctattcttttgttagctgccattcttctataattttgtctttatattttactgggtgttaagattgctattccagctttcctttgtcttttacaccttttcccattcttttatttttttccatccctttttgtcctgttttccaatagatggatagaattttctttctctggtttaaaggttatacatttgtgtgtgtgtgtgtattcttagccatttgcccttaaaacatagagatggttattcctgttgattaaaaaaaactcagtaatgttactatcttctctttaataagatag

SEQ ID NO: 133455 - DNA, 596 bp, Homo sapiens
gaattatattaaggctataatttaaagctagtgctgtatcttcaggagactaaagaaattagcttgataaaacactatacagtaagtcatttaggctttttctttgctgggacaaggaagtgtttcacatgaccataagtttttataagggtgctttaggataaaatggcactatggggaaaccaataggcatgatgaaatggcgctgaatattttattctttctatgtggtgaatttctagtgctagattacataacggaaggcattaatgtacctgacaaattttctggaaaattatcatttatcctaattggagtgagtacacagaaaaatagaccacgatggaaaggaccagacagacctatccgttgaaacaaggtttgtgtccaggagttactcagctgtgagcagtgaacattgaaaaaaaatcacttcaggggaaaggatccaactgaactgggtacagtgaagtgagttggtccaggtttctgaatcttccattttgatccagctaggaatggaacagacaatgaagggaagtccaacaaacatgaacctatctaaagtccaatgatcaaaggaatttgtaggaagc

SEQ ID NO: 133456 - DNA, 484 bp, Homo sapiens
ctaggccagagaatgtatattattattttattcctgaaaaacatatcctaaaataaagggtgcacatgtagacattttaaataatacagaatgaatacctacataggcactgcccaccctaagaaagacagcataagcaattgaaacactcttaacctctaattcaatggctgtcacctgggggcaatttttctccccccaggggagcttgccaagtctgcagacagcctgggttgtcatcacagggaggggccaccactggcatctggtgggtggaggccagggccgctgctcaacaaccttcgagtccagaatgccccattggcctcaggtgtcaccagggccttccctctgcatgctgttcccccaggagatcatcacaatctcacgagactctcgtgttaaccatcccttgcccttcctcatggttctactgcacgtctgtgtctctaggtcacgtttggctttgcctgtgtttgaactt

SEQ ID NO: 133457 - DNA, 511 bp, Homo sapiens
ccaaatcaagatccaaactgactttatgtatgtatatatctctcaatgcaagcaatatcaaacttcattttctctacaaaaatgccaagttagtctctttataaaaagcagttacaatctgaagacattcatgttacttcctttgccagctccaactctgccttatttaaatctttgcatttcatgggaaacattaattctatctatggcagagccacttggtttgttagcagactgatttgctgtcatcagactgtgagatgattttttgtgtgcatcatttttttcttgaccagctttttgaaaattaagaaatggatagtcatgttttcttcaggttctcaagtattgtcagcatccgtaaatcccttccactctgggaaatactactgctccctgcttcccatggcttccacatcagtccaggactttttctacacaaattattctggctctgcctccttgaccttggtattcttagcattatttttcccatttttttgcaatggag

SEQ ID NO: 133458 - DNA, 465 bp, Homo sapiens
ctaaaataaccttctcttcaccattaaagcagaatcccaaattctagcttctatcaaaatcatgaaaatgatcagctccaaagtcacacatacagattctggaacaaagctaagggatggccgtctgtcatcatggaaaagcagctcctcagaaataagtgacattaactattgtctccaaaactaaatctatgcattggtttgaccagggatctcacccacaaatgctgcctagagcagaaactgactacttctgacatttcatatcctcctaatgaagaaggtacatataggtatgatgagcacaagaaaagctcagtggcagcaaagggttggaacttgaaaccatgtatctacctccacgaaatgaagtcagctacatagtcaaggcaatattcaccacttagcttcctaaataaaaatcctatataaatgctatgtgctcaataaaagctataactctcc

SEQ ID NO: 133459 - DNA, 459 bp, Homo sapiens
ctacagcaaccatcccttgaagactggggaaacttgtcttggctttgaccaaatggtagtacatgtctcattcctaaggatagacaacataaggttggattttaccataaatatatcactcatttcacaagaacagagttggggttgaggtgaatcttgatattgctctatgctacagaattgacatcaaagagataaattagtaataggttttagcacctaagaagaataagcacaatctccaggctgctcattgaatttggaagacataatgacaatgatatcactgaaaacactaggatatcattgacagaacttccagtaccgataaattcatagatttaatgatgagtcaggtgaaggttttcaaatgcagaggaggcaaaaaacaaagtataaatattagaaagtagattctgcaatgaaagaactaaggaaaattagtatggggatatagat

SEQ ID NO: 133460 - DNA, 153 bp, Homo sapiens
aggctgcatggtcattttgtctccattttcggtagaagctggcatcacagtagggattgtctgaatgactacctttggagaggtcgctgttgttggactagtgctggttattaatggtgcacctgcattaactgactgaactgccacagttga

SEQ ID NO: 133461 - DNA, 750 bp, Homo sapiens
gcctatgaattatgaggattttcctgctaactgatgagaacaagaactatttctgccctatgcaaacttcagggattattccttgtaatgcagtttctcaaccttagaattattgacatttatgggctggataattatttctggagtttaggggactgccctgtatatgaccaaatgtttaggagcatccctggcctcaatacagtagatggcagtaacatcctttaaattaagacaatcaaaaattgtctccagatattgccaatggctccaagggagtacaattgccctcagttaagagccactgctctaattctttctggtagttttcttatatgcatgccatggctaaggactttgctcaggactcaagggagacctcctacagatctcccaaattctgtatctgccaccctttcctcttctataggcttacctgagaatctagtcagttgacgtctctggattcccagctctgttttcccaactcaaggagacgactgagttttgcctgtgtttctttttccccatcacagcctggaaactctaggctgcaatgctggggcagtcataggctcacattgtttcctgtctctcagtgatctctgtcctttgttgcttgatacccagcatctttgaaaactatggtttcattatcctttatttttatttatttttagtttctagttttttcaggtggattcctgttaacctcatcttggtcctcatctttattcttgaaagatactt

SEQ ID NO: 133462 - DNA, 843 bp, Homo sapiens
gccacagcagaacgggatctctccgcgcatgtttaaggcctttgtaagcaagagccacccggaattctcctctaacaggcagcaagatgcccaggaattcttcttgcacctggtgaatctagtagagaggaaccgcatcggctcagaaaacccaagcgatgtttttcgttttttggtggaagaacgcattcagtgctgtcagacccggaaagtccgctacacggagagggtggattacctgatgcagttacctgtggccatggaggcggcaaccaacaaggatgaactgatcgcttatgaactaacgagaagggaagcagaagcaaacagaagaccccttcctgatgtgggtacgtgccaagataccatttagtgcctgccttcaggccttctcgtgaaccagaaaagtgtgatgatttctggagcagtgccctacaagcaaagtctgcgggtgtgaaaacatctcgctttgcttgattccctgaatacttggtagtgcagataaagaagttcactgttgggtctgtggactgggtttcccaaaagaattgatgttgctatgtgatatggccagaccttacttggattatcgacccatctccgagccaggggttttccagccagggagagggaagaactttccaggacattcaggcccccccataagtctttcctgaatgactcaaaagatcgtctgattgaaacaattgattggacccatcagaacatcgatgggcatcagaggatggaattggccaaagggttcccgcgtggaaaattgtgcaaggggggtgtcaccgaaaaaggggggagggcgcacaggacttgcccggaaaccattgg

SEQ ID NO: 133463 - DNA, 246 bp, Homo sapiens
tttattgtcattatatatttacaaaagtctcctctattttatcctgatttcctagtgggcaaaaccaaattcttactggtctttggtctactacatagtcagcacatagcactcaacaaaagtacctttagttaaatgagtctaactctcctatcagcttttagatggcctaagaattccctcttcaaacaccagatatcagttttccttcttaatccaatattcttatgtgaaaattttactgca

SEQ ID NO: 133464 - DNA, 119 bp, Homo sapiens
ggttgccctagagcttgcaatatatatttacaagtccattttgaagtaacactgcattacttcattgatagtgcaagtactttttaataacaaaatagttctaattcctcttttttctc

SEQ ID NO: 133465 - DNA, 513 bp, Homo sapiens
aagcagagacacagtgaacacggccatggcctggccgccaccagttctggtgggaactgcagtgttttggtgacatctcaaaccctatgtgggctcactcgatggagtaatggctaatttgatactttatacgttatttgcgagagtagatcttttttactttttaataggatggtgctattttttttaatgatacctgctcatgtaaaaaacaaaatagagcaacagaaaagtaccaagaaagcaaaaacatttcatcatcagaaatagccagtgttaaactaagctttgtaaagaaaactctgaagattctcatgaatagtttgcttcctagaaacccaccaacagattttttgttgttgttttttttgagacggagtcttgctctgttgcccaggctggagtgcagtggtgcgatctcggctcactgcaagctctgcctcctgggttcatgccattctcctgcctcagcctcccaagtagctgggactacaggcacccaccaccacgccc

SEQ ID NO: 133466 - DNA, 784 bp, Homo sapiens
cacggtggctcatgcctgcaatcccaacactttgggaggccgaggagggcagatagcctgaggtcaggagttcgagagcagcctggccaacatggtaaaaccccgtctctgctaaaaatacaaaaattagccaggcacggtagtgcggacctataatcccagctacttgggaggctgaggcaggagaatcatttgaacccggtggaggttgcagtgagccaagacggtgccactgcactccagcctgggggacaagagcaaaactccatctcaaaaaacaaacaaacaaacaaacaaagtgttatactaaagctggtctttttaagtttgtgcagtgaattcagtgcctaagctttaacaggttaccaagcagctttgttacattaaattgaatcatcagccaccaaatttatatcaggtttcagatgctggccatatgaaaggggaaaattcttaagtatgtttggcttttttgttgttgttgttcattcaacaaatatttactgagaatatcctaatgccagaaaacgtgctagaagtgatttaaaacttgagtaaatcaatatctgcttaggaagattgatataggttagattttagatcccattaacttgtttcagaaaataaaaatgcaaactgattgtggtaaacttgtggagttatacaggtaaacatattattaaacatgattttgacaataatttggccattatttggggcatttaaattttcataagatgagttggtatgtatatataccacagttaacatatctacctatatg

SEQ ID NO: 133467 - DNA, 399 bp, Homo sapiens
taaaataatagctatttcacacggaaattggggagaataaataagcacgactgtccagattttacagacagaagaacatgaaccacaaaggactacataatttgtccagcatcagaatgtaaagtcaggttcattgttgtttgtgttagatcatataatgcagagcagatggcctaatctgtgttggtgtttgtccactttcctaaatttttgtttgtctttccgttatctctatttggttctagctaggtcatgattgcttatgtcaaagaaacaaagaaaatacgacaagaatctgtaactgtaacaatgttgtttaacacaactttgaatacatttttacaggaagcaaagaagtgtgttgccctctaggaaatgtgtgttgctctgatgtaatta

SEQ ID NO: 133468 - DNA, 327 bp, Homo sapiens
tccactgaatagcaccccttgacctggtcaccagtgacccagcccatgctgaccaggccaccactaagcccagctgaccaggtcgccaccggtcaagccccacagcctaggtctgcactgaccagacaccaagcaactggctgccagtaggtccccacttgccaaaacccccactactggatccccctaatgagaccctccctaagcagacccctgctggccaggttcccactaaacaggcctcactgaccaagtcccaactgactaggtccactgagcaggcccacactgatcaggcaggcccctcctaaccacatcagaaggcca

SEQ ID NO: 133469 - DNA, 393 bp, Homo sapiens
cgatctagaggatcccttatatgctgtctcaggggacacactcttggttcataagcaaggaagattcccagcagcagatggacagtgatgtcattctccagtatcttgcagctagttgactggtttgttcactgacatcttaattcgtggacattttcttagttcactctgtattttctggcaggaattgattatatgcgaagctggaaaaggtgaagcgagttgaaggtagttgctatttgacatacagccctccaaagagctctgctttttttctcttcctttcatctcaacacacttttcttgtagagactggctttttcatgaatgaactcatttggaggaaacacctgtactctctgcttatttactgtggagagagcatttttgtag

SEQ ID NO: 133470 - DNA, 361 bp, Homo sapiens
gggtcataaaacgagacttgctcatattgggtgcttattctgtagtccttgactttacccctcaccagcagggtgaccttggggcaaatgacttgacctctgtgccttggtttccccagctatgaaacgggtaataataacacctcctctgggtttgatgcagcacttaggacagcgtccagcacgtggtaggagctcagtcatgtcagccaccgttattattacacacaaatgcacagacgtgcagacacagcaatgccaggctctgccatctggcagcagcagcgcgaaggtaacgatttatttctgtgtgctttgtctgtctgtgtttaccgaagggagtgatattagtgtgtgtgtg

SEQ ID NO: 133471 - DNA, 435 bp, Homo sapiens
atcacttgaacccaggaggcagaggttgccatgagccaagattgcaccactgcactccagcctgggtgacagagcgagaccctatctcaaaaaaataataaatataaataaaaggaatatttctaccttttagacagaatactcaaaaacatgcatgaatgaaatagatgcagttatgctattttattcttatgtgttttcaatctgaaatgtttatagctaacagttgggaattatgtgctgtagtatgtatatagtatttttagtgaaaatattcatataaaatattacttaaatcatttctacattgcacaaaatgatttcagataagtggaaagagtgaagatgcaacagctgctacataagtgttgcttcaaggaagtgatatcccagtcttccattctaccagatatctgccatctgtcgtatgcaaaa

SEQ ID NO: 133472 - DNA, 601 bp, Homo sapiens
aatcaatcaatatttaaatttgttttaatttctaatatggtaaatattgataaaacccacataaaagctctttgtggttcttaaattttaagagcgtagaggggtcctgagaccataaagtttgagagctgctgttttatagtatttaatacaaaagtaagtttatttgaataaaaaatacttgatcacttggttttattatctttatgcaagttacttctgattacaaatacaatcgtccctcagtatctgtgggggattgttgccaggacacccccttagataccagagtccatgtgtgctcgtgtctcttatataaaaataatgtatttgcatatagcttacatatgtcctcccaaatacttaactcatctagattataataacgtcatataatacagatgccatgtaaatagttgttatactgtgttgtttaggaaataatgataaataaaaaggctgtacgtgtttagtgctgtcttttttttttctctctgagtattttcaatccacccttggttgagtataaggatgcggagcccacagataaggaaggacgattgtacacatcggttctaggaaacacacttctcttttataa

SEQ ID NO: 133473 - DNA, 162 bp, Homo sapiens
gttagactagcagatggagaggatggtggggggaatgagagggcattccaaatggaaggtgcgctaagtgcaaaaggcctggagacaagaggcaatggcctatcccaggaactgacagatactcacagggactgaggggataatcatgggaagaggagtgta

SEQ ID NO: 133474 - DNA, 338 bp, Homo sapiens
caataattagaagaggagaagcacactggttgcatttcccgcttgtatagctctttttatctgtggccaggtcccagttagcagtacaagtaagcacttagaaaccttgaatcttactgattatttaagggccatgtttcaggacagctacagcagcaggaaagtgagggataaaatgctaataggggaaactgcaaattttgcatataaactcaagccacttatctaggtaactgaccccctaaactatgtatatgcagccagaatccagtatagttagttgagactaaagatactaagtagggatttcagctgctgcctaccccacggaagagagt

SEQ ID NO: 133475 - DNA, 268 bp, Homo sapiens
aatagttttataaggacctcatgaaagggtatagggaggatgaaattggatcttataatagttatgcctaggcaaattgtctttaacagtgagcatttaactgtttatttagacactttaacaatgtcttataagttatcctgaaacatttaaggttgtgtggttacaaggccaacttaattttttaaatactataagtgtaatattcagatggaggcattcatgaaataatgttgtttcaattaaccattccacagtctttttgttc

SEQ ID NO: 133476 - DNA, 423 bp, Homo sapiens
gtaaacagcttctggggtaggcttgaaagtaggctccacaggtcccatcttcctactgggaacctggagggagctagtcctatgaggagctgaccttggcaaagagccacaggggccagagctgtggcagatgtgggaagaattctcagtgcctactagtgggcccagcacacaggaggctgatgttgcttatgtccaactagcactgttactgataaaattgatccataaaaatccaaatacgtttcatgccagacaaccatttggtagaacagaaattccagccacaactcagaatattatccagctaagttctattttggaactagtggaatttgatattaaaaaactgtagtgtttaagatattatccacgtcatttccttctttgttctctccctccttctctccttcccttcttcct

SEQ ID NO: 133477 - DNA, 160 bp, Homo sapiens
gcaatttggaagcaatttcgccagtgacacaggactctcatcagcgcggctgttcttggtaggtaggtctgaggagatgggaatgtatgcactgccacccaccaggctgcatctggccagtctccagggagaaattcttccttctggagaaggacaaccc

SEQ ID NO: 133478 - DNA, 519 bp, Homo sapiens
ctaaaaatacagaaattagccgggtgtggtggcacattcctgtaatctcagccatttgggaggctgaggcaggggaatcacttgaatctgggaggcagtgagctgagattgtgcgactgcactccagcctgggtgacagagtgagactcactctttaaataaataaataaataagtacatgagcttaaagggatagtggtgtaatgtagagtttaagcacatacaagttttgaagttagacatatctgtatcagatgctggcttaaccgcttattagctaagtctgtttcctcatttaaaaatcaagttatacacttaaaatatatacaacaaaaataaaatagagtaaaaaaacaaaagtaacaaattgggatgtcataaaaaaatgacagagcagggaactccaaaggtccattctgccactaaagtgaggaaaaaactggtaaaaatgtcagaatcaacctttttggaactctggaaactaaccaaagtttgcaacaaacagaggaatgcttaatt

SEQ ID NO: 133479 - DNA, 206 bp, Homo sapiens
tgttaccatctgggttaccaaggggatcttacaccttctaccttcctagattgttggtgtctgcagagaggctcagtcttcaacagtgctgtccagtagaatgtgctgcagtgatgggaaatggtcttagagattttcatggagttttaagctgtaaaaactatgagccctattaatagcacattttatagaggcttcatgaagtg

SEQ ID NO: 133480 - DNA, 383 bp, Homo sapiens
acagggtctcactttgtcatccaggctggagtgcagccgtgcgacttgtagctcatggcagcctccaacacctgggcgatcctgtaatcctcctgccttggctcccgagtagctgggaccacaggctcatgccacctcccccagctaatttttaattttttttttttttttttaaatagagatggagtcttgctttgctacccagtgtggtggtgcatgcctgtggtcccagctacccaggagactgtgactggaggatcgcttgagcccgggagttcaaggctgcagtgagccattatcatgccactgcattccagcctgggagacagagcaagaccctgcctcaaaacaaaaacaaacaaaaaaaccctctgctctggata

SEQ ID NO: 133481 - DNA, 461 bp, Homo sapiens
catgtgactgactgtaggagagaagtgcggaatgatttctaagtagtggcaataattttatcagaacagaaggcaatacatttgaatgataagttcaaggtatctttgaggcattttgatggagatctctaatagataaattatagttagaaaaaggataggatctttgtcttgaatgaggttatgataggtgtgtacatttgagagttactgtgtggtgatgatggaagcaatggaaatggattacctagagatttattttgttcctcacaaaagaatcgtcatagaagacttacgctgtattgggaggcagctatgtaaaaagctgaggacttcatccagagacttcattcagatcttaattctggatctctgttttctctttcataaattaagggtaatatcagctatatcagaataatcatagataatattttattagggcctgaggtataagagtt

SEQ ID NO: 133482 - DNA, 607 bp, Homo sapiens
gcacagcaccgacagtagtggaagcacatggggaggcatggtggggagaccacagactatcctcatggggctggtacctagcaactttaaccatccaatatgtgagcgtggctaaagaaggcaggacaattcttctattaacataagggagcactgctaaacacactttggggatggggggacacaaagtactcacagaatgtggacagaacacagaaatcaaaccaacatgcccccgaatatggattcctataagcctaggctgaataagtttgctacagaaagtgtcactgtgcttgacagttttgtttgggggaaggaggaagtggggtaaatggtgcacattctttcaaaatgtaccttcaattaagcttaaaaaaaaaaagagaggaagtaagttttaaactaagcaaaaaaacaggtatttacattttcagtgaggcatagtatttcaaatctcctgcctttttccttctttcaacaataaattatcagccaacgctctgataaggcctccagattagaaatgattctactaaccttgttttatttacactacgcatgctttgagttttacagttcagtagtagagctgcacagctcctca

SEQ ID NO: 133483 - DNA, 396 bp, Homo sapiens
agaacagttggcttggaacagcagatagagaagcagtgagagtaaacgcaggtctgcggggccaccgaggacaatgattaatgggtttcccaggcctgctatcagctggggcaggcagtataggaataggtctcagaacatgttaccccaaggccctcttgcaagcactccagtgagcagaggatcggcctacacattcccaacccatgagctcaggctggaggtgagccagggagagccaaggtggacagtgggaggagggtcagaaagggtctgaacgtctcactgctgctccaggaagggaagactagccatccattgaggcattacgacaccacctctgactcgaacaatggactgtgtggtgtgaccttaattaaaggaaaaacgtagaat

SEQ ID NO: 133484 - DNA, 383 bp, Homo sapiens
agggaggacagattccttaaggaaagactgtgctctgggagggggcaggtagcgtcattttggggtgtaaaggcatggaatgctgatttgtaggcaaagttgtttaaggaggtcctgtcacattcagtggcatccgttatgataaagccaataggcttttacactcatctgtccatttctgtcaagaccctatggctgaggtcaaaacaatgttctgggagaaccagttacctctaaccttccaattcagacactgccagcttaactatgtagaaactggcacacagaccctgttaagtgctgcaacaatgacagcgtttctatgaatttgttggtacatgtgggactttagctcatctgaggagtcgaacagcagctgtgaa

SEQ ID NO: 133485 - DNA, 701 bp, Homo sapiens
ttcaactgagtagtaactataaaaagaaaatctgttaacctcacaatacttccaaacctagacagcagagggagtcttagaaacaaatacccaacacattaagttgtataaatcaagccactttaggaacaatgaaaactgggtttttactcattgtaatcactttgtaggatattataaactgtgtaaataaatgtattaaaaaaattatatgtgtaaaaatattcaagtgatattatcttgaaattaatttaaaatgttaagtgggcggggtgcggtggctcaagcctgtaatcccagcactttgggaggccaagacgggtggatcacttgaggtgaggagtttcagaccagcctggccaacatggtgaaaccctgtctctactaaaaatacaaaaattagctgggtgtggtagcaggtgcctgtaatcccagctactcaggaggctgaggcaggagaattgctgaacccggagaggcgaagtgcattgcagtgagccgagatagcaccactgcactccagactgggtgacagagcatgactctgtctcaaagaaaaaaaaacaaaaaatgttaagtggtatttctcctttactgtactactaagattaacgatatttcaaaataaatctggagcatgaacaatgaaaattagctacagttcatgaattttcctaatagatctataattcaagagagcg

SEQ ID NO: 133486 - DNA, 327 bp, Homo sapiens
taagttggagtctcatgccattcagtaaggatttacatggcaagaatgaggtcattgccagccactggcctgggcctgaactagacatcagtcaagcgttctaagtataaggagtatcctcagaaacagagatatggaggaaggccctaaagagccactgtctttttaaaactcaaaacatgaaataagggaaacagcacatttgcaaggtaggtggtgaagaggtgcttttcttgttagaaaggaaaggaaaggaagaagaaaatgaggaagcagtttattttcaaaggagtctcagtggttagtgctttgtgattttgcatattg

SEQ ID NO: 133487 - DNA, 446 bp, Homo sapiens
ttgctataaacaaatcaccccagtgtttagtgcttctttctttggaatcccaacaggccctatatcaggacagtttggggcactgcctggtaggaactccactgccaccacttttggggtgataccagctgcaagtccagagggacaaaacagatgccctgaagtccctcccatgttctatgattctctgggatgtaatggtagacataatttcaaaaaccattttagagcaacaagtttacaaatcttgatgattcctttccatgtgtgccatgtgtgccatgttgctgtgccagcaacagcagtaattctcagggtcaagtttccccaagtgctgagcagaactttttactgaacacattactggaccctagtgattgttgtcaataattgcatcataagcagtggctaagcaagcattaccacctacactgaagaaacacaaa

SEQ ID NO: 133488 - DNA, 380 bp, Homo sapiens
tctaaaccagggataattttaacccacagcggacatctgataatatctggagatatttttagttatcacaactaggaggagggtgccactggcatctagtgggtggccacaatgctgctaaacatcctacaatgcacaggacagaccacctcaccaaagaattatctggcgcaaaatgtcgatagtgctgaggttgcaaaaccctgttctagtccctttacagttttccaggaacccttggtgactgcaatgtccttgtgagataagcaggttggagactgctaaccccatttaagagttgaggaaggcccgggtgggcagatcacgaggtcaggagttcgaaaccagcctggccaacatggtgaaacctcttctctact

SEQ ID NO: 133489 - DNA, 684 bp, Homo sapiens
gagtgactaaaaaacagccatgatgtagtagaactctggcattttcaaagcagtcatctccaagtgtggtgtattgcctgaattgtttcagagtgttggtaaaagtgatatacttggtggtacttgccaactttaaccctgggttgtgctaggaaatgaagtttagtaggacaaggacccatagtagtatgtgttaagaaagggccatagaacagttaaattaatagcgttttcttctctcccctatagtattttgggcacgtttatacccattgaaaggcaggtttttttttctatgcttattgatttagcctatctatttataacagtataattcagaatataaatatggaacaagtttcataaggaagtttatctgtaactcagacattatatcattaatacttcaaatctcattataccattatgacctgaatgctacatttttcttcctgtatggagagcttagggaaaaattgtggcctgatgtcttcatccattcacttatcatagagtacataatgatctcaaatatccaaaaatggttatattcagctgcatatttctaagaaaataggtaggtccacagcaggttcttaaattccacatacttgggtgtaggacacagggattcattccctgagagtttttgaagctgaggagacacctgggttttgtttttcc

SEQ ID NO: 133490 - DNA, 243 bp, Homo sapiens
gtatggttaaataaatcaggatgcttccatatactttgctgccttcttaaagatttatagtgcacattagcttagtaaaagctttgggaagttctgcagttaaaaaacaggtttccttttatttaactcagctagtccctaaaagtaatcagtcatgaattctttaaacatttttttttttttgggcaaaagactttaacatcatggaaccaggggtccagtggaactcctttgggaaaggtt

SEQ ID NO: 133491 - DNA, 409 bp, Homo sapiens
gcacttatagctcttaaaatgaaaagtagaaatgatgttaagtattatctcattctaagcaataaattatatttatccatgagtgcagtggcgcgatttcagctcgctgcaacttccttctcctggtttgaagcgattctcctgttttagcccagctaatttttgtatttttagaagagatgggatttcaccatgttggccaggatggtgtcaaacttctgacctcagatgatcagcccaccttggactcccaaagtgctgggattaaaggtgtgagtcactgcgcatggctaaaggaaaggtgcaagtttttttttttttttttggaaacagagtttggctctgccgcccaggtagcttgaaatttcacgggcacgtaaccaccagtgcctgactattcacttggtat

SEQ ID NO: 133492 - DNA, 1006 bp, Homo sapiens
aaagagttcacagggatctatcatgaaaactgtacagagggtttggagcatcctacaaaaacatgttctgagaaaccatgttccatgcccttgtcccagacttgaaaggcatttgcccatcatgttggaaggatgggatttgaggctgatcctcttgtctggatgggttttctgcacccagcctcaggagacactgacatgaggctccattttgagaccttaaggttggagtattccataatacagcccacagccaggggtgcagtagtcttcctctcttcctagagggtagggattctgccctgctcatatttgcacctttctcctccctctgacctccctcactgccatcagcaaactagagtactttgcctgtcgggggtgtttgccaagtgtttctgagtagaccctggtactacctggtggacactaaagagggctctaggcagtaataagagggaattctggttgtaccttgtgcaggggaggcttcctgctgttgctggattccctgttggaaagaagctgggcagttgtgtttagaactgaccctgcagatggggaggcttcccccttctctctcttcctgagggctacttccagatgagtgggggagcctgccagtgctcatcaggtccacctgacatgtcaaaaggaaaaaggagaaacctgggtcttccccgggaactttgaagttacgaataggaaatcgaaggacttgatgccgagataatgttcttttggaaggaagggactggttccccagaccagcacctctggtaaccagagagaagatgttttgtgaagactagagtgatgcgttttctgggagactgcaagttaagaaggctttaagctttatattaattagaaatttgtattaatgtatagtaattagagaaaagcctacaggaaaatcacagaatcggataatgaggagacctgtgtgacttagtagcattctaggtaccaaagtggtgcctcggaactctcgagtggaaaccag

SEQ ID NO: 133493 - DNA, 210 bp, Homo sapiens
ctcggcactgcttggatggtgtaatttactaagagctaatagaaaggctaggaccaaacccatgggtctgctgagattcctggtgcagggctctttggggaaggagcatggtggctcaggtcaaacatacccgaggttaagtctgggtccagccagagaggacctttaaccctgcccactgcgcttcctctccttgagcctcagtttccc

SEQ ID NO: 133494 - DNA, 312 bp, Homo sapiens
attaataattccttcagaagggagaaatagttcttttgttgccaccacagagtagggaaacttttactgagctttatttactctgcctagaatctacccatacactttagatacctttttttttcctcttctattcatggaaactgcttgtttggtgaaagtatatgtaaaatttggttatgggacttgattatgtaataagaaacctctgttagtgcttggttgactgtagcaataagcaaagcaaaataaaatttgaagttggggtgatttggaatgacttaataaaattcatataaaacagaactagag

SEQ ID NO: 133495 - DNA, 433 bp, Homo sapiens
cgaaactctgtctcaaaaaataaataaataaataaatacatgtgaaatattttcactaaagtagtagtctcaatcaagggcaattctgacaatttcttcagacattcctgatcgttacaacctgcagaggatgtgttatgggtatctaatgggtagaggtaggaatgttgctaaatatcctacaatatacaacagagcccccacgataattatctggcccaaagtctcaaagttccaaagctgagaaacctttctctagagccatactgtgccaaatacttacggtcaatttcaaacaaaaagaatgcaccaagttctcaggaaatgtttacctaccttgcctctaatacatactgttttgttttgtttcttttctttttttcttgagtcagagtatcatgagacgcatatcgggatcctctagacagccaca

SEQ ID NO: 133496 - DNA, 718 bp, Homo sapiens
cgaaactctgtctcaaaaaataaataaataaataaatacatgtgaaatattttcactaaagtagtagtctcaatcaagggcaattctgacaatttcttcagacattcctgatcgttacaacctgcagaggatgtgttatgggtatctaatgggtagaggtaggaatgttgctaaatatcctacaatatacaacagagcccccacgataattatctggcccaaagtctcaaagttccaaagctgagaaacctttctctagagccatactgtgccaaatacttacggtcaatttcaaacaaaaagaatgcaccaagttctcaggaaatgtttacctaccttgcctctaatacatactgttttgttttgtttcttttctttttttcttgagtcagagtctcgctgtcgcccaggctggagtgcactgggtgatggagtgagaccctatctcataaataaataaacaaataaatgtcagggaccaaagtatcacataacatataaacagcaggaactatcttatctgggccccatatttcaggagcctctctattgactactgttaggtataactcctccatatttgtctattcattcaagtaaacacacttactgagggcctactatgtggcaagcaactggacaacaaagataagatgaaaatattttaccagcctaattaaaaaaacagctaaaataaaaatgatatgtgctataaata

SEQ ID NO: 133497 - DNA, 368 bp, Homo sapiens
acttacaaggttgccagagatcccaagattcacaattttaagactgtatatcacacaccctttatatgcttgtctgtatagatataccctcatgtcttccacatattcagaaatggaagaaaattcattccaaatactattgattctgatcagtgggaattacagaaattcatatcgcagttcaacaatctgtaaaagaaactacatggcttttggccttcaaaaaattgtaacagaaaatattaactgaaccaaatcagtatttcagaagcttttttttttttgcaacttaaattatccactattaagaaaatgactttttttttgagatggagtctccctctgtcatccaggctggagtgcagtgg

SEQ ID NO: 133498 - DNA, 491 bp, Homo sapiens
ctctgctttttaaatacttcttgaatcataacgaatatcattttccaggtaaactgaaccattcacattaatggtacctacgaagttctttttttcctagaaaatgctatcagtgtatcatattaggctggtcaagggcatacactgggttgctcactgatttgggtaaatgatccaacctctctgctcaggttcctcattgaaaactgggatcacagtaactcctgagtttactgtaaggactaaatgagtaaagagatatgctaaccattattacattcccaggtgatcatatcagttaagcatttgttaagcgcctagcataacgtgaaagcactgttccagcagacaacaggcagagacaacttttctgatggtgacaagtgctacagagagaaagaaagttggggagagggataaggaattaatgtatgtgtgtcacgaggtggtggcgggagttgctattttatacaggagagcttggggtatat

SEQ ID NO: 133499 - DNA, 1166 bp, Homo sapiens
caggcacgggagagaatcaccttgtctgccggttgctaagaccatgggaagagcacagtatttgggtggaagtgtcccgtttatccaggcagtctgtcatggcttcctttggctaagaaagggatatcccctgaccccttgcgcttcctgggtgaggcagtgccccaccctgcttttcctagccctccatgggctgcacccactgcccatccagtcccagtgagatgaactaggtacctcagctggaaatgcagaaatcacccatcttctgcgttgatcatgctgggagctgcagactggagccattcctgttcggccctcttgcagttgtgtgcagatcattattaatagtttttaagttgaattcctgttactgttttctaaagcagtatcaacgtattgatatttgtaactattgattttttaaaatatctctgaacttaacaagagttacatctaactttttaaagcagtgagctccgaacccataaaattacaaaatgctaatttttgctatagtttactagctttctgtgaacttaggaatgtttgcatttatttttaggaatatctatggcttgttcattaagcaaatgtttattgagactttattgtatgccaaggactaaagtagtaaacaagatagacattgtctatgtatactaacgaaccatatattcttgggggatggagtccttctgtcagttcatttatcagttttatcagtgtgtatgactctaaaaattattcacaaacctctatatcaatatttagatatcttgttttgctttgttagaaaagatgatattatgtaattatatatattgaaaacatagagcatatattcactattcttttgaaaagtgctattgggccgggtgtggtgtctcacgcctgtaatcccagcactttggaaggctgaggcgggtggatcacctgaggtcaggagtttgagaccagcctgtccaacatggtgaaaccccatctctactaaatacaaaaaattagccaggggtggtggcgcatgcctgtaatcccagctactcgtgaggctgaggtgagagaatcacttgaatctgggaggcggaggttgcagtgagccgagattgcatcattgcactccagcctgggcaacaacagtgaaatgccatctcaaaaaaaaaaaa

SEQ ID NO: 133500 - DNA, 343 bp, Homo sapiens
ttaaagttaattttctgtcctattttttacttgatgaatctggcaacttcactatgaatcacaggatttacaataatatggtactgacctgggagaaacaatatagaagaacataatcagagagcttatctgtaggtgggtcagagtgcaaaggactattgggtcctacctgatacattaaaaactgatcaatctaaatgcacatctcagccctcactgtgagaagtgacagccatgggtggctggggctgagggtgaagctcccgagccctctcaggaaacagataatgcagatcaagttcatccttatgttggctttcacctcggactattctaaatattg

SEQ ID NO: 133501 - DNA, 531 bp, Homo sapiens
gtgtgtctgtgtacacagagaaagagagagagacagagaaagatggagtcacagccacagaaccagagacccagggagaaagagagagaaatacagggagaagagatacgcacagagacagagacaaagggtgaaaaaataaccttagaaatgataccagtggggcccaggcacagtggctcacgcctgtaatcccagcactttggggggccaaggcgggtggatcacgcagtcaggagttcaagaccagcctagccaagatggtgaaaccgtctctactaaaaatacgaaaattagctgagtgtggtggcgggcacctgtaatcccagctactcgggaggctgaggcagataattgcttgaacctgggaggcagaagttgcagtgaaccgagattgtgccattacactccagcctgtgtgacagagtaagactctgtcaaaaaaaagaaaaagaagaaagaaagagggaaagggagagagagaaagaaaggaaagaaagaaaggaaagaaagaaagaaaagaaagaaaga

SEQ ID NO: 133502 - DNA, 377 bp, Homo sapiens
tgataaggaagatagtcattaaatattattaaagatagtaaaacaggctataaaaccatataaagtataactccattttctgatacagtatatatgttaaatataaaaaactagttcacataccaaaatattaaagtagatattatgtctgctgagactaaagataacttatattttcatcttgaagttttcttatatttttaaacttttctaaaaagtgcttctcaaaaaatgttatatttgtccaaaagaaagagtgacaccgcgctctgctggttttcctgctctcagactctttgccagctcctgtaacactgttaaagtattcacttcatcagtgatctttctcaggccctcttctttcctcctgtctgaac

SEQ ID NO: 133503 - DNA, 142 bp, Homo sapiens
tgtaaacagaaagcacttaggtaagagtttagtaaaacatgtttgctgcccagtaggaaaaagcagcatgtactatagttgaaccttagagaatcatggaaataaattcctcatctcagtgaaatgttctggtgacatattt

SEQ ID NO: 133504 - DNA, 721 bp, Homo sapiens
gcgcttcttgctgccaacatgtgaagaaagacgtgtttgcttccccttccaccatgattgtaaaatcaacaaggaaggcgatgagcacagcagtgtgaagttcctggcaaccatcattctacttttgtctccatgattttgaatactctaagtacctcatattatagccatcctaatgggtgtcattttcatgcgcgtccatgtgaagagaccaccaaacaggcattgtgtgagcaacaaggctgtttatttcacctggctgcagaggtgggaaggccaaaccgaagaattatgtctgacagaagggaagaaatgaccgcggtgaccttctcagaccctgtgggaaagacctctacctatccagtgaaagtgtctacccagactaagagggggcttccgaggcgattgggcaagatcagtcttcagccactaagccgagaagatctgggaaggagtcagagagccttgggcccacagttccagggctctgagagtggctgcagcctactcactgtgaagacaatgagggtgaaaaccttcatgatgatccacttccacttcatgaacaggaaatatgttttttctcttccttatgattttttaaaaacattttcttttctcttgcatgcttgattgtaagagtgcagtacatattatatatatataatatacaaaatatgtgttaatcagctatgtgttagccaactatgttattaatgta

SEQ ID NO: 133505 - DNA, 314 bp, Homo sapiens
ttctaggagacagggaaaacagatattaggacactaaatctaaactaaataataaactaaatcccactaaacaatatgctgcttaaccttggaagaaaacaaaacaataattctcataatcaagtttctctgtagaacaacatttcttttgtgtacatacagcatactccttactacagagaaaggcaatctctagttttcaagagttctcatattggtgtcacttgtaaatgggtaagttcatagtaataactgcagactaattcaggcacagggttttcaacaacaaatggggtaggtatacagatacagaa

SEQ ID NO: 133506 - DNA, 652 bp, Homo sapiens
gaaatcttgtctgttggagaagcaatttttttcaactttgtaacagagacttgacatttttaaattttaaaagatgatggactagactcaagtattttttaggactgtcccaatcataagtctgaaggatttcagtgcttatcataacatttgacatacagttggcacttggtaggtactgaatcaatgaataggagttattggttgcctattcagaggcttgtgggagttgtcatccccattgcagagagccagttggtgaatcagcaaggtttccatttatgctgctcccctccacccagtcccctggagggactactctctgagcagaaggaccattggtgttagcagaagacctcatatgtgttggagaacatgttgccttgtgcagcacaattgaaagtgtcagggaattggaagcagaaaaaaaatcataacctggatgagtgacttcagtttgatccagagataataggttgggtattagcctacatgctgtgagaaatttttattttcacttcatttcatgtcatgtcatgtcatgtcatttcatgtcatctcattgcaggttcaataatccttggttcataacacacttgcattattggtctatgcttggtccacttttatctgtgtttttttttctttctat

SEQ ID NO: 133507 - DNA, 1536 bp, Homo sapiens
cctcaagtgatcatcccacctaggtctcccaaagtgctgagatgacaggcgtgagccaccatgcctggcaaagagagtcttgatacaacatattcttttgaatcctcattgtgtaaattgcctcgttgtaaatagacactcagtaaacattttcctcaccaaaatatttttaaggatttttctacccttctccttttctctttgctttccttttcttgcctgttctttccactccccccaaaatgatcagatagcaaatgtcttgataacatgaggtgccctcacattaaaaaacaaaatattgagccgggcgcggtggctcatgcctgtaatcccagcactttgggaggctgaggtgggcagatcgccttaggtcaggagttggagaccaggctgaccaatatgatgaaactctgtctctactaaaaattcaaaaatgtgccagacctggcctggtggcatgtgcctgtaatcccagctacttgggaggctgagtcataagcctgcaatgggaaaatggatcgaatctggggtgagggggaagtgatgtgggggttatggtacctcttttctcttccaaagatgctgttcttactgcatcacttgtggctggccaggaaaagccatgcaggagttttgtttgtggccactaggtgacgatcgtgttctgtacgggacctcttattaatagttcaccactagccgccactccagaagagcggaggaacccaggataatattttgtcaaccaagaaacaagaagtccctcccaggaactggaaatgaatggggaaaatgctgaaatctcatttgcactattcatttctcttctctctggaaagctcggcaatcatcaggtcatttcatttggcttaaattccatgtgtctttccaaacttttaaaagctggtgaaaattgttccacccatatgtaaaagaacataggttaagttgtctaattcttgcaggaatgtggatatagcattaaaaatatgtctttgtatacttatcttacccatgtaagaaaagagtggccaactttcatataaatagaaagagaacatttaagctatatgcagtttgcatttttgtctactattatgaaattattatctatgaaattcaagctgtaactcaacatatgtataattttaatttctaatttattgttagatctcagcacttaaaaaattacatcttgtatttgaattgttaaatctgttccctgcaaagaacagtaatacaatcatgttctaatttactagcatttgcatattttagaaatataatggcctgtaatttacttttcttttgcctataattttctgaagctctttatgatgcaccggtgcatttttatttaaaaaatagattgtgactcctcaaataatgttacaattcgatgttcaaaaagcaatccaggtacatagccataaagggatgagctagagaggtctccatattatcattcaatgtgagaataaaaattctatattttattctagaataaaattataaatttctttatctaggaaa

SEQ ID NO: 133508 - DNA, 741 bp, Homo sapiens
agccactctacagcacaactgcccctttttttttgcaataaggacacgagggaaaaaaagccggtaaggtgggaggagttgctctaaatgaaagcgatttgagacataacaatcagatgtaatcagaggaacttctttgcaatctgaagcaaaccagctgctaaaagaggacagtcaaggaaatgtgattcggggtatgagattacactgtgtgctgttaactatgtgatcatgtcattgtagctatgtaaaccaatgtctacagccttagagatgcacagtgaagaacaggaatgacgggacatgtcgtctgacatgtgtgacttaaaatgcttcagcaaacaaacaaaaaaagggaaagtaaaaaagagcagacaaagcaaatgtggtaaaatcattgtaaccattgcatttaggtaagagataatagtctactctaaaagattctattgtaaaatattgtgtatggttgaaattttcatggttaaaaaaaaaaatctgtgaatgctaagatattcctttcctgctcttctggcaatggcaaactaatcccaggaccaccgcatagaggggcaactgtgactgaaacgaatataatccccgaaacggctctcatttccccagtcaatcctgagcacaggagaatgaacacaggaagaggcctctggacagcaggcaaaggcagtggctgcaggcgaaggcagtggctgcagggcagcgacaagcaaaagacaaaggcag

SEQ ID NO: 133509 - DNA, 484 bp, Homo sapiens
catcggaacccaatgagcgaatgtttgctgaggctcctgctggtgttgctatgttgatgaaattgagaggagccaggaaatgaacattataatagtatcttttttatttttatttttgagatggagtctcgctctgtcacccaggctggagtgcagtggcgcaatctcggctcactgcaacctccaccttctgggttcaagcgattctcctgcatcagcctcccgaatagctgggttacaggtgtgcaccaccatgcccagctaatttttgtgtttttagtacagacggaatttcaccatgttggtcaggatggtctccatctcttgaccttgtgatcctcccgcctcggcctcccaaagtgctgggattacaggcatgagccaccgcacccagccatgaatttttatatatgaacaaaggttttcatttcacatgggtatcccactgggagtgggattgttggctcatatggctatagcgctt

SEQ ID NO: 133510 - DNA, 389 bp, Homo sapiens
cgaggtaaatggtctcttcaagagaattttgaacaaggcagaaatcttgctcaaagacactgttcttgtacccaagactgcagaggtgagactaagatagagacctgatgaagatggctaatttgggacacaaggttacggtaattttttaatctgataacctaacaatacaatgcaagtaggactaggaggggacagaatgtgctttataaagactgatatgcctattaaacagtctgtcaaatatcagaaatattaggatagcctttggcgagtgccggggctcagacggtttacgattgaattttctaacaggtacctgtagtgcaggcgttctatgttgctgtgatggccatatgctttagataccagatggaaaggaaggtgtc

SEQ ID NO: 133511 - DNA, 250 bp, Homo sapiens
ctccacacgtctgtcagaaggtggtgggagccactgagggtgggtccctcctcccccggtgcagagctttgtcctttctcactgtccctgtctcgctccctccctccttctctccccgtctccctcccccacttctctctgtccatctctctatctctgtctctccatctgcctctgtctctgcctctctctccatctcccccatgtctctctgtctgtctgtctgtctctccatctgcctctgtctctg

SEQ ID NO: 133512 - DNA, 370 bp, Homo sapiens
aaattttcttcaactattttggactgatgttcatttctcttctagttgagtcacattccccttttgatattctgaaatgtaagtactaaaatatgaaactgactgctattaatacactgtattgtagacagtaaggaaatgggagaagtgaggataaaaaattgctactatatacacaaatctattcatatcaaagtaaggaaagttttgcatgaccaatgcagtgttcatttctacaactggtcatatcaacttaattaggatttataactacctttttccaccagtcattctataacccctttaccctcagcaaatacctcagctgtttatggtttcttgctgtgtaggatgtcccacatcatcattc

SEQ ID NO: 133513 - DNA, 257 bp, Homo sapiens
gggagccgttagacaagtgcaacatctatagggcaagctttcacgcagaactctcaggcacaaactgaagctgctgtccagaggcagagtttctttttcaggggaacttcagctctgtccttgaggccttttgactgattgaatcaggctcacatatattatcttggatggtttccctaaaagccagctaattatgggccttaatcacatctgcaaaatactttcacagcaataccttgattagtgtttggataacc

SEQ ID NO: 133514 - DNA, 528 bp, Homo sapiens
ctgtggggcttcagagaacgtgagcacctgtgtttgcattctccatcaaggttcatgtcctgttggctcataagcatgattatatccattatacaaactggggcacaggcacccagagagaagtcaaaagacttgttcaagatggacaactaggaagtggtggggacagaccagtcctgtctgatgccagatccagcgctgtatctgccagtcagcatgcacactttcatctctccagcctcttcccactcacctttactcaacatttctgggcctccatagtgattgtagtaattcggtaaagatgattcatttctttagtccggtcttcggacttgacttcttagaagcaggtcttgtgcaatagttgcatattaaccacttggtgacacagtgcatgagggtatgccaactctttttgctcatggccgtgcagtgcagaatttccaggcattgtccgctctgtttcctggacttcggagtgatagcaaagttttgtattccctgatcagctgtgtatctctgagc

SEQ ID NO: 133515 - DNA, 430 bp, Homo sapiens
  misc_feature (173)..(173): n is a, c, g, or t
attccaaagggccagtatttccctggtaccaaaaccagacaaagacgcaacaaaaaaagaaaactacaggccagtatctttgaacagagatgcaaaatccttaaaccaaattcaactacatatttaaaagatcattcattgtaatcaagtgggattcatcccagggatgcaanggatggttcaacatactctgatatggtttgtgtttgtgtccctgcccaaatcttacatttaattgtaatccccagtgttggaggaggggcctggtggaacgtgattggatcataggagtggagttctcatgaatggtttagccccatctccccttgctactatatagttagtgagttctcatgagatctgattgtttaaacctccctgctctctgtctctctcctactctggccatgtgtgttcccctgttgccttc

SEQ ID NO: 133516 - DNA, 261 bp, Homo sapiens
ttccccaggggacacattgacatttacaacactcatctttattttttttttaatactgctttctatccagccaattattagtctgtcttttaataattcatccaaatctcttctgaatcattgcataactttgtacagtttccacccacagtgtcttttacttttatttttggaagtaactgtttttaaaagttactgttatttttaaaagtgtgccttccccagaaatcagggagttacccatgtcctagaactccacgg

SEQ ID NO: 133517 - DNA, 790 bp, Homo sapiens
agcggagtcttcggggaggagctgcattacacacaggcttcggaggcttccgtggagaagcttggaggtaatggctgtcgtaaatgctagttattttcagagagttctcgaagatttggaataaagccgagccccagaaagacaggtcaaccacagaagtgctgagccaggtaaagaccctgctggacaagcagctggagtgagaatcaagacagctggaccacaggaccagacccagcagtatccatgtgacacataggttaatatcagagaagcacatgacctgggcaatctgcatgtgatgccaaccaagccttggaaagacagtgcaaccacagaagtgccgagctgggtaaaggccctgctggacaagcagttggagtgagaatcaagacagccggaccacaggaccagacccaccaggatccacatgacagtggtatcttccggtatcatcctattcaaacaacgtgttcaagcatccttggaaaattgaggtggagaacaggccacacaagctgtaaaccctttgtagtcataagacgaaagaggatttgttaagagtattgtattgggtagaacttgcattagcagtgacaaagatagccacctcaagctttggtaataacccttggaacacaaatataaaccataatggagtctgagtatgtcctatgcaactggaaagaaccagttgtggccagcaaaagtttgtccagatctgaaacttcatcaaacagtaagaggaaaaggcattttctctagaagttcaaatactctcactagatga

SEQ ID NO: 133518 - DNA, 786 bp, Homo sapiens
agcggagtcttcggggaggagctgcattacacacaggcttcggaggcttccgtggagaagcttggaggtaatggctgtcgtaaatgctagttattttcagagagttctcgaagatttggaataaaggtgagaaaagaagagagtgctgcttaggaataacgggaaaggagtgtcgttctgtgagggtcgttgtttctgtgagggaattaatatctgtgttttgtgttccttcagattattttaaaagtccacagtcggggaggtggtaatcaacattacacctgtggaaaaatattcttaaagaggtagcaaaagctaactttttaatagagcattttatgtttccatcaaaaggcagtggtggctgagataaatgatgaaacaaaacttgggagtttaatcttccttattttgaaaaaggttgtaatagtcttaaatgaaaaattaagttgttggggatgttggttttttatattactttgaatgtgttgtgtttctaacaaatcttactgttttggtggagtatgttagtaatttaaagtaatgcataactgtgcaaattcgagtatctctgagaattagtttggttatttgtcaagggatacacaatgacttaatataatagctttttaaataatgtgcaaaatatgatctttgtctgtacttctacctatctctcaagagaattgtacattcctatttgtactgcaatggaaaaaatctaaaagatcataacaataacagacgtgcattagtataataaaacacaacaaacaatatacttag

SEQ ID NO: 133519 - DNA, 469 bp, Homo sapiens
gagtgggaatgcacagttagtacagccactgtggaaaacaatatggagatgcctcaaaacactaaaaatagaaatatcatataatccaacaatcccactactgggctgggtatatagaagaaaggaagtcaatatatcaaagagatatctgcacattcatgtttactgcagcactattcccagtagccaagactgtgactttggtgaggatgtatgaccaaaagagagaggaggggggtatatggaagagattgcttgtatggatgaagcatggaataaccgtggcaaggagagaaataacgagatgaggggtgagggacagtgaggtggaggatggatcaatgtgttgtgggtcctgcaatggtagaaagaccatcaaggtgcttgagggagtgaggaggaaaataggaaatagtggctggagagtggttacttgaaactgagtttatggcaaggatgtagaggggtg

SEQ ID NO: 133520 - DNA, 323 bp, Homo sapiens
tatgtacaactgcatggtgaaggcagagagttggatttaaccaagactgtgactttggtgaggatgtatgaccaaaagagagaggaggggggtatatggaagagattgcttgtatggatgaagcatggaataaccgtggcaaggagagaaataacgagatgaggggtgagggacagtgaggtggaggatggatcaatgtgttgtgggtcctgcaatggtagaaagaccatcaaggtgcttgagggagtgaggaggaaaataggaaatagtggctggagagtggttacttgaaactgagtttatggcaaggatgtagaggggtg

SEQ ID NO: 133521 - DNA, 396 bp, Homo sapiens
atttctgtggctcttcagtgacagatgaatgaatgtgctcaattcaggtaactacatttgacctttttcctacagcaattgaagggtgtttgggtagcatctgcgattgtgttgaatgccctggttggttacgggtgtggggaagtggtatacagtactttgatcctcctttggagaaggagatgctaatgtggataatgagaatttggttctttatctttagtttcgatttggccgccttccttcactgagtcacagtgctcacttgtttagtgatgggcatgtcatttaagcctgagactgtccctcagactgtttatgacattggatctgaatttcccattagatgaacagccagcatttgtcatataaattcaagaacacactaaaagtttg

SEQ ID NO: 133522 - DNA, 2158 bp, Homo sapiens
  misc_feature (1299)..(1299): n is a, c, g, or t
agctaatcgttgccagcggggtgtggacttcgccgctgaccccacctccgccgctttgggtaatttagagccgcgcgccgggcgggaatgtaagatggcggagtagcaacgcaaagcgcttggtattgagtctgtggccgacttcggttccggtctctgcagcagccgtgatcgcttagtggagtgcttagggtagttggccaggatgccgaatatcaaaatcttcagcggcagctcccaccaggacttatctcagaaaattgctgaccgcctgggcctggagctaggcaaggtggtgactaagaaattcagcaaccaggagacctgtgtggaaattggtgaaagtgtacgtggagaggatgtctacattgttcagagtggttgtggcgaaatcaatgacaatttaatggagcttttgatcatgattaatgcctgcaagattgcttcagccagccgggttactgcagtcatcccatgcttcccttatgcccggcaggataagaaagataagagccgggcgccaatctcagccaagcttgttgcaaatatgctatctgtagcaggtgcagatcatattatcaccatggacctacatgcttctcaaattcagggcttttttgatatcccagtagacaatttgtatgcagagccggctgtcctaaagtggataagggagaatatctctgagtggaggaactgcactattgtctcacctgatgctggtggagctaagagagtgacctccattgcagacaggctgaatgtggactttgccttgattcacaaagaacggaagaaggccaatgaagtggaccgcatggtgcttgtgggagatgtgaaggatcgggtggccatccttgtggatgacatggctgacacttgtggcacaatctgccatgcagctgacaaacttctctcagctggcgccaccagagtttatgccatcttgactcatggaatcttctccggtcctgctatttctcgcatcaacaacgcatgctttgaggcagtagtagtcaccaataccatacctcaggaggacaagatgaagcattgctccaaaatacaggtgattgacatctctatgatccttgcagaagccatcaggagaactcacaatggagaatccgtttcttacctattcagccatgtccctttataatagagtaacttctgaggctttttgagaataaaatccaccccacccttgtttccccttggtatttgatgacaaattcagcagaagacccggcttgctccagtgtagctttctacatcccacatcaggtatattagagnttatccgaactggggaaagacggattgagattaactgctgggacctcctacctgcattatctcattctggcttccttgataattctgtgggccttgcagctttaactatagctcagctgctgcaagatttcagacttttgaggatgttgtgtgagggtgtttgactgtgactggggaagctcagactactttgtatgtgaatgcttcagggttttctttgttgagaacaactagcaacaaaggcaacccatgtgtgaccagttctccccaaggtctatgctaaattatagcaagagccctgggcaaccccaaacctagtcctggtagctgagcaccctgtaaggcaggagcaggcagctcagcttgagcagacattgggtggggggtggggggtggttgaggggggaggcagcacagtgcagcaaatgtttcttgggaggaagaagcctgatccatcaccatctgcttgactatgtagcttggattctcctttgtacctatccctttcgatttggctttaccttcatctatcttgatcctttcctggccaaatatcctcttgggcccaaatgaacattgtaccatagtcttctggaaagcaaacatgcttcctgctatgtaattgctaacattcatattagatgatgtgctgtagcttgatcttccttagcctactgccactgaggcagtaggttttaggtggtatcgtagtgccttttgattaatttaagtatttaattttcatcttccttctttggatctatttggcctctcaaatgaactgagattcctgttaaaaaagattgatgttattgtctcttgtagaggaaactaataaagtgtgtgtacctgtgtgaat

SEQ ID NO: 133523 - DNA, 828 bp, Homo sapiens
  misc_feature (552)..(552): n is a, c, g, or t
  misc_feature (575)..(575): n is a, c, g, or t
  misc_feature (583)..(584): n is a, c, g, or t
  misc_feature (587)..(587): n is a, c, g, or t
  misc_feature (597)..(597): n is a, c, g, or t
  misc_feature (623)..(624): n is a, c, g, or t
  misc_feature (633)..(633): n is a, c, g, or t
  misc_feature (648)..(649): n is a, c, g, or t
agctaatcgttgccagcggggtgtggacttcgccgctgaccccacctccgccgctttgggtaatttagagccgcgcgccgggcgggaatgtaagatggcggagtagcaacgcaaagcgcttggtattgagtctgtggccgacttcggttccggtctctgcagcagccgtgatcgcttagtggagtgcttagggtagttggccaggatgccgaatatcaaaatcttcagcggcagctcccaccaggacttatctcagaaaattgctgaccgcctgggcctggagctaggcaaggtggtgactaagaaattcagcaaccaggagacctgacccagctgataaagtaatgtcaccgataatggacagcttcttcccgaattattgtgctactgattgtgatgcaaatgatagtgtaaacattgccatctgtaaccaggcaataccttagttaaaagaggcttacaaactgctgtctttagatttttccaaaccattatggctcatgggccttaataaagaatacaaaacaggaaaaaaaaaaaaaaaaaaaaaanaaaaacaaaaaaaaaaaaaaaanaagaaaannaanaaaaaaaaanaaaaaaccaataaaaaatcccccctnnaaaaaaaancaacagaaaaatggnntctttttggcggccccttgcgcacagcgctttttttattgtagaattttttagatgggcccccaaatttggcgctttttgcccattttgccttaaggggggggggattacaaatcacgggcccggggttttaaacgggggggggggaaaacccggggcgcccaaatttaaggtttgagg

SEQ ID NO: 133524 - DNA, 2109 bp, Homo sapiens
  misc_feature (1250)..(1250): n is a, c, g, or t
agctaatcgttgccagcggggtgtggacttcgccgctgaccccacctccgccgctttgggtaatttagagccgcgcgccgggcgggaatgtaagatggcggagtagcaacgcaaagcgcttggtattgagtctgtggccgacttcggttccggtctctgcagcagccgtgatcgcttagtggagtgcttagggtagttggccaggatgccgaatatcaaaatcttcagcggcagctcccaccaggacttatctcagaaaattgctgaccgcctgggcctggagctaggcaaggtggtgactaagaaattcagcaaccaggagacctgtgtggaaattggtgaaagtgtacgtggagaggatgtctacattgttcagagtggttgtggcgaaatcaatgacaatttaatggagcttttgatcatgattaatgcctgcaagattgcttcagccagccgggttactgcagtcatcccatgcttcccttatgcccggcaggataagaaagataagagccgggcgccaatctcagccaagcttgttgcaaatatgctatctgtagcaggtgcagatcatattatcaccatggacctacatgcttctcaaattcagggcttttttgatatcccagtagacaatttgtatgcagagccggctgtcctaaagtggataagggagaatatctctgagtggaggaactgcactattgtctcacctgatgctggtggagctaagagagtgacctccattgcagacaggctgaatgtggactttgccttgattcacaaagaacggaagaaggccaatgaagtggaccgcatggtgcttgtgggagatgtgaaggatcgggtggccatccttgtggatgacatggctgacacttgtggcacaatctgccatgcagctgacaaacttctctcagctggcgccaccagagtttatgccatcttgactcatggaatcttctccggtcctgctatttctcgcatcaacaacgcatgctttgaggcagtagtagtcaccaataccatacctcaggaggacaagatgaagcattgctccaaaatacaggtgattgacatctctatgatccttgcagaagccatcaggagaactcacaatggagaatccgtttcttacctattcagccatgtccctttataatagagtaaggtatttgatgacaaattcagcagaagacccggcttgctccagtgtagctttctacatcccacatcaggtatattagagnttatccgaactggggaaagacggattgagattaactgctgggacctcctacctgcattatctcattctggcttccttgataattctgtgggccttgcagctttaactatagctcagctgctgcaagatttcagacttttgaggatgttgtgtgagggtgtttgactgtgactggggaagctcagactactttgtatgtgaatgcttcagggttttctttgttgagaacaactagcaacaaaggcaacccatgtgtgaccagttctccccaaggtctatgctaaattatagcaagagccctgggcaaccccaaacctagtcctggtagctgagcaccctgtaaggcaggagcaggcagctcagcttgagcagacattgggtggggggtggggggtggttgaggggggaggcagcacagtgcagcaaatgtttcttgggaggaagaagcctgatccatcaccatctgcttgactatgtagcttggattctcctttgtacctatccctttcgatttggctttaccttcatctatcttgatcctttcctggccaaatatcctcttgggcccaaatgaacattgtaccatagtcttctggaaagcaaacatgcttcctgctatgtaattgctaacattcatattagatgatgtgctgtagcttgatcttccttagcctactgccactgaggcagtaggttttaggtggtatcgtagtgccttttgattaatttaagtatttaattttcatcttccttctttggatctatttggcctctcaaatgaactgagattcctgttaaaaaagattgatgttattgtctcttgtagaggaaactaataaagtgtgtgtacctgtgtgaat

SEQ ID NO: 133525 - DNA, 749 bp, Homo sapiens
  misc_feature (643)..(643): n is a, c, g, or t
agctaatcgttgccagcggggtgtggacttcgccgctgaccccacctccgccgctttgggtaatttagagccgcgcgccgggcgggaatgtaagatggcggagtagcaacgcaaagcgcttggtattgagtctgtggccgacttcggttccggtctctgcagcagccgtgatcgcttagtggagtgcttagggtagttggccaggatgccgaatatcaaaatcttcagcggcagctcccaccaggacttatctcagaaaattgctgaccgcctgggcctggagctaggcaaggtggtgactaagaaattcagcaaccaggagacctgtgtggaaattggtgaaagtgtacgtggagaggatgtctacattgttcagagtggttgtggcgaaatcaatgacaatttaatggagcttttgatcatgattaatgcctgcaagattgcttcagccagccgggttactgcagtcatcccatgcttcccttatgcccggcaggataagaaagataagagccgggcgccaatctcagccaagcttgttgcaaatatgctatctgtagcaggtgcagatcatattatcaccatggacctacatgcttctcaaattcaggtatcagtggaagctaaatattggtgtttgaanggtgggaggaaaggactgatgatgctgaagactgcagagaagccaaaaattatgcccaagtacatctgaaaataaactagatatcaacaacaaaaaaaaaacaaca

SEQ ID NO: 133526 - DNA, 1842 bp, Homo sapiens
  misc_feature (983)..(983): n is a, c, g, or t
agctaatcgttgccagcggggtgtggacttcgccgctgaccccacctccgccgctttgggtaatttagagccgcgcgccgggcgggaatgtaagatggcggagtagcaacgcaaagcgcttggtattgagtctgtggccgacttcggttccggtctctgcagcagccgtgatcgcttagtggagtgcttagggtagttggccaggatgccgaatatcaaaatcttcagcggcagctcccaccaggacttatctcagaaaattgctgaccgcctgggcctggagctaggcaaggtggtgactaagaaattcagcaaccaggagacctgtgtggaaattggtgaaagtgtacgtggagaggatgtctacattgttcagagtggttgtggcgaaatcaatgacaatttaatggagctaagagagtgacctccattgcagacaggctgaatgtggactttgccttgattcacaaagaacggaagaaggccaatgaagtggaccgcatggtgcttgtgggagatgtgaaggatcgggtggccatccttgtggatgacatggctgacacttgtggcacaatctgccatgcagctgacaaacttctctcagctggcgccaccagagtttatgccatcttgactcatggaatcttctccggtcctgctatttctcgcatcaacaacgcatgctttgaggcagtagtagtcaccaataccatacctcaggaggacaagatgaagcattgctccaaaatacaggtgattgacatctctatgatccttgcagaagccatcaggagaactcacaatggagaatccgtttcttacctattcagccatgtccctttataatagagtaacttctgaggctttttgagaataaaatccaccccacccttgtttccccttggtatttgatgacaaattcagcagaagacccggcttgctccagtgtagctttctacatcccacatcaggtatattagagnttatccgaactggggaaagacggattgagattaactgctgggacctcctacctgcattatctcattctggcttccttgataattctgtgggccttgcagctttaactatagctcagctgctgcaagatttcagacttttgaggatgttgtgtgagggtgtttgactgtgactggggaagctcagactactttgtatgtgaatgcttcagggttttctttgttgagaacaactagcaacaaaggcaacccatgtgtgaccagttctccccaaggtctatgctaaattatagcaagagccctgggcaaccccaaacctagtcctggtagctgagcaccctgtaaggcaggagcaggcagctcagcttgagcagacattgggtggggggtggggggtggttgaggggggaggcagcacagtgcagcaaatgtttcttgggaggaagaagcctgatccatcaccatctgcttgactatgtagcttggattctcctttgtacctatccctttcgatttggctttaccttcatctatcttgatcctttcctggccaaatatcctcttgggcccaaatgaacattgtaccatagtcttctggaaagcaaacatgcttcctgctatgtaattgctaacattcatattagatgatgtgctgtagcttgatcttccttagcctactgccactgaggcagtaggttttaggtggtatcgtagtgccttttgattaatttaagtatttaattttcatcttccttctttggatctatttggcctctcaaatgaactgagattcctgttaaaaaagattgatgttattgtctcttgtagaggaaactaataaagtgtgtgtacctgtgtgaat

SEQ ID NO: 133527 - DNA, 367 bp, Homo sapiens
ggggagatccccctgctagctcacacatcaatcagggatgcagagtctcctgttgctaggatcccagaagtctgttgtgagagtgagctgtccctcagttccctcacttacccttttcataggagccattagaggtattcaggtatcattcagggcttccagatttccccctcttcaatctcgactttggtgctgactctctcactattcttgatgttttctcttcaaagatctgcccaaattatggtggtttattccatactttggtctgtcttcttggtagtggtgtttcctggctgccttttatctgccatcctgttctccctcctcctcattctttttaaaatacacttaattttctactgta

SEQ ID NO: 133528 - DNA, 870 bp, Homo sapiens
tgttcttgcacagctattaaggttttagttgtggcatcaatgttgttggctatgtctgttgagagctggtcaaggaggcttctgtgactctggcaattctggttcccatactggatataatgccacatctagcaagaagtggaattaattggatagccctcttcaccctgggcaagatgaaatgcttgggccgggcacagtggctcacgcctgtaatcccagcactttgggaggctgaggtgggtggatcacctgaggtcaggagttcgagaccagcctggccaacatggtgaaactctgtctctactataaatacaaaaattagccgggtgcatgcctgtaatcccagctactagggtgactgaggcaggaggatcgcttgaacctgggaggccgaggttgcaatgagccaagatcgtgccattgcactctagcctgggcaacagagcgagactccatctcaaaaaaaaaaaaaaaaaaaaaaaaaaaaaaacatttgttggcggcggcccggccccaggaaaaaggtttttcaagccccacttcggttgggggcccggcggcccccatatagtgtatggtcacccctgggccttcggtggtcccaagagaaccccgcgcaggactgaggcgggttccccccaataaaaaagcgcgggggaccgggtgttctgacacatcccgtggcttcgcgcctaagggctccccacggcgtccaggagtgctatacccgccgcggcggggcgggcccacgcgccacaaacgctgatgcacacccgccctccacacacaacacgtcaccgacgacgcacacgcccgccgccccacaccaccacaacaccccagccaaacacacacaacacaccacgc

SEQ ID NO: 133529 - DNA, 674 bp, Homo sapiens
cagtgagcaaatcataaaatgtaggcttctttatgtttgtatatctaattgtactaaatgtgtttgaggcaggacaactcccatctcccacaaaatccagggtggatttttaaaaagcattttaggacttgtttttttattgggcatctcccagtttttaaggtgtttctatgctagaaatctcatggatgttttctttattttcatgcctccttgtaccctctgtattgcaacctgccttagtgattccatccataactgtggctttaacttatctgtagggaaggcttccaactcagtttcctatcctgattcctcagggcattctttaccctcacttttcctagatctcaactgttgagaggaaaccatactgtctgtcattagcaattttgcaaaaacagcctgtgaatgcatattagcatcacctgattactgagcgcccagaggctccgtctctctgtacccggatacaacacaggagggaaatgatgtggttcctgtcctcagaaactcctggtcaaagaaggttcctgtgtcaggtatgtgcaagatgtgaaagccatagacataaacaggtgtcactgaaaatagaaagatatttccatgtaaacagtgtataaacttggcctttagaggtatcggtggagccaagaagaaaccgttggcagtac

SEQ ID NO: 133530 - DNA, 222 bp, Homo sapiens
ctgggactgcaggcatccaccaccatgcctggctaatttttttgtgtttttagtagagatggggtttcactgtgttagacagggtgtttgtctagcattttaagagtttgtaatggaagggttttcaagtcatttaatctcagtattgctaaaatgtaagtttatcctaattattcagaattggaaatgtagtctagaaaatccaaaatattaactggtatt

SEQ ID NO: 133531 - DNA, 415 bp, Homo sapiens
atactaatccataatacaactcagatgaatcacaaatgcatgcttgcggaaagaagccagacacgaagggccacatgttatatgattccacacatatgaaatatccaggaaaggagaacccacagagacagaaggtagattcaagtcaccaagggacaggagagagagcaacaggcagtgatctgttaacgacgcattcctctgtggtgcaaaaaagttttgaactagagaggtggaggacacacaacattgtaaatgtgctaaatgtcaccgacttgtagacttaaaaatggttaatagggccaggcgcggtggctcatgcctgtaatcccagcactttgggaggccgaggcaggcgatcaccagaggtcaggagttcaagaccagcctggccaacatggtgaaaccccatctc

SEQ ID NO: 133532 - DNA, 188 bp, Homo sapiens
gcactgagtgtaaaacttgagcttttagaaatccagcagaaagatttcctccctcctaagagattcatccaacattcctgaaattcactctgattgtcccagcttgagtcccagggatgtttccagaaatgaatcactatggccaggggcatatgagaccccatgatcaggcctgggccacctcctca

SEQ ID NO: 133533 - DNA, 393 bp, Homo sapiens
gatttctgggcccttctaacttgtactttggaggaatctctttagtggtgcacaggagcctgcttgttccagctcataagagtctaatgtaattttcaagaattctgtgaactggtggttaaacacagacattattaaaaaataaattacatgaactcacattaaacaaaaaggagataaatactcaaaataactgctttttaattattttactacattttactattatctatgctcttctgaagatttatttctattgtctctgcatagcggaaactatataatgatttgctactgcccatctcttctcagttccatgatcagtgagggtgagttagtagcttgccattggtcatagtgggagtatctataccatggaaattggcaaacact

SEQ ID NO: 133534 - DNA, 726 bp, Homo sapiens
atattatgaagcatttagaaaactgtgaaatcttaaatcaattgaaattctatagtttaaatacaatagtttaatggattttaaaatatcgattttaaaattgatattttatgattgctactattgataagaatactatttgacgtttgtatcaggattcatggccttcaaatcctttacatatatataacttcaattttatttcatctaagaattaattgctgtcaattaaggataaaataaaactttgactttatttggattgttaatgtagccaggctcttctatttaaagaatgaatgttacaattaaacaaataaagcatttatatgcaaagccccactctcacaaactgatgctgagctggacattaacagaaaaaagaaattagtttcacggataagaatgaacacttgtggacaatgatgccaccatgtagataggttttagggtttttttttttcatagaaaaacagagctgctttctaatgtgcccgaatattcagcagagagtgtgtgcatatggttaaaacaatacatgttttaggtaaatacacatgcacccgaagaagcagcactgtgatttgactaataaatcataatattcatttaattttttaatggaatttaaaactaggaatagttttagaggttatttagttcgattccctcattttacacataccatatgtttctatggtgtttatactattgaagttaaatata

SEQ ID NO: 133535 - DNA, 739 bp, Homo sapiens
attgatttaattctttacttaaaatatatagactggttgaatggatgaaaaaaacatgatctagccatatgctgcctacaagaaacataatttacctttaaagatgcatatgaactgaaaataaagggatagaaaaagatattccatgcaaatgttaacaaaaaatgagcaggcatagctatactcagatacaacaatttaaataaaaaacagtaagaaaaagacaaataaggtcattatataatgataatgggatcaatctagcaagaggatgtaacaccaaatccatattggcatccaacactggagcacctagattcataaagcaaatattgccatatctaaataaaaaggtgaactctgatataataaaattgtggcactttaacaccccactgccagcactaaacaggtcattgagacagataatcagaaaagaaacatttgttttaaactggactttagaccgaaaggacttaacagacatttagagaacatcttacccaacaataacagaatacacattcttctcatcagcacaaggaacattctccaagatagaccatatattaagccacaaaacaaatctcaacaaatttttgaaattcaaaatcacatcaagtatattcccagatcacaatggtgtaaaactagaaatcaataccaagagaaacattggaaacgatacaaatacatggaaattaaacaacatgctcctgaacaaccattggttcaatga

SEQ ID NO: 133536 - DNA, 211 bp, Homo sapiens
actatgtaaacacttttaatagcaagtcatatactaaattgtaactattttagttttcctgtacaagtttttgtttttgcagtcttaaagcttaaaaatctttcccccacaattttcacctaatttactgttatttatctttcaaattctagtgtaagtgtcacattttcagagaagccctgaagcatccttttctcctaccccacaattc

SEQ ID NO: 133537 - DNA, 568 bp, Homo sapiens
cagagtccaaacagtgcccagagtccaaacagtgcccagagtccaaacagtgcccagagtccaaacagtgcccagagtccaaacagtgcccagagtccaaacagtgcccccatttaaaaggcacagagtggcaagctggataaaaaagcaagacccagtgatatgctgtcttcaagagacccatcttatatgcaatgacacccataggctcaaaataaatggatggaggaacatctgccaagcaaatggaaatcagaaaaatgccagggttgcaatcctagtttcagacaaaacattttaaaccaacaaaaatcaaaaaagacacgggtttacataatggtaaagggttcaattcaataagaagacgtaactatcctaaatatatatgcacccaacataggagcacccggattcataaagcaagttcttagagacctacaaagagatttatactcccacacaataacagtgggagacttccacattccactgacagtattaaatccttgaggaagaaagttaacaaagatattcaggacgtgaacttaacattggaccagatagatct

SEQ ID NO: 133538 - DNA, 459 bp, Homo sapiens
tttccaaataatactgtttattgtcatttcactttggtttttttggcagccctgttaggggaaacccagcaaatgatccgcagctgcatagcgatatctaagcaaaaatgtcacttcagtcacccacacacccaagcccggaacaagttcttcattgttacgatttcttgagccaactcgtgacacaaaatgtaggtcacaattgtgagcaattctcatcctctttcacttttctatatgtggaaggattttccaaataagaaatgcaaggttaacgtagaatgagcagcgatcctgatgctttttataaaccttttggggtagttaacaggcatatttctcagcagggtcactgttggaatttagagtggtgctgcctatccgtgacaggatgttttgcaaatctagtccctcccactttgcttataatatccttccccagtcgttgttacacattct

SEQ ID NO: 133539 - DNA, 437 bp, Homo sapiens
ccactgtgcctggcctatattcaagctttatacaaacacacatatacccctctgcatatacacatatataccccgtagctatcaaaatacagacccatttttctacaggggaggggaagaaaaaaaggagaaaagacaaagaggaataataaagatcgtggggagagaacaacccatgggaaagccagaaaagagaattgagagacagttagaccagggagaagcctggcaattcctacagagaggacatgcctaggcaggtagtggaggggaagcaatggtgaaatcaggccagcagcagcactgcattaacacttgagtgatcaaacaaagggtaaagccatcaggaaagaaactgacagctgcagtccttaaatgccccaatttagagacacaatgactccttcttccattggccatcctcaaacccaagtcag

SEQ ID NO: 133540 - DNA, 485 bp, Homo sapiens
agatggagtctccctctgttgcccaggctggagtgcaatggtgcaatcttgattcgctgcaacatctgtctctcgggttcgagcgattcttctgcctcagcctcccaagcagctgagattacaggcacatgccaccatgcccagctaatttttgtatttttagtagagacggggtttcactatgttggccaggctggtcttgaactcgtgatctcaagtgatctgcctgcctcaggctcccaaagtgctaggattaaaggtgtgtccagcctatttttttaaaatcatacttttaatttattgtataaccaagatggcaacagcattgcagaatttaaaaagaaaacaaaggaggaaccaccatctcaccaccttaacaagcaaatggttttaatttttctgtggttctttctagaacttgtcctcaaacagacagacattgggcacagctataaccacagtgatgatctgttttgcctccagtg

SEQ ID NO: 133541 - DNA, 300 bp, Homo sapiens
tatggagggggtgctttatacctgcctgtctggtctcacactaggacagcatggcagagcagggacttgaatccaagtggtctgagtttttgctctttacttacacacgaatctgtgtaactatttttacaaaactcttaaatcttcaggagtttattttgggttatgatgtgaggtgaataactcaattatttcctaataagtatctgattgtacaaatgctgtttgttgaatactcttttccattctcgctgattgtgatgccggtttatcacattcaggcataccttggggatagtg

SEQ ID NO: 133542 - DNA, 271 bp, Homo sapiens
tagaaccctcagtctttctctcttcatcatccttaaagtctcagctcaggcagtacttcttggggaagcccttccccctctccttcctaagtcaaactgtgctataattgattctcgctgcaactccagccctttggaatacttatcaaatatgagatcttacatttctttaggtgactattggttaatgtttggttcctgttctaaaaaaaatagaagatactccataaataagtgttgagtaaataaagtataaagatcagttaggagg

SEQ ID NO: 133543 - DNA, 505 bp, Homo sapiens
gaacactggtagtgcatttagggcccactgggataatccaggttaatgaccccatctcaagattcttaatcacatctccaaagtctttaccatagaaggtaatgatataatttggctgtgtccctacccaaatctcatcttcaattgtaatccccacaatccccacatgtctagagagagacctggtgggaggtgattggatcatgggggcggttcccccatgctgttctcgtgttagtgagtgagttctcatgagatctgatggttttataaggggtgcttccccctttgctgctcactcctctctctcctgacaccttgtgaagacggtgcctgcttccccttccaccatgactgtaagtttcctgaggcctccccagtcatgtggaactgtgagtcaattaaacctctttcttttgtaagttacccagtctcaggtattcctttatagcagtgtgaaaacagactaatacagacaacatctacaagatgcagcgattaggac

SEQ ID NO: 133544 - DNA, 284 bp, Homo sapiens
taggtgaccctttagcatgacccccccactcggagaggtcccctgaccccaggaggtctggcaatgagcgtcatcaattgagacaggtgactctgggctcttagcttctggggggcccttgccacccactggggaggtcttttggaaatctcactccctgtccacacatcctcgcgcctcgctcgctctgatcctaagcccggccacacacctgtgaccaggatgaccgtgctcctgggcggcagcactgatttgaaatgggagggtcttggaaacccagacgt

SEQ ID NO: 133545 - DNA, 210 bp, Homo sapiens
aagggcacagagcatgttgctctggctgttgactaagttccttgcagagggcctgagcctggggctggaactttctaaacatgagcctggcttgtgtatttgtttgtttgttttagtactggaggtgtccatggaaggtatatcctcccagccccaaaggaaggcatggtagtagactagtaacaaagcccatctggtaccaagaagaca

SEQ ID NO: 133546 - DNA, 295 bp, Homo sapiens
ggccaggagccccggccccacctttcctccttcccttgtgcctcctggcacttcccgcagccctcccctgttgagtgtaggcgttctgcccggggcagtcgctgtgagagaggccatggcctggactagggtgatgcgaagaacagaacttgctaccagattggatgcagggttggggactccacagtgactccacacttcttaacctgaacaatgaattgccaaaatagataacagaagaaattggggaagaagagttgttctagccaatagagcagctaaagccaaaaaaaaa

SEQ ID NO: 133547 - DNA, 499 bp, Homo sapiens
gacaaaggttatgcaaagtgtcgacagcacagcacacggggcatcagtcctcacataacacaaccatcccatggtgagcccctcccccagctctctcaccactctggacatcagacctcaggtttaggacaggaaggccactgctacctactgcagagtgggagacacattctctttaccagccagaaagactggcttattagttcactaactagctgtgtggccttggctaagttccttaacctctctgggcctgatttgcctcatctccaaaatggtaaaaatacctcccccacaggcttgccacccagtgccaatgaaataacatccatgaaagaactttgtaaaagttctgtataaataaaacaataaaataaaaaaataaataagtgccatataaataaagggcattgtgctgattttccagtatctggcacatgccttctgcatcatctcatgttcagattcagagatgcatcctgggaggacacttccagag

SEQ ID NO: 133548 - DNA, 422 bp, Homo sapiens
tacagattttttgaagcagtcattatggatttggattaatatatttacctaattcgacctgacctccattgtgactagtgatttatgcccaggagtgtgctgaggttttattatgttttccatgcaccaagtaaactggcccatttggagagtgaccttgttttctttatgaaacccatgttctcatcaactgagctgttaaatgcctgtaatataaagtcaaataaatcctgctttctaaggcactgtattatttatatagcatgtgtaaatttagaagcatttggtcttgaggtcaggagttcaagaccagcctggccaacatggtgaaaccccgtctctactaaaaatacaaaaaaaaaattaggcatggtgatgcatgcctgtaatcctagctactagggatgctgaggtgggaggat

SEQ ID NO: 133549 - DNA, 200 bp, Homo sapiens
tcaatgtgtcagcatggttgggttctggtgaagacccttttctgggttgcggactgccgacttcccactgggttttcgcatggtggaaaaggcaggctcctttgggcctcttttataagggtactaatcctattcatgaggactctgtccccatgacctagccacttaccaaaggcccacctcttaataccatcatattg

SEQ ID NO: 133550 - DNA, 322 bp, Homo sapiens
ggtcacaggacagaaccccacatagcgattgtctaaactcttcttgtcttctcctattccagctcccacccttcagtccagcccagaaaaagagtttacctctgtttgtgcccagcatacccttaggatatcacacatacttctccattctatgactttcctttgaaatgtaccatccatgaaattatgcttcatgaattatgctattatggagatggaggaaatgcttatattagaccaacccttatgatgcagaaaacaaagaggaaatctcgataaaatattaagcatacacaatgcgggccgggcacggtgactcatg

SEQ ID NO: 133551 - DNA, 795 bp, Homo sapiens
tccactgccagtgtgtctttggacttgctattccctcaaccagagaggcatttcccacacctctttaacactactcctttagatctcagttcaaatgtcacttcctggagaagcattcttctatttccctcactaggtcaaatctccttttatacgtgctcttgtagtacttctacatcctcacttgccaaagttgaaattttcatttgtgaaattatttgattaattactgcttctcccactagactgtaaattccttgagagtaaagactagatttattttgtttattatgaagggtaccagcatatgccaccccaaaatatacttctttggcatatagattattttgagctaaaggccattgagaacctgcagatacagaccaagctctgaaaacatggcacaagtttttctcttataaagaaaatttacatttataaagcaaatttttgtttgtagacatgtttccctctcccataccaaaaaaaaaaaaaaaaaaaaaaaaaaaaatgttgtggggcggactgggccccggaaaaagtttttagaaacaattcggttgggggcgcggggccccctgggtaggtggaagggggccaaaagggggtcccccagaggagagaaccgggggaccacaagcaagggggtgggggattctcccgccgcaataaaaaagccgccgggggggaacacgcgcggggtcctggaaaaaatctcaagagggagcttcagaggggcaaaacggggctcacatcaacgcgggaatccccagggaatcccgaaaacaattagcg

SEQ ID NO: 133552 - DNA, 292 bp, Homo sapiens
gtgcctacattacagtaggctgcagagcacatttcaaaaccaggcattttgaaaaagtaaggttaagtaagttttgaaaagggaagatcaagccccaaaagtaagatcaaggagtcaacaaaaactttttttaaatgatacattttatctcaattcaaaaggaattctttccataacctacggaaagaataaaagcatgcttttgattattcgaaattctaataattacaagcaatcagttattttctcttgtcagacaatactcttgtcaaatatatcaatgaaagcctaa

SEQ ID NO: 133553 - DNA, 272 bp, Homo sapiens
ctgaagaggaggagggggttagtcttgctgtctctctcaggcattgcagaggtggaggaggttaaaggggaagcaggagagatttattgtaaaaaatccacatatacgtgggcccgttcagttagtccaaactcatgttgttcaagggccaactgtatatatttaatataagaaaaaggggatatctgcgttccaataacactttatttatggacaataaaatttgaatttcatataattttcacgtaacaaaatattttttaaaatttctc

SEQ ID NO: 133554 - DNA, 251 bp, Homo sapiens
ttgcctttattttccttttttaaatgtttattttctatttcattaattcatactccttaccatttaactctttctactttcattagatttatttgctttctttttataacttggaatagttagatcattgcattttagcctttttcccctaatacatacactgaatacatttatctttaatcaggactttagctgtatgccacaatttttactatcattcagataaaaatatgttctaatttctattgtgc

SEQ ID NO: 133555 - DNA, 378 bp, Homo sapiens
caaagtgctggcgcacatttacaggcatgagccaccgcgcccagccgaactaatcattattacagtagccctatgctgatagtcttggcttctgtcctttgttacaacagacccactcgtagggtctctggctctgtgtgtcgcatacctcagatctgtgtggtgcctcattggccctgacgtgtgggaggcattgctcctgctgctcagacctctggtgactccctctcccgcttctcccaactctgaggcccagggactgggaatcagtggcctgtgttgggtttggacccggccctgccacggctggcagcctgaccttgaacacatttcctaacgtagctgagtttcggttttctcttctgtaaaatgtgcgta

SEQ ID NO: 133556 - DNA, 1637 bp, Homo sapiens
aggagtgggactgcctggaccctgttcagagggacttatacagagatgtgatgttggagaactacggcaatctggtttcaatgggactttacactcctaagcctcaagtgatctccttattggaacaagggaaagagccctggatggttggcagagagcttacaagaggcctgtgttcagatctggaatcgatgtgtgaaaccaagttattatctctaaagaaggaagtttatgaaatagaattatgccagagggagataatgggacttacaaagcatggccttgagtactccagttttggagatgttttggaatatagaagccaccttgcaaaacaactgggatatccaaatgggcattttagtcaagaaatattcactcctgaatacatgcccacatttattcaacagacattccttactctccatcaaataattaataatgaagacagaccctatgaatgtaagaaatgtggaaaggcctttagtcagaactcacaatttattcaacatcagagaattcatattggtgaaaaatcttatgaatgtaaagagtgtgggaaattctttagttgtggttcacatgttactcggcatctgaaaattcatactggcgaaaaaccctttgaatgtaaggaatgtggaaaggccttcagttgtagctcatacctttctcaacatcagagaatccataccggtaagaaaccctatgaatgtaaggaatgtgggaaggcctttagttattgctcaaatcttattgaccatcagcgaattcacactggtgaaaaaccttatgaatgtaaagtatgtgggaaagcctttactaagagctcacaactttttcagcatgcacgaattcatacaggtgagaaaccctatgaatgtaaggaatgtggcaaagcctttacccagagctcaaagcttgttcaacatcagagaattcatactggtgagaaaccctatgagtgcaaggaatgtggcaaagcctttagtagtggctcagcacttactaatcatcagagaattcacactggtgagaaaccctatgattgtaaggaatgtggaaaggcttttactcagagctcacagcttcgtcaacatcagagaattcacgctggtgagaaaccctttgaatgtcttgaatgtgggaaggcctttactcagaactcacaacttttccagcatcagagaattcatacagatgaaaaaccatatgaatgtaatgaatgtggaaaggcctttaataaatgctcaaaccttactcgacatctgagaattcacactggtgaaaagccctataactgtaaggaatgtgggaaggcttttagtagtggctcggatctcattcgtcatcagggaattcatactaataaataataaaaattaaagcccctgtcaccttcctcatattttaaaccaaaaatcatgtctaatagttaccctcttccgtagttttttttaaaactttgtatttaaattttgtatccaaatgtatttcattccaggttataaattcggagtctaaagtgacattccctctctcccccagtcatataccgatgccagctgttctataattctttcattcattgttttgttctactttcttggtgacacattatactcatgtttatattt

SEQ ID NO: 133557 - DNA, 396 bp, Homo sapiens
ttgggtctcaggtcctctaatctcctatttggtggtatccttataaaatacaagaagtgttctctgagaaatgtggaaaatttctgacgatcccagatgatactaaatcagttgccccaaatcctttagaagaaggaagaataaggccaggcacggtgtctcacgcctgtaatcccagccctttgggaggccgaggcaggcggatcacgaggtcaggagatcaagaccatcctggctaatatggtgaaaccccgtctctactaaaaatacaaaaaaattagccggccgtggtggcgggtgcctgtagtcccagctacttgggaggctgaggcaggagaatggtgtgaacccaggaggcggagcttgcagtgagctgagatcacaccactacactcc

SEQ ID NO: 133558 - DNA, 515 bp, Homo sapiens
gtttgttcccttcgttacattagcctgggccaaggggtaaagcatatctatccctttattgcccgtaagtgtcccttagttccagtggagattaagaaaactggaatttattgagcacatactatatgccagaatttgttctgagggttttgtagttctccttgaagaagtccttcacctccgttgttagctgtattcctagatattttattctctttgtaacaattgtgaatcggagttaattaatgatttgtctccctgcttgtctattattgatgtataggaatgcttgtgatttttgcacattgactttgtatcctgagacttttactattaaaagaaaagcaaacaaacagcaacaacaaaaacagcatcaagaaaaatgttaccaaaaaaacctcccaaatgtcagcagcctcaaagatcgaacctagataaactcacaaaggtgagaaagaatcaatgaaaaaacactgaaacctcaaaaagccagagtgcctcttctcatactaacg

SEQ ID NO: 133559 - DNA, 173 bp, Homo sapiens
cacgatagtgaataagtctcacaagatctgaaggttatataaagagaagttccctacaccacttctgtctttgcctgctgccatccacgtgatatgtgacttgctgctccttgccttctgccataattgtgaggcctcctcagccacacggaaatgtgagtccattaaaacct

SEQ ID NO: 133560 - DNA, 292 bp, Homo sapiens
tgactcttaatcctactaacaaccctaggagatagattctgttattattaccatttcatgatttaggaagctgagaatcagagaggttagtggctggggttgaaattcaagtagtacagtgtaagagcctttgcttctcctagaggctctgtaaaggtctgttgaataactgagtagacgatagattgattgcaatatagttcctctgttgcctttttgaagtgttagtttagtaagcaaccacagagaaattattatctactagagatgggaataggaacggtttcctaaa

SEQ ID NO: 133561 - DNA, 748 bp, Homo sapiens
atcctgacatcagtagattttgctctcctcttttttctctctctcactctctctttcttcctcactctctctctctctgtccctctctttcataggtaaaaacctaaataattggacaagtacttcctttattccaatttattccaattagttaacataaaagaatccttcattttcactctttcttatttcctcctctatcattttacaaagagttccactgctcagctaccaatccttcatctatgctttcttctcgagaatattaggcctttaattacatcatgacttctgtaggctcacacaattcttcatcattcagatcttttgcaacatttaaatacactcaacacacttgaatctcaaaaatcatcaattcctcacagatacctctcttttctttactcccacataccattactactgtcatcctataactcaactcttttaccctgaacaatcaaacttcttggatttatattgagttgagaaaaatatatttattaatggaatacaaatagccaaatgtcacaaaggaaatgaaaatgttatgtttaaacatatttttactaggaatcaatattattgacagaaatggagccatattggcttggttttaaaaatgtgttagtcctatattcagaatagaagaaattaaaaaaattaaaaacactacatggataaaataagatgcatttttctaatataattttctagcttatggaagccaccttagacctatgataaa

SEQ ID NO: 133562 - DNA, 177 bp, Homo sapiens
cccagttctgtccagtttttttttcccttagcataatagaggctgtcggacttttttatactaattactgtgtgagcctcagatgaacccccttcaattcacagggctttgttaagggaggagctgtcaatgtgtctgcccgtttgcagctgtgctgtggctttagcttgcttaaca

SEQ ID NO: 133563 - DNA, 284 bp, Homo sapiens
tgtgtgtttatggacctgctgtgtataatttgatgctacgttacacatttgacactagagtcaacagcaacaatgtaaacaattcaacaacaaaacctcctgtaccaaggtatttaatgttatgcaaacatgattcagctcatctccagactgaggggctaggcactgaaaaagagttggggccaagggagcacgtcctaactcagatttgagctataagccagtgatggcatgagtgtgtgtgttaggagggatgggttgatgcagacagactgaagtgtcac

SEQ ID NO: 133564 - DNA, 456 bp, Homo sapiens
agatgaagttgaaggactaaaacgcctaatgacagagatactgggtcgtcaggatggagtttgcaagactgggtcattgacgatgcatggtaactggtggagaccaaattttgaacctcctgcacccaggcgctcttctcaccacctgccctgctgctaccaggtccaacccactgtcatctcttgcctagattcctgcaattaccttctaatagattcccccactcctaccccacctccagatctactctcaaggcaagagccaacattatcctcagaaaatgttctgcaggttattcagtcttctgctgagcactctcagatggctttctgtggccctctgagcaaaagcagaagtcacccatcccaacctactcagctcccatcattccctctttgacctcacctgacctttctccttagtattgcagcctgtccctactatgaccctccatt

SEQ ID NO: 133565 - DNA, 372 bp, Homo sapiens
gtagtaagatcacttgaggccaagagttcggggccaggctgggcaacatagcaagaccccactgatggcgatggaggcctgtctagagtggctgctgcaaagatgccagccatagtgggggctgtgcggccagggctgcatgttctatggagctggcaggagccctgcccccttatgagttagtggggtgggagcccaccctcatgggtgcagctgccgccacccagccctggctgcagacccaggcatccctgcactcttggaggtccgggaagacccctttcccccatagtctcagaagtgcctgctcccactgcctggactctccaagctcccggctcctgctctgattttggagcaaagtcgaagctg

SEQ ID NO: 133566 - DNA, 513 bp, Homo sapiens
caactgaataaattatagcactagctatgacagacattggtcgttttccacaaatgctggctaacagccaagctctgtaaaacattaccattgacttagcaaacctcaaccagcttagtgcagaaatgcagatactctaattcggtcaaggcaggcaaagcagaaaagcccgagaggcaagtgaattgtctgtaggtttttttaaagctcttctttctccccatcaccagccttttttggagtgtcacagtaatggctaacattgaaaatataactttgtttccatgtattatatgaagcgaacatctttcttacatgaacaatgctgctcccagtaacagactgttttatatacaaaattatatcaatgtaattgcaattgaaaacccaatgacgactttttacattattatggtttccagcaagcatatggttagaatgcccaagttttactccagaagggcagtccagaaaccaccctgttataaataacattctttcaaggacagagag

SEQ ID NO: 133567 - DNA, 606 bp, Homo sapiens
ggtaagtggtgaggcacagggaggtggcactggtcaccagcagacgtgtgcaggagcgcctgtctacagctctgggggtgatggcagcagctcttcacgcccaccccaggacccactccacttggcactggctggtggtcatgcttccatcagaagaaccttgggccatgctgcaaagcgacaacaggacaaatccggggacccaggcaggtgctccctagagaacagggtggtgggtcagaggcttgaccccacttaagctcttcctcaggggtgagattggttgagtgctcaggaagccaatacctggcttgttatgggatgaagctcttggccagaggggacccaggtgtgtgctggtgagaggccccatctccaggttggaatcgttgcttgggctctggggagcactaattaacaaacgtgtggttagggtgaacccgcaggcacgctggctcaaacggagaggcacagagtgcagagtactttttcaaggtggagccaggggaaggacccagagcagggaaagctcagaaacaggactgcacccaaacagcccggcagcccaggccgcctctgccgcattcacaatgacggctttgccgg

SEQ ID NO: 133568 - DNA, 127 bp, Homo sapiens
caaaatgtttaatgagcaaaataattgtgttacagtgaaatgaatatggacatattcactgaattaataaatgaattaaatgatgacttcatggaaacctcctgagaaagtagttatggaccatctt

SEQ ID NO: 133569 - DNA, 963 bp, Homo sapiens
caaccatcatgggcagcacaggcacaaattccaggaccaaagaggaaagcgtcacctcaaattactagaagggtgagaggagtaagaggagagggtctagaaacccaagaaggacttcccaaaatgaggaggtggccacgtcgagaggttcaactccagaagcaagcgctgaccgcagggctgagcagcctagagccaccgcagcgctgccaggcacaggcctcgctcagggcgggtcagagacacacggggccacagcaaaccattgtgatgaatggcagcctgcaaggaggggactgccaagtgccttctggcagaggcgggagtcacgggagaggatggagcatgatggacggagcagatctgaagcaggaagcaggtcaactggccaggaagggcctgggctctgagtgcaggggaggggaagacaacagggcgggtgaggacagaaactcaagatggccagagaggaaaagcgtgggctccccagcaggcctggcctgccttaggcaggcaggagggagaccaatggcagagcacgcggctgtagaggtggggtcagaggcatggaatggccaccaagaagactgacacggaactaagaaaaaggagctgatcaaagcctgctgggcagtggtccacttcatttctaatcgtgaggatcctctaggtgggaatctaaagacctattctgtatgtgagcagggtccaaacgtgttaattccttttgtgtatggagcagaactgcaatcaatgctgaaactctcccgatgctttttatttgcctttacagtaaacaggacccgccaacattctcgagggtgcactctcaggaacagtgtccagcaagcaagtggtcgctgaggcggggagcagcaggcgccagggaggagactgagacctcctcaaaagagagtgctcgctctgtccggggggcagggaggcccagggctgtggggtggc

SEQ ID NO: 133570 - DNA, 110 bp, Homo sapiens
catctcacactctttaaagatatatcaaaactgaaagaattaatcagcaaagacctgcactacaaaaaatattaaaggattcctttcaggagaaggaaaatgataccaga

SEQ ID NO: 133571 - DNA, 790 bp, Homo sapiens
aataatacagtgtggcagctctggaaatcagattctcccttctctgcagggtttattgttgttgctttttgttatttgcttagttccttttcgaactaattctgtgaagttaatttttgccatatgttgtcactgaaatctctgcttggttatcttagtggtcacttgtgagtgggcctttagggactaccagacacatcaaataatgacagcagtttgagagtgaggctttgaaagcattccatgattgttctgtttttttccagttgccactaggctgctggtttttactgtgattgtgtgctgatggttttcaaggctactgtagaggtagagagatgacaatgggcaagttaaaatgcaagagctgctgtttttaccaaggctcagccccttgtcttgaatcagcattacctggattcctgcaagcttttagttaatttccagaattttaagttaagttgatttgaacagtttgtgtcagttttctccttgcttttaatgaagcagaattttctgaagtatttactccaccaatttctttgatgttctcctgtgacaagtgtttaagaatgtttttctagtcaatatatcattatctgtccatgcatatttttctaaaaccttacttttaatggctgcctggtattttaatacatggaggtactgtaatacaattttagtttcacttgtctttagaactcatcaaaaattgttacaattttttactattatgagcagtgctttgttgaatattcttttatcttaatcatgtatgattctcaagact

SEQ ID NO: 133572 - DNA, 734 bp, Homo sapiens
gtgagatgatatctcattgtggttttgatttgtatttctctgataattcgtgatactaagcattttgtcatatactttttaattatttctatgtcttcttttgataaatgtgtattcagatccttagatgacaggatctcctatatagaaaaacctaagtactccaccaaaagactcttagaactgataagtaaattcagtaaagttgcagataaaaaaatcattatacaaaaaaaaccagcatctctatacacctgtaataaactagctaaaaagcaatcccatttgaaatagttacaaataaataaataaaatatctagaaatacatttaacaaatgaaagatctctacaatggaaattataaaacactgatgaaagaatggaaaggacatagaaaaatggaaagatgtccaatatttataattggaagaatattgtgaaaatgaccacacttcccaaatccgatctacagatttaatgtggtcattatcaaaataccagtggcattcttcaaataatagaaaaagtaatcataaaatttgaatgaaaccacaaaagaccctaaatatctaaagcaatcttgagcaaaaagaacaaaattggagacatcacattacttgacctcaaactatactacaaagctataataaccaaaacagaatggtactggtatgaaagcagactatagaccaatggaacagaatagataattcagaaataaatccacatattt

SEQ ID NO: 133573 - DNA, 391 bp, Homo sapiens
tttttcaatttactttcctgcccttgcttcctgtcttccacagaggagtctggccctggtgtcaccattacttgctgtttgccctggacagacagttcacagggatgtgtgtgctcactgagcctgcatgtagagccagtatgggttgcttgcagatgttggttgtttggaaatgggacccactcagctgtggatataactgaggccatcatttcctgcctccaaatagaggcctgcatctaatcctagtaaacagttgtatggggctccagggcaagggatcaaaattagaaccttagtctagcagaggtgacaaaggccaaagaagaaaaacgtcagaataatctgtcagcccagtagtagaggttagttcatcttggttgagtagtag

SEQ ID NO: 133574 - DNA, 467 bp, Homo sapiens
agaataataatgtttgtcagggctgagggtagagattgggaaattactatttaatagacttcaatttgggataacggagaagttccggagatggaaggtcatgatactgcacaacaatgtgaatatacttaatgccactgaattgtacactcaaaaaggattaaaatgataaattgtatgttatacatattttacaattacaaagtcaggtatgttgattttaatttttgctaagcaaaaatattccacaatacccctctaataagaaggccaaaaaaaaaaatgtgaccaacagggaacaaaatgaaaactataaaaggataaacaaaggaaagaataaattccatttccttccctgaaaatggagagaattgaaccaggttttcttccaaatgtaaactctgaaaattttatgtttgtaagggaagggggatgaaggattcttctataatgacataccatgtttc

SEQ ID NO: 133575 - DNA, 425 bp, Homo sapiens
cctcttgctgactgtattctaggatgaagatatccatgcaaacgtaaatatggtacctgggagctgtcagacatgctggagttactttagacttaagtggaaattagttcaaacacatggttattttaaagcgaggtagtggagttgggagctctggtgaaggaagcagaaagaacacagggcttcgcaccagaggactgggtgctaattgcctggattgtgattaagtccaccaatctctctaattctccatttcattatctgtcaaatagtgatagtaataccaccaggttgatatgggggcaagtgagatacgcattgagacgctttttaataaactgaaaagcactgtgcaagcattcattcaataaattagtgaataaaggcatattgggacagcactttgctgcttttattaaagggca

SEQ ID NO: 133576 - DNA, 835 bp, Homo sapiens
cttcagccatcaggctgatattccaggcagcagaaaggaagaaagaagaagggcacctggtttcccttttaggatgcttttgtgaggtacaattagcattcttgtctttaacttcttaaagctcatgcgaaaacagcttactgcaaggtgagcacatgactgcctagcttaacacagaatttccttatgaaggaggactagaacagtggatgttggtgtaggcactgcttagtctgtgtcacatatagcgcataacacatcaatagtgagaatgcttcagttcaaccagttcatggctttgggggctgtaccaattggtttataatggttatgattttgtgaccaattattctttatgtggagatatatataagaggaactgctttattcatttagaccaataaaagcgatacctgaagtgatttgtggacaagtggctacaagaggatattggtgagcatatttgttcccatgagtcattttctaaccagttatcctaacactgggtttctgtactgtctttaattttcacattatctctaaagtcttcaggaggaaatataagcagtgtggtgctagaatagctttctatgtgaattcttttcccccttattcattactggaaccagtaattgcctagagaatgatgggcaaaatgccagctcatcatttctttaagggtctaagaattggctttggagaatggaagaaaattccagaaacactgtcaagaaagttattatttatttcaaatgttatttggaacagcaaaggacaatatgttttatagcacaacttttaagatgactgaattggcaataaattcacatgatga

SEQ ID NO: 133577 - DNA, 453 bp, Homo sapiens
cacagctcataactgacagagatgagaggcaaagcaaggagttctgaccccccagcccagagttctttcctttgcaatgagccatttccctgtttggaatggattcacgagaaattatggaatttcttcccatgaagatctttaagagcccttagtaacaccaccaacagtcctatgcttgataaattttaggtatcactcttccaaagagatgaaaatcattcttggtatcattttgaaaaatctttgagcttaagaagtcttcggccttttgggcctgtctgcaaaataattatcagccctgcccaatacactagaggaggttagagagaggcagttttttgctatgagtcataatttcaatttctattaaaattcttacatggccacatatgctacctctcaggctttgggcctctgggcctgtgctaatttgcatgtctggtttagata

SEQ ID NO: 133578 - DNA, 676 bp, Homo sapiens
aaatttcaggcaactccttttccaagttgttgctcacagattataatagatgaattcagcagaatgttctgacctcctagactaggtcagataactgagttcttgtcctaactcaaatcctaagtagctgtttcttaaagctctgttctgcctctgcagaatgaaggcttggcctatatagtgtatgagattccttctagcttcagggttttgtaactatcagaataggtaatgaggaaggagactatgccctggtagcctttagccatatcacaaatatttaacatactcccaaaatagcacatacaagacagaaattctttgtacttgaagggaataataaatacagaaagcatttgagaagtacacatttaatttctgttaactctttttttcttatttatgtttattattagatgataaatgacttccttttttttagtattaaaacaaggtgatcaggatagtgagaggattgggtcaggtgaaacacatgactcacctgcgtgcttatgattccccttggaagatggttttgggtaacattctgggaaaactatggataaagtcataggcttccatatttaattaattctaagacttttttttcacatttcaacatctcagaaatttatggtatgccaattcaattggcaacttttttcctctcttggta

SEQ ID NO: 133579 - DNA, 756 bp, Homo sapiens
ggaaatgaagaaacagcaagtaacctctaggtctcatgatttccccttcaagtaatgtccaaagcacaccttccctagcattactcctctcacatcagtatctgagcttttatttaattcttgccctaacctcagtgagctgatcctggctccactagggtcagtttcagtttttcaatctcctctaatcttatacccttcttcagaggacgtaggtagtagatccttccctaagaggtaggaaagcttttcctccaatatactccagcttaccctgcaccctaggccagaaaggagacctgagagacaagcggagagacaaaatcatcagtgttactagggtttctgacacagtacaagacaccgtgggagaaggaataaggtcagggagaggctagaatttcgtctcatggagaccaagactgtgccattcatatttagggcaatctgatgaccctttgctgatttttctaatccctacagtttcactgctctgtgtccttttagagaaaaaataaagtcccaggataagatatcacctccagagacaagtgtagataagttacttttttcattcacttattcatttatttagcatctatattgtacctagattagagaaagaatataaaagaggcataaattgtggtctataaaaaccaaatgagagaaaacatcaataaccactgtaggcatttaggagaagaagaaattctcaccagtcaggatggtctaaaaatgccttgtagagagggg

SEQ ID NO: 133580 - DNA, 225 bp, Homo sapiens
tgtactctgaggatcttcccgactagcccgacagggagtgtttcagggtggaggaggagggtgatagtggctgttttctaagacagcaagggatgtgaagggacagccaggcatcaggcaagaagcatgcagtagacaaagggaagggcaaacacaaggcccagaggctgtcgggctagtcggggctgtcgggctagtcggggctgtcgggctagtcgggggggt

SEQ ID NO: 133581 - DNA, 198 bp, Homo sapiens
ttagaagccggggaattgggaaaataaagtttctagattatttatccatttttaaaacagccagtggcctagagagaggccccatagcaattgaatttgctgacactcttaagatctttgttgactaaatagcagcttctacagttgtagcaagtaaatttattccttttacatgtaaaatctgcttaccagagtttg

SEQ ID NO: 133582 - DNA, 160 bp, Homo sapiens
tcctcgcggccgggaggcccgaatacctggcctcagttttcccgtccgaaccccaagaatcgatgcctgggaatggaaagagaagccccggagccgcgagtcagatggagccgcgtagtcagatcgagccgcgtagtcagatcgagccgggtagtcagat

SEQ ID NO: 133583 - DNA, 480 bp, Homo sapiens
tcttcagctttccttgtggttgcaaaatggctgccactgtttctgacatcatatgtagccatgacaacatccagctgaagaagaatagtgtttcttccttgcatctgttcccaggagcatctgcctcatcccaaaatcatgtgaagtacttaccttaatctatccttaggtagataatacgttgcatgtagctgaaacatcttacctgatccatttcaagaggggcaggctccaaatatttacatttgtccatttattctacatatatttattgaaagcctattatgagtaggtgtcggactaggtgctggaggtttaatggggaacagggaacaagacagttcctgccttcagggagctcatggtcaagtgacagaggcagctttgcacagaccactttactcaattcggtttaattgaattatttcagtcatagttctatagtgtgctagtggtaagcctggggcgtcaagctctgca

SEQ ID NO: 133584 - DNA, 625 bp, Homo sapiens
tcatgggaacgtctatactcagaccagcggcgtatgcagaccaatatggcaaagacaggcttttctctcacatccaactgtagcaaaacccaccagcacaaacaaagaacacacacatttaacagcaaaggagaaggaccaaagactgtcaaatcagcaataaacagatagagaaagcctgacagaaaaagcattaaaccatgctgctgattttttaaaaaaaggaactgataaacatgaaaggctattctactaatgttttacctttttatcaaaccaccctgcactgaattgctgctttaggaaaacaaaacaagatcaatacttagcaattcaagatgaagcaataaagtcattttctcttctcagaaatgcaatccttttatcatatccattatgtttctgtactatccggccacacttcccacctcttccgactccttccttcccagcttttacttacttcaaagatggatataaacataatgctttttatcttccctgaagcttctagatttatatctaatctacagcttgcttcaggcatgattaaacatccataaggaaagatactctttcaagcacaacgttgatggatccaacagttaaagcgagcataacattt

SEQ ID NO: 133585 - DNA, 475 bp, Homo sapiens
tgatggccgattcctagagtatccccgagagatcagatggagcacatgagattttttagaaaaaagctgttctcacaggagatttagtaagggcagtttataggtttagattctgctgttccttattttcattgttcttccttacccctcaaaaatataggttaatgagacattagctcatttcacatcctaaatccaaaccctcttcccttggctaacacggggctgggttgggatgttcacattgaccataatcattgggaaaagaaacttagggacttctatcaaacatgagagtttgggaatgatatctgaatttcacaaattaaaaggattctgagctgctggttataagtaaggagggggacaaaggagcatcaggaagcagggtctgagggggtctctgctccttttgagctgggtttctttgggtaaatcacttcatctctctctgggcttcagtttcctcatctgt

SEQ ID NO: 133586 - DNA, 432 bp, Homo sapiens
gaaaacagagatttcatggagcttcctcattccgtcagcctagagtgggattttggctgtcacccttcaaggatgaaaaggtgcagaggacattgggctgcagacagggcgctcgtttaaatgatttaaaagttttggtcagtcgtggtggctcatgcctgtaatcccagcactttggggcgccgaggcgggtggatcacctgaggccaggagttcgagaccagcctgactaacatggagaaaccccatctctactaaaaatacaaaattagtcgggcgtgatgccacatgcctgtaatcccaactactctggaggctgaggcaggagaattgcttgagcctgggaggcggaggttgcggtgagccgagatcgtgctattgcactccagcctgggccacaagagcaaaactccatctcaaaaaaaaaaaaaa

SEQ ID NO: 133587 - DNA, 235 bp, Homo sapiens
gagagtcccagtcagaattaatccatccttcgctgggctctcatagttcttggcttgtattgctattagcacacttaacacttcctacctcgtgttagaattaactatgtctgatcctcccttcacactacacctaaagcaagctgcttagacgtttgttatggcactcagcatcttgcatcaatgctagcctgcctgggtttgcctcccatcttatccagtgagtccttcctgt

SEQ ID NO: 133588 - DNA, 520 bp, Homo sapiens
tagcaatacctttgtctgcttttataatctcctagaattagaattgctggattaagagtattcatgtgcttaacacttttcgtactcatttgtcttagtccattgaggttgctataacaaaataccatagactaagtgacttataaagaataaaaaattgtccctctcagttctggagtctggaaaatccaaaataaaggtgctggcagattcggtgtatcatgaaggcctatttctttgttcctagacaatgtcttctcgctgtgtcctcacatgatgaaaagtaagaatgctggtctcttcggactgttttaagagcactaatccgattcatgggtgctccgccctcacaacctaatcatctcccacaggccttacccaaaaccatcacagtgggaatcaggtttcaacatatgaattttggagcatggtgacacatgcctgtaatcccagctactccacaaactgaggtgtgagaaatgcttgggcccaggagtttgagtccagcctggacaacaca

SEQ ID NO: 133589 - DNA, 266 bp, Homo sapiens
tcatggctttcttctcacctgggctaccctgagtctcctccttggtctacagtctgacttgttcagtctcccatctgttctcaccagacacaggtgacatggtctctaaatgcagatctcaacatgtcatctctgtcccaaaaccctcgatggccctgtcctgagggtgtagtcagtgaggcttgttaggaaccctcggcacctttgttgtcctccacacagtgctcgtgtgggacatccctgctcccttccgcccaccccaccca

SEQ ID NO: 133590 - DNA, 246 bp, Homo sapiens
ttaatgtgagttatagatgtgtagtataattaggaatgtatctggtctttgcactggttcttggcatagagcttcaaaaacccttggaatttcctgagtgataggagtgactttgtgatgcaattggggtgactcatggtagacccttagatagccttagaatgatggctggtctccagaaagattagccctgtgatcacagggttgcaactctggtcagccagacctctgaggaggaaagagggg

SEQ ID NO: 133591 - DNA, 545 bp, Homo sapiens
ataaacaatgtaactcaattgtatctaatttagtaattttagcaggggagggtggctgtaatcctagctactcaggagaatgagaaaggaaaatagtttgagcccaggagttgaaaaccagcctgggcagcacggcaagacctcagctcaacaaacaaacaaacaacaaacaacaaacataaccagagtataatttagtccttttaaaccagcactggtctagtatatataaaaataatttatgggctaggcgtggttgctcacacctgtaatcccagcattttgggaggctgcagtgggcagatcacttgaggccaggagtttgagaccagactggccagcatggcaaaacctcgtctctactaaaaatacaaaaaaattagctgggcgtggtggcacatgtgtgtaatcccagttcttagtaggctgaggcaggagaatcatttgaacccaggtggcagaggttgcagtgagccaagactgcaccactgcactccagccttagtgacagagtgagactctgtctcaaataaataagtaaataa

SEQ ID NO: 133592 - DNA, 309 bp, Homo sapiens
tagctgggactacaggcgcacaccaccacgcccagctaattttgtatttttagtagagacgggatttcaccatgttggccaggctggtctcgaactcctgacctcagatgatccacctgctttagcctcccaaagtgctggtattacagacgtgagccaccacgcctggccagttttctgtagactttagctgttgaggcatgagagaagctaggatgctctggctgtttttatctgtgagccctcatgtttcctgtgattgtatctcttacagaactttatattcaaaaacaaaatagcaggaatacc

SEQ ID NO: 133593 - DNA, 324 bp, Homo sapiens
gtagctaatgttaaatggctgcagggatttatgtttttatgtactttccaagataaactctctgcaaaatgctcagtaacggaatgagagaagtctggtagctaagagtgaattaaaagtggagagatacctatagaaaatgatgactgccattttttagaaaatctaatatgtaacatcttctgacaaaaattaggtgacagggttaaatcatttattaacacaacaactatgatagtaatagtgacagtaacagcaacaatttgggtaataaaagctttacatgcattattttctatcatccttacaacagccatttaggta

SEQ ID NO: 133594 - DNA, 740 bp, Homo sapiens
gcctgggatgcctgattttcacatggccgactcttatcactcaactctttctagaaggattcttccagcagcaggccgggcttggtggctcacgcctgtaatcccagcattttgggaggccgaggagggcgaatcacgaagtcaggagatcgagaccatcctggctaacatggtgaaaccccgtctctactaaaaaatacaaaaaattagccaggcgtggtggcgggcgcctgtagtcccagctactcgggaggctgaggcaggagaatggcgtgaacccgggaggcagagcttgcagtgagccgagatcgcgccactgcactccggcctgggcgacagagcgagactccgtctcaaaaaaaaaaaaaagaaagaaagattcttccagctgccgcgccccgcctttccgcagtcatcttctgcacggcatttacgactctgttaggttgcttggttggtttttactgtctcccccactagaatggaggttccatgagagcagggagcaccctcttgctcagcatggtgccctcagcacacagaacagtgcttggcataaatagatgagcccaatggctctcattttctgcctttgcttccccgccacccatgcttcctgtcatactctgcaggacttgaagttgcttttcagtcattctgtctcacacattgttccttctcctagaatcccttttctccttctcttcttcagttgttgagatgattgagacctacatatc

SEQ ID NO: 133595 - DNA, 301 bp, Homo sapiens
tcaggctttttattgttgagttttaagagttattcatatattctggatactagacctttatcaggtagataattgcaaatattttttcacattttgttagttgtcttttttctttcctgatgtcctttgaagcataaatgattttgaatttggtaaagttcaatttatattttattttgttgcttctttgatgtcataaagataatgcaaactcctgaaggtttacaccaaagttttcttctagttttagctctgttatttgaatccttaataaattagagttaatttttgtatgtggtgt

SEQ ID NO: 133596 - DNA, 272 bp, Homo sapiens
ttgtcctgctttggactatgggagcaaactggctcctgtatcctttattttgatcccagcagtcttcgacagatagcttcatgcttttgcccaccttcccaaagtccatttttagcctatactgaagttggttgtttcttcaaaaagctttggtttcttccagttagaactgtagagactacagtctaagttttaggagagataagatagacagatcctctagaaagaggaatgtaaagaattaattcataatagtccaaaggcaggacaag

SEQ ID NO: 133597 - DNA, 703 bp, Homo sapiens
ttggttattaagataagagagagagtaatctgggttatgaggaaaatctaatgagttttctatttgctgtgtgggtggaggaggtgggaatatgctttaaaaacccaactttagaaaaatctgaggcaaaatcaaatgcttataaatagggacaaggttaagtagatggtgggagggctatatcatgacatattatgtaacctatacaataataatttagccaaacatacattatgtagaaaaatggtcacaatgtatggctaagtgaaaaaatgcaggctataaaatatgcataatataatagtattttattaaaacaaaaaatattctcactgtataattcctattgctatagatatttcagttgtacgacaaaggatgtgttaataagacaggccaggaaatagaactctgaaaataagaccaaacagttataagaaaagtttgtcccatttgatgcagctataaggaaattattttcccaataattttgactttttattttctacatcatttaatctatgtggctcacagaagcttttgccataattatttggccaaattagatgtgaagtataagccctatgaccctgaggtataaaccctatgacaccaagccctattgagtaacctgcaacaactgcctctggcatgaactgaggaaattcaagagccctggggccagtggggacatgtaacatga

SEQ ID NO: 133598 - DNA, 406 bp, Homo sapiens
tcaggtagatttgtacttttagtagagatgggatttcaccatgttggccaggatggtctcgatctcctgaccttgtgatccacccacctcagccttccaaagtactgagattacaagcgtgagccaccattgcccagccccgtatcaaatctttatagataattcagatttatcacagttttcctcttatattgtcgttcctgatataagactttcttatgctttatcatgcaaaagtttttttaattaaaaataattttttgtttgggtaagttacacgtaaaattcaccaaaatgtacaattcagtggcatttagtgcattcacaaagttgtacaaactatcaccactctagttccaaaatgctgggattacaagcgtgagccaccattgcccagccccgtatc

SEQ ID NO: 133599 - DNA, 713 bp, Homo sapiens
tgagacaccttaaggagcgtgtgaggtggtcatgaggatgggcataatgaccctgcagggcctagtcaaggatgggtcatctgaggttttcttctgctaactttcatcatgacccaaagaaggtccagggaaacggatgttatgggaggatcttgctgctaaggaggtgagatccagagggtcactgtgaagttgtgtttttgtatcaacactcgaagtgagagaaccagagaataccttcattccagcttattcctttttgtgattgacttccagtatgttccttgtgaattggtttccttgttgaactgttagcttaattctcatccgagctggtggcactccattttatcccaaatactgtgatgggcaacttctcataatttacgatctaatttttcaaaccttcactattttgaaaatataaccaaggccggttgcggtggctcacgcctgttaatcccagcactttggggggccgaggtgggtgtatcgcctgagttcaggagttcaagaccaccccgggcaacatggtgaaaccccatctctgctaaaatacacaaaattagccgggcatggtggcgcgcacctgtagtcccagctacttgggaggctgaggcacgagaatcacttaagccccagtggtggaggttgcagtgagccgagatcgcaccactacacttcagcttggactacagagtgagaatctgtct

SEQ ID NO: 133600 - DNA, 486 bp, Homo sapiens
  misc_feature (135)..(135): n is a, c, g, or t
  misc_feature (148)..(148): n is a, c, g, or t
  misc_feature (377)..(377): n is a, c, g, or t
gctgtctcatgccaattgtgtggccataattaggtcttgtaattatgtatccttgatgatcgcataactgtggtggtggagtggtggatggatttttagagtttgcttctgatactgagtctgggttatgctatntggaactgtcatngatggtgagatagagatgatggaagaaaacccaaatataccagaaatgggtagtacacctccattgtctatttatattttattctcatcaagatttccaccaaggtgactcacaccactaatcttatcactttggggggccgagtgggaggattgcttgaggccaagagtttgagacaagcctgggcaacatagcgagattctgtctctacagaatttttttttttttntttttgggagaaaaggattttaagggggatccttaaaagtcagaccggaaggcttgaaggttgggcaggggccggtggttaaaaacgggaaacagctttgaaggggagt

SEQ ID NO: 133601 - DNA, 213 bp, Homo sapiens
tgcgtcctgacacacctctccaaagcttgatatgtgtctctggcttgggctctgcatggtccattttgcataatgacatagacactgcctagtccttcgtacagcagagggctcttctgattttctttggtctcaaaggaacaggcagtaggtggaaggcatgaggcaggtgtctgggatgtactcagctgtgtaggtgggaaggagcccatc

SEQ ID NO: 133602 - DNA, 820 bp, Homo sapiens
atatgaaatagtcttaaaggtagggtgcatttcaattctttgctttcctaaacatccaggcttagaaatatttaagttaatggatgagcatagtcctagtaaacttctcactcggaaaccctgtgccagactgtgtgcagatggggcagcagtcatgactggcaggcccagcaagtggaatcacatttgcacattgttttattcactgtgaacatttttgcaggaaaaaaaggaaaaactgtctccctgcttaatgcaattctgacgcgatcagtacaaattataaattacatttaaagtgatggtacaaattagtgaacatttccagctttgtgtgacagtttggggttgagcatcagcgtttaatacttggtgttgccgtcacttggttgtattgaccaacatttctcaaagtatagccctaaatgacatctgccagaaatgcaaattccagggcccccttggaacttcagaatcagcatatctggctgcagaacttgtaatccgcattttaaataagtgcctccccaggtgatccatgtaaagcagttttgttgaggccctctagtacatacagtgggaacgtttgcaaagattatttgttatctcaatttaagatacttatttttaaatccagagaatacaaatgtataatgaaagtttgagagcaaagctgactgattttgggtccatatttttacttatgagtgagatttgagacttcaaggcactgtgggtagtgtcttcaatttgtgcaataaaattaattttcaaagtacaagttagaaatttagttgaagggcacatgtgagaataattt

SEQ ID NO: 133603 - DNA, 497 bp, Homo sapiens
ttctcctccctcaggctcccaagtagctgggactacatgtgtccaccaccacacccagctgattttttgtatttttagtagagacggggtttcactgtgttagccaggatggtctcgatctcctgacctcgtgatccgcccgcctcggcctcccaaagcgctgggattataggcgtgagccaccgcgcccggccgcaggcaggcttttttaaggatagcggtcacaggcctgctggttcatcttttctgcacaatgtatttcataatccagggtagtgcttaactgtagtctcatgacaagcatggaacatttaaatatcatagaaattttaatacatattattgaatattgaaatgaactcaatatgttggatgttgatctgttatgtgataaaatcaaaactcactgtgtctaaactataaatgtgatacattaatgtaagaggtacaatcttacccctcttatctgtggttttgctttctgcggtttcagttac

SEQ ID NO: 133604 - DNA, 457 bp, Homo sapiens
gtgttgtggatgtaataccccctgcgtcaaacatatataaaaagtgctcagattcagagccatactatcacttatgccatccaaaaaattgtttttaatgaagacagggaaaaaagaaaatctaaatgccgtatatactgtgttggccacaggaaacttttaacaaattcagtatttgaattctgtccagaaatgtgtttctctaatgcttcatttctgtcacacttgaagagatgggtatcactgtcatcctgcacatactgtttgctcattcttcatccagcagcgtttcttgagcacctcatgtggcggacatttttttctaggatatgagaatagatcagtggtcaaatggatattatccctgatctcacagattttatattcaataaaggagagacagataatagacaataaaatgtaggcaaccacttaccactgaggaaaagaaaactta

SEQ ID NO: 133605 - DNA, 682 bp, Homo sapiens
atctgaacggacttcctcctaggccagggcagtctaaaatgtaaccaacctgagagactggttcaggccatgacgggaagcaggacatgagacatgcctcattacatccttcagcattgacatcaacacaacagaccttaagactggtaagaaacatttacaatctgttctctctggagcccacctgccacttggaggcttcacgtgcgtgataaaactttggtgtccacaatcccttatcataacccagacattcatttctattgataataacttttttttttttgagacagggtctaactctgttgcccaggctggagtccagtgatgagttcttggttcgctgcaacctctgtctttcaggctcaagctatcctcctaccttagcctcctgagtaactgggactacaggcgggcaccaccatgcctggctaatttttccattttttttgtagacacagggtttcgccatgttgtccactctcatctcaaactcctgagctcaagtaatccacttgcctcggcctcccaaaatgcttggattacaggcgtgtgccaccgcaccaggcctattgataataactatttcaactcattgccaatcagaaaatgtttaaatctgcctataatgtggaagcccccacttcaagtttccggtctttctgcaccgaaccaatgtagt

SEQ ID NO: 133606 - DNA, 345 bp, Homo sapiens
tgtcttgccccaagtgccctctttgctttctttttagagagttctgagactcattagagagtttagagattttagcattcttgaagttctttctgtggtcagtttggtgaaccacttcatttctaaagtttctcagttgaccccattcttccccagctttgcattctccatgaagccacctgtgtttggtgtgtatgggttttctgcaacctaggttgaacaagtcctctagaatcctgaacaattggtgattcatgctggcctggtttttctaattggcctggaaatgtggctgtagtggacacaagtggacttggcctcctctttgatgcgggtaaactttag

SEQ ID NO: 133607 - DNA, 715 bp, Homo sapiens
acctattttcatttcttaattgacttgatttttcttcaaagattaaatgcatttgtttcttgttgaactcagaattttcagttattgtgcttgtttcaaaatgctttaaaattagttcctgcattgtattgagagacatatcaactgaactctaaggactggtgaggtcttgcaagcccaccactgctttcatttgtttgcaaaccccatgggactcctatttccaagtgctggcagtagacagagctggcaaaattttgttctgacagactactttattcttgtcaaggaaagtttgtcagtggaaactatgtcagtagaggagcttctggagaattccagcatcaggggcactgggttgttatttctggcttggctgtagaatgaaccctgggactataggcaagtcacttaatcttttaaagtctcacctgaaaataagaataataccatgattctgtgactcaaagatacacattttccctgcattttattattcctgaaatggaatgtgtctaaataaacttgccagcttccaggcccagtatggataccccagtatgagatataagtaacatttgtgaatgtaggtgaacttggagggctacatagaaggtatctgcttatttgatatcacatgggatgagtgatttgcattgatagcagcacacatgtttatttgcatttcatgttaaataaatcaaaatttacattt

SEQ ID NO: 133608 - DNA, 445 bp, Homo sapiens
gtgagtcactttttcctatttcagtcaatttggctgtaaaataattacaataacgaggtcttgtttactgagactgaagtccgtgctgcccggcctcatttaacggctagaaagaaaaaaaaaaaaaaaaaaaaaaattgtgggcgccatccgggcccgcaaaagagacgtttctaaaaacccaattcgggttgggggggagcacggaccgcccagataggggaagcgaaacattggggacaaggtgggtccctaaagagagactccgggcgcaggaacttcaggtggggggttcccaccaaataaaaaaaacgcgccggggggcaaccacgaggcgtatggaagaaaaaacccagtaggaggttcggagggccacatacaggggggattaacaaacgaggtcccaagcagagagctagtattaaaaattaaccccgcggcacgg

SEQ ID NO: 133609 - DNA, 678 bp, Homo sapiens
aacttggctcaaaacaacacaaatttatcttagttttgtacatcacaaatgtgaagtgggtctcacctaaaatcaaggtgtgagcagggctgcattccttcctggaggccataggggagaatctgtcccctgtgtcttccaggttttagaggccgcccttggtcctgctccaggcccctggttggtgagtgtttctcattctgcattactgtgatgctcttctgcctacctgtcccatatttaaaggatcctgtgatcattctgagcccactggataacccagaataatcttcttatttaaagtgagatgattagcaacctttattctgtttgcaaccttaattcttccttgccatgtaacaaaacaacattcataggttctgtagattgggatttagacatctttggggaaagggggtcattatccagcctatcagaaataatccaaacttttcccctgaaaattacacaaatatacattctatcagtactaagtcaatatcataagtctatatatttctgaatttttttttttttggagacggagtcttgctctgtcacccagcctggagtgcagtggctctatctcggctcactgcaagctccacctcctgggttcacgccattctcctgccttagcctcctgagtagctgggactacaggtgcccaccaccacg

SEQ ID NO: 133610 - DNA, 520 bp, Homo sapiens
gaaattataaaaactactctctcagaccacagtggaatgaaattagaaatcaagattaagaaattcactcaaaaccatacaattccatggaaatcaaataacctgctcctgaatgacttttgagtaaataatgaaattaaggcagaaatcaataagttctttcaaactaataagaacaaagatgcaacataccagaatctttgggacacagctaaggcaatgttaaaatgaaaacatacagcactaaatgcccacaccaagaagttagaagaatctcatttttctatcattatgtaaactatcattacaactgataggttacaaatgataggttatataatgtaacctatcattacaactaaaagaactagagaaccaagataaaacaaatcctaaagctagcagaagacaagaaatattcaaaatcagagttgaattgaaggagattgagacatgaaaaacatttcaaaaggtcaagaaatccaggagttgattttttgaaaaaattaataaaataggt

SEQ ID NO: 133611 - DNA, 126 bp, Homo sapiens
aatgtgccttttacttcctgggattccaaagtaagggatactgtataaaaggatcaccattgctgaagtttaaaaccactgctctaaaagagttttctgccttaatgtgctccttttccaaaattt

SEQ ID NO: 133612 - DNA, 340 bp, Homo sapiens
atgttaggagcttatggggaggcattggaaaaggagaggctgagaaccccgaactagtccctaccttcaggcctgcaccctacttttaggcctcaacaccctccctactcagaccttgccagtagccggctcccatccccagccctgaccttagctcctcctcccagggaatgcaggtgccaggagaccccagggttccgtctctgactcacagaactcagcaggaggtggggacggctagggcacatccaggaaaagcgctgccaagtcagggcggcaccagaccctctcccggacagcacccggggcagcagtctaattggggagaggaggttcaggg

SEQ ID NO: 133613 - DNA, 763 bp, Homo sapiens
ggagaagtccatgggggtggagaggaagaggaagaggaagaaggattctcaagaagctctgcaagatggttgcagttgctggcttaagctgcaaagtaaggaagagaatccagcacacgtggtgctggtacataatttaagctgcaactgaataatagatctttccatcactttatgagcaaaacaactaccagccactcttggactctgtctttttaaaaaatgcttttcagagataatccactggatctctaaaaaaaaaagaaagcaagcaagcaaacacaaacgtagtttaaggagcacaaaaacattttaagatgagaagaaccaatggaaataatttagaatgttctctaggctttatactcaaacttcaaaaccttcagaatcttaagcacaaaagactttgagatgatcaactgtaactactcattttctgataaagaaactgagaactaggccaggcgaggtggctcatgcctataatcccagcacttcgggaggccaaggcaggcggatcacgagctcaggagttcgagaccagcctggccaacatggtgaagccccgtctctaccaaagatacaaaaaattagcagggtgtggtggcgtgtgcctgtaatcccagctacttgggaggctgaggcaggagaatcgcttgaacctaggaggcagacgttgcagtgagctgagatcgggccattgcactccagcctcagcgatagggctagactccacctcaaaaaaaaaaaaaaaaaaaaaaaa

SEQ ID NO: 133614 - DNA, 243 bp, Homo sapiens
aagtcctagttcttggccctgcttttcccagacactgactgtgtggctggagcaaataccttcttcctgttgggcttccactgcccatttgtgcaatgatgaggttgccctggatgcccccagaagacccttctattttgggcaatactttgatgttcatattggaaatgatagaactggctcgaaagttttatgtatagtcattctcccttgcatttgtttagtcaataaatacttactggg

SEQ ID NO: 133615 - DNA, 367 bp, Homo sapiens
ccagattccctgccctttcaccagcctcaaggctggagatgctgagaaggtggaaggtcaagcaagaccttctgagtcttctctgggtggcagcagctttctaactttttttgcggcaaatcagaaagccagcggtgggcttccattttttgcgcatctcgccttttctttgtcctgaaggcaactaatactctgtattgaatccccttctccttgaaatagctagaatgacatgtcttcttgactgaaccatgactgatagggtaggcctattttacaactgagaaaactgaacatgagaaaaaggtaaattgctcaaagtcaagcaagcaagtggcaggacaaaagaattcacacccaggtttat

SEQ ID NO: 133616 - DNA, 347 bp, Homo sapiens
tgtttgcagcccccagaggggcattgagggccccagtaccagccagtgcactggggagtgcatggctctgctgccccgtcctaggaatccgtactggagagcctggtgatcatcaccgctatttctatggacactgcctctcaagagtgctggctgggatacctgcaaacctgcaagtttaatagccccaattctcttcttcttaggcagtaatgggtctgccttaggcagctcttaggcatcaagagctctgggttcatgacagaatgccatgaaaacaaaagccaccatttgaaccacgagaatatatgttgtcagcctggccaacatggtgaaaccccgtctcc

SEQ ID NO: 133617 - DNA, 148 bp, Homo sapiens
ctcatggaaaacaggtactggacccgtctcaagcactgagcacacagctatgccccaggcagaagacttctgatgaagggaggcaggggccacacttactcagccagcctatgcaagagaagttctaatagcaacaacaacaaagggc

SEQ ID NO: 133618 - DNA, 179 bp, Homo sapiens
tcttcttggtagagatagagtcattgagcacgataatacagaagctgttgtgttgcagattaccatggcaataacgacaacaaaaaaaagtgcagtcttttttttttaggctccaatttgaagactgcaagaatctatcgatagagacaagaacaggtctcaaccacaagaagctgcag

SEQ ID NO: 133619 - DNA, 496 bp, Homo sapiens
ggtgagaggatcattggagcctggaagtcgaggctgcagtgggccatgattgcatcactgcactccagcctgggagacagagtaagaccctgtctcaaaaaaaaagtaacagataattatgaacatgtacttgcaccctgtgtgaataaccaaataagcaaaggcagaatgaggtcaaagagcacgcaaattagaaatttttatgtcatactgctctctaaaactattttaagtcctactgatcatgaagaaaaacgtctttcaaaacctcatcaaatactgggtagcactggtcttgttaatttggtagtccaaaaatactaagttgctttaatttgcatttctttaacaactagtgagattgaacatagtttcacaggataattggccattagtatttcttccgtaaactatgtttatgatccataaatctattggttcctctccttcctacagacttgtaagagctcattttatgttaggatatcagccctct

SEQ ID NO: 133620 - DNA, 561 bp, Homo sapiens
agcagccagcttattaggtttaatcatcaactgtgcttatcagatccttcatttgtaagtcccttgaagaaaaaaagtgcaaaatgattccttttgtgctttggagattgatatcaaagcaggccttgaggtcaactacagaggtgctttaagtggaaattataagcaggaaacaaaatgcactcattcaatttcttcaagttgagtggagacctcctggatgccacgtgtcagctttacctgctagaaacacacgctcacctcgctgtccaagaccctggaaaggggaaccccttgaattgattggattttgctccccttggccaattcttcactatggtttagagatttgtggtcttccagtggcattctactcaatcaaggtgaccagccatctgttgaactgtcttttccaacctgatatacccaagtgttgtggttccaatttcaatattccctcctagggagagcaaatgagaagatctatgggtgaataatacaagaatatggtaaatggttgacaatattacccacgaacctgcattaagtcaggttggttcg

SEQ ID NO: 133621 - DNA, 458 bp, Homo sapiens
agagctgtggaaccatcaccaaatagcatgcctccttcgctttctcttcatcttgatcctcccctcctccagtagttccctgttcttttcaaatagaacaccacacaaggaaactcaatgaaggaaagtgtgtgtgtgtgtgtctgcatgtgagtatctgtcttgcgtgtggacatgtgggcgtgtttgagcatgtgtaagaaaaagtgcatgtgaagaaagcaaacagtaaagcaaatggggcagctgttaataggcgaatctgtgtaaagattatatgagtgttctatgtactgttcttattcttgcatctataaatttgaagttatttccaaagaagatacttaacacatggatatatgtgagactaatttgactgcactaggagttctctggaatggaaattttcttctacatcctgataacatatcttactcttcccatttaacagatggaac

SEQ ID NO: 133622 - DNA, 347 bp, Homo sapiens
atgaattccaaacattggcttaacttttaaaaggtttttagaacacagccaaaataacatcatatagcaagccaaaccagaaactggcttgggtatagcctggctatattgtcagtgacataaggaatccagacctgctaactgtgtcacacctgagtctttaaatgatctcatcactgttattatgtcatacctgcagcagcttctgacctcattaacactatgttctatgataactgacagaagaacacttcatggcaatgcaatttgaactcagggcctggcacagtggtaacactaaccagggaaataaatactcaacaagagtgagcagagctatatctgta

SEQ ID NO: 133623 - DNA, 417 bp, Homo sapiens
tgaatgttcacccttcttttcctattataattcattcagatatatgttgctggattaacctaagcacaaatctgctcatctcttcattgctcaaaattgatctccatttccttccaaatgaagcactaagtcctcaaactagtatttaaaaatcattcctactacacctgaaggatgcttttataatcatatcacacctactcattaagtttcacccaagcatgacaattttgtgaattccctattccaggccttcgcattcctgctagtttcatgccctccacctgaaacactccattctagttcacccctttgaaaaccttaatcatcctttaagacctagcccaaaggagccttcattcataaatgtgtcctttccctccttgtaagaggccatttgatgaccctcttccttga

SEQ ID NO: 133624 - DNA, 538 bp, Homo sapiens
aaggatctaaaagcagaaatagcatttgacccagacaatcccattaactgtgtatatatccaaaggattataaattattctgctatgaagacacatgcatacttatgtttattgcagcacctttcacaatagcaaagacttggaaccaacccaaatgcccatcaatgatagactggataaagaaaatgtcgtgcatatataccatggaatactatgtagccataaaaaggaatgagttcatgtcctttgcagggcacatagatgaagctggaaaccatctatgtggaaaccatcattctcagcaagctaacacaggaacagaaaaccaaacaccgcctgtcctcataacgtgggagttgaacaatgagaacatatgggcacagggagggaaacacaataatagagggatactttcaaatataacaaacaagggttccttaatctcagtttgggaagcactgctatccaggatatggcagggaggggaacatcacacaccagggctaatgtgtgtattttagtagagagaagatttcac

SEQ ID NO: 133625 - DNA, 457 bp, Homo sapiens
tattaaaaatcataacagcagttggcaaatgggcaagatataagatgaatacaaaaatattaattgcaaaatgtacactagcaaacaaaaatcgtatttaagcatgccttcacaaataatagacatatatttctatctctgaggtagcaaagtagagatacaaagacttgtgaatgagctaaatacttccctaaaagtaagaacataaaggaccacttggtatccgcagccactcagaagaggtggcaaagagaaggctttacactttgcctggaggtgacggattaaccagagcctgagggtggcctgctcaggttcaggtctcctctcccggagaatgaaacccaggctaattggctaattaccatgaaacaccaacaaggcccaacagagtaaagaggaaacagatgcaagacaccctgtgacccaggctgatgggcaccagcttcaggtaaag

SEQ ID NO: 133626 - DNA, 543 bp, Homo sapiens
atacagatcagaaacagacaaaggaagatattcataggtggaatctgggactggagggtcccagatggaaagttttcttctcctcagggacatgttgtcctcccagtattgacatgtagcaatatgtggagagtaatgccaactcaggaagctcaccaaagcatcagtgttcagagtttttattggggtttcattgcataggcatgattgagcaaattaccgcccatgtaattgaattcagtctccaatgctacctctaccttccctggatccggctgattttgtgcgggccaaagccccaaccctctaatcacaatggtggttctttctgcatggccagcctccatcctgagttatctcattagcaaaaactatctaggggctcaccatgagtcacctggttagcataaactatccaaaggacccacagtgaatagtaaagacactgctatcactcagaacattccagaggtttagaggttaacttccaggagctgggacaaaagccagacctctctttgggtaaagttaattattcactac

SEQ ID NO: 133627 - DNA, 1191 bp, Homo sapiens
gcacagaaggagttaagtttcattagaacaagaggtgtcactgtgcctgagggctactgtggaccactgtagccctcaggcacagaaggagttaagtttcattagaacaagaggtgtcactgtgactccaacatgcagttcgctcagttcgctctgaagagtaagagtctggaagataaagacatgtttttgaggagtaattaacaaaaatcatctgtgtaatttgcttaagatgcttacctgcatttgggaaatattttcttaaatagagtgttaaattctactaggtggtattaaatgtctcctaggtagatatttaaaagtcaaaagcagaatagcacatccaggaaccttaatattttaggatggatttggttttggttcttcttcaccactgatttactttgtgacattgggtaaattagttttcctctctactttttaactttcctattaatatcctaaggaaaaaaatgaatgagactattaaaacgtcattaaaatgatccaaggtaaggtctgaaaagtgctttcattctttagagaaagatatgagggttgatgattattaatgagctaagattctgttagatttatgttttacagaatttaaggtttttcttataagatattactcctgtcagtttctaatttcatctgtatattttctaaacatgctgccatatgagttctcacactgtgcctgttggtaggtagcaagccctattgaatcccccgttctgtctttggaacagttggttaaggaggggaggtgaagtagtagagagcccattccgggtatctggttggttccaggagctagtgcctggctctggtggcctgagaagaaccatcttattctgagcactccaatggaggatagggcttcatggtagaaaatgacattatttgaacgtaacggagtgggtgatagtgttggctgaggtaggaaataggaggagacatggaattggatggagctcagagggaaggatgatcatgagtttggttttccatgcagcgagtctgagctttctggaaagagatggaggcagatttaataataaaacactttgtttttggctatctcaagactggcgtgtagaagtgacagctgtgagctcacatagctctgctgttgatactctgtattcatcctttccgatagcaacttacctggtgagtagacgt

SEQ ID NO: 133628 - DNA, 574 bp, Homo sapiens
gctaaggagcagctagatgtttctgcaataatatcacccagctgggtctcattgttggtacccacttgcagcttttctttttccatttaaaaatatttaaaattatttagctttaaaactcctttagaaaacagggagtgctttagtaaaattaccagtgaaatgtcattggcataatttctataactgagatcataaggcctaaagatactgatttaaattttatctcacgcaagtttttgggatttcaaggtgccctctagtatgtctttttccactgtttgtttgaacatgactagtcatattttctttttccaataaaaaatctctaaacaattatttaatcttaagtgttgttcgaagttatgtttttaaagagaatataaagaattatgaaattcatgatcatttggttactcatagagctgaattatccaatacttaccctaggagaattttacctggaaattaccagatatgctctcaaccccattttttttctaacaaataaatgaaacctagttggggcgcagtggctgaggccggcagaggttgaggcctccaacacagaggt

SEQ ID NO: 133629 - DNA, 237 bp, Homo sapiens
aagactaagaaagggttacatacatctgccatatcctttcattctctcagtgctaaggaactaaatgtgtgatcgtttatctgtaaatgttttccttgttgtctttagtatcctatgttttggctcccatgaacctagttaattcttagcaactttcaagatcaagattagccatgggaataggcaaccagctgttacatctttttggtttagtaacttactgacatgcatttcaaa

SEQ ID NO: 133630 - DNA, 603 bp, Homo sapiens
ggtcaatcttcttatcataatgttgagtggaagaagccaggtccaccagacacatgctgctcatttatgcaaagtttggacacaggcaaaacaaaactagtttgatcgtgatgggaaacattagagaaatgcaaagacatgaccatcataattgtcaggagaaggcattggttaggattgggaagcggcaagcagaagcatttagggattggctggcaatgttttacttctcggctgagtgagggttgcatcggtgtttatttgataacacgttctaggggctgggcaagatggctcatgtttgtagtctcagtactttgggaggccaaagatgggaggattgcttgagcccgtgagtttgagaccagcgtgggtgacatagcgagaccctgtctctacaaaaaattaaaaaaaaaaaaaaaaacccagctgcgtgtggtggcacagcctcaaactcctgggctcaagcgatcctcccttcgccttccagccactcaggaggctggggtgggaggatcgcttgaacccaggagtttgaggctgcagtgagctatgaatgagccactgcactccagcctgggcaacagggcaagaccctgtctc

SEQ ID NO: 133631 - DNA, 641 bp, Homo sapiens
gttccttgggcagcaaccactagaaaccccacaaagaccagctggggccagaggcaggatgtgtggtcctgggcaggtctgagacagatcaaacacaaggtaatcagtctgcagaaccacagacaacacagacctacgccatggaattccagatcattccagatctacaagtcattggttcattccataagtatttatcatagcacatagcacgcgccaagcaccgtgctaggctgtcttgagaatggaggtgtggggaaagagggatgaggtacaaagatgcatacccagagaaggaatctcctcccttaaggaagcagtgaggggaacagacgagctccacacacaaagggacgggaggagagggatagacacaaagcctgctagaggtgatcagggaaggcttcacagaggaggcagtatcagtcccagcaactgtagcccagttgctccccgtcacccaaagacagccacacctgatcccctggctcaggcagctggaaagaggagctgagaaaaaggagagtcatgctctcagcaaacatcaagtgctgtaagcatcataaaatcatcatcatcatcatcaccatcagacactgatggcccagtgggaggcctgggaccctgaagagagcccaggt

SEQ ID NO: 133632 - DNA, 1311 bp, Homo sapiens
ggagagccaatcaatatacacaaagagggaggagaagagagagtgccaataaggacacaaggaaagtggtagcgtacccttgtcacttcccaaagtctcccagcgggataccggtgccctctgcccttaatcaagatggccgccttgggggggctctagcgcacagtggaatatggcggtgcttccggtcccgctgccctcagcgaagatggcggcagtggagaagcggcggcaagcggtaccaccgccggccggtttcacggacagcggccgccagtcggtatcccgggcggcgggggcggccgagagcgaggaggacttcctgcggcaggtcggcgtgacggaaatgctacgtgcggccctgctgaaggtgctggaggcgcggcccgaggagccgatcgccttcctggctcactacttcgagaacatgggcctgcgctcgcctgtaaacggcggcgccggggagcccccgggccagctcctgctgcagcagcagcgcctgggccgcgcgctatggcaccttcgcctggcccaccactcccagagggccgccttcaacaacaacgtgagcgtggcctacgagtgcctgagcgccggcgggcgcaggaagaggccggggctggacgggcgcacctacagcgagctgctcaggcgcatctgccgggacggccaagcccccgaggaggtggtggcgccgctgctgcgcaaggtgcagtgccgtgaccacgaggcggtgccgctgagcgtcttccgcgcgggcacactcacctgcttcgtgctgctggagttcgtggcgcgcgccggcgcgctcttccagctgctggaggactcggccgccgccgtggccgaccgccgcgtgggccaggccgtgctggacaccctggagggcgcgctgcaggccagcgacgccgccgcgcccgcgcgcttcctggaggccggctcgcgcttggggcccgacagcctggcgctggcgctggaccgcgccgtcggggggcggcggcccagcgcgcccatgacccgcgaggagtttctggagagggccgccgcgctcttcatcgcgaaggtcaagccggtgggctgaggcccgtgggccgcgcggatccgggatctgcgctggggggtccccgcgtgcggggcgcgcggagccttcccttcgccctggtgaggccctgccataaccaggcgcccagccctgcggaggaggccggggctcccaggaagcggacgcccggtccccacacagcgccgcggccgcccctccacccccgcgggagcccctgccccacgctaataaaatgtgttgcgaggctg

SEQ ID NO: 133633 - DNA, 1756 bp, Homo sapiens
ggagagccaatcaatatacacaaagagggaggagaagagagagtgccaataaggacacaaggaaagtggtagcgtacccttgtcacttcccaaagtctcccagcgggataccggtgccctctgcccttaatcaagatggccgccttgggggggctctagcgcacagtggaatatggcggtgcttccggtcccgctgccctcagcgaagatggcggcagtggagaagcggcggcaagcggtaccaccgccggccggtttcacggacagcggccgccagtcggtatcccgggcggcgggggcggccgagagcgaggaggacttcctgcggcaggtcggcgtgacggaaatgctacgtgcggccctgctgaaggtgctggaggcgcggcccgaggagccgatcgccttcctggctcactacttcgagaacatgggcctgcgctcgcctgtaaacggcggcgccggggagcccccgggccagctcctgctgcagcagcagcgcctgggccgcgcgctatggcaccttcgcctggcccaccactcccagagggccgccttcaacaacaacgtgagcgtggcctacgagtgcctgagcgccggcgggcgcaggaagaggccggggctggacgggcgcacctacagcgagctgctcaggcgcatctgccgggacggccaagcccccgaggaggtggtggcgccgctgctgcgcaaggtgcagtgccgtgaccacgaggcggtgccgctgagcgtcttccgcgcgggcacactcacctgcttcgtgctgctggagttcgtggcgcgcgccggcgcgctcttccagctgctggaggactcggccgccgccgtggccgaccgccgcgtgggccaggccgtgctggacaccctggagggcgcgctgcaggccagcgacgccgccgcgcccgcgcgcttcctggaggccggctcgcgcttggggcccgacagcctggcgctggcgctggaccgcgccgtcggggggcggcggcccagcgcgcccatgacccgcgaggagtttctggagagggccgccgcgctcttcatcgcgaaggtcaagccggtgggctgaggcccgtgggccgcgcggatccgggatctgcgctggggggtccccgcgtgcggggcgcgcggagccttcccttcgccctggtgaggccctgccataaccaggcgcccagccctgcggaggaggccggggctcccaggaagcggacgcccggtccccacacagcgccgcggccgcccctccacccccgcgggagcccctgccccacgctaataaaatgtgttgcgaggctgacgctggtgtgtatgcgagcgcccgcctcccagccccggtgcccgcagaagacgcttttccccagcaggtcacccacggccccggaaccgcggcgactggaggctggattcgaggccggaaacgccgggacccctggacccggcctggtgggagcagcggagggggacgccccacggggccctgcggagcctgaagccggagagcaggcggctcttctggaacgcagggcccgggccctccagccccgcccggcccaggtatcctccctgagcctcagtctccccagatgtcaaatgaagaggccagctgggcagatggtagtgacattggtgagacaacagccctaacacttcccaggaactgaagtgcctcatgtgattgattcccaggcccaggcagcggaggttacaccctcagcaagggctcagctgggatctgcgcccg

SEQ ID NO: 133634 - DNA, 729 bp, Homo sapiens
  misc_feature (672)..(672): n is a, c, g, or t
  misc_feature (708)..(708): n is a, c, g, or t
ggagagccaatcaatatacacaaagagggaggagaagagagagtgccaataaggacacaaggaaagtggtagcgtacccttgtcacttcccaaagtctcccagcgggataccggtgccctctgcccttaatcaagatggccgccttgggggggctctagcgcacagtggaatatggcggtgcttccggtcccgctgccctcagcgaagatggcggcagtggagaagcggcggcaagcggtaccaccgccggccggtttcacggacagcggccgccagtcggtatcccgggcggcgggggcggccgagagcgaggaggacttcctgcggcaggtcggcgtgacggaaatgctacgtgcggccctgctgaaggtgctggaggcgcggcccgaggagccgatcgccttcctggctcactacttcgagaacatgggcctgcgctcgcctgtaaacggcggcgccggggagcccccgggccagctcctgctgcagcagcagcgcctgggccgcgcgctatggcaccttcgcctggcccaccactcccagagggccgccttcaacaacaacgtgagcgtggcctacgagtgcctgagcgccggcgggcgcaggaagaggccggggctggacgggcttttttttttttttttttttttttttttttttttttttttttntttttttttttttttttttttttttttttttttttntttttttttttttttcttttt

SEQ ID NO: 133635 - DNA, 1875 bp, Homo sapiens
ggagagccaatcaatatacacaaagagggaggagaagagagagtgccaataaggacacaaggaaagtggtagcgtacccttgtcacttcccaaagtctcccagcgggataccggtgccctctgcccttaatcaagatggccgccttgggggggctctagcgcacagtggaatatggcggtgcttccggtcccgctgccctcagcgaagatggcggcagtggagaagcggcggcaagcggtaccaccgccggccggtttcacggacagcggccgccagtcggtatcccgggcggcgggggcggccgagagcgaggaggacttcctgcggcaggtcggcgtgacggaaatgctacgtgcggccctgctgaaggtgctggaggcgcggcccgaggagccgatcgccttcctggctcactacttcgagaacatgggcctgcgctcgcctgtaaacggcggcgccggggagcccccgggccagctcctgctgcagcagcagcgcctgggccgcgcgctatggcaccttcgcctggcccaccactcccagagatgccccagacagatgcctgccgttgattcaagacatttactgagcacctactgtgggcagggcagtgttctgggcaccagggctataaccaagacgaacttccggccctggagggcagggccgccttcaacaacaacgtgagcgtggcctacgagtgcctgagcgccggcgggcgcaggaagaggccggggctggacgggcgcacctacagcgagctgctcaggcgcatctgccgggacggccaagcccccgaggaggtggtggcgccgctgctgcgcaaggtgcagtgccgtgaccacgaggcggtgccgctgagcgtcttccgcgcgggcacactcacctgcttcgtgctgctggagttcgtggcgcgcgccggcgcgctcttccagctgctggaggactcggccgccgccgtggccgaccgccgcgtgggccaggccgtgctggacaccctggagggcgcgctgcaggccagcgacgccgccgcgcccgcgcgcttcctggaggccggctcgcgcttggggcccgacagcctggcgctggcgctggaccgcgccgtcggggggcggcggcccagcgcgcccatgacccgcgaggagtttctggagagggccgccgcgctcttcatcgcgaaggtcaagccggtgggctgaggcccgtgggccgcgcggatccgggatctgcgctggggggtccccgcgtgcggggcgcgcggagccttcccttcgccctggtgaggccctgccataaccaggcgcccagccctgcggaggaggccggggctcccaggaagcggacgcccggtccccacacagcgccgcggccgcccctccacccccgcgggagcccctgccccacgctaataaaatgtgttgcgaggctgacgctggtgtgtatgcgagcgcccgcctcccagccccggtgcccgcagaagacgcttttccccagcaggtcacccacggccccggaaccgcggcgactggaggctggattcgaggccggaaacgccgggacccctggacccggcctggtgggagcagcggagggggacgccccacggggccctgcggagcctgaagccggagagcaggcggctcttctggaacgcagggcccgggccctccagccccgcccggcccaggtatcctccctgagcctcagtctccccagatgtcaaatgaagaggccagctgggcagatggtagtgacattggtgagacaacagccctaacacttcccaggaactgaagtgcctcatgtgattgattcccaggcccaggcagcggaggttacaccctcagcaagggctcagctgggatctgcgcccg

SEQ ID NO: 133636 - DNA, 454 bp, Homo sapiens
catgcaatcttgtcataccagtgtgtaactctataggaaaggcaagtaatggttacattttatcagaataaactcatgacaagaacatttgaattctttatatggtgaagttcttcaaaggctcttttataattgagttttgctataggaattgttaagaaacaaggtttttgttttttgtgtgctgcattttttggcactcatctaactttatttctttattttttcattgatacgtaatattttgtacatgtttatgagggtacttgtgatattttttacatgcatagaatgtgtaatgatcaagtcagagtatttgggggttatcccatcaccttgagcatttatcatttcttctggctattttgtttttgtttttggttttttgtttgtttgtttgtttgtttgagacagggcctctctcttgcccaggctggaatgcagcgatgcatag

SEQ ID NO: 133637 - DNA, 341 bp, Homo sapiens
atttcctctaggtgtgatgttcggttgttaacttaagatctttctaactttttgatgtaggcattcagctctataaacttccctcttaatattgctttagctgtgtcccagagattctggtatgtagtatctttgttctaattagtttcaaataatttctgaatttctaccttaatttcattgtttacccaaaagtcattcagaagcaggttaatttccattaatttctatttttattgcactgtagtctgagagtgtggttggtatgatttttttttatttgctaaggattgttttatggctgattagtcaattttagattatgggccatgtgcagatga

SEQ ID NO: 133638 - DNA, 1346 bp, Homo sapiens
acatagaaaaggcgtagcaaaaatacagtattgtggaaccactgccatatacgtggtccatccttgactgaacatcatgcggcatgtggctgtatgtatacacatagtttttgctgtgagtttgcatccatctcataggaagacatatatcaaaataaggaccagactggagagtgtgtaaattacttttcaatactaatggcttattaatttgatattgtcagcaagtatgttgcaaaaacaaattccaccagaatgtgagttccatgagagcaggaactgggttgttcaccttgttggcacttggagtagagccactgagcttcgtgctgcataaaattgcttggaagaaagaagggagggcattccaggtaactgaagcattgctatgcaaagtaagcatttgccctctgaaatattttaacaatgtttatagaaacctttctcaattgtattaaactttgtaaattgtaaaaattattctgttataccttttctatttactaggcacaggcagccataggtgctaggtatgttttgaaaacatattgaacctacagtgtacatatcattccatgccattaaatattcttatttaatcatagatgtgttcaggtgtgtttggtttcctatttgtggatgtactagattgttttctttttttaacaaaacctgtgaacttgctttaagtattatcatttggtgacatgcccgccatttcagaaataaatgtttgagcaaagaggaaagccaccgggtctgattcagctctctggaggctccagagcttacctcgctgatgggaaaaagagcatcgatttaattgcccttggtaccgacttctagtatctagtattttgccagactcaggtatttcttaaagccattattcagagtcttcagcaaggacattgtattttacttgtgtctccttagttttacctagtttatttcatggttttaaagtattgtacatttttataatcctttaacaagacaaaaggttgagatgttggacatttaaatgccaaaggtgttttattatgagacttagcatttcatatttggggatggtaccttatcgaaaatcagataaactttggttggatgggtatttggaggaatcttttaagtcttttcttaagcaaagtttggacactctaaaataaggttgccaactggcatgtagagagaaaaggatgtgtcatacatttagaccaggtggcctgtcctgtaaatttttttgaggggaggggtgggcttgtttttttctgtgtttcggttttttccaatttttgttttgtgataaaatatgcataataaaacttattttatcaatttttaat

SEQ ID NO: 133639 - DNA, 541 bp, Homo sapiens
atatatggttagggcttgggaggggcccatgcaaggggtggctccaaaggggaagcacccctagctccacagtacatctgcctttgcctctgcccataagatatctctgcttcttgccaaactgggtattggagttcatttagacagaagagttttccttttcattcccaaacacgaggccctcggaagttaccagtcaacagctatttaactgatactttattctggttatgtccttgcaaccataaccatctctattctgggactgaaaacattagagacagtgtaacatgtcatgtgatcagattcggcatgttctctaaaatctcaacagtgctaaattgcctccccatgttacgaaagttgcccaaggaaatgaaatcccaggatggatgctcgccataaaaataaccccctcgtttctctgtccccttccctgatagtcacggaaaagccaaggattaatagactcctttaatttaactcagttttgtctctgatgagggtctagtgaaagcaactgcccaatctgtcgcttgaa

SEQ ID NO: 133640 - DNA, 546 bp, Homo sapiens
gccgtgggctgaaccaaagagcaggctctgatgtcagcgacaaaggctctcaaataacaatcttttcagaagatcaacagggagagagaccaggccccggatgataaagctactggtgcagccactgaaccacagggctttctcttccttcactctgcctctttctgattgggaacacacaacagttgttttaaagctttccctggagggtgagtgataagaaacctattacctggaagtatcgcctttctaaagtaggagaacaaaaggccacactttccccagatggtgagtctcttggggcttcagggtttggaaaaggctcttgcttggacatcctgatccgtcttccattatgacactggcccgacgtttaagctctgactcgggatacagttcctgccccatcctctccatttgtgcttttccttgtgttgtggttgctgggcaatatgacaaaattatgtttggattcctgcgtgggaggaaaactttaatactgctttgatctgcaaatcaaaggacaaagtcactttcacaggattt

SEQ ID NO: 133641 - DNA, 404 bp, Homo sapiens
tttaaatataatctattttaacaatacccagaggtatatgtccagcagatccttctctcctgaattccagattcataaacccaactgtttactcaacatccctaagtcttttttttttttttttttttgagacagagagtctcactctatgacccaggctggagtgcagtggcgcaatcttggctcattgcaacctccacctcccaggttcaagcaattttcctgcctcagcctcccaagtagctggaaatacaggaatgtgccaccacgcacaactaattttttgtatttttaatagacatgcggtttcaccatgttagccagggtgatgggtaccgcactcaaattcgggatcacggacgtaacagcatgctgtctgaaagtgatctccaggcccagaaccg

SEQ ID NO: 133642 - DNA, 408 bp, Homo sapiens
tctctgatcatttgaatgtgtacgttttaccctcggaatctttgtcatctttcttttccttatattgagatgctcaaatttccttttcataatgatgtgccatggtgtgttctgtctattcatttattccttcactcactcactcacaagtagacaactgatgaaccctttcaatctaaagactaacagtcttctgggaaattttcttatagcatttctctgataatttcccattgctcctttttcctttttcccacattctggaactccagtgattcagatgttgaatctcctagaacggcttctaattttaaaaatattttattctctattatctagcttcttgtctttttattctactgcctgagacatttgacatattctttggatccttccagtgagtatact

SEQ ID NO: 133643 - DNA, 495 bp, Homo sapiens
tcagtgtaatttctcatggctgattttgacaggagatgtcaggttagtcttagttatcctggagcctaactggatcttgggaataaatctcttattttggtagcactttcaaataagtggcagcagttcatgcataattacttctgaattatctaggggatttatcaggtttgattatagatgcataatgaatttaccaaatttgtgggtattatggagatattaattccatatgaaacctcacaattcattcatgtgccatttgttttcattccttttttataataagctaattagtttaaattatttgtacttgtacaaggtcttgaaacacatattaggaatgattatacagagaacccaataaatgagaagttttggagacagcattaattgtgatgaagggttcataaagcagtggatgttcaattttcccatttggggtggtaataacaggtctaatcatgacacctccataaagtcatgggaagtccc

SEQ ID NO: 133644 - DNA, 387 bp, Homo sapiens
gcttgaattcgaattcaatttactgcttccaggctccaaatgcgcctttcaataaagtagttcctcattatccttgggagatacattgcaagacccctagtagataattgaaaccacagatagaactaaacccactatacactatgttttttcctatatatatatatgataaagtttataagttagccacagagattaataataaaatacagcaattataacaatatactgtaataagatgaatgtgaactctcaatacatcttattgtactgtactaacccttcttgtgattatatgagataaaatgcctaaatgaagtgaatgacataagcatgatgacataaatgaataattccagaaataaacaattcatgttttaaattgca

SEQ ID NO: 133645 - DNA, 384 bp, Homo sapiens
tctgggaggggtggtgaggctgtgctgggcccaggcctgcccatgccaagctgttagaaggcagggacatgtgtcctccatgcctcctctcctgcttttagctcctttctcttgctttcccatgccagctcctctgactttacttgggatcctccgagacagcccatttagggcatgtgaatccgtaaaggccacctgcgttcagatgtctaattccagctgtctggaattagatttggactggcctgcgtttgaatccaagccccactgtcactagctgcgtggttggtcttcagcaagtcacttctctctgggcctcaggggcaggagtcttgttttgcctgtgttacagttttatgtaattcaggcatcaaaatgtacctg

SEQ ID NO: 133646 - DNA, 893 bp, Homo sapiens
aactttaaaaaatagaaagtaaaaattgacagacatatgaagagaaattgtcaatgattaatcacagtgccagtgacagactttggcatatttctttcagaaagcaatagatcaaataaacaaataggatatacattattttcaaacacttttggaacatttaccaagaatgatcagatattaaggccacaaagaaaatttcaacaaaatccatcaagtagagtacacataggccacattcaccaactacaatgcaatataattagaaattaacagcagaaaaaaaaaatctacacatctggaaattaaaagatacttttctaagatattttttgggttaaagaactcaaaatgggaatctcaagctatttagaaatgaacaatgacaagatatgtcagttatgaagcttttgtctattggccccaaaccccatcctctgctttgtgatgctggggataaaactctgtaaaactttctgctgggcagcagctccctgctcagctctgccagcagggggcacgagagggaggctgcagggatggagaaggaagacacttgcttcttcctatttgctttcatcaccccagcaacggtccctcaccctggcagtaacagttggttctagcatctttttttccccctcagagcccacctccctgtgcagcttcagagcagaagcaccaaatggatagcatcttttcctcaaaatctgagccccagccctgcagggcctctcctccatcatctgctgggtagtatgccttccttacagttggagtcccatttctaccagggtttgtctctcctgcttcttggttctgataccctaacctctctttgttctcctagacccagtgggtacaagctgcttcctacagttatcacattacct

SEQ ID NO: 133647 - DNA, 469 bp, Homo sapiens
aaaaaaaacacttatttcatgccctgccaaattcaagttacactagacttccattttcttaagataatcaatcatgaagaaatcctttatcaatcattcaaaagtaattttaagtgtaacataactgtgtttacttcccatgcacttaatacccttatgcgctaattttgtgaattaagtttactgattatagaagtatgtgctgcatagaagtctgtgcttagagggtgaagttcctaagcttaccttgaattacagctacatttcagtgttaaatgtgcatattaagaataattcttttggggaaagaaattatgaatcttcaggacagtctacaatggtttagagttacattctgcctagacttttatgacttgctgctattgttttaaaaaccccacttagtctctctcttcctttctgatttctaaagtaagcctcagaatttccaaaccaattcatccacagc

SEQ ID NO: 133648 - DNA, 526 bp, Homo sapiens
catttttcaattgggttgtttagtgttttgttgttgagttgtaggaattcttatatattttagctattaaccccttatcagatatatggtttgcaaatattttctcccatcccattggcagccttttcactctattgattctgtcctttgatacacagaatttttcaattttgatgtagttcaatctgttttttcttttgttgtctgtgcttttggtgtcatattctgaacatacttatatgtgatcgtaatacaataaatgctatttgtagtgtgccatgattaatacttttttcctgcatgcctttgtgttttccctggaattaataattgttaccttttgctttattgctttatttctttcttagctttctatgtatttatctctctttcctccctaaactctccctcatttgtgtaaatctcctcttactacaatcacccacattcaatacagtaatccccacttatccgaagtttcactttccgcagattaatttacccgaggtcaaccacggtccaaaga

SEQ ID NO: 133649 - DNA, 911 bp, Homo sapiens
gagaagagccagatagtgttccagctggaaaggagtattagcaagacagagtcacagcttttgtaacctaattgcagaagtgacatctcatccctttttcagtattctgtttattagaagcaagtcacttggtccaccccacactcaaggggaaggggctacacaagggtacaaatagcaggagttcatgaatcattggatggccatcttacaaatccacctatcacctacctactgaaagccttcagtaagctttaagagcatacaggagccctgacacccaaaaattagagaactgctgatctaaatgtatgttacattggtggaacatgtatgggagatataataccttccttaaaaagttcttctctaggataagatcttgggccttggaagcctgtatatggggagtgcaggtaaaatcaggaaagcctcccctttttgtcaacttcagtttctggagagagggatcttaatactacatagctgtcttctaacatcttttaggaagtaacacaactatgacaggaacagtagtgaatgttagaaaaaataaaaggtctgagagaggagaataggagcatattcttgcaaagcagaaataaaactttttaaaaaaatccgtgcccttcagtgaaacttttttttaaaggatctttgtatgttaccttatgggaaactctagaaatcaactctaaaaatgaaattttgagtaacaatttttagaatggttgttaaaatggctaaaagctattatgtgactcaaatttctttttttttttttgtttgagacagggtctcattctgtcacccagctggaatgcaagtggcatgatcgtggctcagtgcagcctttacctccttgggctcaagtgatcctcccaactcaacctcccgagtagctgggacca

SEQ ID NO: 133650 - DNA, 721 bp, Homo sapiens
aggttaatgtcacttttccatatctaccaattcacttaagtagctttaacccaaataaaacaaagggtcttgactcttgattctgatcagaaaatgtcatccttttgtccatttactttaaataagtagttatttgtggtacaacttgcatatttctgattgtttctgtagttacctttgatttttttcatataattgcaaggctgatgatactttgaaaatttttggacttccttacctttgacagagaagagaatagttttgtatctttaaatgcatggacatttaactatttgaaataagttctatttagtattcagagccctattcagacaaaactagggactgtagctgaggcttatgggaagctttcaatttcctaagttatattgctacagccactgtactgagaaagaactacagtactgtctaactatggcatttggtcagatcaaggtgagttatatagaaaggaaaagggaatcaataaaatataggattaataattttttagattttgtaacagatacgatttgtcaacaaagttggaggattaaagacaacaattcctggggctgtttgattttaagtaatccaatctggatagattataataaattcacgttttttgaaatatatagtttactagtgagactatttcagtgttaagaccaatgagtttccgtctgtgtggctataatgggggtttctgacctttttt

SEQ ID NO: 133651 - DNA, 755 bp, Homo sapiens
gtaggaaaaaaaataacttaggcaaacgtaaatgataatgttaaataaaagaatacaaaaaagctctccttccaacctgcacctgcattttaggtggactttagaagactgtggtgtttctgtaactgttaataagcattcataagaccccagaacagagcttcacagccaagcagaaatacatgatgcgtaactctaatgcttttgacagaattggagcaaaagaaataaataatttcactcattcttaatttgtacacagaccatctagaaagctcctagttttgcttttagtagcatctgtacactcggttttttcagacaagacgtcagctagggtaaaataaaatgtattcctacatgagcaattttatttgagaatctgcagaaacaggaatgatctctatggcatttttaaattgtaacattaagtgctaatgtgtatgacttccagacatctgaagccataaacttctttgcaagttacatgccgacacttcatttgggcagtaaatcagctgtcacagtgacttactgcaatgacagcaaaagctccagcactccagacagtgggatttttatgctgccagcagaaaggtcttttcatagacactcttacaagaaatcaaaattctattctattagtatccagcattcggccaatttttgaccttaaaaattggtaatgtcatatgattcaacctaatatttgatacatatgaacttttaaaaggttgttttggaataaaaacatg

SEQ ID NO: 133652 - DNA, 412 bp, Homo sapiens
aaaaaaaagagaaacctactctgaaaaagcacactaatgtggaacttcaaaacaataataagagaaatgtttactcataaaatctggtatgcaacattgatgtatcatttaaacaaacattgttaggccagccaggcgcagtggctcacatctgtaatctcagcactatgggaggccgaggcgggcagatcacctgaggtcaggagttcaaagaccagcctgaccaacatggtgaaaccccatctctactaaaaacagaaaaattagccgcgcatggtgacacatgcctgtaattgcagctacttgggaggctgaggcatgagaactgcttgaagccaggaggtggaggttgaggtgagccaagatcgcaccactgcactccagtctgggtgacagagagtgactctatctc

SEQ ID NO: 133653 - DNA, 179 bp, Homo sapiens
tgcagggattacagatgtgagccaccacacccggcagaagaatttttatactgtatttcggtagcagtagtgtggtagttacaacctcacagttcagaaatatgacctttttgatgtatttcctacaaagcagtttataaacattagtgccactttcattacatgtggataccataact

SEQ ID NO: 133654 - DNA, 328 bp, Homo sapiens
gaggtggggaaacagggagggatgggaagagaaagatagggagagtgagagaggcgaagagcgacagacagagatggggcctagaagggggagagacaaggactgagagatgagaggggaaatgagagggcgatgggaagcatgggaagcaggaagagcccagagaggaaggagggagggcagctctgactcagagagggcctgcgcagccccaggagggaaccccagaagtggggagtgcaactgagagggagcaatgacgtctcagactgagagatgagggggcacgagggagccctcgggcatcagtggcgggtgacaaagacag

SEQ ID NO: 133655 - DNA, 768 bp, Homo sapiens
gcgcaaattaattgctggtagttcttaacaaaggagcatttaggctcataaatacgtgtttttagtgaaaaataattttgggaagatttagaaaataatgaagagtatgtgtcctattatatacttattattaataaggaaagaaaaagttgaaacacccacagcattgaaacctgaaacctggtttatttcgttaggtaaacattagtacttaagctgtttagaagtaacagtatcgccaattttagtcaaggtgcatatatgtgtaggggttagaagaggcagagaaagagccaactatgtgtgttggacaatgtgtttttttggatttattttttccaaaatctttctgtaacagcccttcctagttttctgcctcctatttttagtgatgcttgtttggtgtaacagttttgggcaggcaaattgatttgatctttattgttgatatttcttaggaaactggagcattatcaaatattctgtttggggacagttgttcctaagagaagttgctctgtgcttaaagaatgagaattgggtttttcttagagatacagcagaaaggtactgtgttaggtgatactgcattccttcaacattatttcagggaatgtaggcatttacatcccagatagaccttcagaagggcaaaatctgtatttgggtgtttttacctattggacaattacccataccaattcatgattttaagcttttttttttaaatcttcgatttggtgacggtgattttaagcttttctacca

SEQ ID NO: 133656 - DNA, 836 bp, Homo sapiens
gggcctgataggaggagagaaacccaaccaaaatgtgatcacgttagatgggaattttgttcaggtcaaggaagacgaggaattcagtccatccctgaaggggcaaataaacgaacgaaaaacggacgacggaacgacacgaaccgaacggacacgacacggggaaccgaaccgaacggacggacggacgacaaccggacacgacaaccgaaacccgaacggacgacacgacacgacacagacaaagacgaaacgaacggacgaccgcgacggaaagaacgaacgacaaccggacacgacaacaacgaacaaccagcgacgaagacaagaaccgaaaggaccgacccagacacggacggacggacgacacggacgaaagacagacgacgggacacggaagcacacggacagaacgaacagctaacgaagaacgcgagacaagacggtgacgaaggacaggaccgacacggaacgaacggacacgacgggagaagaactaagaagacagcaaaaggaggggaggacgaacgaaacgaacctaacgcgagaagaagaaagcaacggacggacacgacacgacaacagcgaacacgacggaagaagaaaagccagaaggaggaaagcaacctaagaaagaagaacggaagaacagacagacacgagaccccacacgacaacacagacaccgacacggaaggagcgagaggcaacggagcacacgacagaagaaaaaacgaaagcgcaaaagcgacagcaagcggagcaccgacttaccgaacggaaaacaagcgagcgagaaacgacgaaaaaaggaaacaagaccgaaagaaaaacga

SEQ ID NO: 133657 - DNA, 585 bp, Homo sapiens
gaatactacctcattttcatcactttcctagaacctattagaaatatgttttcttctatgaccctaatagtaactcaggaatacttatatgttttgacataatctggaatttgtgtttagagattaaaatctaagataatccaattctgttatattattttagtgctgaattatgttttttaaaattgtagacaaagtcttcagtaatctctatgctgatgattaaagaaaacattgctattttcataggtcatagagaggataactgaggaattcattggcaagcttgtgggtgttgctttttacagtaatttattgtgaaatataggtgagtcattaccatattactgctacaaaactgcaataacctcaaaaaatttttataaaacatttcaaattggggtagaaaaagaacttctgaagaagaaaagagacatataaatcaaacgtgtccacgtgtagtactatgtggtggcggggggatcctgatatatctttaatccctcttggaatgtattgagtgtatagaatgtagaatatctttgttttagtctgtgtattcttaacataccactaccacctgac

SEQ ID NO: 133658 - DNA, 470 bp, Homo sapiens
agtgtggcacccatgcacactgagcccacaccaagactattctggaactgctgctgggattcatgaggcacgaggagctaaattcactgaggacgctactggcggctttcctcctcagcatctgtccccttcccccttccttcctgacatcagtgaattccataccagggaggccagttccccagccggcttctggaagaggcatgtccagcacccaggctgagccactcggtgcgctctgcaccccggtcacagtgactggttcagagttcaatacgtggctggagccagaccgaaggagagtgaatccaagacttgctaagacaaagatgctgtccttcctgatgggtgtgaaccagccagtgtatataaccctgggagcagcgggcagggcctgtgtatcccatgaagctgactctccccaggtagggcaaagaaacaagccccagatgacactgtggaggagctgg

SEQ ID NO: 133659 - DNA, 335 bp, Homo sapiens
ggagtttaagaccagcttgggcagcattgtgagactctttatctctacacaaaataaaaaagctagctgtgcatggtggtgcatgcctgtagtaccagttattcaggaggctgaggtaggaggatcgcttaagcaaaggaggtagaggctgcagtgaactgtgatcgcaccaccgcactctagcctgggcaatagagggagatcttgtcataaacggagcatcttcttggctcttaaagactgccaggttggaggaaatgtccttttgaaaattacgactaacctggctgggtgcggtggctcatgcctgtaatcctggtactttgggaggccaa

SEQ ID NO: 133660 - DNA, 377 bp, Homo sapiens
tacataataaataagaagaaatcacaaaggaagcagatattatattgtttttaatataacatgaaattgtttgactttattttgatgacctcacaaaagtataaacatggcagtggtgtgtatgatcaaagtaagaaattaaagagttaccggttctttataaaccagaagtccattgacttttaataatgctgtctcaaatatttgatagtaaattgtggaaataatcaaagctgagcctatgggactgtactttgtagtactgtttaatttaataactctaataatcccttaagaatattaggaaaaataggccgggtgcagtgactcacgcctgtaatcccagcactttgggaggccgaggagggcggatcacc

SEQ ID NO: 133661 - DNA, 157 bp, Homo sapiens
tacccagcttctttctggggtggagggcttcttgattaaagtcggatcattttaggactttaggaatcttctggaaaaattggccttcccatgaccatctgggtgattttatgtggatactgctctggcttttttctgtgcgaagaggagaggggtg

SEQ ID NO: 133662 - DNA, 727 bp, Homo sapiens
gggtggtggtgtttaggattggctagagatggctgttgcttggtacccagtaggtgctctatgttagtaactcttaaatgtcgtggaagtccaaaagagaaccagagttgagacagatactgctggagaaatttaaaggaagatatagatattttatgaaaaatgaaccaaaaaatatttctgaagaatgaatgatggctccaagaatgatgtttgaaatgtgctctctatatgtagaaatgaaattgtataagggcgtcaaacttttctgtactgtttttcatttgagttgcttatgagatatcgaggtaaaataattggcaatatatcattgctatggttatttatcaagacatcaaactttctgactaagcatgtgtaatatttatatttatgttaaatgctttaatacaactagtagattttaaccatctagtttttttctttgaagatagcattctgtttgtctgaaattagaatccatttcagtttcatggaggagcaaaggtgaggcactcatctgtctctatgtcctttttgcctgacacagtgttagcccaatgcttggcaccagtaggtgttctatgtataagtgtttttcagtaaatgaattaataatatatcagtttttctctaaatgaattaataacatctcagttttaaaaacttcacagattagatggattgatttcatgaaacatttcctttgtgtttaagattcttgcca

SEQ ID NO: 133663 - DNA, 276 bp, Homo sapiens
tatgggcaagccaggctctttcccgctgccaggacgttgtgtgtgctgttcctgttacctgggccgctctttcctgcttactttgccaagctagttacctcctatccttcaggaatctgctgaagcatcatgtccttagaggtctggttacttcctgctctgctccagttgttctctactctgtgctcggaaatatcgttcctcttcagcctgctctctctttccgaaggccccaccggcttcccggatggagcccgcgccccagtcgacattctc

SEQ ID NO: 133664 - DNA, 832 bp, Homo sapiens
ggatagaaagatagaaagaaaaggagaaggaaagtgatgatatgaacaacagagaatggaggaccaacagataggtattcttacttaagaaagatcaagtacaaataaaataaaagtgatagtcaagagtataagagggaaaaaaatcacaaattctctcaactgaagaaaaataatagaaaagttcaattaaactaagggtaggttttttgaaaaggaacaaaattgacaaaccttcagctagactaagaaaagactcaagtaaataaaattataagtgaaagaggagacattgcaactgataccacagaaatacaaaagattataagagactgctatgagcaattttgtgccaataaattaaataacctaaaagaaagagatgaattcctagaaacatataacctaccaagagtgaaccatgaagaggtagaaaacctgaacagacaaataaccggtaaggagattgaatcagtcattaaaaacttctgaacaagaaaagtctaggacctaagggcttcactggtgaattctagtaaacacttaaggaagaattaacaccagtccttctcaaacttttgcaaaaaatggaagagaagggaacacttccaaactcatcttatgaagtcaacattaccctgataccaaagccagacaaggaaattgcaagaaaaaaattacaagctaatatgcctggtgaacacagatgcaaaaatccctcagtaaaatacaaatagtctaaattgaacagcacattgaaaggatcacatcctgatcaagtgggatttatccttggcatgcaaggatggttcaacacatgtaaatcaataaa

SEQ ID NO: 133665 - DNA, 357 bp, Homo sapiens
agaaaacttgccataaataaataaatttaaccgtttataacatagatgttttggagctcctgcccacccagattttttttttaataaaacatctattaaaccagaattatagttgggaaatactgccgtatacataaatgttcttggaaaagcccagtagtttaattgctgctttgagccttccactaaagacacattatactcataataaaattctcctatttgcccatgataatgaataaaattcttgtttagacaaccacctttaggccgtcttttttgttctttttttcccccttcaacttttaaatttaggggtacatgtgcaggatgcataggtttgttacatattacggg

SEQ ID NO: 133666 - DNA, 788 bp, Homo sapiens
ctttctgaagcgcattctcgcccttggaatccccagcccagctttttgaggcaggcaggcggggccccacttgctcgccttcaggacttgggctctgtgaaggagaaatgcccgaagctacacagcggacctgtcagagccagcccacaactagggctttctggtacacagtaggtgctcagtaaatacattttgaataaatgcccgctttctccccatcatcctaggctcgcgttttcctacctaaacctgtgtcggggtaggaaagctgtagattccttgcactctgtacctgaacttgccatgatggggcaagtgcgttcctttgctcaaggaagatacagtactaagacactgtagagacgtggctctcatgatttgggtcatttgtgaagtccccaggctagactacagcctttttcttggctgattaaatatttattgtatggctttgctttaaagggaactttccaaaatcgtatctatttaaaactttgtcttgtcagtacacaagtccgccatcaaaagaaaaaatgtgcacagttccaccatgaggtgacatagttaatgtaattcttaccccaccaagcctctcggttgctagttgtttactcagttgttcattcattcattctctcattcggcgtatatttgttgagcacttgctatgttccaaatgcaggagtaaccatgctgagcaaaaccagctaatggcactgttttcattgagcctgggacttaatggttcaactagatagtagatagccttactaaataatgcataaaat

SEQ ID NO: 133667 - DNA, 347 bp, Homo sapiens
tgaggcacacggagtgtcaggactgtgccatgtggtacaaccctcttcccagtcaagatgcaggaccaagatcagcaggagaccatcccctggtccaatggtgacaccagtaagagcagttaacagttatgtgccaggtattatgctaagcactacattaatgtatttaatcttggcggggtgtggtggctcacacctgtaatcccagcactttgggaggccagggcgggcagatcacttgaggtcaggagttcaagaccagcctagccaacacagtgaaaccccgtgtctactaaaaatacaaaaatagccgagtgtggtggcgcatgcctatcatgccagctatt

SEQ ID NO: 133668 - DNA, 393 bp, Homo sapiens
ttatagatctctgccttcatcttcacatggtgttctccctatgtatgtgtctctgtgtccaaattttccctttttataaggacatcattcatattggaattggggcccacctaaatgacctcatcttaactaattacatctgcaatgacattatttctgaatacgatcacattctgtggtactggaggttaagagtgtaacatatgaatttttgagggacacagttcaacctgtaacaggtggaaagccgtcaatgggttttgagcagaggaatgatgcaatccaacttaggtttataaaggatcactgttttgtggagaatagaatgaaaggaggaagcagagtcattgtaaaaagccaggcgagacaatggtgattgctgggccagggtgc

SEQ ID NO: 133669 - DNA, 330 bp, Homo sapiens
ggactgaactctgtccttctgtgggtcagctacttggctttcttccagcccctcttccaaagcctcacacatccgggagctgaattgtggctctctggttgtcctttccagaacacttccacctgcacccgggaacgctgctgcgcctgagaggctggaggctctgaaataccaacggataaagaagcccaaaaagtcatccaagggctcttcgaagtcaaagaaacgatccgacgattctgcctcccagactcagcagcttcccaactctcaggttctgtggcccgatgaagctgtctgcctccgaaagaagaagagacattctcgtcc

SEQ ID NO: 133670 - DNA, 988 bp, Homo sapiens
ttctgtcctgatacaaggaaagaggcagagcaggagccggcaatgttaaggacaactttttataactgcccagtatttcctgacccctgtcaaaggttggggagaatacaaggtttcttgaagctttttgactggggtgtcacattaggcacacaggtgtctataatggaatctccccttcagtttggtcatagaagtgcttggacaagtcagaaaaatagctagctgtgggtatccctttaagatattcccaagtctaccctgtgtcatagcagtagttctcagagtgtttgtttaaaggatcccactttgaactttgccaagtactaccaactaccttgtctggtgttcagcaactgcccctactgaacagccctttggaactctgaatgatttgggcctcacagaagctccctaaagcctaggaacttggtgactatcatttgaacaactaggcagccatactgcagtcagttgtcatggggtcattccctaggcccccttcctatcagcctctacctaaagaagctagataggaagctaagcacagccatggttgggaggctatatctaaagctcatgaggggtgatcccggggttaccagccttcagcactccctctagcaacaccccattctcttacctagcggggatttgtacctttccactgaggcctctccatgctccttccctacctttcatggcaatactttggcctgcctcttatcctggtactaagttgaagtaaagctcaccctttacttccctacttgaaagttctactctgagccttgactcttagccacagtgaggcatgttgaaggttcctgctggtttattctttttttttttttttttttttagacagagtctcactctgttgcccaggctggagtgcagtggcacgatctcggttcactgcaagctccgcctcccgggttcatgccattctcctgcctcagcctcccaagtagctgggactacaggc

SEQ ID NO: 133671 - DNA, 375 bp, Homo sapiens
tgaaaaatgacctaacatgtactatgcttattacctgggtgacgaaataatctgtgcaccaagctcccacaacatgcaatttacctgtataacaaacttgcatgtgtacccctgaacctaaagtaaaagttaagaaaaagaaatgggctctggagccagaactgggtgcctacctcggtgtctcacatgcccatacctgatgtctagggcaaggtttgtaactctttgtgcctcagtttcctcatctgtaacactgaaatgatgatagcacctaccttgtcaggttattgtagtgattaagtaacttaatacttaggaaattcttggaacaatgtctggcacacagcaagtgcccaataaatgcaggtgatggtg

SEQ ID NO: 133672 - DNA, 255 bp, Homo sapiens
ccatgccactgctccccacctatactcctgcataccctgcccatagttcctccctgccctcctgttcttgagaccaagcaatccccttctaagacaatctgcattcatgattctgttaatttccaaagcttccaggtatcaagctcttactctatgccagatgcagaaacctaattgaattatctcatttacctgcacaatcctgtgactaagtactatgacccccatatgcttatatgaagaaacagaggcctg

SEQ ID NO: 133673 - DNA, 611 bp, Homo sapiens
cccaaagtgctgggattacaggcatgagccaccgcgcccggcctagaaatttcaatagaatagagcagatcaacaaaacaaaaaactccactataacaacaaccataaaaagaacaaggggaggtacaatatgcagtattaggaataaaaatataaatgtgttccaactaaaggaagagaacatgcatttttaaaaacaagaagccactgtgaagaacttttgcctgtaaatttaaaacttggatgataaagacagtttcctaggaaaacatagtttaacaaaaattacttaggaataaatagatttgaatggactcataaataaaataattgggccaatagactaaaaatctctcccatcacttctaaagaaaatgctgagaggaatgttctattcagtaaatggcactaggactgttagttctccatgtggagaccagcctctgtaaaggtagctatggggttcatacacttctggtctaatcttcaagggaaacttgtctccaaaggccactcttctgtgatgaggaaatcatgcttctgtgattcactattccctcagcaaggtggtgagcagcatacctccctattatacatacctgctacaagca

SEQ ID NO: 133674 - DNA, 710 bp, Homo sapiens
aacatatgatacataggtaccaaattacctttttgaattaaaaaaaaataaactgaattccaaaatatatcttcttccagagatttctggataagtacttgtggatctctatgagcacatgatattatttctctaaagtgaaaatcataaatcatattttaggaatatcctagtttgttttacagtcatttgcaggtttctctctgtgtcagctagcctgatcttaggtcttcttttcatccaatctgcttagttaagcccatggacctaaactgatttatttctcatctgttcagcctgtgtcagtggaaggtgcactaggcttttctgatcagccaaggctaatcagagttggagtacagaccagaattcaacaaaggatacagtcataaattagggttaggtttgcaaatacttttataatgtggaaattagagtttaaggcataactaatgaagcaaacagaaaataacatgggaaaacaaagttatcaaagtcaggaaagacgaaaatcattgttcccgtctcataaggtaggactggagaggcaaatcaccagtgttaaatctttgtgcacattttaatttacttataataaatttctgaagttggaattgacctgtcaaaaggcacagacattttatagcttttgatatgcattaaccaaatttcccaacagagatttataccaatttacattctcccaggaa

SEQ ID NO: 133675 - DNA, 533 bp, Homo sapiens
aaataaagatttaaaaacatctttttgaggtactcaatattttttaaaactaaaaggaatcttgagatcagtttgagagctgttgatctgaaaatcattgataatccttttatgctcctttcccctgctctttgaatccagcttgctttaagttaggttcagattctttatttcaagatcatagctggaagtccctgctagtatagtccatgtgtgggagaatcattctctcactctccagaatgcttgattagaaggcaatgggaagtagagaaaaagaactgatgggataagaggagcagagaggggagcaaacggagaagattggcacagtaagcatactctccttcttaccctgattctctcctccacaatccagacacaatagggctagtatctgccatggcacagagcttccaggacccagacccagcactaaggcaacatttattttcacccattgatgctatctatgttctacttgctcttaaatattttaaatgttattctgacatgtggcatcattaggagga

SEQ ID NO: 133676 - DNA, 564 bp, Homo sapiens
tcaatagagatgggattttcctatgttgcccaggatggtctcccaacttctggcctcgagcaatcctccagccttggccttccaaagtgctgggattaaaggcaggagacactatgtccagccttggtttgctttttcaacaatattaattctacgtccccactttcaaacaggtataaagttcaggaaggcccatttatttcctttcttcctccctactctccccatctcacctctacatacgctcttgtgctccaactataccatcttgcaagcttcctaaacttcagaacctctctgatccccactcttaccacatctgttcttcaatactgtggggactttctccttactcgttggcaccagcctatccacgctttccttacttaggcagttagggtcaatgtggttcaatctctcacttccccaaaccctacatttatttcctctttgttcttttaccccatttgcccaagaaaacaccaatcctgttcttttttcaccccgtccccgcagctggtccactccacatcacctccctgcttaagaactattctctctttt

SEQ ID NO: 133677 - DNA, 232 bp, Homo sapiens
agctcctcaccgagtcttagaagacagagatagtcacaacactgttgcaaatattatcaccactaaaatcaacaccattagcactggaagtctctgggtgacaccttccttagcccagttagttagaaaactgctgctgtgtcagaggaatgtagttataaaagttccacattttggttagttgataaaggagacttcagtaatgtaaagggcctttctcagaagacggtag

SEQ ID NO: 133678 - DNA, 614 bp, Homo sapiens
actctattgccaatttaaatgccgctgtatactctgtgtatcatggctactttcccagtattttgaaaatttgcgcagggtaaggggattttacaagttctcaaaaacatgaaatattcctctacagtagccataccacatgatggctaagtgaaatgataggtatccatataaagaggtgcacctgtgtatgacctctgttcctgctgctggcattaaggtaatagttggattccatttgaaggctgagcctcttcctgggaatggttagggaaggctcaggcttattagcattaaatatcagcctagactgagacaacaatttctggcaactttgtgagaatatatgtatttgttgttgcagcccacttttttttggttaacgttttcaacaactgaagaagaacataactgctaccatttgctggcaccataatgagaacttatatacataatctcatttgaaccttacagtggttttgagggagtagatattactcttcccatctttacagcagcgagtcctttgccaaagttactacttgacctaggtattttctaccacagtgggctacctgccagttttaaaggtctggtttttctagaaaaaaaaa

SEQ ID NO: 133679 - DNA, 331 bp, Homo sapiens
gctgatgctgggcgggcaggcaaggaggctggtgctggcagggctgcgcttccccgtggcctggtgcagtcccagcaggacctgctgttgggggctcctggccgtggtcacggtgggcagggagccacatccctctgtccggcctggctctgcaccacggtttggcttcctctttgtgtgttcacctggcccagctgcccttcgccactgcagaaacagcacggagggaagggggcggcagattcagacttgaggtcagttggtcttttgggagctgggagcacagccagggattccctccggcagcaccggcatcttctctggtttcttt

SEQ ID NO: 133680 - DNA, 683 bp, Homo sapiens
ctttgagcctctgtaagatttctacctttaccacacagccctccgtgtgcatggatccttcttcagtgggtaacactttgagggcagtggctatttttttcctaaactttataatcttcctaggacctcacagaatatacctcttattcaaattatgcaattaatctgaacacatctggacaaatggactagatcagtctgaattcacggaaattctggagtctagggtaaatttttttaaatgcagttatattctttcctagggtatatatcctagataagctaactaaacattagcaagtggagccgtttcttgatttaattcaatgaatgggtaataagcgctttagtttagataaaagttacttaaaagtaaaatggatgactaaatgtaatggggtaatctagatgagatcttgaatgagaaaggacattcttagataaaaacaaagaaaatgtaagtaaagtacgaactttagcttataattatattatcagtattggttcattagttgtgacaaatgtatggaactaacgtaagatgttaacaataggataaaatgggtgcgggtaggagccctcagtacaatctttgcaacttttctataaatctaaaactatcctaaaacaaaaagggtaataaaatatgttcagatagagtatatgttttcaagtgaaaatgg

SEQ ID NO: 133681 - DNA, 234 bp, Homo sapiens
ggtgtaattgtgtctccaagtgtccagtacagtgctcaggagggtaaatatcaaaatgcaccacccaggcacgttcagagtgttgggatacagtcagtgcaaggaggcatatttcaatgatgactatagtgggttgaaaagcgtcctcccctaccaaagaaaatctgtatccacctggtacttgtgtatgggaccttgtttggaaaaagggtctttgcagatgtattaataatg

SEQ ID NO: 133682 - DNA, 101 bp, Homo sapiens
aagattccacagagctacttgttgcagtgtgcaaaggtgaactaatatgcaaaagaccatttttccaagggtagggaataccacttaaaatacctgtcaaa

SEQ ID NO: 133683 - DNA, 405 bp, Homo sapiens
gccagagcaacatagtgagacccccatctctacaaaaaaaaaaatgttttttaattacccgggcatggtggctcatgcctgtagacccagctagttgggatactgaggcaaaaggatggcttgtacccagagttcagggctgcagtgaattattatcactgcacttctgcctggatgacagacaaagaccctatctcaaaaaaaaaaacacaaaataatgaaatctatgattaaggattctgatgctataagcctttccttaaactgcaaatgtttcatgctaatttgaattgcattttaagaagtaatgattcttggggtaaagaccatagaatacggcacccagaaataaatccacatatttccagccaactgattttggacgaacatgccaagaacatacgc

SEQ ID NO: 133684 - DNA, 809 bp, Homo sapiens
  misc_feature (529)..(529): n is a, c, g, or t
ggtttccactgccaaaaatgttgtactacaaaggtgttaagattaagaatgatagggagaaaaaggggtggctactctaattatcctgtttgcatctgtagaaatttcttaacaagaattccacttcattaaaaatatgtgaaatatatgaaaggtagtgatcaaacacatgaaagtaaatataaaggttttgctgacatccaaactataaaaagtggccagttaaaatatttacttaactatattaaacaaaaaataattctcttatgacttgctataccttaaaaaagcttccattacagctttccaccttttctagcaatgtcctctgaaatgtcatatcaaaatacatttgattcacagggcaagggccagcccatcacttaggtgtatgaactgggcctgggatgagaaagacaatagggagtgctaaagcctgggacaaactggagatttgtccatttcaccatcaagcaatacaattcattgaaaaccccagtgctgcaggtttctgtttgtgcaaatatgnactaaagcatctctctgccatttttacttaattggaaaacaatttttccttacaatcatgcaactaaaataaaataccgaaattatgtggaactgctcgaatagaagacctgtacctgtcatctgtaacctttatgtgttaattttctgtgttacgggaaactttcattctatctaactttttatgtcacccaaccgggtttggtctctcatattggatccggggtagactggtttggccccgcgcggggcctgctggatccccccctggggccgggggc

SEQ ID NO: 133685 - DNA, 257 bp, Homo sapiens
gatccagatcccagactgaacagaaactctgctccccaaccccaggagtaaggcccctctgcacgtttttatcccacctccttggtacacagggccttgctgttccttgaacctgccaggtgagtgggggctttgcaggcatcgggcaggtttgtggcaacctggggtggcatcatgtgcccagctgctcccttcaggtctcaggctccagaactgcagatcctattgtctgcctgcacgcgtgtggggctggcctg

SEQ ID NO: 133686 - DNA, 743 bp, Homo sapiens
tgaactcagtttctttaaagtattaaacaggcaaatataaatagctaagaaaaccgaaatatattttagagcacattcataaaaattaccaatgaatgtccctacttttttcttttataatgtaatataatcatttcttagttttatgtgcagaaacttctcaatattaagcacagaatctacttagtaatatcttacatgtctatcttggagtaagaatttgtcagtgctaatgttgcagccccttggggcttcttaatattggaatttctccaggcttgattatagttgagggaagttcaaagggaatttttttattgtttagcttgtttttaggttgcagtaaattctctaggtcatccagcaggattaggaagagaagcattgtgagaaacaggttttgggttttgctgaaatttgcttgtcagcattgcatcacttttccttaactgttctctaagtactgatgtctttcaaattgactcagatcatactccttatctttgagcagaatattttgaacagaaaattaagccattttcatttatatacctaattcaataggtttataaataaaagggcaaatcctcacgataatacagtacagtaaaaattgctctccccctagaactgagaatagaaaaacaatttcctcttacattgtttatagtaggtagcccttaaaagaaaatcacttatccctgccacccccagtggtcctcataacaagttaggaaactgaa

SEQ ID NO: 133687 - DNA, 442 bp, Homo sapiens
tttctgtcttcttccgaaccctgcaaactgttcaacctctgcctgttacccagttccaaattcacttccacatttttagatatccttatagcaacgccccactacctcagtaccaatttactgtatcagtccattctcatgctgctaataaagacataaccaagcttgggtaatttataaaggaaagaggtttaattgactcacagttcatcatagctggggaggcctcaggaaactttcaagcatggtagaatgtgaaggggaagcaagtcaccttcttcacgaggtggcaggaaggagaagcgcaagcaaagggggaaaagctccttataaaaccatcagatcttgtgagaactcactcactatcatgagaagagcatgggggtaactgcctccatgattcaattacctctccctgggtccccatcatgatatgtgagga

SEQ ID NO: 133688 - DNA, 259 bp, Homo sapiens
gtgactagcaagatattgacagctttagattgggttaaggacaagttatgtttcatattgctgtgtttgaggtcccttcaggatattcttgtagctgtgttcattaaataagttggaaacatatgtctggaactagggagagcagccaggaatagagagagttatgggaatccttctcaaagagatgaagctctgggaatgggtgagattgccaagaaatagtatgtggagagaagaaagaagacaagggcagaatttt

SEQ ID NO: 133689 - DNA, 545 bp, Homo sapiens
tgcagtggctcacacctgtaatcccagcactttgggaggctgaggcgggcagaccacgaggtcaggagaccgagaccatcctggccaacctggtggaatcccatctccactaaaaatacaaaaattagctgggcatggtgtcacgcgcctgtagtccaagctactggggaggctgaggcaggagaattgcttgaacctgggaggtggaggttgcattgagccgagatcctgccactgcactccagcctgggcgacagagtgagactccgtctcaaaaaagaaaaaaaaaaaagttaatagctctgtgctatttcaaaaattcagtccactcatataaaattgttcaagttagtacattactgtagtacatacacctgggtaattctcaattaaatgccaggcaaggcacagcaaatgctttcatcatggcataatagcctgttgtggaatactagtgaatacctaacaaatgcttcaaatagtatcttagcgtaatacatgccgacgggcactgacctccttcccaggcggaatataattttttt

SEQ ID NO: 133690 - DNA, 336 bp, Homo sapiens
acggatatctggggaatccctcctggattcaccgcctcttcagttttacagcttcccacagcccttgtctgcatggatgcaaagtgggatgttgaaccctgggcccttcttatcactgagaaatatgttaatgaagataaacatgttaatgaagataacatgttaatgaagattaaccaggccatctgaaggggctggtgttttgaaaaaatagaatcaatttttgtttacctggactggaactaggggaggaatttagagaggatgttccaaggtcctcctcagctttctatagcttgagtaggagccagtgaatttagttgatggtctatagtc

SEQ ID NO: 133691 - DNA, 386 bp, Homo sapiens
tgctagagcaagtgaactcggttttccctggaggtagatatttgctagtgagctgttctttggccaaatcacaattgtgtttttgcactccacacccaacggcaaacatgtctcctattcccatttttccctcattatcacgcagcagcattcaagcattgagttattaaatcacagggttgacaaacaaaatggcaatttctagaaaagcataaagcataaaatgtttttattttaattacttcactgattcttgctaaaaattatcatgcccattgtaatattttgaaaaaatacaaaaaatgtattccaatccctccagatccattacccagaaacaggcaaagagcgtactttacttaacatccaatgtggcttcatcaaaa

SEQ ID NO: 133692 - DNA, 452 bp, Homo sapiens
ctagtaagcgtcgacagaaagccttacttcttcttacttccttttcacaggggaaacagacacacacaaacaataaaataaaataaaataaaaaacatagctttagatatttttcagaagagagagattgctttacagaagaggcgggacttgatcaagggtagagttaaagtacaacagagagacagtctgagacatgaggcccccagccttgcccatgtcaaggctagcaagcaccttggctgaaagcaagaggagtgagaagtcagggtcctgccctgtcccatcccaggttggattttccaaagaactggaaactgaggtcatatacatcaacttggttgacaaaggcccccagccattacaaaggaaggcaggtgcacttcttctcaagctgcccaccataacttcccatctgcctattgtaggggggaaaaaaaaaaaaagcacag

SEQ ID NO: 133693 - DNA, 501 bp, Homo sapiens
ccagtcggggtgttagggtgcgggatggaattgcttagggacctggcctacgtggccagttcccaagaactttgtcttttccaggtgagtgcagccccttccgctccagtaggttccagattaattttttatccccaagctctttcctgctccttcatgggtctcaggtctcctggaaatccaggaacagcaattagcccactgctatttagggcctttgtaaacattgaaggatgattcggagcttaggctttctctcccgtgtcaggaatcagtcagatgaagcctgctgcacgcgtccctgtctagatcttgattcaagtgattatatgcatttggatctccgtggatgcatctggtggcctgggctaggccagtgtaagttaaatctgctttcttgagccagtcctcagaaatgacttggtggcctagttgttggtagaggtaagtgagtgggagttttagccccgccttccagcctccagatcagactctatctca

SEQ ID NO: 133694 - DNA, 458 bp, Homo sapiens
ccagtcggggtgttagggtgcgggatggaattgcttagggacctggcctacgtggccagttcccaagaactttgtcttttccaggtgagtgcagccccttccgctccagtaggttccagattaattttttatccccaagctctttcctgctccttcatgggtctcaggtctcctggaaatccaggaacagcaattagcccactgctatttagggcctttgtaaacattgaaggatgattcggagcttaggctttctctcccgtgtcaggaatcagtcagatgaagcctgctgcacgcgtccctgtctagatcttgattcaagtgattatatgcatttggatctccgtggatgcatctggtggcctgggctaggccagtgtccactctggcctacatcctctgctcaggactgcaggtcggccatttgctggtccccagttcttccagttttctggggt

SEQ ID NO: 133695 - DNA, 770 bp, Homo sapiens
cttttagccagtagagggggcccacgagccctctctcaccagctagcacttttctcaccaccttcctcgaaatacttgggggcagcaagggtgttggcagatgagagtctcccactcaccatggtgagagtggtggggagtacccagggctgacctgactcacaagggaagcagtaactgtagaacctgccagcctccctggtccctgtgcccatatggcttcggctgatgagggctcagactctaggttgccctgaagatcaaggctttgtctcccattctgcccattcctgggtttcttcccaaaatgactactgtggggccagtcatggcacaagggccaggacctctagaggctggggtggggaaggactgagctagtgattcttagaggccttctggggcctaagagctgaaatctcagcgcccgggtttccctaaagtttgctgaagacagcagccccggccagcaggagaccgaccgggcaccaccccaaaccaggcaaacggtggccacaaccctcatccacccacctggtatgaggtcactgagtggggaaacagacaggagcgggtggccaccatactgacagacccggggctctcccttgcccaagcttcaggttcaaaggctgaaaataacagtggcttccagtttggaagtggccaaaggacaatcatgaccagagactcaggagtatgactgtaataccctcactaggtattgacatgcactaagcaccttgatataggatttcacttccttctga

SEQ ID NO: 133696 - DNA, 319 bp, Homo sapiens
cagcacagcctcagtgctctgtttgttgagaggcagtggctggctaaaaacgaacatgtcaagcctgacagattgcctaggtttgaattctggccacttactaggtatatgatgttgggcaagtttcataatctctctatgcctcagttccctcatctataaaatgggaataataatattacctacttgattgggctgtttgagaattaaatgaggtaatgtatgtgaaacaagtagaatagtgcctgtcattgtaaatgcttattaaatgttaatcattgccattattatcattatttttatttagttgctgggttca

SEQ ID NO: 133697 - DNA, 486 bp, Homo sapiens
gggaaaaaaagaaaggaaggaagttctgtcttttgtttttgcctttatttttattttttttaaggtgaaaaggcctgtttatatggctagatttgcacgcatttgccaggcctttaaacataatatatatctcctttcctccctttttctcttccttccttttttcctttctctgcaactcaatggaaatagaaaaaaagtccaaaacaccagatttttttttctctaaattttaaggaatgttatctttcctaaaaattaaacacatctgtgtgttgctgtttctattaaggtagcagtatctgtgaaaagtcagaataaaatgaacactttgttaaaatatttaagttaagccaaataaaaatgaaagttaatgccagaactttaccattcgtgatttataaataagctgttttctaaataaaaataaccacccacctgcagtcagatctcttagagaaatgggagggatgtgccgtttgagga

SEQ ID NO: 133698 - DNA, 1628 bp, Homo sapiens
gaaaaccgcatccttgcttgattctccatttccaggggagcgggtagcaacatgaaggcagagtagccctttaatcatgggaagagagtgattataagagggacttcccaggagaaaagcagaggccatgatctcactagtggtagaaaactaacaggtttcagtttaagatcataaaacctaaatcatgaaatctaaatctcatggttggaacaaactacttaaaggttgtctagttcaaccatgccagtgttttaaatatttaggaatatccgaggtataatacaattaaaatgtttaaccatggaagagaatcacagaggcttccatcagacccttctggattaatagggccagatcatggcacacacagcttctcaagatcacatccctgctgatctctctggccctcctgatcactgctcccccacttcacaccctgtcctgcagccaggccctactgcttgctgttcacaaattgttccatgtgatgtcacttccttagctctggtctggctggtccctgaacctgacattcccttcctccccttgtgaccctctaatgaacgccaactttcatctttgaagggttagcttctattacctccttcatgaagccttctggataacattggccatatccttctaggcatcttctaagaatagtgtaataggctgaatagtggcccccaggagatacattcactgggaatctccacgtgtgacattatttggaaaaagtttttgcagatgaaatcaaggacctggaaatgagatcaacctgtagtagggtgggccctaaattcaatgactagctcttagaaaagaaggggaaatagacacacagagctgaaggccatgggaagatggaggcagagattagagcaatgcatctatgagccaaagaaccctaagaattggaggaagtcactagaagctaggaaaacaggcatgtcacagattctccctcagagtctcgagaaggaaccaaccctaccaatatcttgatttcagacatctggcctccaggattgtgagggaataaatttctgttgttttaagccatgcagtttgtggtattttggtacagcagccttaagaatctgatacatgtatctcgtaaaacacctctgatacttacctgcgcttgtggctgtgttttctgatactatgagagccgtagtatctggataccggagagtctgcgaacttgagagaagggccgtgtctgattttccttcagtgtcccaaggaaggatcttgcacagtacccagatttggagaggtgccaagtgaatgcttcggtggactgaatgaatacaaatcaaaaataatgatgcagcgggaatggatgcagtaagattgctgtggcctatgcagttcacacagttcacactctgcatgttgaggagtaagtggacagatctcttaagcccaggggctagcaaaccggtctgtgggccaatttactcaccgtctgtttttgtacagcttgtgagctaaaaatggtttttaaaaaggttgaatacaatcaaaagaataatattttgtggcatgagaaaagcatatgaaattcaaattttagtgttcataaataaaattttattggaacctaaaaaaaaaaacat

SEQ ID NO: 133699 - DNA, 998 bp, Homo sapiens
taaatttaagagtaaaggtaaataataattggttttctttagtaaaacagtcgcacttggaaaaaaaatttgtttttgtgcacaaaggaaaataatgccatatatcttcatgttttattttcacgtatattagataatattggccttttcttgataagtgagtgtggtgatgcagtgtgctctggattggctttgtccaaagaaggaagccaagatcacatcccacagaaggagcgagaacttgcgtcatgggtagagaggaaaacacttagcactctttgaatagtacagtacattgctgagtagtgatacttttaactactctgcagtagaaattttactgtgcacattgcttggctctttctactatttagttgtataaagaagtggaggagaaacaaatgaagaattttgagaactacgagacatctgtaggatttcgtgtaattgcgtatactttatctacataaagagaacaaaaaggttaaatccttgtgacatcacttagcatttaatgtcaatattcctttatggatttttttttctttccaacctggctgcttatcttgtcttccttccgcaagtatttattgagcaccatttatgtgccaggcacgctgatacctgcgcttgtggctgtgttttctgatactatgagagccgtagtatctggataccggagagtctgcgaacttgagagaagggccgtgtctgattttccttcagtgtcccaaggaaggatcttgcacagtacccagatttggagaggtgccaagtgaatgcttcggtggactcttcctggcttctggtggatgccggcatccttggtgttcctgggcttgtacgcatcactccaacctctgcctccatctttacatggccttctcttctctgagggtctctgtatttccatctgctcttctgtaagaacaccagtcattggattagggcccactttcactcaggatgtcctgttaaagaaaaatttattcaagacc

SEQ ID NO: 133700 - DNA, 1111 bp, Homo sapiens
taaatttaagagtaaaggtaaataataattggttttctttagtaaaacagtcgcacttggaaaaaaaatttgtttttgtgcacaaaggaaaataatgccatatatcttcatgttttattttcacgtatattagataatattggccttttcttgataagtgagtgtggtgatgcagtgtgctctggattggctttgtccaaagaaggaagccaagatcacatcccacagaaggagcgagaacttgcgtcatgggtagagaggaaaacacttagcactctttgaatagtacagtacattgctgagtagtgatacttttaactactctgcagtagaaattttactgtgcacattgcttggctctttctactatttagttgtataaagaagtggaggagaaacaaatgaagaattttgagaactacgagacatctgtaggatttcgtgtaattgcgtatactttatctacataaagagaacaaaaaggttaaatccttgtgacatcacttagcatttaatgtcaatattcctttatggatttttttttctttccaacctggctgcttatcttgtcttccttccgcaagtatttattgagcaccatttatgtgccaggcacgctgatacctgcgcttgtggctgtgttttctgatactatgagagccgtagtatctggataccggagagtctgcgaacttgagagaagggccgtgtctgattttccttcagtgtcccaaggaaggatcttgcacagtacccagatttggagaggtgccaagtgaatgcttcggtggactgaatgaatacaaatcaaaaataatgatgcagcgggaatggatgcagtaagattgctgtggcctatgcagttcacacagttcacactctgcatgttgaggagtaagtggacagatctcttaagcccaggggctagcaaaccggtctgtgggccaatttactcaccgtctgtttttgtacagcttgtgagctaaaaatggtttttaaaaaggttgaatacaatcaaaagaataatattttgtggcatgagaaaagcatatgaaattcaaattttagtgttcataaataaaattttattggaacctaaaaaaaaaaacat

SEQ ID NO: 133701 - DNA, 1515 bp, Homo sapiens
gaaaaccgcatccttgcttgattctccatttccaggggagcgggtagcaacatgaaggcagagtagccctttaatcatgggaagagagtgattataagagggacttcccaggagaaaagcagaggccatgatctcactagtggtagaaaactaacaggtttcagtttaagatcataaaacctaaatcatgaaatctaaatctcatggttggaacaaactacttaaaggttgtctagttcaaccatgccagtgttttaaatatttaggaatatccgaggtataatacaattaaaatgtttaaccatggaagagaatcacagaggcttccatcagacccttctggattaatagggccagatcatggcacacacagcttctcaagatcacatccctgctgatctctctggccctcctgatcactgctcccccacttcacaccctgtcctgcagccaggccctactgcttgctgttcacaaattgttccatgtgatgtcacttccttagctctggtctggctggtccctgaacctgacattcccttcctccccttgtgaccctctaatgaacgccaactttcatctttgaagggttagcttctattacctccttcatgaagccttctggataacattggccatatccttctaggcatcttctaagaatagtgtaataggctgaatagtggcccccaggagatacattcactgggaatctccacgtgtgacattatttggaaaaagtttttgcagatgaaatcaaggacctggaaatgagatcaacctgtagtagggtgggccctaaattcaatgactagctcttagaaaagaaggggaaatagacacacagagctgaaggccatgggaagatggaggcagagattagagcaatgcatctatgagccaaagaaccctaagaattggaggaagtcactagaagctaggaaaacaggcatgtcacagattctccctcagagtctcgagaaggaaccaaccctaccaatatcttgatttcagacatctggcctccaggattgtgagggaataaatttctgttgttttaagccatgcagtttgtggtattttggtacagcagccttaagaatctgatacatgtatctcgtaaaacacctctgatacttacctgcgcttgtggctgtgttttctgatactatgagagccgtagtatctggataccggagagtctgcgaacttgagagaagggccgtgtctgattttccttcagtgtcccaaggaaggatcttgcacagtacccagatttggagaggtgccaagtgaatgcttcggtggactcttcctggcttctggtggatgccggcatccttggtgttcctgggcttgtacgcatcactccaacctctgcctccatctttacatggccttctcttctctgagggtctctgtatttccatctgctcttctgtaagaacaccagtcattggattagggcccactttcactcaggatgtcctgttaaagaaaaatttattcaagacc

SEQ ID NO: 133702 - DNA, 317 bp, Homo sapiens
gctcaagctggcctgggcccttgtcaccaccatgctgcgcaagccacccaggagagaagtggtgaattgtgggcttgtatttcctttttggctgacacaggcaacctcccttggatatttaaggtgttctgccacagtggactgttcagatatgtgaaagttaaaaaagcatactcaacctgaactgagttgtacccagagtctggtgtgggagtcaaggtccttaggggcagggtattctggagggagccacaatgctccagattccaggaacccgtttgggagctagtcttgggcagagcaaggatcagctccag

SEQ ID NO: 133703 - DNA, 544 bp, Homo sapiens
caaatagatccggtgtctgttgaggtttcgctttctgggtcatagacagtgcattcttgctgtatccttacatggtggaaaatactagctagctctctggggtctctttcataaggacactaatcccaatcacctctgttttcatgacctaatcacctctcaaaggccccatctcctaataccatctccttggggttaggacttcaacataagaatttggagggaacacaaaattcagaacatagtctggggctacttatatcggttttaccaggttaaatactcctaaagatttaatttcccatcttggtaactgctgcagccattgagaagcaagacagaacagcaccacagaattaaacatttctgaatattctcttattcatctcatttgtaaggtatttgattccacaaatctgttatgctaatttctatttctcttcactttgattgttactgttactattccttggaattcttatccatatacttacctggaattcaaaccatatcaatattttaaggctctatttaggtccaatat

SEQ ID NO: 133704 - DNA, 472 bp, Homo sapiens
caaaggctgagagaagctgcagaaggcctccgggtagcaaccaacgcagctgcccagaatgctattaagaaaaaaattgtcaaccgactggaggttgcagccaagcaggccgcagcggcagccacacagaccatcgccgcctcccagaatgcagctgtttccaacaagaaccctgcggcccagcagcagctggtccagagttgcaaggcagtggctgatcacatccctcagctggtccagggagtgagggggagccaagctcaagctgaagacctgagtgcccagctggctctcatcatctccagccagaacttcctccagcctggaagcaagatggtgtcctctgccaaagccgcagtgcccaccgtgagtgaccaggccgcagccatgcagctgagccagtgtgccaagaacctggccaccagcttggcggagctgcgtaccgcctcgcagaaggcaagtggagcgtgtc

SEQ ID NO: 133705 - DNA, 336 bp, Homo sapiens
caggcgctctagaggatctcggacatttaggtccacggaacagaatagagaacccagaaacaaacccaagtacttacagccaactgatctttgacaaagcaaataaaccataaagtggggaaagggcagccttttcaatgaatgatgctggcataattggctagccatatgtaggagaattaaaccggatcctcatctctcacattatacaaaaatcaactcaggatagattaaagacttaaacctaagacctgaaactataaaaattctagaagataataacattggaaaaacccttctagacattgccttagtcaaggatttcatgaccaagga

SEQ ID NO: 133706 - DNA, 463 bp, Homo sapiens
tcactgcaacctctgcctcctgggttcaagcgattctcttgcctcagcatcctgagtagctgggattacaggcatgcaccaccatgcctggttaattttttttatttttagtagagacagggtttctccatgttggccaggctgggtctcgaactcctgacctccagtgatctgcctgtcttggtgttccaaagtgctaggattacaggcatgagccaccacgcccaaccagcttgatagtttttgtttattcaacaaatattgagcacctgctgtatgctaggcattgtgcaaggtgttagggctgatgcttgagcacagtacctccacatctgcagtatggggagagagagatgataccgtgatgagatctgtattagagctgtgacaaggtgctgtgggaacacaggatttgttacatattcttaatttctttggccacttaaacagtttacttttgtgg

SEQ ID NO: 133707 - DNA, 602 bp, Homo sapiens
cgcagtgactcatacctataatcccagcactttgggaggccaaggcaggtggatcacccagggtcaggagttggagaccaaaatggcgaaaccctgtctcgactaaaaatacaaaaattagctgggcatggtggcacatgcctgtagtcccagctacttgggaggctgaggcaggagaattgcttgaacccgggagatggaggttgtagtcagccgagactgtgccactgcaccccagcctcggcaacaaagcaagaccttgtctcaaaaaaaagaaaaaaaaaagaaaaaaggaccttccaaatgtccaaatgtcagaaaggcaagcctatgcaaagagtttttaagagggctattaattcctgttaagtcaactggaatagagaaggatacaggtacttttcctgtgtgtagaacccaaagtttgaaaccacctttgaggcactgcactaagtatttcatagtcaaaaagcacttacctgaaaattaaagctgaaggttttctttactgatttgaagggcatctgggaatttcatttcgtagaaactccacttaaacatggcaagagtttctcaagatataaaaattctccctgattgta

SEQ ID NO: 133708 - DNA, 326 bp, Homo sapiens
gaagacttaaccttagggtgacatttaggaaaaccagaggccatcttcccctgccaaacaccttgcttgcgtcacagggaaaactgagacagtttccttgccctcagctccagagcagcaatgcagaggttttgcccgaggggaaaggcaggctgcaataacagagttctgaaggtatccccaaaataaatgacttaatttggaacacaatggggagaaaaaaaagcctaaggatgttcccaataacaatagagatttgggtggtaagctattaagagaagattagtaactacttgagagcaacaagctatagaaacaccagctag

SEQ ID NO: 133709 - DNA, 682 bp, Homo sapiens
atctgtcatttcgggctgctgtaacaaagtgccaaagactgggtggtttatatacaacagaaacatttctcatagctctggaggttggaagtctgagatcagcgtaccagcatgttcaggttttggtgagagccttcttccaggttgcagactactgttttctcgtatccttatgtggttcaaagagaggagaaagctctctagggtcccttttgtaggtcactgatcccattcatgaagattccaccctcatggcctcatcacctcccaaagcccacctcctaataccatcacattgggggttaggatttcaatgtatgaatttggaggggacataaacatttagttcattgtaagaaataagggtaaaatttagtctttggaagagaggataagaaaggtgatagcagagcaagaagaagattatccttttatcgttgctctgtaaccttggccagggcacttaaccagtctactttattacctttctcttagtctcatcacacaatgagaaactgccattctttggaataagttttgctgcatggcattaatggcattctcatacaaaaaaaaaaaagacaaaagaaggctgggcgtggtggctcacacctgtaatgccagcactttgggaggctgaggcaggtggatcatttgaggtcaggagttcaagaccagcctg

SEQ ID NO: 133710 - DNA, 269 bp, Homo sapiens
aaggtgatgtgaggtgtgagtgtgtccatggacacagggaatgtgagtctcgagggcacactaggaaggagcagggtaatagaagtactggtggttgctaatgtgggtttagagacatagaggcacttcaatgtgtgccatttcgagagtcagctgtgtgaagtctggaatatgctaataagcatcagaaccttgtgaagattgtgcccttgtgtccgcggaggaccagagtatgttgaggttccagggggtgctactcgggggtaggg

SEQ ID NO: 133711 - DNA, 282 bp, Homo sapiens
cggagtcctgggtctgaatagaggccaggccgccctgtgtttctagaaaacgagtacactgtaggcatccttggcaaggggacatactacacttagaaacaaagcctgcttctttattttatttttgtagagacagggtctcactctgttgccctggctgcagtgcagtggtctgatcatggctcactgcagccttgacctccggggctcaagcaatcctcctgcttcagcctccctagtagctgtgattacaggcacccaccaccacacctggctgatttt

SEQ ID NO: 133712 - DNA, 674 bp, Homo sapiens
ggtttccctaatgctgcccccgcccctacagatggatccacccaaggctcccactggcacctgagttcctgggccgatcctgactacagcaacgggcatgtgaatcctcagtatccccactcagtagggcttagaaaggaattgttgcccaagagcgaggagctggtggtttggtatattttgctcccatttagttggccctggagggccctggggataacttccagccatcaacattaccccctatttaaattctcttcttgcttaatctctgcataccctgttttagtgcaggccaaagaaatgccttagtctctggatttaactatatgatgccttgcagacatgcctggagcacaagtttggtgcgtgggagccctgcccagtttccctgcctggcccacaattctcctcttttcctgcccttgtcacccagtatctatgtttctcctgctctagatggatttcccatgaggcaacctccccactggggttcccagattcattgcctaaagtccctggtgtcattcctgcctgccgcaggccaaccctctggcatcacaagtatgccagcaaatcacaatgggtgcttcttaagacacaggcccccatcagtccctggctggagtgcagagcctaagctaagtcccaacatgggtagtcaaatgtcctga

SEQ ID NO: 133713 - DNA, 339 bp, Homo sapiens
ataatttgctgtttcatttctgtgtggctcctgcagccactagctggcatgaaagggtccctctggtattttgaaccaaaaaggaaataaaactcactcacacttcactacagataacctgaatattttgaatttggttcatggcaagagaaatgtgtactttggatttattttaataatagtggtgatatgttggctgagttatctcctttacgatttggaaacttgtgaagtagttgtctgagtttaagaaaagcaatatatgcctacgggaaataatttttatctcatctgaaaataattggaatatatgaacaacacttaaggagaaaatgtctc

SEQ ID NO: 133714 - DNA, 182 bp, Homo sapiens
atcgatgccagttgtactcaatacagcgctggaagacagaataattaggcaagcaaaaaagtaaggatcagtgagtgtgtctagatacagcattttgagttagctcttaatgttcatagcacattctaaagcctgggccagaaataacattgtaatgatgatgttaggatggcaagcagccc

SEQ ID NO: 133715 - DNA, 636 bp, Homo sapiens
aagccaggtgaatgtttgctaaattgtatagccaataagaagtcaataggctccagtccaaagaagactctacctttcctataaagcatatgtgtgtcataaagaaggttgatggtagagagctggctcaaagcctgcatctgtttaatagctgcatgccatttatttattttttgcttttagatccccattgactgcccatctactatctactggttactataataggtgctgggcgtagagcagagaagaaacagacttagacttcgtggagctaccaaactagtatgagaaagacatccagaaacaataaagttattattttaaaaaccagaacaaattatatatctgataagggtttaatatccaaaatacatggaggaattcttacaactcaacaacaacaaaagatcaaataactcaattaaaaatgggcaaagaacctgaataggcatttttctaaagatgatatacaaatggccaatgagcatatgaaaaaaatgcttaacatcactaatcgtcataggaatgaaaatcaaaactatgagatattacctcatatacattaggatggccactatcaaaacaaacagaaaataaatgttggcaagaatgtggagaattccaaacccttgt

SEQ ID NO: 133716 - DNA, 318 bp, Homo sapiens
ctctctctcacacacacacacaatctgtattattagattgcatttctatggcttactcataattttttccactgcttttccatcaatacaatatgaatatatgccaacttggtttttcaaaatgtgactttgcattgtcacggtcattgtcaaattcacatccccaatctcctaccatggtattttcaacgtgggcacatgttgtttctcagatgactgtagtcctagttctgggttttctatggaccaggtcgacaacactggggaaggcacttaacttccttaggacatagtgaaataaaggagttgtggtaaatg

SEQ ID NO: 133717 - DNA, 256 bp, Homo sapiens
ccatgttcggtcactggcaggtgcagcctgtggcacagcctctgtgcatatgtggtgtccttacactccctgaatttggaagcctcatggctcctgcagaatggtggggtaaacaggacatagaatttgaacttcatcactggtaggctgggaaactcctaggaggatttaagcagagggatgacatgacatggctggattgaccatattgaatggtcactctggttgcagaggggagaatggacgtggtggggcc

SEQ ID NO: 133718 - DNA, 476 bp, Homo sapiens
cagtgcttcaagaaggagattgtaatcaacggtgctaaaatgctgctggataattaatataaaggcaaacagaggtaatcagtgaaaacagtggccagtttataaatactcttgtgggataactgacatgacgtatgcaaactactaagcctagtatttcattagaattcagtaagtgtttataaatattaatattttgaggctattattctgttgtgaaagttaattcattagctgtgagtgatcttaatgacattcaattaaataagatccatggaactcaacaactagtggaagagacagaagaaacaaatccagagggtgtgcctgtctcagcctgtcatccaagtgttgcaggtacttcgaaggagaagagaagctatccagtggtcttcgatagagaacagataatgaataaaggcatcaaagataagagaagacatatattaagatctaaatgggttgttacaactaaa

SEQ ID NO: 133719 - DNA, 780 bp, Homo sapiens
gaggcaaagagtcctgcccggcaccggcgccgcgtgggccaacctgcgcccgtggaggggcgcgcagagggcaccgggcgccgggagcaggcggcgcagcaccagcatgtgttagtgccgggaggccactgtgtcagcaagctgagagggaaactgaagcaagatgtcgggccggagtgggaagaagaaaatgtccaagctgtcccgttcagctagggcaggtgtcatctttccagtggggaggctgatgcgttatctgaagaaagggacgttcaagtaccggatcagcgtgggcgcccctgtctacatggcggcagtcattgagtacctggcagcggaaattctagaattggcggcaatgccgcgagggacaacaagaaggcccggatagccccgagacacatcttgctggcagttgccaatgacgaggagctcaaccagctgctaaaaggagtgaccatcgccagtggaggcgtctgcccagaattcaccccgaactgctggcaaaaagcgagggaccaaaggcaagtcggaaacgatcctctccccacccccagagaaaagaggcaggaaggccacgtcaggcaagaagggggggaagaaatccaaggctgccaaaccacggacgtccaaaaaagtccaaaccaaaggacagcgataaagaaggaacttcaaattccacctctgaagatgggccaggggatggattcaccattctgtcttctaagagccttgttctgggacagaaggtaacaaagagaattgccttgtgctatatta

SEQ ID NO: 133720 - DNA, 312 bp, Homo sapiens
agttggctggagtaaatggtgccattgacttcagtgcttcctcaatgagctccaatccctttctcttgggatttgtcatagatataactctctcttctaactgcaacttcgttgttcctagcactttcccctggctttgtccacttcctggaagccccaccacctttgccaatgactggtccctaaagacaatgctttcttccccattggccaaaaatggagtcgtttccatcagcgatactgccatgaaagccagtctctggattgttctgtagagacagtggtctcttccacaaatatttcagccatggt

SEQ ID NO: 133721 - DNA, 879 bp, Homo sapiens
catgtaaaatatgctgttttagtttattcttgcactgctataaagaaataccttagactgggtaatttataaagaaatgaggtttaattggctcacggttctgcaggctgtacgggaagcatagctgcttctgcttctggggaggcctcaggaaacttacaatcatggcagaaagtgaagcagaagcaggcacatcttccatggcagaagcaggagcaggaaagaaaggaggaaggtgctgtacacttttaaacaaccatatctcacaataactcactcagtcacggttatgttatgagaacagcatcaaggggatggtgctaactcattcgtgaggactctggccgctggatccaatcacgtcccaccaggccccacttccagcactgggcattacaactggacctgagatttgggtgaagacacagatccaaaccatattgtatgcctaaataaatttatatctaaaagaaggttcaggagaaaagtacatgttgtcagcattcttttagccttgatcaatcatcaatgagtgtctcaggctctgtctttgaccacagaaaatcagtgagtagctctgtgttctacactgccagttgcacagttccgctgaaacttggtaacacattagtccttctggagctatacttgcaggtaggcgaacacccatggaccaagtgctgtaattcaagctaacaatgcctagctatctccaaaggcaatcgctggagccttttcacgctaaattagaggtaagcattgtaatcaccggctaggaaaataaactcactctggtttcaggagctttgtgtttttaaaccggtcagactccttgaactgctgccagcaaaccatgaatatacatcaatgggagacaga

SEQ ID NO: 133722 - DNA, 807 bp, Homo sapiens
ctgttgaaggaagaagaaagcaacaaaagactggaagctgaaattgaatcatcagtctagactgactgctgctataagtaaacacagtgaaagtgtgaaaacagaaagaaacctaaaacttgcattagagtgaacacaagatgtttccgtacaagtaaaaatgagttctgatatttccgaagtagaagataagaatgagtttcttactgaacaactttctaaaacggaaattaaattcaataccttaaacgataagttccgtaagaaaagagatactctcagaaaaaagtcattggctttagaaactctccaagcgacctaagccaaacacagcagcaaataaaggaaatgaaagagatgtatgaaaatgcagaagctaaagtgaataattccactggaaagtggagctgtgtagaagagaggatatgtcaactccaacatgaaaatccgtgcattgaacagcaactagatgatgttcatcagaaagaggatcataaagagatagtaactaatatccaaagaggctttattgagagtgaaaagaaagacctcatgctagaagagaaaaataagaagctaatgaatgaatgtgatcatttaaaagaaagtctctttcaatatgagagagagaaagcagaaaaagtagtaagtatcaaggaagataaatattttcaaacttttagaaagaaaatttaaacatttggttctggatacatgttgaacttagttgaatataaaaatcaatggataaaaagtgtgtttaccatactgtataattccatttacatgaagcatccagaaaagata

SEQ ID NO: 133723 - DNA, 425 bp, Homo sapiens
cccgctgctccctaaattcttatagttctagtatgttccatgcataagttctgatacacattctcatcttctgaatgctatagtgtgtgctttttcataaagctgatgataattaaatttccaggctatttatttttttagttttgtgtttgttggtgaagtccaactgtttatattcgtcaggactttttagttgcaaataacaaaaagcagcttgaaggagggctctcaagaagtatagtctgcctgatgaatggcttgaaaccagaaggaagggctctcatgacttcccccatcttgtcttggcttctttctgcgcatctgctctctctgtcctcccttcctataccctaccccagcaactttttctacttctctggtccagacttattcattcaacaaatatttattattaaaaaataata

SEQ ID NO: 133724 - DNA, 524 bp, Homo sapiens
ctggaatagggtcctgtggtgtaagaacttgtggccttaaataaaactcttcttaagacctcagtttcaggccaggcatggtggctcacgcctgtaatcccagcactttgggaagctgaggcgggtggatcacctgaggtcaagagttcaagaccagcctggccaacatggtgaaaccctgtctctactaaaagtacaaaaaattagctgggggtggtggtgtgtgcctgtaatcccagctactggggaggttgaggcgtgagaatctcttgaacccgggaggcggaggttgcagtgagccgagattgcatcactgcactccagcttggcaacacagcgagactccgtctcaaaaaaacagacctcagtttcatcatctccccaatcaccacactaatatagactctgcagagttgctgtaggattaaattataagcacgtggccagctcccagtggcacacccagcacatggtggagtgcatgtcctgaatacatgcaacctgaacacaaatccaatgcttga

SEQ ID NO: 133725 - DNA, 184 bp, Homo sapiens
ttcaggggcaatatgtcctgaaccccatcaggatgaagccccagctccatgaagcccctcttgaactggtccatcctactgttccagtctcagctccctctgctccaggccttgaacttcacattccagcctggggactcctggcagttccctaaatatgcaaagagctcagctttctttcctg

SEQ ID NO: 133726 - DNA, 407 bp, Homo sapiens
tgatttcacctagcttgataaccataaacctggggtttatggacttaaggtagtctgtgaactcttccttctctccctgataaattttggagtggttgtgtaagtgcatttatttatttttgtaacttacatacagaagaacatatgaaatttgtaaattataaagtaaaaactcttgtaactcatgctcaagtcaagaaataggatatagtcagttccttagaaatggattcccatccctcctagacttagcctcctctctcccctagatgtaaccatttttttaacctttgtggttattatttccttttcattctgtacagttttaccatacacatatgcatctctataaaatattgtttagttttacctttttaagatcatttaagtggaattgtcctgtattt

SEQ ID NO: 133727 - DNA, 317 bp, Homo sapiens
aacttaaacatacatgaagcaaaaattgagatcatggtagaagattttaacacccccttctcagtaattgatagaacaactaaaaaaaaaatctataaagacatagaagatttgaaccgatttgatctaatggatacatttggaatactatacctaaataactgccaaatacatatttttttatgttcacatagtgtattctcaaagagagaccatgtgatagacaataaaacaaaacaacaaacttaaaaggaatgaaattatgcagtttgttctcttaccacaacagaattaaaattcaatgacagtaagatagg

SEQ ID NO: 133728 - DNA, 694 bp, Homo sapiens
cagcagaaacaatggaggtcaaaagcaatgaggtaacacattcagagtgatcaaagaaaaaagtcacccaagaattttatatccaacaaagctatcattcaaaaaaagaaagcaaataacaacattcccagataaacaaacaaaaactgaagaatttgttgctagcatgtccaccttacaagaaatactgaagttattcagactgaaagcaagtgatctcagatgataattcaaatccacagaaacaaataaagaaccagaacactagtaattatgtaattatagaagactgcataaacgtatatttttcctttttttctattaattgattaacaaagcaattccataacatatgtataaaatgtatttttcagtctataacatagaatgcagtatatttgccaaaagcaacacaaaagaggtggctgagagcaaagctatatttggataaggaaatatagatgataaagcaataattataacaatgcattgataggtttgtaacattaatagacataatatgcataacaatagtactataaaaagacagacaagacaatagaactatacaggagtccgggcagggtggctcatgcctgtaatcccagcactttgggaggcccaggcaagtggatcacttgaggtcaggaattcaagaccagcctggccaacatggtgaagccccatctctact

SEQ ID NO: 133729 - DNA, 781 bp, Homo sapiens
aagaaccataccatttggtcgcatagaaccacctttttgtcatgggtcatgataaagaattgtgctagtgctcatgttttagagttgtcagtagctgtctacgttcttccattcttctaacacatttcatgctgttgtttctaggtacgtatgttgttctgtacaggcagaaggcatgcagccctaaagcgggtagggtggagaaaagatgcataatcaggccagcaaaagagggaaacagatgggttgtgggagatgaccctgcccccatgctgtttttgttctggctgctgttgatcatatgtgaatcagcagcccagaaactggagttactgatcctttgataaaaaaagaaagtatgaacttagactcagtagagttataaattacaactctaaaaagtgattcaggttttacagtaaatacaattacaggagtattcaggaattggtaaaggggacttaattatgatggctatacctcaacatttttgggtcttgtctctagattatcatagtttacgagattttatcctgtgggctctttcaaaatgaatagagagtagtgtgtttgttagagaaataaatccaatgtgtatattttatgccaaattagtcttttgtcagtgcttgtatatgacttctggtctattttctaatctcaaggttaaggaaaccttgctgtgtctcactgagtcttcccatcattctgtggaagaatcttattttttaaaaaatactaggagaatgttatcaaacatatacaaatgtagagataatag

SEQ ID NO: 133730 - DNA, 442 bp, Homo sapiens
tgcttgcagggagtaaattaccaaatttgtataataggcttactgtagtcaatctcactacagagaatattatattaatgttttctcaaactttggtcatttttaaactatgcataggattttgacaatatatctgtgtaccattttattattaagtagttaatactcctattcacttgatattgcctttgtgcaatgcaattctgacactcgctccctagggatggtcaaatttcaaagctcaagggcatactcctccacgagactgccctcacttcagacaccggccacaagttccagggttccaaggtcaccagtacttctgcccaactggctacaaattcaggggttctcattacctcctcaggtttgataatttgctagaatgactcatagaactccaggaaagctatatttatgattctagttttcttatgaatga

SEQ ID NO: 133731 - DNA, 678 bp, Homo sapiens
ctgaacagttatagtgagtacaatggagagaaaagcagcagaagaaaaagtgtaatagctgttggtgttttaaatgatattatttgatttatgtgattatgcattgaatgcttatagatttaggtaataattttctagattttaagctatctgaagtctccagcatttttttcctgtatgctgtttgagtgaccccaagtacctctgaacagcaagatcagtgctaatgctgaccacatatgcagcggcccctggcctgaaggaaacgccgggctcttgctgcactttgtacctttgtcctttctcaccaatcatgcccactttgtctgagtttcccatgatgcaggaagctgcaggcttcaccatggtcacctgcttatttaacaaggaccttttgttctgcactgggttatgaggtttgaagtagaatcctgcagcctgaatcccccattgcgcacagctgccattttcataccttgacgcagtgatgcttctggatgggtgatactggccaggtttggggctggtctaatccagttccaggggaggctgacctcacccagccctgcaagcccactgtgatcttggctccagaaatctcaggaaacacacactgcccctgtccccctgcagtcccttgacacagtacagcttaaagccatgtaaatttttctctat

SEQ ID NO: 133732 - DNA, 410 bp, Homo sapiens
aaatatagagagatcctttgtatactttgcccagtttcctccaatggtaacattctacaaacttacaaggtatcacaaccacgatgtgtgctcacttgtgtgggtgtgtgtactaagttctggacaatttaaccacctgggtgggttcagtcaccaccagtcaatacactacacagtccccacaccacaaggatccctcgtgttgccacctctctcagcaaccctgacccgcaaactctggcaaccactgcagcatcctccatttctaaaattttgtcatttcaaaattatacataatatttcaaaaatggaaccatacagtatgaacctttttgggatcggctttttacattcagcatacaggttgtagttctagcaacagtactgccagggtattccatggtacaagc

SEQ ID NO: 133733 - DNA, 269 bp, Homo sapiens
cagaaattaaaaatagtaagaaacaaatagaatttaaatttcattttctcctaccctgggcatacatgtgacaaaatccaatatatatcactctgaacagcctcagggtacagccactttatattgcacaagctgtaaaagtagtcattttcaaactcaactattatttaaaatgattacaagcatttaaaatgtttaaaataaagatccaaccctgttcacttgggaaacagttgtggcagttccttaaagtgttgaacatagggtta

SEQ ID NO: 133734 - DNA, 277 bp, Homo sapiens
cagaagtctaagaatggagctgaaaggcaagaactgcataggaggagaagaccaggattcggagacttttagagtgagaaagaaacattggtagacagagacaggagagctaaaaggtaagtatgggaaatgaagaattgccagagcagaaaggagcctgggtgggcagagtctaagatatgttacactcagacatattgtattagctcttggagatttctgccttgcaaacttagacttttttcttcctttatgttttgcaagtgttctctttcaa

SEQ ID NO: 133735 - DNA, 480 bp, Homo sapiens
tttggggaaaattttccccacagaggaaggacaaaggggtttaatttctctgttatatgaagaaccagtaaaaggacagttttatagctcttctgagtggaacagaccaggctcaaatcatgcgcttgactgactcattgccatggtttacacaggtccttcaactgccagctttaagtcagatgcctgctcacagggactcatccaacagtaggttggctttagaaaagcgttctgtacctctgagaaacaggacctcgatgaagtcttcactgatgtcaatcaagaatcctttctgggggattcacactgtgttcactacacaagggcataagcacaggcaggaaaccaagactcaggcctgggtacaaatcctgacctccacctgccagctgtatgacttcaagtaagtgatttaaccattctcaagtgttcccatttgtaaaatgggaataatacccccatcttacaaggctccaa

SEQ ID NO: 133736 - DNA, 188 bp, Homo sapiens
ccccacacattgaaggtagagcagcaaacaagatggtggggccctgcctcctggagctcactttctggggtggggagacaggcagtaaatcaatatacacaagacagaaggtcagatggaggtatcaaggtgaggcggtggtgcatgatgggggtgttcttttagaccaggtagttgagcagcggcca

SEQ ID NO: 133737 - DNA, 459 bp, Homo sapiens
ggcctcgctcccactgggcttttctcattttctcaaacatgctacgtttgttctgactcaggcttcagtagacattcccagggcatctccactgctttcatctgcagtcttcctaagctttggctcttcccagaactgtccaaagtcaatgcccctgctctattattttatagcataaccctctcagtctttccttcatagcactcattgcaatgcagttgttttgttgtctaactacttgcttttgtctgtgtcccagcatccagcatccagcttagcacataataggttctcaatcaatgttgattgaatgaatgaacgatttgctcagtcacacagctcgtaagtggcagagctagaattctaacccagtttagtctgactccaaatccagagctcccaacacatgagaagtcatattttatcacccaaacctaaactcttttgagagtgaaagag

SEQ ID NO: 133738 - DNA, 834 bp, Homo sapiens
cttatgacctcattggtatctttttagaccattcattggtgtttactggaataatatgccactgagaaaagaagttatttatttgctgccagtagcgtaacagtcatatttgcttttattcacattcacccaactcacatttcatttttaaagttttaaatgcaaagaataaaggtaataactttttctatttgtcatttgtgatattatcaaattgaattatttcttttgttcttttattttcccttcatttaaaaaacacctttgggtagcacctcaatataaaattaatatctctgatttttctataaattgtttctttgttgctattttctgatttcctatcacaacatatttctgtcttggtattgtattattgaggaagtcccaggttttgttaggaaattgcttgacccagtagatagtagttgcaagcactggccctggcatcttccagactgggtttgagcccttgttcttccacttaccagctctgataccttgctgaagttgtttaaatgtttcctgtcctttaataacagaaataacatttggagcacttagctgagtcgagagagtaggtgcttcatattaactattttgttgtaagtaatatataatctttaattttttgtcttcataggttgtcagattttttgacatgattatgactttttagtttacaaatgagtgaaattatttcagattaaactggtcattgaaaaattttgaggctaggcatggtggctcacacatgtaatcccagcactttgggagggtgtcaggaggattgcttgagcccagtagtttgagaccagcctgggcaacatagtg

SEQ ID NO: 133739 - DNA, 246 bp, Homo sapiens
aagtgacttctcttcacagaatcaaaagccaaggaaaggacattaacagtggaaattgatgttcttgaccagttttgctctgaggtggtcaagaatataacaatggcctgtagtggaatgattttgctttctccctgtgtaaaacagtgatcctgtaaaacccaagtttgtaatttattaacaaggaaatgtacatataatcatttgtagctgcaagagactagcaataaccaaaaggcttgtcat

SEQ ID NO: 133740 - DNA, 192 bp, Homo sapiens
gttgatgactctatctgtgaaaacagcacgtaccctgaaggatgccacctctcacctgtgtacactacctgatataaaacttgcccatggcaggttatgagctcacttggggaacaagacagctaaccgcagttccttagtcacagcttcacacaaagcttagtgtttagtgcctgtttctctctttcacat

SEQ ID NO: 133741 - DNA, 682 bp, Homo sapiens
gaactatccacttctctgtccatcccctggtaccatctcttgcttggactaatacaatttctctgtttctggtctgggccctacccatactgctaaactcacctcatctcactcctccactgctactctacattccagctacactacccttctttgggtttctacaacatcctcagctctttcctgcctcaggatcttcacacgtgctgctctcttgggctgagttcctcttgctcccactgcacttgaatattacctccccatttttcaggtaaaatttgaaaattcttgactctcaatataaattgagtctccattattcttttttttatgacatttggtttttttgtttggttgtttttttctttcagggcacatactttttgtgtttgttttatatacttttgtgtgtttattttttctaagttttctaactcctcacccacttcaagattataagttccatgaggaaaacagccacatctgttcaatttacctttgtacccctggtgcctagcacagagtgttatatacaggggttttttttttttttaaggtagagagatagaaatcatgctatgaacaatattactactattatgaatactactactactaccccctacattcttttaacacatggtttattaaaaatccttgttggcatttcaccagaggtaca

SEQ ID NO: 133742 - DNA, 426 bp, Homo sapiens
taaaagccattctaaaattaataccaacaaaatgttatatactttttatacatttcaaaaggcactctaacttgatgacttaatttgatcttcacaacaaccttgtgagttaggtgatcacatatttgcttatttgagacagacacaaaaagattggtagaaatctcttgcctcccatctagaaccctaaactattactttatttcagtacatacagacaagcattactatcttgatttcaccaaagaagaaacaagtacagagaagaaacttgcctaacgtcacagtgctgctacacagcagaacaagattcaggccaggaccaatccaagcctcacctctaaccacaactgtcataaaaaaaaaatagataaaattaacagttcaaaattatgtagctgactaaaaaccaactgtggtagcagg

SEQ ID NO: 133743 - DNA, 363 bp, Homo sapiens
ccttaacttttgtatattaatttaatgttcttagttttcgttgatagttaaattttatgtagatggttgtcatgcataaggcaggaagaaatattttctgtgcaggagtgaaaataggctagagttccgttgcgtgtgtatgtgtggggttttttttgtgtttttgttcctttgtttctttgttttttgagacagagtctcactctgttgcctaggttgcagtgcattggtgcaatcacggctcactgcaacctccgcctcctgggctcaagtgattctcatgcctcagcctcagctgggattacaggcatgcaccaccatgcccggctaatttttgtatttttagtagacacggggtttcac

SEQ ID NO: 133744 - DNA, 189 bp, Homo sapiens
aatatgcatctgaggaacatattcctttaggttttctatctccattaaatgtgatctaaatgttctggtatatctcaaaattcttctgcttcagttaattatgctctaaattctcagaaatgtacctcagaatactaggaaacaagtttggcaggcaaatggcagaaatggcacagggatgaagatgaa

SEQ ID NO: 133745 - DNA, 446 bp, Homo sapiens
tggattgtacagcgtatacccttgtctgtctatgttcatttaagattcatgcaaattgtttatttaaattttatatctaatgaaaaatatttgtaaaacaatgtaaaacactagttaatgaaatgcaggctgaaagatttaaaagggaatgtcctcatatccttaatgtattttgaaattcatcaaaaagtaagattaattgacagatggacagagggacagatagagggagagacatataataagtcaatcaggatgaaatttaaattatagaatctgatctgtgggtataaggctgttcactgtaacacactttaacctattttttatatctgaaagttcccataataaaatggtgagtaaaaaggaaaacatacttttgaagtaattcatccatagcagcatgaataagtgaggataagatcccagagaaaaagggaagtaca

SEQ ID NO: 133746 - DNA, 216 bp, Homo sapiens
cccctccaaggttatcttttcttttttctttgcatatttcccaggagctctgcactaaagcataaactttcacattagagaagtgaataataaagcagacaccagaggaatacatatgctgtttgaagaggctttctcacccagcctccttcatgcttgcagactcatacccagtgcagttgacaattttaggtcgactcagaatccattgtatat

SEQ ID NO: 133747 - DNA, 337 bp, Homo sapiens
ccatgttgctgggagaagtgggagtctgaaggctggcttggtcattttatggtaaggtgtgagtcatgatggtccttgaaattggggtgaggctgtgctggtcgcccatagcggcataaaatgggttgcctgttggtggttctgactgcagtcggggatgggaggcactagacagcctttggctatagtgggactttgtagacatttattttccttaggaaagctgctcttctctgtctccgcctagatggacagcttcagaattatataccccctccctggttctgtagagtaatacccaataaacagagattctgctcttgtaccctgaagccac

SEQ ID NO: 133748 - DNA, 269 bp, Homo sapiens
ctcctgcctcagcctcctgagtagctgagactacaggtgtgtgtcaccatgcccagctaatttttttttattttttgtagaaacaaggtctcatcattttgcccaggcatgtcttgaactcttaggctcaaggagtcctcccacctcagctgcccaaagtgttgagattacaggcatgaggccctgtgcctggctaagaatccgtttctttgcatttttcagcttctagaggcacccacattccttggctatggccttgtccatcttca

SEQ ID NO: 133749 - DNA, 596 bp, Homo sapiens
atctgccttgtgttaactgggtgtctgtcctttctcttttcagttgactctctgtcttgaaagccaactgatatttcaaaaatgaacatcaatgcatagctccagtttaaagacttcagtgactccctgccacctccaccctgatctaagggattcaggctgtctgccattcaaggctttttgcaatctgctcccgattcccctttccagtcaacttgcatttgatatctctgactcactcgtccctcaaagcaccatgtattttcacagcgctctgcttctgtgctcaggtttttcacttttgtataatgttctcctgttattcccatgacttctaatcaaatctacctctttgaagttttccgggtctcctgccttacctggtgcagaattaaatgctttctccattctgtccctctgacccttccccggcaaatcagggcttgttctaaacttgtctccttctgcctctactgagaagtttccttgtcatatttacaaaaataagggatattgaaatggaataatctctgtaactgactcttcagatgctttctagaggcggtgagatttgaagaaggaataagatttgcata

SEQ ID NO: 133750 - DNA, 404 bp, Homo sapiens
gggaaggataattattaaataaatcatggaacatccattaaaaatgtttataaatcattttaacaatatggaaaaatgggatattaaattagtagaaagaggatacagaagcatatctaaaatacgaccctatatacatgtgtcggtatattacaatgatatttataaaaatgcagatacctaggacatatagcaatggttctcttttggtggtgggcttatggatgatttaatatttctttttatacctttctaatttttccactttttcagtgagcacatattagttttctcagttctctttttttttttttttttgagatgcagtctcactctgtcaccttggctggactgcagtgacacgatctcagctcactgtaacctctgcctcccaggcttaagtg

SEQ ID NO: 133751 - DNA, 688 bp, Homo sapiens
gacttactggattttattttattttattattattgctgttattaaagatatacatacacatacacatatgtgacattgattttgctaagaacctaatatattcagcatgctgtctagtcatctcagatgatccttgctttgaaaaccttaagcacttaaatgacaaaacagtcgcgcacacagagatagatgtaaaggtgatattttacttaacattttttttaacacccaaatttgctagtagagaaaaagagaagagggaagactcccaaatggttatgaagtttgggagaggagctttataggggtaacatgaagatgaggaacctaatatgggattagagcataggaaaagagacacagccttagattctattcaaaatagtcagtgtagaggccaggcacagtggcttatgcctgtaatcccagcactttgggaggccaaggcaggtggatcacctgaggtcgggagttcaagaccagcctgaccaacatgaagaaaccttgtctctactaaaaatacaaaattagccaggcgtggtggcgcatgcctgttatcccagctactagggaggctgagacaggagaatcgcttgaaccccagaggtggaggttgtggtgagccgagattgcaccattgcactccagcctgggcaacaagagcgaaactccgtctcaaaaaaaaaaa

SEQ ID NO: 133752 - DNA, 767 bp, Homo sapiens
  misc_feature (767)..(767): n is a, c, g, or t
ggcccccctgtggaattgtaagtgaacacgataatagtacctgtttacactgtgaaggtggatattgttacagaaaacacaccagtggctttctcactgttgagctaataatgccttgtgaatgtatgatctacggagaaacccctgtagttgtacctgctgatgctgtctgtctgttggaaaataaaatttgaatgtttttttttctaaaaaaaaaaaaaaaaaaaaaaaaaaaaaaaaaacaaaaaaagaaaaacacaaaaaaaaaaaaaaaaaaaaaaaggagggggggcgcagctcatcaataacacctaccaggggcgacgacacgacacagcaagcgccccaacatgattgattagcagaaaggggcccccacaataggagaggagcgcatattaataacaagcagagagaaggagcggcagcttatataacaacaagtgtggcagaggaacaaacagagcgcagaagggagaccaccttgtggagacgagaccacccaacatgcggaggtggcgggaaaacatagaagaggagcaacacccccgcacaagcaaagaactatccagacccgaccagggagaaaaacaaacaaccactcgaccaaggcggacttaacggaggcggtaacaccagcagagagacagtaaacacagacacggacagaagaaaaaagtcgcgacctcccaccggtcaccgacacgtattacacacagaaccaaatgtaagtccaaacacagacgcaccgaacacgataaagaccn

SEQ ID NO: 133753 - DNA, 261 bp, Homo sapiens
ggcccccctgtggaattgtaagtgaacacgataatagtacctgtttacactgtgaaggtggatattgttacagaaaacacaccagtggctttctcactgttgagctaataatgccttgtgaatgtatgatctacggagaaacccctgtagttgtacctgctgatgctgtctgtctgttggaaaataaaatttgaatgtttttttttctttttttttttttttttttttttttttttttttttttttttttttttttttttt

SEQ ID NO: 133754 - DNA, 346 bp, Homo sapiens
taggtgtgagccactgtgttggccatcattttactttattttgactgagttcagcatgctcttttggatagtgtgccttgttattatcttctagttgtaggttggatgagtgttcagtggtgctgggaaacaatggcttctgaagcaattcggatatagagccaatatatgaattcacagattatttggacagctgcctacattttaaaaacatctctagaatctctaaaacttttgaagcaacaagcccttttgaaaagtatattcctggaaatagcttcaccctgtccttttggcctcacaagaatccactttttttttttttttgagagagagtgtctcgctc

SEQ ID NO: 133755 - DNA, 403 bp, Homo sapiens
agttgtacttccctagatccgttctcatagaaattcctcagtgcaagataatcaaccaagagagagctatgtatctccccttcttctatcatttctaattcccttcaatcaccaagactctttctttctcattttctctccaaacctattttgggatattttgtttgcaatctcatctcccttttctgcccagagtcattatccaagagttgtttttcttcttctgtgtcactgtattcctaatgtaggaggtaatacatttagttgattttcattaaatgatttagataactttccttaataaaagcaccaggtaaagaattaatatatcttcattttacaacttcattaggccagcctcaatccagcagtgaggactctaatttgtaaagaaggtaacaca

SEQ ID NO: 133756 - DNA, 250 bp, Homo sapiens
attcctccacctggttaagttcgtatatgtgagattattctcattacttacttgaaaagatccagtgagcaatttttccttaaggcaagcttcctgctctttaggttaccaaccccagagggatgatcaagtgagttcccagattcttttatgtaaggtaacttccagggctattaacctatgataatgtagttccctggacccggtagtcctctgatacgctggtttgcttgtgtctgtactcttttgg

SEQ ID NO: 133757 - DNA, 439 bp, Homo sapiens
tctttatgtattgaattttctaaaagtagggtcgagtggctgggcttagtggctcacacatgtaatcccagcgctttgggaggctgaggcgggaggattacttgagcccaggagtttgagaccagcctgggcaacatggtgagaccccatctctacaaaaaagtacaaaaattagctgggcatggtggtgcatgcctgtggtcccaggtacttgggaggttgaggtaggaggatctcttgaacccaggaggccacagtgagccgtgtttacgccactgcactccagcctgagtgacagtgcagtaccctgtctcaaaaaataaaagatcatctcaaataaatataaggtcaagtaattacctacacaataatcaatgaattcaaagcctctgaaactaaaaatgtagctaaaacttttctggatataaaatatatatgt

SEQ ID NO: 133758 - DNA, 497 bp, Homo sapiens
acccagacagagtccctatacttactgctgatatgggttgcatgtgtcccctatgtcatcttgaattgtaatccctatgaatctccacatgcggaggcagggccccagtcggaggtgattagaccatgggggcagtttcccccacgctgttctcatgatagtgagttctcacgggaatttatgattttaaagtgtggcgcttcacttgttcattctctcgtgttcattgtctgtctgtctctctctctgtcactctctcacctgcctgccaccatgtaagacatgcctgcttccccttctgccatgattgtaagtttcctgaggcctctccagccatgtggagctctgagtcaattaaacctcttttctttataaattacccagtctcaggcagttcttcatagcagtgtgaaaatgaactaatacaattgccgtcttcttttttttccttagtggcattgtcttgctctgttatccaggcttgagtgcagtggcct

SEQ ID NO: 133759 - DNA, 644 bp, Homo sapiens
ggtaactgcatgattttaattgtgtctttttgctttagtagaatgtcctaaaatgacacaagtgagaatagtgtgaaaataaatacattcatttattggttaagctttaaatgtgagtgaaattttcttcaactaattataatactaaattaattctagaatctgtttcaatgtagccatataattatgtagaactataaccctttattgcccagataaatcttgaccctgaaataatgtacgatagaccctcatctgctataattctgaaaactgcagtaagaaagccaaattttaatccaaatgtttcatggttctttgggcttccaagatgacaggctcatcaaaaactattcctgacttggccagaaatggaaagatcttcattttgatgggtacaaatgaagaagccacatagatacatatttggaccaagattccttccttttggcttcgagatctttcactaacaggactgaacgaaccagaatcaacagtattgggaaaagtagataactaaaatataaattttaacatgaacaaatttaccaactgattcagaagaaacagaaatcagagaagagatggaactttaaaataaatttaaattttatcagggagttgtggacagactcctatgaaaa

SEQ ID NO: 133760 - DNA, 642 bp, Homo sapiens
gaggtgaagtgtacctaggtctcaaactcactttaaaatgcataaataagatgtgatgggttgatggataatagatggatatataataaagcaagttgtaagagattaatcatattgatagaatctaggtggtaagtaaatatggttgttgactacacaattttcccaacttttctgtatgtttgaaatttttcaaaatgaaatgttaagaaaaaaaaagtaaactttgatctccaagtcaaattactttttgctcagtctccagatatagtctcattttgtggcaagcaaagtcaatttccctctacttagagcagtaggcaggcgtattctgtgtgctacttagcagtgggggtcaaaagtggtaaattagcaagtttgtccagagggaagattggtcccaaaggatgagccgaaaaggacagtcactgatgcaaagcaatcagagtgactacacttctactgactgtaacagcacctatggtaactgtttttttgatccaaaaaaaacaacagtactttcaaccagtactagatcccctttaggggagtctgccactaccacccaaatactcactaacattcttaggcagcttttctactctaagtacaaccagaagtaccttctaacaaaaacacaca

SEQ ID NO: 133761 - DNA, 293 bp, Homo sapiens
tgatcctccttgatgtcactgaggtcaggggtctgaatccattgtaacactttagtgagagcttctttgtggatctgaccctgtcctattgtagaggactcagtgatgaagacttggacctggctctgatgggttcattcttactgcttgaggtctgttcattcatttgcccatccattcatcaatccatccatccatccatccatccatccatccatctatccatccatccatccatccatctacctacctaccagtccatccatccgtctgttcatctgtctgtccaccca

SEQ ID NO: 133762 - DNA, 414 bp, Homo sapiens
cacagggcacaagggaggttggggggaggaatgtcagggtggggctgtgtgtagtcacacattcaagtgtctgcagatgggcacagtgtgcgcctgtaaaggtgtttgaaggccggtgtatacaggacacctccactctgtctgtatgtctgggcagggtgtgcatgatagtgtctttgtgtgtgggtatgtgagtgtgaggggagggcgtctctgcctctgcgggaggaagtgtggctggagaggattagtcattctgtaggattctgcccaactcagccagatggctgcaccaggctttcctctctgtgctgggtggagggagcagccactgaatcctgctcttatccggaggcaagtggcccagagagaggtggatgagtgtctgtgccagccctgcctggccagggacca

SEQ ID NO: 133763 - DNA, 351 bp, Homo sapiens
agcttcgttcatgcataagttatactgctgttagctgtgagttcagtgttaatgaatcaacaatatattttacataaggtgtctttaaacagaaacacatataaagcaaggctctatgttgatcagttgatgaaaatgttttgaccagaggctcacgggaacctagcctgtatttcttctaggaacaaattaggtattaactaattcagcattcatggctactttatagaacagaactaccaagaacaatgaaaatcaactgtactttgagacctttacccaaaggatagcaatattatgcattttgtttttgccaagagttggtacaggctgaaagcataatgaaggtaa

SEQ ID NO: 133764 - DNA, 735 bp, Homo sapiens
tcagcattctatgatctctgtgatctctgcctgttggtgttacgatgttcctgttctcgggcagtttaatggaggagacaagtaaagaagtagttatagtacagtatgggtacaaaatgtcataggaacaaaaaaaactaaagtaggcttttgtggagctaaaactcctcccaaaaacctaacctgcttctattatttttattttttgaaaaaggagtgtcttgagttggtgtgactaaataggaataacatgattttacacatgatttggaaccttcggcctcccacttgcttgctggatgaccttggttaagttgcttcccttccttggtctcatcatgatacctactgcatggaattatcataacaattaaatgaaatgaaaatctatagaaacacctaacccagttacctgggatgtagtatcagttctcttcttcctcctgggttccaaccaaaataaagacaactttttggagcgcaacattttcttaaattgagtttctccttttctttggaagttcatttttattattcttgactctacgtaatatttcaatccaggctaacaaaatgtggcctcttagagtccttgggaaaacccaccaattaggtacagaatattttctgagtagtaaattagttatgtacgtgtattgggggggttattgaaaatcctttgtctatgaattcctaaataacattattaatttttactatatttggaagataatt

SEQ ID NO: 133765 - DNA, 837 bp, Homo sapiens
tggtatccaagatttattggttggtctgttacatcacttgacgttcagggcaataaatccctgagccatagtagtgggactacaaagaaaacactgatgggagacagatttcaaaggaagaaatgatcaaaccgtttgattaaatgtgtagaagttaatgagaaatcagagggaaatagaaatatattgagcactatctttgttaaaggccttggtgataggttctctggagaaatcttagtagcctggttttcaggagttacaatctagttaaggaaacgtaactaagataaccaagtcctcttttgctttggtcattttgtatggacttacagcccttctagggcaactttacatactttagggttttggataacattttgtgtgtgtttgcacatgagttttacactttgcctgctattacaaaacaccaacaacctttgttttaggtatgtttcatttagttaactaagaatagctacatggagaaggaatgtttaatgtggtacacttcattaagtaacttcatggttactctgtgccaggccttatgcagtgaagagagtagactcagtatcttcaagaagatgagaaaagacaggaaaggaaatgattacagtgcagtgtggtaggatgtgatacagaagcacagtgttcagtgggaacagaagagggatacccacttacgatttggaggctgtgagtttgattcccatcttggccactcgaaaatcttgggtaggttatttaaatcatcttagatgaggatcccagtttcttcctgacaaagttattaatagtgcctaattcaaagggtaagtttaagaaacacatata

SEQ ID NO: 133766 - DNA, 268 bp, Homo sapiens
gtatgaagccacaaaagaccctgaatagctaaagtaatatggagcaagaaggacggaggtatcacactttctgatccaaattatattacacatctataataatcaacacagtatggtactggcatacaaactgacatacaaaccagtagaacagaatagaaaacccagaaataaaccccacacatacgtggtcaactatctttgacaaaggcatcaaggatacagaataaagcaaggatagtctcttgaataaaaggtgttgggaaaa

SEQ ID NO: 133767 - DNA, 450 bp, Homo sapiens
ttagggggtagggagatacaattctacctgtaagagaccctacaccaaagaacggtctggctatgggatcttcagctaatgggggctaagaaagacttacaggccagttgctaacacatcacaaaccaacatctggtgttgctgcatcagggaaggacttgcaaaaacatggactgagctaaaatagactgcctgtggatgacacaaacattctggataacatgtaacaaggagacaatgcagccaagcttcgaggaaaggaagggtcatttctagaggttgtaaatgaagagggaactagaaatgagagtggtaaagaagtaccagaccctggcagagagatgctgggcttcccatccccaagcacggacagaggacgtacttatgagtgagctgggaagctgcaactgaaatgtctgcacaaagctagcaatggctgccctttccaca

SEQ ID NO: 133768 - DNA, 386 bp, Homo sapiens
ctgccatgcagacaggggaaggggaatcttgggcagccccacccagaggcctggtggtcttcatgggtgggaagggggaacatgcacagattgcagagggatagaagaggccgacctggagacagtaactttagaggaggggttcatggggttcatgaactttgggggaagggttcctgccctaggggttcatggctaccacctcctgccttatccttctcatctgtccctctctcctaggaagtgcctaaactgaacacaggtgggtggagagaggagatgggagcagagcccattgcagttgcaggaatccagtgggtggtccctgggttggggtctcagatgtctccttttgcctctctctcagacacagatacacacaaaca

SEQ ID NO: 133769 - DNA, 218 bp, Homo sapiens
cgtcacagccctccctgcttatctcaagacagactctaggttaactggtgaatagagctttactgagctatgtgcagagaaaacacggaagattacagcacaaaaagaaacaacggaagcctgaatatcagacgtcattgttcagaaattcttcaggtttaatgcattctctggggtctcacagactgtcctttggtccttttctgtctttttttttt

SEQ ID NO: 133770 - DNA, 434 bp, Homo sapiens
ggcacctggcgccttgattcaacagtgctattccaagtcccagccaccctccacgcccagggttcccggagccgccgtctgtgttctcttcccttgcaactccacagctgggcatccgggacagagtgtgagccacccctcccctcatttcctttcttcccttcaccccagcatgctgggatcactgcatgctgtgccctcgggctacagtacccactcctgtccctctcccatcctacatccactctcacagagatggcaaaatctagctcagctgcaacccttttcatgaaacttttgtcattcacagctttaaaaaaaattgcttccttcctctggattctcaaagactttacatctttctcatgcaaagttttaactttctactgtggactactgttggacgttagtactgtaagctttagtcctgccca

SEQ ID NO: 133771 - DNA, 738 bp, Homo sapiens
cagagacacagcttcaggaagaagcaccctccatgaaaaaaagtaaattcaaaaatagaaacaacggttacaccagatgtggagatatcaatgtaaagattcaggaaacctaaacctaaaggaacacaataattcttaattattaataattaataataagatagatcttaacaaaaaagaaattatcagaatcccagatgaagaattcaaaatactgattttaaggaagctcggtgagatgcaagagacatctgaaaccaatgtaaagaaatcaggaaaacaattcagaatatgaatgagaaatcaaggagacagatattaaataagaaacagaaattctggaactgaagaatttattgatggaaatagaaaatgtattcaaaagcttccacaatagactagactacgtagaaaaaagaatttgagaactggaagacaaatctttaaaaataatccagtcagacaaaaatatataaaaaatatgaaaaggaatgaacaaagcctttgagaagtttggcacaacataaagtaactgaatttacaaattattggtgttcataagggcaaaaagggatcaaaaggtttagaaagcccatttaatgaaataatagatgaaaacttctcaagtataacaggagatttagatatccagatacaggaagctcagtgatccccaaataaatacaatgcaaaaaggactttgctatggcacattataatcagactgtctaaagccaa

SEQ ID NO: 133772 - DNA, 597 bp, Homo sapiens
cagtccagtccgggtgctttggctcatgcatgtaatcccagcactttgggaggccgaggcgggtggatcacctgaggtcaggagttggagacctgcctgaccaatatggtgaaaccgcatctctattaaaaatacaaaaattagccaggtgtggtggcatgcaactgtagtcccagctactcgggaggctgaggcgggagaatcgcttgaaccctggaggcagaggttgcagtgagccaaaattgcgccactgcactccagcctggaagacagagcaagactctgtctcaaaaaaaaaaaaaaaaaaaaaaaagagcaaatgcccagtctagtgagagagacagatccctccacctttccagacagtgacaacccagagtggtcagggctgtcatgacaaagcccagaggggtgtctgacccaggctggggagtcagggggagcttcttggagaaggggaaccctgagtgctgttgagcaagtcgtgcaaatgctgtgtgatgagagtatacagcttgcgcaggggcctggagtgaaatgaggacatgttctattcaaggaactgcaaatatgtccttaacttgccgggggaagtgg

SEQ ID NO: 133773 - DNA, 412 bp, Homo sapiens
aggctcgctcttcatgggtaggatgactgtacatctcactgtgtcacgctttatgcctgtttatgcctgttatcctggtacaatgatgaacggtgtccctctttcactctcaaaagtgcccaggtttaataagaaatatctttgtcctacttttagatgatgggacctgctgaaggattttaaacaacgaagggacagggtgagatttcaagttagggagatgattcaggaggcaggggagaggatagagggacaggagcatgcctggaggccagcttagagagaaaggcctgagcaaagcagtggtaatacaacggggtaagatagtgctcatgtgaaagctagcaaggaggtacagaccacagccgttggtgaacccatggctgtctggagaggggctagtgaggatagc

SEQ ID NO: 133774 - DNA, 244 bp, Homo sapiens
aagtaccggacacagtcccatgcattctctgactattcaggcagatgaggatttcagggccttgaattagcattctctggagggtgaggtttgcttgccctgaattagagttctcaggagggtgagtctgcaattggagaatattaaagaggcagtggcactaaagtaattttaacctacattccaaaatacctccttagttgttgagttgaaccattctctaatttttactatttgacaagca

SEQ ID NO: 133775 - DNA, 690 bp, Homo sapiens
cgattttggatcacaccagatccttatcacaaagatgacaacatccagattggccgtgaggtgaaaatatcttgccaagtagaagctgttccttctgaggagctaacatttagttggtttaaaaatggtcgtccattaagaagttctgagcggatggtcattacacagactgatcctgatgtctctccgggaacaacaaacttggacatcattgatttaaaattcacggattttgggacgtacacatgtgtagcatctctgaagggaggaggaatatctgatatcagtatcgatgttaatatatccagcagcacagttccacccaatctgactgttccacaggaaaaatcaccattggtcaccagagaaggagacacaatagaactgcaatgtcaagtaactggcaaacctaaaccaatcatcctttggtctagagcggataaagaagttgcaatgcctgatggatcaatgcaaatggagagttatgatggaacactgaggattgtgaatgtatctagggaaatgtcaggaatgtacagatgtcagaccagccaatacaatggatttaacgtgaaaccaagggaagccttggtgcagctcatcgttcagtatccccctgcagtggaaccagcattcttggaaatccggcaaggacaggatcgaagtgtcactatgagttgcagagtactg

SEQ ID NO: 133776 - DNA, 419 bp, Homo sapiens
atgctgtctcaacatgtagctcaggatgcttcaaactcctgggctcaaacaattttccctcctggcctttcagaatgctgggattatagggtcttgtcctctcttgatttccatttgcatggcatatctttttccattccttcaccttcagtctacatgtgtccgtacaggtgaggtgagtcttttattggcagcatatagttgggtcttgttctttttaaccattcagtcactctatgtcttgattaaataatttaattcatttacatttagagtaattattgatagatgagttaatactgccatcctgttaattgtttcctatttgttttgtagctcctttcttcctctcctatggtcttctttggtggttgattttctctagtagtatgtttttgattcctcgcctttttattttt

SEQ ID NO: 133777 - DNA, 335 bp, Homo sapiens
ctcagcatctccaagcaggtatctcaagctcagactccaaaatccaccccaccccactccacccccagctcattccacttcccaccaagctgatccttgctattccagaaagatgccagtgagtcttccaggcctttgcaccagctgtttcctatggccccccaccaggaggggctttccttggaaaatagcacccatcccctcaacacgctgtattcccttaccctatgtcacttctttcacagccctgaagtctacctgatgttagacttgtttttttttttttaatagagacggagtctcactatgttgcccaagccgatcttgaacttctg

SEQ ID NO: 133778 - DNA, 442 bp, Homo sapiens
ttgcataagcaaagtatctgcttcccccactgaagaagaaaaaaagaagctccaggagggcagggaccatgctattttggtggccacttgcatcctcactgtctagcacagcaggcacttaatgcttattaatatagcaatctttatgctactgacatagtaaaataatcatagcatacactaaggactatatatgtattcacttgtgtggatccaatctccctggaagtaagcattttttagaagatacatttactccttcaagttaccagtgggccttcctagccctagtgatctgaagagataatatagtttgccaaagagccaagtaaagtgtggtaatacaactcacagtggataataaacaaagatgctgtaacttgttgtatcacttctttctttctttccttccttccttccttctttctttttctttttcttt

SEQ ID NO: 133779 - DNA, 250 bp, Homo sapiens
cccctctccctggggctctgtccccctctctccctggctctctgtcttcctctctctggggctctgtccccctctctctctggtctctgttcccctctctctgggtctctgtccctctctctctgggtctctgtccctctctctctggatctctgtccccctctctctctgggtctctgttcccctctctctgggtctctgtcccctctcctctctctgtgtctctctcccccctcctctctctgtgtct

SEQ ID NO: 133780 - DNA, 410 bp, Homo sapiens
cacccgaggcttttggagacttctggcgaggctgtttgctctgaggccatgacttgagatatatgaggattttaggtaaaatagacaagtagaggcaaaatccatgttatgggggcagggacaagaaagttacccccaaacttaaaagggccacagggagtgatcagttttaaaagaaagcccctcagctgcctctctcagcttctcccaccaaggcctagaccaaaaaacaacagctttacgccaagtatggtggctcattcctgtaatcccagtagtttgggaggccaaggtgggagggtcgcttcaagctaggagttcgagaccagcctgggcaacatagtgggactctgtctctagaaaataaaaaaagctgccgggtggggtggctcatgcctataatccgagca

SEQ ID NO: 133781 - DNA, 124 bp, Homo sapiens
aaaaatgtaataaacatccaaagccattccattgagagcaaaatgttctttggaacttctgaacatgcctctgcttgaagtgcctcccttttcctccctctctccctatccttccttggtgtag

SEQ ID NO: 133782 - DNA, 178 bp, Homo sapiens
attaccatgttgaaaaaaaattagcagtaaagatatacattgaacatttaacagaattttgctattactttgataatatcttaataaagaacatagaaacatagggctgatagaagaagtgttatatgtaattgtcccactgtactaagtcatatagtacaaaattaacactgaatcc

SEQ ID NO: 133783 - DNA, 590 bp, Homo sapiens
gactacagacgcacaccatcaaatccggctaatttttgaattttcagtagagacggggtttcaccatgttggccaggatggtctcgatctcttgacctcatgatctgcctgccttggcctcccaacatgctgggattacaggcgtgagccaccacgcttggccgttttagactcttgattcttaatgacctttcctttgcctctaatccacgggttctcatggggggttattagaaattccatggagttttaaaaaactgcagatgtccaagtcttacctagaccttcacagcttgagactctgggattagggctgagtatgcatacattttagaaaatatttactgaggattctgaagtgatctcttggttaaaaattccttcctaatctattcatcactgatttttttattttttttttttttttttgagatggagtttcactcttgttgcccaggctggtagtgcaatggctccatctcggctcactgcaatctccacctcttgggttcaagtgattctcctgccttagctgctgagtagctgggattacaggcatgcaaccaaacccggctaatttttgtattttt

SEQ ID NO: 133784 - DNA, 285 bp, Homo sapiens
ttcagagagaaaagcaatccaagcatgcccccagtcactgaggcaccgggggggtttctcccagcttggtaggtgtatgctgtgagccctggactgtccatgaacagagctgtagaagacagtggtcaatctggcagtggtaatgagatcctatagtgcttcctgagtatgagcttcctcagttggatcaaggtcaccatttgaatgaagctggcataacagggcatacaagacaagcagtgctcaagtttgaggggtttgcctggatttgctgctgacttgctg

SEQ ID NO: 133785 - DNA, 276 bp, Homo sapiens
ttgaaggaagtaaaatttctcctctatcttcttagggtttccctttgggactgacataaaatagattactacttgctagaaataaaagactttacgtgattacaactcttctggcactgccttcatttcctggttattacactttaacctttaacataatttagctcctgtcgtactttcatgtatgtgatgacgaggtacttttgtaaacagtgttccacagtactccacccttggtgtacaaaacagaaacgcaacattgctgaagtttcataa

SEQ ID NO: 133786 - DNA, 236 bp, Homo sapiens
ggagaggggaggaaagaaggcaggagagagtcagggcctccattaggaaaactggctgtttgctgaagtgacagaccagaggcagcaaggaaaaaagaagaagaaaagcccataggaggcaatggcaaccttgccgagtgaatcaagacagaaaattaccctagtgtgcagaaccttgttgaagaggtaaccgttgctagctttcaaggtgtttctgaaaaggaagctatcaccct

SEQ ID NO: 133787 - DNA, 310 bp, Homo sapiens
tagtttttgacagggatgacaaataagagggtgaccccggatactgtagtgccaattttatagacatgctggtgaattctagtgcattttatttttatggttagcagaagtgagatgaataggttttatttttcacctgccattcctttaaaaaccagagtataaatttcttagtgtctgagccattccagtttaactactgtagtgttcatgtaacctaaaataatttcaaagcctaatacatcagaagaaaaatgccctaatttattttttgtctgattccccccttcccctgtttatttcttccttt

SEQ ID NO: 133788 - DNA, 388 bp, Homo sapiens
ctgcattcaacgccctcccccagccccttctatttaccaggagacctctctacacacacacattgcttgaaccatctctacctgttcagttgtggactaggtaggtactggggcaacactgtgtgaacatgtgtcacacagcactcatgccctagaaggagcttccatggcttaggaagggatgacaagactcgtacaggaaaatctgaacaccagcccaggcaaggccataaaagggcatatcattactaccaaaacaagggcggaagagaaagtgacctcgtttaattcttgatccttctactttctgctgatgcccttgggctacttatttgctctgggcctcctcagttttttcatttagaaaaatggcttgggctgaggcaca

SEQ ID NO: 133789 - DNA, 547 bp, Homo sapiens
taaaactttttgtggtacagaaaccttttggtatgctagtgcagccagcctttgttagggcatgagcttattaactatttgtttctgggaaatgtcataagaattgatgacgatttggaaagaaggaacaaattcaagttctctacagaaattaattgctgttaaaaatgtgtcacatgctgggcatgatggctcacacctgtgacctcagcactttgggagtccgaggtgggaggattgcttgagcccaggagttcaagactagcctgggcaacatggcgaaaccccatctttataaaaaatacaaaaactagccaggcgtggtggctcatgcctgtaattctagctacttgggaggctgaggtgggaggatagcttgagtctggggaggttgaggctgcagtgagccgtgattatgccgctgtcctgcagcctggccgacagagtaagaccctctctcaaaatcaaaaacaaaaaccatagtgccacataattgttttcaacttcagtttcaatccttgtgttttctacagtaaaattgtaggtg

SEQ ID NO: 133790 - DNA, 275 bp, Homo sapiens
atccatcctcctcggggtattcctttaatcaatgtttattaatatgaatgaatgctttggctaacttgtacaggtcatctgccacttttaagtactccattcccacctcatgggtgtgtttcatctctttggtacagttgcatatttcctgaagagtctcattttgtgtattgcttctccactacccctcaccactggacagacaactggccagctgtcactcaaatgctaattgtgtctatcatctgctttctctaatagccttttccttccgc

SEQ ID NO: 133791 - DNA, 352 bp, Homo sapiens
tgcttcaaaggaagctgatgtatggagcgtgtgtcaccttcctctacaggaatggggtttggcagtgatccaaagactcactgttatgacatgttctcagggaagtaggtcatatgtccccagggtattcagagaggcctgtgagtgtgagatgtttgggctgagcagggctttcttcctctcaaggctccaaagggcgggccaacaggtcatttggtttttctcagtgatatgttttcctcctcaagattcatcacccctctctcctcctctgcttgttctgaggcaaatggacacagaaatacattctctgttttatccttcatcgttgctaacccctgtggggtcgctg

SEQ ID NO: 133792 - DNA, 466 bp, Homo sapiens
atgttgtgcctttataggaaaggaagggtgtactggaactctaaaacactctactgctaccccaccagctgatcggtatgcaaacaaggccagcgggaagctgaagcagatgagatcaggtaagaaaatcacgaagtgctctaagccaaagtgaggtgttgagagcaaggttgtctatactgactctgatgaaagctaactcagactcaaagtttctccttcataaactgcaatcatccttcctcctctattttccctgacaaaatcctcacctttctgccaacccacgaaggggacccccaagcgacactgactctagaagatcatagttaagatcactctaagatgaccttgaaggaccttgctatctgggtaggctcacaggtcagctggtgaccaagcacttgacccttgagattcatgatagagatggcagaaaggaaattgggaggtcgttttgggtcag

SEQ ID NO: 133793 - DNA, 659 bp, Homo sapiens
gagcaaaataaacctaaacagttaagtcgttggtatttggctcactattacataaagccaagcacaatccttactgatcagatgttcttacagtattctaagtctgagatgataaaacccagggaaaatactgagcacacaatggacttcaatgctgaataaatacttgctgagtgaattaataaatggattcctgaattcatagtaattctcatttctgttcctagaagtagaaaaaataagatgtatacaacatatacttcaaaagaattggaagaaattgttggctaactccatgtttgagggagacagataggttaagtacataccatggagtgctttgaatatcagattgaaatgttttgcttaagtcagtgagcaatagagagaagttggtgtttgtgcagctagacaatgacttaaacaggtgtgcctgaaagttcagatccgttttagtctgaagctctcagttgtgctcccacatcgataatagtcatctgtaattatgtgatcttcaaacataaatattatagttacattttacctgttgtattataatgaggacctattatctcattatttagtaaggaaatatctgtactatgtagtatcacccattgttttcagaagctacaattgttattgattatatagaaggg

SEQ ID NO: 133794 - DNA, 319 bp, Homo sapiens
gtgaatttcataagtgaatgtcggttccttttcttgccttttcaggagtgtcctcttagaacccattttccacttttttggttttctttgtatcccgtaaaagagtttatctaatctcaacttctaagaccttttttcttgtgtatttttgcagcttgcctccaaattgatatgtctgacacttttaacctagttgaatattttacttgacaatatagcagtaccagtgagatagttcacttccttctttctcagaatgtctgatgataaactgtgcatgttccaaaatcatgaattctgtctaccttcctcacctccc

SEQ ID NO: 133795 - DNA, 589 bp, Homo sapiens
gatcatcagagagaagtataagtagttattgtttagtgagtacagagtttcagctttggaagatattaaaaagttctgaagatggatggtggttggtgatgattgcacaacacaacattttgaatttagttaatgtcactcaactgtacacaaaatgactaaaacagtaaagttgggctatctatattttatcacaataaaaaatagtttagaaaagtcactaaagaaagaaacaactccaacccacagcaagcagcaaaaataaaccccaagcagtggcaagaatctggtttctggagttaccacataataatattcaaaatgtcttgttctcaacaaaaaattatgagtcatgagaagaaacaaaagagtatcccactcacaggaaaaaaatgaacaactctccttgaaaaagcacagatattggatctactaactaagactttaaatcaactcttacaaaacgggtgattaccagagcctgggaaggataatgggtagggaggtggagggggaagtagtgaggcttaatgagtacaaaaacataggaaaaatgaataagatctagtatatgttagcacaagagggt

SEQ ID NO: 133796 - DNA, 130 bp, Homo sapiens
acaagctggggcacaacagtttgcagactttacaatgaggcagacgtgatgctgactttttatgcatgttacctcattaagtttgttccctgcaacacacttacaccttaggtattgttactttgttatg

SEQ ID NO: 133797 - DNA, 885 bp, Homo sapiens
tgggggcctattctcgccgcgcagggcgctggggggtcctgagagagggagagcctggggctgcgggcgcgcggaagggaatgagccgaggggcgcgcggcggcgacgcgtccggcgaattttgaattgcccccctgggaagtttcgatttatcttttctgtactacaaagaaagaaagcgtcatatccactctaccaaacttctcctctacacacttgaatctattacagcgttttggtgcctaagagaattttctgctcattgggttgtttgagggcagagtctgtgttttatatgtgtatctctagtacccgactaactgcttaacgtggaggaaaaacccccgtgtaaatttgttgaattggggttttgaatggtagaggatacagaaatttggcttcttggtagccaaaaacaaaacaaaaaaacaaacacgtgctttgaagtctctgtccttcctgcagtgttaggcagaacaaacgtgggtgccagattctaatggagttgtctggtccagggagattagcgagaggctggggcacgggctcaggagtctaatcaagataggaaataaatcgtgtgcccgaataattctctgaattcagtaacgggggacagttttgctattaggccgctaatagtgacatactgaatacggagttctacaatatggttcggtaccgggtgtacgggtgcttcccgcattttgagcctaaaacttatggagatcttagggtcccgtcttgaaggttggtcacggactgccaacacacatgtggggactcggcttaccgggattgagactgacgggggccatgagatccggaaagggaggagtggcaaatggcatggggacaccgggtcaccgtcgggggtgtcattgg

SEQ ID NO: 133798 - DNA, 564 bp, Homo sapiens
agatttaattgactcacagttccacgtggctggggaggcctcaggaaacttacaatcatggcagatggcacttcttcacatggcgggaggagagaatgagtgccgagtggagggggaagccccttataaaaccatcagatcttgtaagaacttactattgtgaaaacagcatgagggaaaccgcccccatgattcagttatctccacctggtcccacccttgacatgtggggattattacgattcagggtgagctttgggtggggacacagagccaaactatatcacagtggttgccaggggttagggatattgggggaagagggagagtttgagtgcataaggattacatgagggagatcttcatcatgattgattggttctgtactttgattgcagaggtggttgtgtgaatctacacatgtggtaaagtgatgtagaattatatatgcacattgtaccaatggcagacttttggctttgatattgttctataattatgtaagatgttaccattatgggaaactggaggaagggcatatgggacttctttgtactgcttttt

SEQ ID NO: 133799 - DNA, 666 bp, Homo sapiens
actgtaaaacatttgagtccaggccagaacatcatctgaactgtactaattgagaacagcaaaggagacataaacagagggtaataggcaagtagagttcccaccttctaactttcccactccctcttcactcagcaagaaattatgatttaggaccgagtaaaataagtgtttaaaaataatagagctttaagtgctaaggaacatagaatgagatatattgaagctgaagagttcagatgaggtatcttttaggaagggagcatttaagctccatgaaaaagttaggatttcgacagagattgaacgtgggggcatttgatggtgacaaaggagaaattaagagcaaaaaatacatggcctatttggagaatgaaaagtagtctgtgaaataggagtccagggtctgtagttatgcagagaggcaagggaacgagcagtaagacttttggaatcgattggacaagcaaaaatatacagtattttatttaaagatacatacctatgtgataactattttttaaagcaagggaattatgcatacaaaattcaggatagtggttacctcttgtggaagcatggggataagtcaaggaacacggatagattcaaggcatttagtagtaatctagttcttaagatgggtggtaggttcacgggtgacct

SEQ ID NO: 133800 - DNA, 893 bp, Homo sapiens
gccgaggagcttcgcgcaggctcagaatcgctcagctggttgacgttatccaggagaatcgcgttggactcagggaagacctgcacaggatccggttgttgctgggtccgagggctgtagggagtggagaaagggccgggaatcgttaagcggggtctgggagaacgacttgcagattcacatttcctccgcccgcggatgtcctccggggaattgaggcttccttcctcagctgcccttgtttctctctttgctcccgctgccccttgttctatttcgtttcttactatttatgtagtctcattgcttgcggttataatggccaccactttattgagcattcactgtacaagcatctcgcagcaggcgctcataagcgtctggcaattcttggccactgctggaagcccaatcattcttttaccatggaagggatttgagagcctacataatcctgtactctaatagccacatggtactcttggggctaggaagataaagtagaaattgaaattgctgttgtattagttttctgaagctgccataaccaagtacctcacactggatagcttaaaacaacagatatattttctcgctttctggagtctggaagtcagaaatcaagatgtcagtggggtcttgcttcttctgagactctggatagaatccttcctgcctcttcctagcttctagtgggagccagcaatcattggtgtactttcgcttgtagctgcattactccattctcttcctctgttatcaaatggtatactccctgtgtgtctctgtctctgtgtgttttataaggacaccagtcctgttaggtaaaaggctcaccttactccagtatgacctgatcatgactaatcacatctgcaatgacactctttcca

SEQ ID NO: 133801 - DNA, 122 bp, Homo sapiens
gtaagaatttacattttaggtacgttaggtttattcctttttataaggtttctgtttgaaattttgattttagaagacattcattctcaaggacgtaaaacacacatacatctaattttttt

SEQ ID NO: 133802 - DNA, 192 bp, Homo sapiens
tttcagataatcctcaattgcttcacgatggcccacaggctgcaatttttttagaatcatatttccacaagcaaacttgaggactttttaaaagtaaagtgccattaatcttagcgtttatatacttttgaggaatttaatatgtgtaaaactgtgctaaaatttttattgtgtgtgtgtgtgtgtgtattt

SEQ ID NO: 133803 - DNA, 340 bp, Homo sapiens
caggatgttgctctcaggagtgtcagcaggccatcttaatggggggctgggccagagccttggggtgctccctctgtggggctggggacgtcttgtctccatggacattccctcttgccagccatcgccatctggcacctggctcagcttcccccaagccaaggtaagcccgacagcatttccaccccagtgttggctgggagccttttcctagtttgtcctcatcagacctaagctggggtgcagtttgctagtgatcacattttagcaggacaccgtcaatcgtaagtgtacccagaggagatttataaggacaaagcctgaagccaggtcacatggg

SEQ ID NO: 133804 - DNA, 112 bp, Homo sapiens
gaaaccaagccactgagggtttgttatcttcctcaaagtctgagactgatagtggcagagatgggatgagaagtcaggctttctggctccgggctctggtgtttgtggctgt

SEQ ID NO: 133805 - DNA, 832 bp, Homo sapiens
ggaaggctccgtgggctcagcactggtcacagtctggctcttcaccctgctccatgccaacatctccaacaaacttcctgctagaaagcctgggtgggctgaggggacccagacccaaacaagaaccttcttcccctcgccccttctcatctcttttgcaagggcaacctgagtgacctataaccatgtgtgtcaggtcccaccctttgcttaaaacctccctgcggagggaggggcagcccttggtcttaaagtgcaacccagacttcccctggccggcgagaccctgcagatccccctgccaattcccttctccagccactctggctgtgttctggggattctctcggcctggaacattctcaagtagctggcccctcttatctttaggtctctgctggaatgttctctctctggaagggcctccaggagccccccactccagggggctcactgaaattctccagcaagatagcctgtttattttcttcttggtgcttatgaaactctttgatgtttgttcacgtggaatttttctgactcttctctggaaaatcagctccacaagggtgagagcctcctctgttctgttcaagtgctgtctccttgcatatgttaatattaaataacattaagacagccacatgtggacagcaggaacctatgggatagatcagatataaaatgtttctatcacggcagaaagttctattgggcagcgctgatttgcctcagattcttgaatgaagcaatgactcaacaagtgaccccagcgtccctacaactcatgctcacctgctgggttgagattaggctctgggctgcggacccc

SEQ ID NO: 133806 - DNA, 419 bp, Homo sapiens
gtttttaggattcttctaagaagtctttaaagactaagaagccacagcagatactactgcctgaaaagataaatgaacagctggccttgttggagacacacctactcaaactgacaaagcaatatgttacatctgaactctcaggaggagaggaccctatatttctttatcctgtagttttgaattggtcggtcaaaggtgccgtgaaagaagttatgaaatttaagcaaaaaccaagatttctggaattctttacacaagttatgctaaaatgcatgaatgaggaaaaatttcatcttatggtagaggtaacaactcctgtccatgacttcttgaaaaggagaaatgagtctctacttggactaataaaagtgaaatataaggatagtgctttgaataaaaaagcaaacaaatcttta

SEQ ID NO: 133807 - DNA, 107 bp, Homo sapiens
actgaatgctgttttgattttgttttgttaaaaacaatgtttttgtggtggtggttttcttcgtgtaagttaaacattaaaaaaatactgcttatcatgactttact

SEQ ID NO: 133808 - DNA, 1218 bp, Homo sapiens
atggactctcttgttacagcaaacaccaaattttgctttgatctttttcaagagataggcaaagatgatcgtcataaaaacatatttttctctcccctgagcctctcagctgcccttggtatggtacgcttgggtgctagaagtgacagtgcacatcagattgatgaggtactacacttcaacgaattttcccagaatgaaagcaaagaacctgacccttgtctgaaaagcaacaaacaaaaagctgggtccttaaacaatgagagcggactggtcagctgctactttgggcagcttctctccaaattagacaggatcaagactgattacacactgagtattgccaacaggctttatggagagcaggaattcccaatctgtcaggaatacttagatggtgtgattcaattttaccacacgacgattgaaagtgttgatttccaaaaaaaccctgaaaaatccagacaagagattaacttctgggttgaatgtcaatcccaaggtaaaatcaaggaactcttcagcaaggacgctattaatgctgagactgtgctggtactggtgaatgctgtttacttcaaggccaaatgggaaacatactttgaccatgaaaacacggtggatgcacctttctgtctaaatgcgaatgaaaacaagagtgtgaagatgatgacgcaaaaaggcctctacagaattggcttcatagaggaggtgaaggcacagatcctggaaatgaggtacaccaaggggaagctcagcatgttcgtgctgctgccatctcactctaaagataacctgaagggtctggaagagcttgaaaggaaaatcacctatgaaaaaatggtggcctggagcagctcagaaaacatgtcagaagaatcggtggtcctgtccttcccccggttcaccctggaagacagctatgatctcaattccattttacaagacatgggcattacggatatctttgatgaaacgagggctgatcttactggaatctctccaagtcccaatttgtacttgtcaaaaattatccacaaaacctttgtggaggtggatgaaaacggtacccaggcagctgcagccactggggctgttgtctcggaaaggtcactacgatcttgggtggagtttaatgccaaccacccttttctctttttcattagacacaacaaaacccaaaccattctcttttatggcagggtctgctctccttaa

SEQ ID NO: 133809 - DNA, 1278 bp, Homo sapiens
atggactctcttgttacagcaaacaccaaattttgctttgatctttttcaagagataggcaaagatgatcgtcataaaaacatatttttctctcccctgagcctctcagctgcccttggtatggtacgcttgggtgctagaagtgacagtgcacatcagattgatgaggtactacacttcaacgaattttcccagaatgaaagcaaagaacctgacccttgtctgaaaagcaacaaacaaaaagtgctggctgacagctctctggaggggcagaaaaaaacgacagagcctctggatcagcaggctgggtccttaaacaatgagagcggactggtcagctgctactttgggcagcttctctccaaattagacaggatcaagactgattacacactgagtattgccaacaggctttatggagagcaggaattcccaatctgtcaggaatacttagatggtgtgattcaattttaccacacgacgattgaaagtgttgatttccaaaaaaaccctgaaaaatccagacaagagattaacttctgggttgaatgtcaatcccaaggtaaaatcaaggaactcttcagcaaggacgctattaatgctgagactgtgctggtactggtgaatgctgtttacttcaaggccaaatgggaaacatactttgaccatgaaaacacggtggatgcacctttctgtctaaatgcgaatgaaaacaagagtgtgaagatgatgacgcaaaaaggcctctacagaattggcttcatagaggaggtgaaggcacagatcctggaaatgaggtacaccaaggggaagctcagcatgttcgtgctgctgccatctcactctaaagataacctgaagggtctggaagagcttgaaaggaaaatcacctatgaaaaaatggtggcctggagcagctcagaaaacatgtcagaagaatcggtggtcctgtccttcccccggttcaccctggaagacagctatgatctcaattccattttacaagacatgggcattacggatatctttgatgaaacgagggctgatcttactggaatctctccaagtcccaatttgtacttgtcaaaaattatccacaaaacctttgtggaggtggatgaaaacggtacccaggcagctgcagccactggggctgttgtctcggaaaggtcactacgatcttgggtggagtttaatgccaaccacccttttctctttttcattagacacaacaaaacccaaaccattctcttttatggcagggtctgctctccttaa

SEQ ID NO: 133810 - DNA, 329 bp, Homo sapiens
tgtgatttgttcaggcaaatacccatagccttttatttgataaaaggctgtaaggttaaaagtattggtttagagcaaaatggattagacttctgtctagggtttggctatttgttatatttgttacttgcaagagaagcataactctgtctgttttaaaaagagtgtgtaaacctatggtgtacttaataataattcaactcagctatcccttggacactgtggaggtccactcttttctcctggatgtaacttacagatctgttagaactaggcttcttttagcctgatttctcccccaaataccgggcctcacactttccctccag

SEQ ID NO: 133811 - DNA, 129 bp, Homo sapiens
ctaaggtattaatgatagttgatcacatcaaattcaagagtaaaaagttcatttagacatcagaaaaccttctggtgggaagatacttgaaaagacatcaatagcaggtcactggctgaaaagcagagg

SEQ ID NO: 133812 - DNA, 210 bp, Homo sapiens
ttccttcttctaattcttgatgaaggaaaggaaaaaagtgcatcgcaatactgaaatttaatcactagtctaaaagtctttaacagtcttcacaaaggcattaaatacttttttctatttttagtaattgtatttgagttgctgaaacactgaaagcatttaaacagtttcttcatccttcatttccaaatataagacaattttttatga

SEQ ID NO: 133813 - DNA, 210 bp, Homo sapiens
ccagctttgtttgccttccatctcaaaacttctcactgttatctgttcttctccacatacaattgcaggcaatcatatgcctcttcaaataccacctggatgcagatgcagatgcagatgatgccaaacttttctatctactttgacatctaagtttgatactttgtcatcatttgctgagaggcatctcctgactgtgttgcagttcta

SEQ ID NO: 133814 - DNA, 703 bp, Homo sapiens
gggaatgagcctcattgtgcaagcctctatgtgcggtgtttgctaacatctcattagccaaagcaagttatgtggctgggctcagactctaagttaaaggcattcgagttacatgataatggaacatggatacagagaggggagaaattgctggccttttttatagtcaatttaccataacatccagttgtccaagcaccattcataatatagttcattctcatcccagtgatacataatttcccctctgtggaatgtcaagctcgcatatttatgggagtatttctgtactctctgttcttttcctatcctaacaccaatcccacactatcttaatttctgtgtttttaaaataagtcttgatgttggtaggacaagtagtccctggacttcattcttttgaagccatcttgtttattatattaattttaagcaactagaggggatggaagaggaacctttagattaaaagagatttaaaagatagggtattttttaatggacaagactaaactacagtgtctagggatgcacattgggtgataaagctattttaaaaaacaaagaagtgatgagtataaaagtcagggtcatggttacttgatccctcatgggtaatgttgtcagatttagaaaaaaaaaaaaaaacaggactccaaaactcccagttgaatttgaactttagatgaacaatgcataattt

SEQ ID NO: 133815 - DNA, 327 bp, Homo sapiens
tctaacgatcccttatatgctgctcatgtgcaagccttagctcacaagattgttgtaagaatgattgagaagatgtgtatgaatgtgccctgtaagcggtgaaagtaatgtctctaagcttctttgtgtttaggatgtcacttgtgctgaactgtaacacccaatgttgtattttgggttgtaacttgtgctgaagtacaacatccagtgtttgtattttctataaatgactatgcattcataggaaagagaaacttaatcagtggctttattaagactcatttcgcacatatgtaatttagaaaaagaaaactgactctgtttcac

SEQ ID NO: 133816 - DNA, 368 bp, Homo sapiens
cattgacttccccacccatgggtctggtacataataaggaaaggaaggaaaaataagttgaaggaaggaaaaatgcgtgatcccctgttgggcttctctccctcacagtcatagattttgaacgtcagagcattcctatctattttccaaattgcccgttggattgccttttcacaacaaccttaattttcacactacagggactggaaatgatactttagttgggtcaaacattagactacacaagggttttatagtcaggtttgggatttgaatgtgtttacgtagtctgtctgtattattttccctggcaaggtgtctggtgttgagttccttggggaacgagaatgtggctcaggacagctcac

SEQ ID NO: 133817 - DNA, 482 bp, Homo sapiens
tgcccatcgaccaatgagtggataaagaaaatgtggcatatatacaccatggaatactactcagccatagaaaggaatgaaataatgtcctttgcagcaacttagaaggagctgaaggctcttattctaagtgaagtaactcaggattggaaaactaaatattgtatattctcacttataagtggaagctaagctatgaggacacaaaggcataagaatgatataatggactttggggactcagagttgggggaaagactgcaggggttgagggataaaagtctacatattgggtacagtataaactgctcaggtgacaggtgcacgaaaatctcagaaatcaccactaaagaacttatctatgtaaccaaaaactacctgtaccccaaaaactactgaaataaaatgaatcaatcaatcaataaaaagcagccacaggatactgctatcctattaacgtatccactaaaagagaagtatct

SEQ ID NO: 133818 - DNA, 169 bp, Homo sapiens
aaacaacaacaacaacaacaaaaacagataaggaatgagaacgtgttagatttcttctagttccaaaattctgtgctctgtcttatttagaaaatccaccggtagtacttgcaattttgaactctctggaattttcaattacttggagacagatcaaatttattgagac

SEQ ID NO: 133819 - DNA, 745 bp, Homo sapiens
agctgcaagatctgtggtaactcatttaggagagctctggcatccgacccgggtcccccaatgccactgcacagctattcaccaagcagaagaaagaccttggcaactctcttcatctcaccaagcctcggtttcctcatcagtgcagtgaagatagtaatatttcctagctcatgatgtcacaaaaattaaattagataattcatgaaaagtgcttagcagagtttccaacacatggtaatcactcagaaaacatttgttagtattatgattattacatacaagtaaattaggtggtaatactgtcccaagcaacctacagattcaatgaaatccctaccaaaatcccaatgaaatttttgcagaaatggaaaaatccatgctaaaatttacatggaattttgagggacttcgaatacccaaaacaatcttgaaaaagagcatagctgtagctctcagactttctgatttcaaaacttactataaagctacagtaatgaaaacagcatggtactggcataaagatagtcaaacagacaaatggaatagactatagagcccagaaataaatgctcacatatgtagtcaaatgattttcaacaagagtgccaagaccattcaatggggaaaggacagtcttttcaacaaatggtgctaaggaaactgtaagtctgcatgcaaaagaatggagttgcactcttacctgacaatatatacaaaaattaactcaaaatgaagcaaaggc

SEQ ID NO: 133820 - DNA, 387 bp, Homo sapiens
aaaggacaaaaaccacatgactatctccacaccattaaaaaaaaagtatttgacaaaagtccacatccacacacattcatggtaaaaacattcaacaaactaggaaaagaaagcttccccaacgcgataaaggacatctgtgaaaaactcttggttaccatcgtacttaatgggaaaagattgaatgttttcccccctatgatcaggaacaagaccaagaaatccactatctccacttttatttaacattacagttaaagtgttagcccagaaattagacaagaaaacaaaatcaactggatgcagattggaaagaaagaagtaatagtatttacttgcagatcttgtatacaggaaattctaaggattctgctaaaaaaaaaaaga

SEQ ID NO: 133821 - DNA, 507 bp, Homo sapiens
gtgtgtgtgtgtgtgtgtgtgtgtgtgtagaaatgggatctcactattgttgtccaggctggtcttgcacacctgagctcaagttctcctgcctcggccctccccaatgtgctgggactacaggcatgagccaccatgcctaaccctctaagactttgggatacaaaaacataatttactttccttcatttctggaataaaacatctcttcttcctccccctactttctgttctgtgcccctgtttgatctctgttggtcctgttcaccttcagccttctctgctgaaggaggaaaggcttggttttataaaaagtgacaatattcagaccacataagatccttcttgcttcattttggattaaatattttaagattttctgattttcttgtatgcatatgtatttacctattatttgactttattgaataacttcaaattgagtatatttgaatgggaatgggcattaaaaagtgctaagctttccctgcctttcagaaaaaaaaa

SEQ ID NO: 133822 - DNA, 1042 bp, Homo sapiens
tgcaaggattagcgttgcccgctgaatctagacctgatggattatcataaagaagacaagtttgcatatctgaattcaattaacagtggtacttgtttgtgatggagttggggtttcatttaactccatctcattaatttatgcaaggaccaaatttgtttagtgtagtttatttgttagaagaagctagcgggcagaggattcatcaaaataataaccaaaacactcagaaaaatcaatagctacttttcaactcctgatctttgtcctcacccagagtgagttctaaacaaaattgtgcaggttatcattcctggatttcgcgctccctctcacacacaaatcctgaagagcattatcatacccattggttcgttgtgcagtggatcaccgaggcatttctttatgtgtactctttggcctaccattccgttctaatggacagtcatagttcatagtgagtttgaagtctttcttctagttaatctgtcaatttttctcacacagtgcagctgctgtgaaagaaattggagctgttacactttgtgctttggtacagtttgtaaaatgctaggtaggagacaggaaaccaaacacagcatgctactaatttcttaaacgactgatgtgctggaactcagagtctgtgtcccagagagctggcatccctttttttctgagaagactaacgtcgtttgaaagtgttatcttacttttgcatcaacgatatagatgcctttggtatgacttacaggattcaacagaacacttagtcttttgtctgcattttccccattgctttgtatttctttagatttaagttataattaacttgaatattaatcttagatggcatgatttgatatgttaaaacgaagagtttaagacgccgagctctgtggttctcgcctgtagttccagctacttggaaggctgaggcagcaggactgcttgggcccatgatattgaggccacagtgtgtgatgattgcaactgtgaataacttctctagcctgggcagggtaacgagaacttgtcccta

SEQ ID NO: 133823 - DNA, 199 bp, Homo sapiens
cccgagtagtccgacaggactcttagcggtggatcactcggcccgactagcccgacagtgagtaggggtcagatagaaagggctacattaaggaagaggtgctccgactgggagcctttggggagtcttcagtaggaagcaatgtggctagacattacttaatggaaaagtcactggggctacagttgtcagaatgggg

SEQ ID NO: 133824 - DNA, 680 bp, Homo sapiens
ggtcagttcctttgatttctcatttttcttattcccctagatagaatgatgagaaagtttagtatttttagctttcttttaaacagctttatattctgggtggttttaagccaccccaatttctgatattttaaaagaatcctggtgtttattctagataagacacctactatataaaataatattttatgttgatgttcaacaggaaagggacactaatcagtccacctgatttatttagcaaatattattaccttctactgtgtgccaggcactgtacttgccactgaggataacagcaatgaaatatgttatcagaggagctccactgcctagtgaagaagatgatcaagcacactcagacctgtgttggttagtcaatggaattgcttagtaaattatttcgggtccctgcagtacggtctttttgatcttctagtgaatacatccctggtctgagagttagaaggttttcataccatttctttctgctggcatttcatctttcatcatatatttaatacagtataatcttgagtaagccatacatcatttttataaagttagtaatgtctgttacaacatattatgagatctttgggacagaaatgctgagtcaacagaaacattatcctttcaacaaacatgcactgagtacgtatgattgaagcactatgtgt

SEQ ID NO: 133825 - DNA, 603 bp, Homo sapiens
  misc_feature (584)..(584): n is a, c, g, or t
gacattagctgtataagctgatcagctgtagcacaattgttgggggtggcaggggagagagagagagacagacacagagagcagaaatgtaagtaagttgggcattgttaggaatatagaatgatgtgataaaactatcagatttttttctgtaggtcagaaaaaatctctaaaatgattgagcatgaaaatgacaggctcagaaataattttataaagataactgaaaaggagtggcagaaaataagaaaaaaaaaaaaaaaagttgggggcgcgcccgcgggcccccggaaaggtttttaaaacccttcggttgggggggcgcggggccgccgtgtatgtgttatctgttggaaccgtgtggtcccacaagcgggtccccagagagaagaaccgggcgaccgaggaacatgggtgctgtggcgtttctcctccaccaaatataaaaaaacacggccggggcggaccccgcgggctttctggaaccaactccccaaacatgggagatcccggaggccaatacgggactcctaatacaacggggttcaaggcacgctcaatatcaattcgcgcgcgcggggganaaaaagaaaaaaaaacaga

SEQ ID NO: 133826 - DNA, 375 bp, Homo sapiens
gccggttgacgtggcttactttggaggtccaaggtgggtggatcacgaggtcaggagattgagaccatcctggccaacatggtgaaatcccgtctctacgaaaaatacaaaaattagccaggcattttggtgcatgcccgtactcgggaggctgaggcaggagaatcgcttgaacctgggaggcggaggttgcagtgagccgagatcatgccattgcactccagcctgggcaacaagagtgaaactcttgtctcaaaacagacaaacaaaaaattactcttaaaaagcaaataaataaaaagaagcagattttgtagccaggcccatctgggtttgaatcctagttctgcttattcctaatgtaagccacggtca

SEQ ID NO: 133827 - DNA, 188 bp, Homo sapiens
agataagtaaattggagttacagaaaaagaagagaaagatgaatgacacataaaaagatctgaagaaagaacagctaaaggttttcccctcaaatttggttaaaactataagtttacggattacgtgtttcagtgaaccccaggcagactattaaacacacacgcacacacacacgcacacacgcaaa

SEQ ID NO: 133828 - DNA, 717 bp, Homo sapiens
ctagacctactcgttcacgtgagcggctgatctcatgttaaagtgattatctgtaccttgtgtgctataccactggcttccactagtgagcatccatcggttcatagtagcgtatgtaagctatgtgatttcctactagctaattatatatcgcctagtgtgggtaatcgcaagtcgttcctgaccaagtccagatggactgtctgacgtctatgactagtgtatctaatcagtcgcgtggagtctaagctgagtcttgagatcattattacgcgccacgctgcttcagcacatgctaatttatgcaatcatcatcactaccaggatagagcacagttccatcactccaaaaacctcgctttgaaattgtattctctactgctcttagtccctggaagctgctgatctgttctctatcaatgtagttttattctttaagaatatcttataagtggaatcatacagtatgtaatgttttgagattggcttatttcaatcagtgtaattactttgagattcacccaagtcattgcatgtgtcaatatttcacccctttgtattgctgagtagtattctactgaatgggtatgccacagtttgtttacccattcacctgttgaggaaaaacaaccagttgagggttttggctatttccttgttttggtcattatgaatagaattgccataaacatttgtctagaggttttgtgtgaacac

SEQ ID NO: 133829 - DNA, 202 bp, Homo sapiens
tgctgcgattacaggcatgagcttctgcgcccagccagcttggtattttcctcatttctctggagatacacattatgaaattttatgcatgccactaattctttgtgatagtctgtatgtaaatacatttaaaaatgtgtactggattttaaaggatttctaagcagaaataaactttagcctaggcagacaaatggacaca

SEQ ID NO: 133830 - DNA, 186 bp, Homo sapiens
tgaaaaagggaaaacactgaaataactgttcgattgcaaaggttaaatctctaaatttctgtatgttttcatcttacttgactttaactagaaaacaggtataatagtgatgccacatactgggaagcaatgagtatttgatacaatgccagattaaaaggtgtacttattttttcgttcaatata

SEQ ID NO: 133831 - DNA, 266 bp, Homo sapiens
atcataaccctgatgtgtacacatcatttcagcttgcatatatgctcttagccctttgcctggctcacacccttaggtaccttgttggagatgttcttgtacctgttggatgggaagaataagaattgtaattaataacctcaattcagatcaaagactgcagactttcataaattaatataaaagtttcatttttcagccaagactgctaagaccctttgtttgaagaggtggatgtccttctctctcccctttggttgagcacg

SEQ ID NO: 133832 - DNA, 352 bp, Homo sapiens
ggctgagagggcaaccgcagcactgcagcccctccatgccgggcggcacaccagccaggagatgtggatggccacaggcagtccccggaggagggatgccaagaggacacatctgtttgctcagctggaggtaaaacagccggcgtctgaacgcttctgatgatgtgggttccccttgctgaaagaaatgtgcagctgatttgaacaagccacagcggggcagtgagtgttctccaaagggtcctcctggaaagctacttatcccaagacactgccactgttccaaaggtttccagaacgtgccttagagatgccttcagaagccactagaacatcctttcgagcagctcca

SEQ ID NO: 133833 - DNA, 362 bp, Homo sapiens
ggctgagagggcaaccgcagcactgcagcccctccatgccgggcggcacaccagccaggagatgtggatggccacaggcagtccccggaggagggatgccaagaggacacatctgtttgctcagctggaggtaaaacagccggcgtctgaacgcttctgatgatgtgggttccccttgctgaaagaaatgtgcagctgatttgaacaagccacagcggggcagtgagtgttctccaaagggtcctcctggaaagctacttatcccaagacactgccactgttccaaaggtttccagaacgtgccttagagagaaggtccaggtatgccagaaggtccaggtatgccagaaggtccaggtatg

SEQ ID NO: 133834 - DNA, 120 bp, Homo sapiens
ggttcccacacctagtatcatcagcatcaccaaagaacttgttagaaatgcaaaattggcttggacttcagacctctggaatcagaactctggaggtggggcccatcagtctgtgtttta

SEQ ID NO: 133835 - DNA, 405 bp, Homo sapiens
tcttggattcatttgttcaggaggcaaggtccctttgggcatcaatagtgtgaaaagccctccaagtgattctaatttagagcctttgcaagtcactagttaaggggtggtagggtggctgttgttaaatcatcctaactttttgtcttttcctgattatccctttctctgttggttcctttttcacatttatgggaaaagcaattatgtacctttttggaggtttcactatgttttccttttgctgggggtaccatttctgggaaatatgacacagagaaactttgtagtaagtgaaaggtaaatatagttatatatctatagatatggatctgtatattgaaatttaggaaatgagttatttctactgcagtaagccacattttcatgcatgcatagcctgcc

SEQ ID NO: 133836 - DNA, 510 bp, Homo sapiens
aaagctcagtattagggtggcagtggcccgattttccaggtgccatctgtcacccctttccttgaccaggaaagggaactaacttcctgaccccttgcgcttcccgagtgaggcaatgcctcgccctgctttggctagtgcacagtgcacttcacccactgtcctgcacccactgtctggcactccctagtgagatgaacccagtacctcaaatggaaatgcagaaatcacccatcttctgcatcgctcatgctgggagctgtagaccggagctgttcctattcggccatcttggctcctcctcccattattttttaatattttctgaaaatcttctttaaagagagaaagccaaatgtcacccactttttcataaaaccttacaggcaaatctattattcttttcttttttgagatggattttccctcttgttgcccaggctggagtgcaatggtgcgatctcggtttactgcaaccccctgcctcccaggttcaagtgattctcccgc

SEQ ID NO: 133837 - DNA, 610 bp, Homo sapiens
ctctccaggatcagcaagggcccagatttcaaaacatcagaaataaattaaaaggcataattaatgcaattggtaactgacatttaaaacattattatttacatttgtttcaaaaactaaattacttgctataaatctaaatgtgcagaacatgtgaaaactacaaaagttgatgaaagaagttaaagaagacctaaataaatgaagtgtactgtgttcatggattgatggatttgaagactctgtgtagtaaagatgtcaatttcccccaatttagcactattactttttattgcatctatagagaaattgacattaattttatatggaaaaacaaaataactaaaataaccaaagcaattttgaatgtgattaataaagttggagaagtcacattactcaattttcatacttacttcaaagctatactaataaaatgtggtattagtgaaagacatagagatcagtgaaacagaagagagtttaaaataagactcgtgaatgtttttgttttttgacaaatgtgcaaaggcaattcagggagaagggatggtcttttcgacaaatgataaacaattctacatatattaagaaaaaaaggttgttgatc

SEQ ID NO: 133838 - DNA, 723 bp, Homo sapiens
ggaagaagcgtgagtcacttcctgcctcagtctgactgctggagtattgttctcccaactgtggctggcgctacccagtgtggcccctacaagtcttagttccttggcggaggggaagtccccactttgggacaaggccaactggacttatcttcccgctcaactttgaggacccagcattgttcctccagtttccagttcttgcagtgtttgtaaaggtgcccgaatcgtacctgatcccattcactaaatattatctccattttatagaggggtaaattgaggaagtccctgagaaattaacttgtctaaggtgtcccagcaaaaaatagtgccccagggatttgaaccggtttgctgattgatttttcaccagttgccttaagaattatcatgatttaacctctctgggcctcagtttcctcctctataaaatgcagacagtgatacatcaaaggtacttaaaggaaaatgtactgtacccacctcatggggcatgtggtgaggataaaacgggttgacacaggaaaagagctctcaatggtgcctggctcatagaaaacactcagtggattttttttttcccattacccgggaacctgtgttaaggaggccacaggctgatcctgtgcagccaggttatctcacagggagcgagaagagatgggcacaggctactctgcgaccttggaataacccagcctgggaagctcctggccacat

SEQ ID NO: 133839 - DNA, 277 bp, Homo sapiens
aagtacagacgtaatatgtaacaaacctgcacattctgcacatgtatcccagaacttaaagttaaaaaaaaaggcccttttaagctgagatataatatcaaggattattaagagttcacaaagcaaaaaaagagtaggaagaatatttccagcacagagaacacaatgtgcaaaagtcctgaaatgtgaacaagcttggagtgcctcataaagacagtatggctggaacacgatgagaaaagacagtgcaagataaggttggggtcagatcatttag

SEQ ID NO: 133840 - DNA, 412 bp, Homo sapiens
agtccaagggtcctagaccagaatccctgttccaacaggtactctctagctgggcttaggcaacttccttcacctagcagagcctcagcttcttcatctaaaaaagagaatggtgccctgccccagtggtcgaatcagagcagagacacagtgccccacacagcagcagaggcagatggtcacacagaagaagaggcagcgtcactggggagcccagctggggcaggtgagcttcacaatccctgctgagccaagaactgggattccacggatctctgggaagttctggaggggatggctcagggaagtttggaagtgtgtaaacacaagtatgtaaaactcagcagcctggttaacactgcagtttgctcatccaggcccacctctgggcatgctggagctccccatgggc

SEQ ID NO: 133841 - DNA, 579 bp, Homo sapiens
aaaaaaaagatatgcacatgactcagaggtactgagatatgaaaaaaatttgccaaggtgcttggatgattcttcctctttacaaatgcatcatatttgtgcctggctggtcctctttaaagcacccaaggtattaatctgagaggacagcctctatctggggaacatttttttgttctcagtgaagtggcacattcagttcctggtgcaggctcactcaatttccattagtcatttcacagctgtatcttgggaagagaaaatttcaaatacttttggctgatttcacaagtaaacaaaaaacaaggccttccctcttttctcacagatcttgtttgtttacagttttcaagtcaataaaacacgcctgtctttgtagatgtttctcctaagtgtgttagttgtctgctgacctatctgcctggcttccactctactcttgtacctagatttgttgccctcatgttgcaggtgaatgctggactacccactctagtttgttattaaatcgatggagcaatttttgtttggtagtttagtattctaaggctgttcatggacaccatttagaaacgaggg

SEQ ID NO: 133842 - DNA, 134 bp, Homo sapiens
caattatctactgatttatctatccattatctacctatctgtctatctaatttgtttcctgtcagctacactgtcccactctcaatctgttctccacccagtggacacccgaggggtccttgggcaacgcacat

SEQ ID NO: 133843 - DNA, 674 bp, Homo sapiens
gtctcaaaaaaaaaaaaaaaaacaatgaatagacaaagaaagatggaaagaggatgtgtgtgtaacccagagcagaaggacttgaggctgactgtggagtagaaaggagaagggagacagagacaaggcaggcagcaggaagagctgtaggtgtgggagccagcatcacaaagggtccatcccaggtgaccacatccatgcctgcagcacccgggtggacggcgaagcagttatgctcgttggctcatggtcactgttatctgaagataactgtgagtcacattttctctgggatttcaaaaactaaataaacctatttataatcccctcttaacagtataatttagttcagtgttttgtgagcccttttctgtttcagatccagttctttgagtattgacacaccatcacagtcttactgtgacacgggcctgtcttgtaccagtgtatccagcagatggcattagaattcttaaatgtcagctccatactcttaaaacagcacactccaacagaaataaaaaataaatctgtggcgcatgcctgtaatcccagctacttgggaggctgaggcaggagaatcgctggagcctgggaggtggaggttgccgtgagctgagattgcgccattgcacttcagcctgggcaacgagtgaaactccgtctcaaaatta

SEQ ID NO: 133844 - DNA, 750 bp, Homo sapiens
ggtctttacagttaacacaacctggagtagcccatgccatactgtgtccttttaagtcagtaaattgaactaagtcggttattcggcaagcagttcctataaaaaactacatggctaaggtgagtgatgatcactgaaaggaattcattgacccactgaaaaaatgagagtagatgaaactactgcagtcatcctgcctgcccctgttagctggctgagtgaggtgttttgccccggtgggctgtggacattatcttcatgtttaaagtgtgtgtactgggggcgagaggccaggaatgatatgatgggtgtaggtcattgtctaggaaaactagaaaatccaaatgttcaaaggaagtaaggtgttgtagtgaaaagctgtcaccctggcctatcgatgttctgttatggtgtttcttagtaaatcccaggctgcatctatatagtcactcatagtaagtgtgtgtttgtccagtggtaggagtggccagaaatattgcatctgttccaccctcaattgaaacagcttctttctccactgtatttcttttgtttttgttatttatttatttatttatttatttttggagatggagtcccgctctgctgcctaggctggagtgcagtggctcactgcaacctccactccccaggagaatcgctggagcctgggaggtggaggttgccgtgagctgagattgcgccattgcacttcagcctgggcaacgagtgaaactccgtctcaaaatt

SEQ ID NO: 133845 - DNA, 2151 bp, Homo sapiens
ggtctttacagttaacacaacctggagtagcccatgccatactgtgtccttttaagtcagtaaattgaactaagtcggttattcggcaagcagttcctataaaaaactacatggctaagatgtacacgttggataattccatgcccatcttggcattgcgaccaggagcttctgcatcccttgcttccaaagagaaccagtgaaacatctttttattcttgcaggttcttaatgattgaccacaagcagatctttcaccctcggatctctagctacaaaaggaaccactggctcaatgacctgtaagggccgtttcagcacatccattctgtccatctccaagccttcaccgtagggaagaactttgctctcagtcacctctcagagagctctctttatagctgaaggtccctctcatgagttacatcaagagtaacctagaattatatcagcaatacacagccatggcccccaagctactggcccgcatctccaaactcctcatgatctgccagaatgcaggcatttctgtaccaaaaggcatcagaaacatctttgagttcacttgggaagagctcatcagtgacccttcagtgcctaccccgtccgacatcttgggcctggaggtcagctttggagcccccctggtggtgctcatggaacccacctttgtgcaggtccccacactgaagaagccactacctccaccaccaccagcaccaccacgtccagtgctgctggcaaccactggggcagccaagcgctccaccctctctcccaccatggcccgtcaggtgcgcacccaccaggagaccctgaacaggtttcagcagcagtccatccacctgctgacggagctcctcagactgaagatgaaggccatggtggagtctatgtcggtgggtgccaaccccttggacatcaccaggcgctttgtggaggccagccagctcctccacctcaatgccaaggagatggccttcaactgcctgatcagcacagccgggagaagtggctacagcagcggacagttgtggaaagagtccctcgcaaacatgtccgccattggggtgaactcgccttaccagctgatctaccactcttccacagcctgtctgagcttttctctctctgctggaaaagaagccaagaagaaaataggcaaatctagaactacagaagatgtcagcatgccgcccctgcatcgaggagtgggaacccctgccaacagcctggagttcagcgacccctgccctgaggcccgggagaagctgcaggagttgtgtcgccacatagaagctgaaagggccacatggaaagggaggaatatctcctaccccatgatcttacgaaactacaaggcaaagatgccctctcatctaatgttggcccgcaaaggagactctcagaccccgggtttacattaccctcccactgcaggtgctcagactctcagccccacctctcacccatcttctgccaaccatcatttcagtcagcattgtcaagaggggaaggcacccaagaaggccttcaagtttcattacaccttctatgatggctcctccttcgtttactatccctctggaaacgtcgctgtatgtcagatccccacatgctgcagagggagaaccatcacctgcctctttaatgacatacctggattctccttgctggccctattcaatactgaaggccagggctgtgttcactacaacctaaaaaccagttgcccatatgtcttaatcttggatgaggaaggtgggaccaccaatgaccagcagggctatgtagtccacaagtggagctggacttccaggacagagaccctgctttccctggaatacaaggtgaatgaggaaatgaaactaaaggtactgggacaggactccatcacagtcaccttcacctccctgaatgagacagtaacactcactgtgtcggccaacaattgtccccatggaatggcatatgacaaacggtttcaggcatggctggatccaggccctgaaatgattccaccagatcttcgcatctcttggctctgctttcctctttgttggcttcattctcaaggagtttctctcctgttgatgacaagatgaccatgaacatctctgggctattattataccagctttagtgcccctg

SEQ ID NO: 133846 - DNA, 2304 bp, Homo sapiens
gtctcaaaaaaaaaaaaaaaaacaatgaatagacaaagaaagatggaaagaggatgtgtgtgtaacccagagcagaaggacttgaggctgactgtggagtagaaaggagaagggagacagagacaaggcaggcagcaggaagagctgtaggtgtgggagccagcatcacaaagggtccatcccaggtgaccacatccatgcctgcagcacccgggtggacggcgaagcagttatgctcgttggctcatggtcactgttatctgaagataactatgtacacgttggataattccatgcccatcttggcattgcgaccaggagcttctgcatcccttgcttccaaagagaaccagtgaaacatctttttattcttgcaggttcttaatgattgaccacaagcagatctttcaccctcggatctctagctacaaaaggaaccactggctcaatgacctgtaagggccgtttcagcacatccattctgtccatctccaagccttcaccgtagggaagaactttgctctcagtcacctctcagagagctctctttatagctgaaggtccctctcatgagttacatcaagagtaacctagaattatatcagcaatacacagccatggcccccaagctactggcccgcatctccaaactcctcatgatctgccagaatgcaggcatttctgtaccaaaaggcatcagaaacatctttgagttcacttgggaagagctcatcagtgacccttcagtgcctaccccgtccgacatcttgggcctggaggtcagctttggagcccccctggtggtgctcatggaacccacctttgtgcaggtccccacactgaagaagccactacctccaccaccaccagcaccaccacgtccagtgctgctggcaaccactggggcagccaagcgctccaccctctctcccaccatggcccgtcaggtgcgcacccaccaggagaccctgaacaggtttcagcagcagtccatccacctgctgacggagctcctcagactgaagatgaaggccatggtggagtctatgtcggtgggtgccaaccccttggacatcaccaggcgctttgtggaggccagccagctcctccacctcaatgccaaggagatggccttcaactgcctgatcagcacagccgggagaagtggctacagcagcggacagttgtggaaagagtccctcgcaaacatgtccgccattggggtgaactcgccttaccagctgatctaccactcttccacagcctgtctgagcttttctctctctgctggaaaagaagccaagaagaaaataggcaaatctagaactacagaagatgtcagcatgccgcccctgcatcgaggagtgggaacccctgccaacagcctggagttcagcgacccctgccctgaggcccgggagaagctgcaggagttgtgtcgccacatagaagctgaaagggccacatggaaagggaggaatatctcctaccccatgatcttacgaaactacaaggcaaagatgccctctcatctaatgttggcccgcaaaggagactctcagaccccgggtttacattaccctcccactgcaggtgctcagactctcagccccacctctcacccatcttctgccaaccatcatttcagtcagcattgtcaagaggggaaggcacccaagaaggccttcaagtttcattacaccttctatgatggctcctccttcgtttactatccctctggaaacgtcgctgtatgtcagatccccacatgctgcagagggagaaccatcacctgcctctttaatgacatacctggattctccttgctggccctattcaatactgaaggccagggctgtgttcactacaacctaaaaaccagttgcccatatgtcttaatcttggatgaggaaggtgggaccaccaatgaccagcagggctatgtagtccacaagtggagctggacttccaggacagagaccctgctttccctggaatacaaggtgaatgaggaaatgaaactaaaggtactgggacaggactccatcacagtcaccttcacctccctgaatgagacagtaacactcactgtgtcggccaacaattgtccccatggaatggcatatgacaaacggtttcaggcatggctggatccaggccctgaaatgattccaccagatcttcgcatctcttggctctgctttcctctttgttggcttcattctcaaggagtttctctcctgttgatgacaagatgaccatgaacatctctgggctattattataccagctttagtgcccctg

SEQ ID NO: 133847 - DNA, 2788 bp, Homo sapiens
ggtctttacagttaacacaacctggagtagcccatgccatactgtgtccttttaagtcagtaaattgaactaagtcggttattcggcaagcagttcctataaaaaactacatggctaaggttcttaatgattgaccacaagcagatctttcaccctcggatctctagctacaaaaggtccccacactgaagaagccactacctccaccaccaccagcaccaccacgtccagtgctgctggcaaccactggggcagccaagcgctccaccctctctcccaccatggcccgtcaggtgcgcacccaccaggagaccctgaacaggtttcagcagcagtccatccacctgctgacggagctcctcagactgaagatgaaggccatggtggagtctatgtcggtgggtgccaaccccttggacatcaccaggcgctttgtggaggccagccagctcctccacctcaatgccaaggagatggccttcaactgcctgatcagcacagccgggagaagtggctacagcagcggacagttgtggaaagagtccctcgcaaacatgtccgccattggggtgaactcgccttaccagctgatctaccactcttccacagcctgtctgagcttttctctctctgctggaaaagaagccaagaagaaaataggcaaatctagaactacagaagatgtcagcatgccgcccctgcatcgaggagtgggaacccctgccaacagcctggagttcagcgacccctgccctgaggcccgggagaagctgcaggagttgtgtcgccacatagaagctgaaagggccacatggaaagggaggaatatctcctaccccatgatcttacgaaactacaaggcaaagatgccctctcatctaatgttggcccgcaaaggagactctcagaccccgggtttacattaccctcccactgcaggtgctcagactctcagccccacctctcacccatcttctgccaaccatcatttcagtcagcattgtcaagaggggaaggcacccaagaaggccttcaagtttcattacaccttctatgatggctcctccttcgtttactatccctctggaaacgtcgctgtatgtcagatccccacatgctgcagagggagaaccatcacctgcctctttaatgacatacctggattctccttgctggccctattcaatactgaaggccagggctgtgttcactacaacctaaaaaccagttgcccatatgtcttaatcttggatgaggaaggtgggaccaccaatgaccagcagggctatgtagtccacaagtggagctggacttccaggacagagaccctgctttccctggaatacaaggtgaatgaggaaatgaaactaaaggtactgggacaggactccatcacagtcaccttcacctccctgaatgagacagtaacactcactgtgtcggccaacaattgtccccatggaatggcatatgacaaacggctgaaccgcagaatcagcaacatggacgacaaggtgtataagatgagccgagccctggctgagatcaagaagcggtttcagaagacagtgactcagttcattaattctatcttgctggccgcaggtctgtttaccattgaatatcccaccaaaaaggaggaggaagaatttgttcggttcaagatgagatccagaactcatcccgagcggctccccaagctaagtttatactcaggagaaagtcttttacgatctcagtcaggccacctggaatcctcaattgcagagactttgaaggatgagcctgagtctgctcctgtgagcccagttcggaagaccaccaaaatccacaccaaagccaaggtcacatccagagggaaggcccgcgaggggcgcagccccaccaggtgggcggccttgccctcagactgcccgctggtgctgcggaagctcatgctcaaggaagacacccgtgctggctgcaagtgcctggtgaaggcgcccctggtctctgacgtggagctggagcgcttcctgttggcgccccgagaccccagccaagtgctggtgtttgggatcatctcaagccagaactacaccagcactgggcagctccagtggctgctgaacactctctacaaccaccagcagcggggccgtggctccccctgcatccagtgccggtatgactcctaccgcctgctgcagtatgacctggacagccccctgcaggaggaccctcccctgatggtgaagaagaactctgtggtgcaggggatgattctgatgtttgccggggggaagctcatttttgggggccgtgttttgaatggatatggcctcagcaagcagaatctgctgaaacagatcttccggtctcaacaggattacaagatgggctacttcctgccggatgactacaaattcagtgttcccaactctgtcctgagcctggaggattctgaatcagtcaagaaagccgagtcagaagatatccaaggaagcagctcctcattggccctggaagactatgtggagaaggagttatctctggaggctgagaagacaagagagcctgaagtggagctacatcctctcagcagggacagcaagataactagttggaagaagcaggcctccaagaagtagcgccatcctggcagcagccaagtgagccaggccccggcccggggtgctggggcttcttgccagcccagccctgcctccccggtctcccaccctgtcctccaagcttctataataaaccagcgggcctccagcattggggtgaggctctggggaaggac

SEQ ID NO: 133848 - DNA, 1755 bp, Homo sapiens
ggtctttacagttaacacaacctggagtagcccatgccatactgtgtccttttaagtcagtaaattgaactaagtcggttattcggcaagcagttcctataaaaaactacatggctaagatgtacacgttggataattccatgcccatcttggcattgcgaccaggagcttctgcatcccttgcttccaaagagaaccagtgaaacatctttttattcttgcaggttcttaatgattgaccacaagcagatctttcaccctcggatctctagctacaaaaggtccccacactgaagaagccactacctccaccaccaccagcaccaccacgtccagtgctgctggcaaccactggggcagccaagcgctccaccctctctcccaccatggcccgtcaggtgcgcacccaccaggagaccctgaacaggtttcagcagcagtccatccacctgctgacggagctcctcagactgaagatgaaggccatggtggagtctatgtcggtgggtgccaaccccttggacatcaccaggcgctttgtggaggccagccagctcctccacctcaatgccaaggagatggccttcaactgcctgatcagcacagccgggagaagtggctacagcagcggacagttgtggaaagagtccctcgcaaacatgtccgccattggggtgaactcgccttaccagctgatctaccactcttccacagcctgtctgagcttttctctctctgctggaaaagaagccaagaagaaaataggcaaatctagaactacagaagatgtcagcatgccgcccctgcatcgaggagtgggaacccctgccaacagcctggagttcagcgacccctgccctgaggcccgggagaagctgcaggagttgtgtcgccacatagaagctgaaagggccacatggaaagggaggaatatctcctaccccatgatcttacgaaactacaaggcaaagatgccctctcatctaatgttggcccgcaaaggagactctcagaccccgggtttacattaccctcccactgcaggtgctcagactctcagccccacctctcacccatcttctgccaaccatcatttcagtcagcattgtcaagaggggaaggcacccaagaaggccttcaagtttcattacaccttctatgatggctcctccttcgtttactatccctctggaaacgtcgctgtatgtcagatccccacatgctgcagagggagaaccatcacctgcctctttaatgacatacctggattctccttgctggccctattcaatactgaaggccagggctgtgttcactacaacctaaaaaccagttgcccatatgtcttaatcttggatgaggaaggtgggaccaccaatgaccagcagggctatgtagtccacaagtggagctggacttccaggacagagaccctgctttccctggaatacaaggtgaatgaggaaatgaaactaaaggtactgggacaggactccatcacagtcaccttcacctccctgaatgagacagtaacactcactgtgtcggccaacaattgtccccatggaatggcatatgacaaacggtttcaggcatggctggatccaggccctgaaatgattccaccagatcttcgcatctcttggctctgctttcctctttgttggcttcattctcaaggagtttctctcctgttgatgacaagatgaccatgaacatctctgggctattattataccagctttagtgcccctg

SEQ ID NO: 133849 - DNA, 2331 bp, Homo sapiens
ttttcagttgcatgtaataccaagaaatcgaattgttttccgttcttatgggaattgttagcaatgcccttattggaatttttaacttcacagagcttattcaaatggagagcaccttattttttcgtgatgacatagtgctggatcttggttttatagatgggtccatatttttgttgttgatcacaaactgcatttctccttatattggcataagcagcatcagtgattattaaaaaaagttcaatctcagttatggatttcaggcctctggccttcagcataatggtgtggacaggctctggtggacattccattacacttcttgattctcctttccaatacatttaatttactacttctcatttctgggattccagcttccatgggaactcatgtttgttttggtggtatgcataattggttgtgcagcttctcttgtattcctcatgtacgtgctttcattcatcttttgcaagtggagaaaaaataatggcttttggtcttttggcttttttattgtcttaatatgtgtatccacaattctggtatcaactaagtaagaaaaacccaacttaattttgtgcatgatattcataccttcctttactttcctaggatatgtcgttattgatccagctcaactttatgtatatgagaaacttggacagtctggacaatagaataaatgaagtcaataaaaccattcttttaacaaacttaataccataccttcagagtgttattttcctttttgtcataaggtgtctggaaatgaagtatggaaatgaaatcatgaataaagacccagttttcagaatctctccacgaagtagaggaactcataccaatccagaagagcctgaagaagatgttcaagctgaaagagtccaagcagcaaatgcactcactactccaaacttggaggaggaaccagtcataactgcaagctgtttacacaaggaatattatgagacaaagaaagttgcttttcaacaacaaagaagaaagcagccatcagaaatgtttcgttttgtgttaaaaagtgaagttttgggattactaggacacaatggagctggcaaaagtacttccattaaaatgataactgggtgcacagtgccaactgcaggagtggtggtgttacaaggcaacagagcatcagtaaggcaacagcgtgacaacagcctcaagttcttgggtactgccctcaggagaactcactgtgtcccaaacttacaatgaaagagcatttggagttgtatgcagccgtgaaaggactgggcaaagatgctgctcttagtatttcatgattggtggaagctctcaagctccaggagcaacttaaggctcccgtgaaaactctatcagagggaataaagagaaagctatgcttcgtgctgagcatactggggaacccatcagtggtgcttctagacgagctgttcaccgggatggaccctgaggggcagcagcaaatgtggcagatacttcaggctaccattaaaaaccaggagaggggcgccctcttgaccacccattacatgtcagaggctaagtctctgtgtgaccgtgtggccatcatggtgtcaggaacgctaaggtgtattggttccattcaacagctgaaaagtttggtaaagattatttactagaaataaaaatgaaagaacctactcaggtggaagctctccacacagagattttgaagcttttcccacaggctgcttggcaggaaagatattcctctttaatggcatgtaagttacctgtggaggatgtccaccctctgtctcaggcctttttcaaattaaaggcagtgaaacagaccttcaacctggaggaatacagcctctctcaggctaccttggagcaggtgttcttagaactctgtaaagagcaggcgctgggaaatgttgatgataaaattgatataacagttcgatggaaacttctcccacgggaagattcttaaaacgaagaacctcctaacattcaattttaagtcctactgcattattagtttccataattctacaagaatgtttccttttacttcagttaacaaaagaaaatattcaatagtttaaacatgcaacaatgattaaagttttcatttttaaaaattttaggatgaaggaaacaaggaaatatagggaaaagtagcagacaaaattaacaaactcagacatgttattcatccccaacatgggtctattttgtgcttaaaaataattttaaaatcataaaatattaggtttgtttttggttattatcaataaagttaacactgagcacattttacaaataaaaatgagttttttgcctaaa

SEQ ID NO: 133850 - DNA, 2066 bp, Homo sapiens
gcctgttgcttcagcctgagctcggttagggcctcacttccctgcttccacacctcagggaggcctcggtgattttgccagagcctcagcctccatcgctctgtaacctgcgggtattggatgattcgtagctaagacttcgcgacacccttgaagctgagaaatggaacccttaacattcagggatgtggccatagaattctctccagaagagtggaaatgcctggaccctgcccagcagaatttgtatagagatgtgatgttggagaactacagaaacctggtctccctagagatggggtttcaccatgttagccaggatggtctcgatctcctgacctcatgatccgcctgcctctgcctcccaaagtgctgggattacaggcgggagccaccacacccggccctcttgaaatttttaagagacttaatgaggaaggaacagagccacagagaaaaatgacttgctcacaacagaagagccagtagtaaaacacaggtgtctggaaatgaagtatggaaatgaaatcatgaataaagacccagttttcagaatctctccacgaagtagaggaactcataccaatccagaagagcctgaagaagatgttcaagctgaaagagtccaagcagcaaatgcactcactactccaaacttggaggaggaaccagtcataactgcaagctgtttacacaaggaatattatgagacaaagaaagttgcttttcaacaacaaagaagaaagcagccatcagaaatgtttcgttttgtgttaaaaagtgaagttttgggattactaggacacaatggagctggcaaaagtacttccattaaaatgataactgggtgcacagtgccaactgcaggagtggtggtgttacaaggcaacagagcatcagtaaggcaacagcgtgacaacagcctcaagttcttgggtactgccctcaggagaactcactgtgtcccaaacttacaatgaaagagcatttggagttgtatgcagccgtgaaaggactgggcaaagatgctgctcttagtatttcatgattggtggaagctctcaagctccaggagcaacttaaggctcccgtgaaaactctatcagagggaataaagagaaagctatgcttcgtgctgagcatactggggaacccatcagtggtgcttctagacgagctgttcaccgggatggaccctgaggggcagcagcaaatgtggcagatacttcaggctaccattaaaaaccaggagaggggcgccctcttgaccacccattacatgtcagaggctaagtctctgtgtgaccgtgtggccatcatggtgtcaggaacgctaaggtgtattggttccattcaacagctgaaaagtttggtaaagattatttactagaaataaaaatgaaagaacctactcaggtggaagctctccacacagagattttgaagcttttcccacaggctgcttggcaggaaagatattcctctttaatggcatgtaagttacctgtggaggatgtccaccctctgtctcaggcctttttcaaattaaaggcagtgaaacagaccttcaacctggaggaatacagcctctctcaggctaccttggagcaggtgttcttagaactctgtaaagagcaggcgctgggaaatgttgatgataaaattgatataacagttcgatggaaacttctcccacgggaagattcttaaaacgaagaacctcctaacattcaattttaagtcctactgcattattagtttccataattctacaagaatgtttccttttacttcagttaacaaaagaaaatattcaatagtttaaacatgcaacaatgattaaagttttcatttttaaaaattttaggatgaaggaaacaaggaaatatagggaaaagtagcagacaaaattaacaaactcagacatgttattcatccccaacatgggtctattttgtgcttaaaaataattttaaaatcataaaatattaggtttgtttttggttattatcaataaagttaacactgagcacattttacaaataaaaatgagttttttgcctaaa

SEQ ID NO: 133851 - DNA, 618 bp, Homo sapiens
gcctgttgcttcagcctgagctcggttagggcctcacttccctgcttccacacctcagggaggcctcggtgattttgccagagcctcagcctccatcgctctgtaacctgcgggtattggatgattcgtagctaagacttcgcgacacccttgaagctgagaaatggaacccttaacattcagggatgtggccatagaattctctccagaagagtggaaatgcctggaccctgcccagcagaatttgtatagagatgtgatgttggagaactacagaaacctggtctccctaggccgggcatggtggctcacgcctgtaatcccagcacttcgggaggctgaggcgggtggatcacctgaggtcaggagttcaagaccagcctgaccggcatggagaaaccctgtctccactaaaaatggaaaattagccaggtgtggtggcgcatgcctgtgatcccagctactcgggagactaaggcaggagaatcacttgaacccgggggcggaggttgcagtgagccgacattgtgccactgcactccagcctgggtgacagggcgagactccatctcaataaataaataaataaataaataaataaataaataaaaatttttt

SEQ ID NO: 133852 - DNA, 784 bp, Homo sapiens
gcctgttgcttcagcctgagctcggttagggcctcacttccctgcttccacacctcagggaggcctcggtgattttgccagagcctcagcctccatcgctctgtaacctgcgggtattggatgattcgtagctaagacttcgcgacacccttgaagctgagaaatggaacccttaacattcagggatgtggccatagaattctctccagaagagtggaaatgcctggaccctgcccagcagaatttgtatagagatgtgatgttggagaactacagaaacctggtctccctagttgacttgcagtatccagaggaaatgtggagaaacacagttgtacagaagggaagaaaataggttgatactcctgttgcaggaccatttgaagtctgagagtttccagctatgtgttctcatttcacccaagacttttgccagtgcaggggatagaagattcattccacaaacttatactgagaagatatgagaaatgtgggcatgataatttacaattaaggaaaggctgtaaaagtatgaacgtgtgtaaagtgcagaagggagtttataatggaattaataaatgcttgtcaaatactcagagcaaaatatttcaatgtaatgcacgtgtcaaagtttttagtaaatttgcaaattcaaacaaagataagacaagacatactggagagaaacactttaaatgtaacgaatgtggcagtcatttcagaagttctcagacctaactcaacataaaggaattcatgctggagagaaccctacacttgtgaa

SEQ ID NO: 133853 - DNA, 926 bp, Homo sapiens
gcctgttgcttcagcctgagctcggttagggcctcacttccctgcttccacacctcagggaggcctcggtgattttgccagagcctcagcctccatcgctctgtaacctgcgggtattggatgattcgtagctaagacttcgcgacacccttgaagctgagaaatggaacccttaacattcagggatgtggccatagaattctctccagaagagtggaaatgcctggaccctgcccagcagaatttgtatagagatgtgatgttggagaactacagaaacctggtctccctagctatgtgttctcatttcacccaagacttttgccagtgcaggggatagaagattcattccacaaacttatactgagaagatatgagaaatgtgggcatgataatttacaattaaggaaaggctgtaaaagtatgaacgtgtgtaaagtgcagaagggagtttataatggaattaataaatgcttgtcaaataaaaaaaaaaaaaaaaaaaaaaaaaaaaaaaaaaaaaaaaaaaaaaaaaggggggggggcaaaaaatacccccgggggggcccctttttggcccccgtttttttgttaaggggggcccctaaggggggggcgctatataaagggcaggccggcgccgcgtttaaaaaagaagttggggtgtcgggcaaaaacagcctcatctgcgcgggacccctggtggggaaggggaccccacactgcttgcgccggggcatctggtgcggacccacaccccaagagaattaaaggcaccgggcacaataaacatttcgggttttacgtgtgtaaccagcgcctattgctggcggagaaaatttgtccggattattatacaggctccaaaatatctacaagaatgacaacctgccctcaccccgacccaccagtacaacagtgtcacgccc

SEQ ID NO: 133854 - DNA, 616 bp, Homo sapiens
gcctgttgcttcagcctgagctcggttagggcctcacttccctgcttccacacctcagggaggcctcggtgattttgccagagcctcagcctccatcgctctgtaacctgcgggtattggatgattcgtagctaagacttcgcgacacccttgaagctgagaaatggaacccttaacattcagggatgtggccatagaattctctccagaagagtggaaatgcctggaccctgcccagcagaatttgtatagagatgtgatgttggagaactacagaaacctggtctccctaggtgaggataactttaatgcataattcctaatactccctctgagttttattttctatttttgtagaatgtcttttgagatatatctatataaaaatgtgtgtctcacacacacagctatgtaagttatatatgtgtatagtaaattcttaacattgttgatagattctcagaaactgtaagtgaagcaacatatcatttaggaaaatgaattttagggctgggtgcagtggctcacgcctgtaatcccagcactttgggaggctgaggtgggcagatcaggaggtcaggagtttgagaccagccttgccaacatggcaaaaccc

SEQ ID NO: 133855 - DNA, 2182 bp, Homo sapiens
gcctgttgcttcagcctgagctcggttagggcctcacttccctgcttccacacctcagggaggcctcggtgattttgccagagcctcagcctccatcgctctgtaacctgcgggtattggatgattcgtagctaagacttcgcgacacccttgaagctgagaaatggaacccttaacattcagggatgtggccatagaattctctccagaagagtggaaatgcctggaccctgcccagcagaatttgtatagagatgtgatgttggagaactacagaaacctggtctccctagaggaaggaacagagccacagagaaaaatgacttgctcacaacagaagagccagtagtaaaacacaggtttgacttgcagtatccagaggaaatgtggagaaacacagttgtacagaagggaagaaaataggttgatactcctgttgcaggaccatttgaagtctgagagtttccaggatatgtcgttattgatccagctcaactttatgtatatgagaaacttggacagtctggacaatagaataaatgaagtcaataaaaccattcttttaacaaacttaataccataccttcagagtgttattttcctttttgtcataaggtgtctggaaatgaagtatggaaatgaaatcatgaataaagacccagttttcagaatctctccacgaagtagaggaactcataccaatccagaagagcctgaagaagatgttcaagctgaaagagtccaagcagcaaatgcactcactactccaaacttggaggaggaaccagtcataactgcaagctgtttacacaaggaatattatgagacaaagaaagttgcttttcaacaacaaagaagaaagcagccatcagaaatgtttcgttttgtgttaaaaagtgaagttttgggattactaggacacaatggagctggcaaaagtacttccattaaaatgataactgggtgcacagtgccaactgcaggagtggtggtgttacaaggcaacagagcatcagtaaggcaacagcgtgacaacagcctcaagttcttgggtactgccctcaggagaactcactgtgtcccaaacttacaatgaaagagcatttggagttgtatgcagccgtgaaaggactgggcaaagatgctgctcttagtatttcatgattggtggaagctctcaagctccaggagcaacttaaggctcccgtgaaaactctatcagagggaataaagagaaagctatgcttcgtgctgagcatactggggaacccatcagtggtgcttctagacgagctgttcaccgggatggaccctgaggggcagcagcaaatgtggcagatacttcaggctaccattaaaaaccaggagaggggcgccctcttgaccacccattacatgtcagaggctaagtctctgtgtgaccgtgtggccatcatggtgtcaggaacgctaaggtgtattggttccattcaacagctgaaaagtttggtaaagattatttactagaaataaaaatgaaagaacctactcaggtggaagctctccacacagagattttgaagcttttcccacaggctgcttggcaggaaagatattcctctttaatggcatgtaagttacctgtggaggatgtccaccctctgtctcaggcctttttcaaattaaaggcagtgaaacagaccttcaacctggaggaatacagcctctctcaggctaccttggagcaggtgttcttagaactctgtaaagagcaggcgctgggaaatgttgatgataaaattgatataacagttcgatggaaacttctcccacgggaagattcttaaaacgaagaacctcctaacattcaattttaagtcctactgcattattagtttccataattctacaagaatgtttccttttacttcagttaacaaaagaaaatattcaatagtttaaacatgcaacaatgattaaagttttcatttttaaaaattttaggatgaaggaaacaaggaaatatagggaaaagtagcagacaaaattaacaaactcagacatgttattcatccccaacatgggtctattttgtgcttaaaaataattttaaaatcataaaatattaggtttgtttttggttattatcaataaagttaacactgagcacattttacaaataaaaatgagttttttgcctaaa

SEQ ID NO: 133856 - DNA, 1860 bp, Homo sapiens
gcctgttgcttcagcctgagctcggttagggcctcacttccctgcttccacacctcagggaggcctcggtgattttgccagagcctcagcctccatcgctctgtaacctgcgggtattggatgattcgtagctaagacttcgcgacacccttgaagctgagaaatggaacccttaacattcagggatgtggccatagaattctctccagaagagtggaaatgcctggaccctgcccagcagaatttgtatagagatgtgatgttggagaactacagaaacctggtctccctaggtgtctggaaatgaagtatggaaatgaaatcatgaataaagacccagttttcagaatctctccacgaagtagaggaactcataccaatccagaagagcctgaagaagatgttcaagctgaaagagtccaagcagcaaatgcactcactactccaaacttggaggaggaaccagtcataactgcaagctgtttacacaaggaatattatgagacaaagaaagttgcttttcaacaacaaagaagaaagcagccatcagaaatgtttcgttttgtgttaaaaagtgaagttttgggattactaggacacaatggagctggcaaaagtacttccattaaaatgataactgggtgcacagtgccaactgcaggagtggtggtgttacaaggcaacagagcatcagtaaggcaacagcgtgacaacagcctcaagttcttgggtactgccctcaggagaactcactgtgtcccaaacttacaatgaaagagcatttggagttgtatgcagccgtgaaaggactgggcaaagatgctgctcttagtatttcatgattggtggaagctctcaagctccaggagcaacttaaggctcccgtgaaaactctatcagagggaataaagagaaagctatgcttcgtgctgagcatactggggaacccatcagtggtgcttctagacgagctgttcaccgggatggaccctgaggggcagcagcaaatgtggcagatacttcaggctaccattaaaaaccaggagaggggcgccctcttgaccacccattacatgtcagaggctaagtctctgtgtgaccgtgtggccatcatggtgtcaggaacgctaaggtgtattggttccattcaacagctgaaaagtttggtaaagattatttactagaaataaaaatgaaagaacctactcaggtggaagctctccacacagagattttgaagcttttcccacaggctgcttggcaggaaagatattcctctttaatggcatgtaagttacctgtggaggatgtccaccctctgtctcaggcctttttcaaattaaaggcagtgaaacagaccttcaacctggaggaatacagcctctctcaggctaccttggagcaggtgttcttagaactctgtaaagagcaggcgctgggaaatgttgatgataaaattgatataacagttcgatggaaacttctcccacgggaagattcttaaaacgaagaacctcctaacattcaattttaagtcctactgcattattagtttccataattctacaagaatgtttccttttacttcagttaacaaaagaaaatattcaatagtttaaacatgcaacaatgattaaagttttcatttttaaaaattttaggatgaaggaaacaaggaaatatagggaaaagtagcagacaaaattaacaaactcagacatgttattcatccccaacatgggtctattttgtgcttaaaaataattttaaaatcataaaatattaggtttgtttttggttattatcaataaagttaacactgagcacattttacaaataaaaatgagttttttgcctaaa

SEQ ID NO: 133857 - DNA, 1926 bp, Homo sapiens
gcctgttgcttcagcctgagctcggttagggcctcacttccctgcttccacacctcagggaggcctcggtgattttgccagagcctcagcctccatcgctctgtaacctgcgggtattggatgattcgtagctaagacttcgcgacacccttgaagctgagaaatggaacccttaacattcagggatgtggccatagaattctctccagaagagtggaaatgcctggaccctgcccagcagaatttgtatagagatgtgatgttggagaactacagaaacctggtctccctagaggaaggaacagagccacagagaaaaatgacttgctcacaacagaagagccagtagtaaaacacaggtgtctggaaatgaagtatggaaatgaaatcatgaataaagacccagttttcagaatctctccacgaagtagaggaactcataccaatccagaagagcctgaagaagatgttcaagctgaaagagtccaagcagcaaatgcactcactactccaaacttggaggaggaaccagtcataactgcaagctgtttacacaaggaatattatgagacaaagaaagttgcttttcaacaacaaagaagaaagcagccatcagaaatgtttcgttttgtgttaaaaagtgaagttttgggattactaggacacaatggagctggcaaaagtacttccattaaaatgataactgggtgcacagtgccaactgcaggagtggtggtgttacaaggcaacagagcatcagtaaggcaacagcgtgacaacagcctcaagttcttgggtactgccctcaggagaactcactgtgtcccaaacttacaatgaaagagcatttggagttgtatgcagccgtgaaaggactgggcaaagatgctgctcttagtatttcatgattggtggaagctctcaagctccaggagcaacttaaggctcccgtgaaaactctatcagagggaataaagagaaagctatgcttcgtgctgagcatactggggaacccatcagtggtgcttctagacgagctgttcaccgggatggaccctgaggggcagcagcaaatgtggcagatacttcaggctaccattaaaaaccaggagaggggcgccctcttgaccacccattacatgtcagaggctaagtctctgtgtgaccgtgtggccatcatggtgtcaggaacgctaaggtgtattggttccattcaacagctgaaaagtttggtaaagattatttactagaaataaaaatgaaagaacctactcaggtggaagctctccacacagagattttgaagcttttcccacaggctgcttggcaggaaagatattcctctttaatggcatgtaagttacctgtggaggatgtccaccctctgtctcaggcctttttcaaattaaaggcagtgaaacagaccttcaacctggaggaatacagcctctctcaggctaccttggagcaggtgttcttagaactctgtaaagagcaggcgctgggaaatgttgatgataaaattgatataacagttcgatggaaacttctcccacgggaagattcttaaaacgaagaacctcctaacattcaattttaagtcctactgcattattagtttccataattctacaagaatgtttccttttacttcagttaacaaaagaaaatattcaatagtttaaacatgcaacaatgattaaagttttcatttttaaaaattttaggatgaaggaaacaaggaaatatagggaaaagtagcagacaaaattaacaaactcagacatgttattcatccccaacatgggtctattttgtgcttaaaaataattttaaaatcataaaatattaggtttgtttttggttattatcaataaagttaacactgagcacattttacaaataaaaatgagttttttgcctaaa

SEQ ID NO: 133858 - DNA, 252 bp, Homo sapiens
taatatctttatactccagagtagagaataagcaaaaaaataaaaaaaataaaaaaaataagtcatgcatgcaggtcttgactccacgtggggcatcctggggaacctgccattgctgttatcagcctacaaatgtgccatcatattacctttgtgaagtggttgtgtcgggaaacctgggaatgcattaaaatgctgcagctgacccactgagagggtcttttttctcatagggatgctgaataagcttgt

SEQ ID NO: 133859 - DNA, 424 bp, Homo sapiens
tctcaagttagacaccacagttctgaggaggccattccacggtgtcagacgcccttcttagtggctccagctgagtctgtgctcaaaccttagttcagatctttgaaataatcgactatttacttcttctttgttccctgctagatggaatcttagcatggatgctttattttgttaagaatcttatacctagatttttttttttacagccccttacaggtagaaatactcagtgattgtttaaggaaagaatgaataaatgaacacatgaataattaccaaaaagatccaaatgccctcagtttgacgcaattaccaaagagattcaaatgcccacagcttgacataattacctggaagttaggtacagaggcacttagaaaaaaatgcaggagcaaatcttttaacattgggttaggtaatt

SEQ ID NO: 133860 - DNA, 395 bp, Homo sapiens
aggtcgaggctacactgagccgtgattacaccaccgcactccagcctaagcaacagagtgagaccctgtctcaaaagaaaaaaaaaagacccagcagggcagatggagtaaccagcaaagccgaccttagtggtgaggctgggcatggcggcctgagcagggatcggctccaaatagtacgtctaccgtgggctcctggacctttctccctttgctagaagagaagcaccagcaccctcccttttcctcttgtgacattttaaaatgtattattcccattcatagccttataaaatcagtacgcagtaattagagaacatttggaaaacacagaaaagtagaaggaagaaaataattacctatagccttcccactcagatcagcccattcacaga

SEQ ID NO: 133861 - DNA, 673 bp, Homo sapiens
tgtcggcggcccttcagaggagatgctgccccacggaacgcctggcaagtgctggcgaagcggcatgggcgtcccactccgttcctcaaccaatttcctcacaatcgcgagccgaagtgtggcgctttggcagtttcgcaaggtcttttgtcaggagatgagttactgaggattgggggtctttggagctcttggacctgaagaacgattaagtttttctcccttcagagagccaagagatggggtcttgctgtgttgcccagggtggagtgcagtggctattcacaggtgtgatcatagctactatagcctcaaaccctgggttcaagtgagtcctttgaactagaacattggccttttctggttctgcagaagcttccagccttcagatttgaactgggacactggctctgcagattttggacttgccagccttcataattgtaacctacactcctgtcatttgtggaatgattgctggagccagaggccaggaagaagttcatgagcctgagagaaaaagcaaggatttccagttctaccctacagagtcttgttctgttgcccaggctgcagtgcaatggccgtgctcttggctcacttgtactccatctcccatgttcaactgattctctgtgtcagctccctagtcgcttggataccaggcccctga

SEQ ID NO: 133862 - DNA, 314 bp, Homo sapiens
aacatcttgtccagtaaaaaagttgtggtaggtggggactgacttgcttttagggtgcaatttatttctttgctacatctctcttcttacatagccctgtattagtcaacccactccagaagacctgtcttccattatgggaattgttcccagccatacttatggtcacgaaggtgacctttatttccatggagtatgttctgctggtttttttgtttgtttgtttgttttttgtttttaagagacagagtcttgctctgtcgcccaggcttgagtgcagtggtgcgatcgtggctcactgcagccttgacctc

SEQ ID NO: 133863 - DNA, 267 bp, Homo sapiens
caggcgtgagcccccgtgcctggccaaatctttcatactatgatttttatggacagtagtccataaactaggaaacgccatgatttatttaaccaaggcctactgttgggcatgatcgactcttgcactttgaacatatcaccccatgctttcctgctaagaagtccacttttaaaaatgccttgtaatttttaaaaattcctctattttaacattccgctattgagtttagggaaatacagtttcctcatgatgggggatcccttg

SEQ ID NO: 133864 - DNA, 307 bp, Homo sapiens
ccatattgccaaacctaagttcattttgattaaaactgttgttcaaatcagaaaccaccctacatgaaaactaaatagcctattttaaaagacataaatacaatgggaaactggcttaaaaccattcccatcaacagtaatatgtataatcctgcttgttctcatttcaaacatggagtctcacttttgcctaagctctatttaggcattttcagtaaacaaacattaagctgaattatttacaaaattaggattccacacattcctgttagagagctttacgtgagagtaaaacactgttgtcctg

SEQ ID NO: 133865 - DNA, 330 bp, Homo sapiens
ggagtttacaatccagggggaaaacagacctgaatacaaatggtgacaatacaagacggagtcaaagagcccaacttgaagtttcagcagaatagcaccaaagactagttcccaacccagctcccagagccagagccagagccagagccaggctggctgcatgagatcacctgggagcttttgcaaacataggtcctaactgagcccctaatcatcagactgggagtcactgggagtgagctccaggaattggtttatttaataagcacccacacacacatgattctgatgttcctatgccttgtagaaacatggaactatggaaaacgc

SEQ ID NO: 133866 - DNA, 292 bp, Homo sapiens
catttccttcaggaattagatttccattccattcctttcatcagtcaaatgatagacatttatagagcacctaccccatgccagacattttggtcagtggacttagtgttggaatcacaggaagggcagtatcacagtctagtaggagagagacccttttagaatgaataatttttcataatgacgtgtatataattgagagatacagaaagtgctgtggcaccctggaggagagagtaaatttttcttcctaaagtaatcttgcagatcctaataagagaatgggtgttca

SEQ ID NO: 133867 - DNA, 686 bp, Homo sapiens
gttggatgttgtgcttcagagcgtaggctttatttccacatctggctatacacatgtgtatgcatgcataggacctaatctgactaatgtgcattatgtccccatcctttgcaatcagaatatcaatgagcatggtggttttcaaaattaattgattttgctattaatagttcaaacctaaaatttctgggatctgtgaaaagaggtagttattacttggaggcagaagaactattgcttctgaaataggaagcaaaatgaagagagctttccaaatgtgtttcttagataaggcccatccttatgtagaaacatagcaaaagaacttaaaactagattatagatggtttggaagatgggaaagaacaagtaaatacatgaattgctagtagtggcagaagccaagtactgttgggaaaagagtagtagctttggaaaaagggactcaggaaaagagtgatcaaaaatagttactatgaaattttagtttggcgtaatgacttagttcaagaagaaaggacatctctattccaagaaagttcaaatcaaatgttaataagctggtatgtactttagcatgtgaagatcacccctctgttccaaaaaccggtaggcttcataaataaataatttatttcttaaacatgtatttagtgcctacagtgtacaaagcactggggtaagga

SEQ ID NO: 133868 - DNA, 606 bp, Homo sapiens
gttgtcatgacagtcttctaaaccctatttaactcaaactgtagctgcatagagcttgagtatggtaaataaactacacttactttatgagaaaacagatcctaaggcacaaaagattgaggcataatgtctgctcataaagtagcctggcaggagaaatgggacctcttatttctgtacccctttcaccaactcatcaaggacactgagcctgttggggctacagtgataatagggaaagtacagaagatgcatgactagaggtctctgatcatggccaggagaaaagttcagtagttttcaaggggaagtgattttcaggtcaaagcaactgtcaaacttagtgaaatggagtttccctgtgaaaatgctaactagccacttgatataatatcttagatgtgtaggaccatattacctatgatatagtatggaaaaaatttaaattttttctctaagtatttttctgtttataccttttattttcatgcttgcttagtacatagaacagggggcatgaaataaaggaaaaccaaaccaagcaatacattgagccaccaccatccaggagggcaattgatgggtaatgggtaatatagggtatca

SEQ ID NO: 133869 - DNA, 729 bp, Homo sapiens
ggctcacgtctgacctcccaacactttgggaggccgaggcagggggatcgtttgagaccagcctggacaacattgtgagaccctgttccttgaattgccctgggagatttcctcagcttgtactggaggtgtgtggccccatgaagcccatagtcaccgttcaccctgagagacgctggctttggggctcacacgcctgctgcggggcagccccaggagatggccaccctgtttctcctggagctggagctgcgcgtgttctcagcaactgtggtggctgtcctgttttgtttgcatcttataaacctttacctgattacattttcctcttcaatttagctgctagaaaacttaaagtcagattggtggctcaccagtaatgagagtttagagtagaggtaaactttatgacatagtcttagactcttcactttctcctcagccaacatgattcacatttactttattttgctgtactgtgagtgtctttgtgtttcctgaattccttctggaataaggcaggttgttagtaagcacaggtttctggtccatctcatagcctcaggcagtgggcggtgctgtccgtgctccctttctgggttacctgtggtagctctgaagttgcagggctgcgatttgaagcctgatttagtacaccgtgtttctgttgtgttctgtggtggtttgctcctcacatgtgagcattcaccctgtggccctgtgtttttc

SEQ ID NO: 133870 - DNA, 639 bp, Homo sapiens
catggggaggtgataatcaaagtacacaaagcctcagttaaagagaagaaataaatttcatttttttttgttgagatccatgtccaattgatttttgacaaggatgccaagagcattcaatgggagaaagaatgaataatctctcaattacatagtgctgggacaactggagatcctcatacaaaataatggagttgggctacctcacaccatctacatgaactaactcaaaatggatcaacaacctaatattggagtgaagacttaaaagaaaacatttctttgaagaaaacaaatggcaagtcttcatcaccttggatgtggcaatggattcttaaatatgatgccaaaagcaagagcaagaaagaaaaaaaaaaaaaaaaaaaaaactttgggggcggccatgggccccgaaaaagttttaaaaccaatcggtggggcgcggggccccagatgggtaaggaacacggggcaaaaggggtcaccaaggaaacccgggcaaggaaaagcgcggggtttccaccaaaaaaaaaaccccgggggaaaacgaggggtcgggacaaactcaaaggaagccagaggccaaaaggggataaaacaggggcccagggagcgaaataaaccgggcgcggggggggc

SEQ ID NO: 133871 - DNA, 761 bp, Homo sapiens
gtcaaagtcctaaaggctgtcagccttgtctgtatatgtctggacccaactgtagacacatttttttttccagcttacatttagatcagtagacataaatagatatgaggagaaaggggtgtggtccaactccaaatacatatttaagtattagctccattctggctaaaatgctttagttggaatgaccacacattggtcccagttttgtcccctggcgacacatctcctttttactctgtagtcagaacacaactttgttctaatactaactctatttttatgaaaatgtgattaaattgcaacctagacattgacgaacaagactatttctttgtaaatgaatctcctgaatataaacccagctgagaggctaccagaagaccagtgttttcaatgttggtggagaagcaggtttcagaacactgtgtagatgctgctctttaaaaatctctgatgggaaattggccacaagagaatattcaagttagtccaaagaaagaggattacagaatagaaagtccagaaataaatccatgcatctacagccaagaaaatctactgattttcaacaaagatgtcaagaacacgcaatggagaaaggacagtctcttcaataaatgatgctcagaaaattggatatccacatgcagaagaatgaatctggacccctgtctttcaccatatagaaaattcaactcaaaatgggttaaagacaaatgtaagacccaaaactataaaactcctggaagaaaacacat

SEQ ID NO: 133872 - DNA, 466 bp, Homo sapiens
ttgaggcctctagctcctcttcacttttccctttcagaagggcatggatccgcacggcctccttccacggaacaccacccaggtcagatgggggcaggcgaggctcctcctcctcctcctctccctcctcctccatctcagactcggaactactgtgaggaaataaccacatagccagagtgagggaatgaagaaaaactgagaaggggaaggggaagggccaccatcagaaacaatgcatgtcaggcaaagcagctgctgagcaggcggagagagacaggagggaggagagagcggcatcagcaggacagggtacctgggcatgagaagccacctacccaagcccgactaaggggacaaagggaagaatgcctcctgctcacagacctcacgcacttctcctcaggtggatggggtagggaggggaccaccgaaggctgcctgtgggtctggcccagcctctgcc

SEQ ID NO: 133873 - DNA, 303 bp, Homo sapiens
gagctcttaaagtgggaaacagaccagatggctagttaaagacaattcctacatgtttaattgtgacaaaaagaacagctgccactatgaaacgaattataaagctatgaccagaacacataaaaacacctgatgagctgggagaaaagacctaatgtgcaacacccagcctacctcactcacgtgcattgcctgccttagccctgtgggctctggggcttgcaaccactgacacaggaatccaagccttttccataaaccttgtcatcatttatcagcctggagagaaggagtaggtttatt

SEQ ID NO: 133874 - DNA, 483 bp, Homo sapiens
cgttcaaattgcaaagggtgaacacatttaatgaagtccgagacgacccatttcccccaagcatcctaccatgtgtctagtaatgacaacacttggcctctttatcaaacccaccagctcctatgcctgcagccggcagcctctgcttgccccaggggggagtccttctcagcagaagctgccctgagcagatcaaatcttcggatatcattcaggtgtcctgctcagtctgttcctaaccaagcctggggcaggaaccctggcacaggtggtggtgttcagaggaaagaatgtgggccaggagccttgaatggtcccaagggcctaggatgatgctaggtgacactgatctgttccaactaagactcttactcttgggaatcagcttagtagcttccagtgacagtcccagactctggcactgagaggaactcaagaaaccactgagtgcagggctcacggtgagcacctctttgctaaaca

SEQ ID NO: 133875 - DNA, 352 bp, Homo sapiens
tcccagctactttgaaggctgaggtgggaggatcgcttgagcctgggaggttgaggctacagtgagctgtgatcacaataaagccgacattgattaaacacctcctacgggccaggcaccctgctgagcactgcaaccccgagggtgatcccactgtcacccattgtgcagaaaaggacattgaggcagaggttgagtaattttgctccgggcccaccactgatcctgcatgtcggtgggagggcacccacgctctgcttcaggaggaagcaacttcatgccagtgccaagacccaccaaggcaggggaaaagatgacacggcttcaggtaggcagcaggctctggtctttg

SEQ ID NO: 133876 - DNA, 242 bp, Homo sapiens
aggtcaagctgagtcatacacacaaggccaaatgtggggaaagcaggaatcaaaggctggaggtaggggaaattctaaatctgcagagcaccatctttgagaaaaagaaaaagaataaaaacctatactggaaggagaacaatcacgaagagaactggtgggtgaagaagttgagataaattgtgcaagccttcactagagataatgtccttttgataggccggttggtgtagtagaagaag

SEQ ID NO: 133877 - DNA, 209 bp, Homo sapiens
tggcaaaatagacattgaaaattttattttatgaattcttagtcactaatttcagcctttttgcctcttagcagaactgaacattatgtaatttgcatactgcaccaggtagaaatccccttgatgtagtcttttctagtgtttaatcatatatgtaactttattgtgtcaatccaaatctctcattcatgtcattttatatctgagct

SEQ ID NO: 133878 - DNA, 748 bp, Homo sapiens
ggttgcagtgagccaagattgcactactgcactccagcctgggtgacagagtgagaccatggcacccccctccccttcaaaaagaaatcagcctcataatcaatttctctggattaaggagtaagagcgtctcaagatttgctgtttatagagagggaggctaatagtttgagagagatacagaatctagggagagtgtgggtttttggtctttcagttgtttgccagccttggataaagaatgaagattacttgagcatattatttagagacaagtggagagaataaaggcacatgccagataggagataattaataaagcacttgtccaaaatagaaacttgttgaacaggaagagacgtcaagtataaggagattttaagatgggagaagggaattttgagtgtttgtattggatgacctcagggttcccagtaaagcaggagctgaattcatcgaaggtgatgtgttggtcaggatcaagagagaggttgggagaacaaagtgctaaaatcgttgtggtcaagagtttaaaaagtgtataccagaagagttattgagtgataggggtttgaaataggcaaagctgtaggaaagggggctggaaggaatattaggaggaacactaaatatacttctgaggtctacctcctggtctgtgaacataaaggagctgaaagagtaatggctgaagttctttagtttagctaaagttttttagctaaagctagaattgttgaaagttgta

SEQ ID NO: 133879 - DNA, 436 bp, Homo sapiens
taggggcatctttggaattgcatgtaaggaaagaggggcatgtagaatgcattagagattccatcataatcatgtctgggcgtggtggctcacacctgtaatcccagcactttgggaggccaaggcgggtggatcacctgaggtcaggagtttgtgaccagcctgaccaacatggtgaaatcctgtctctactaaaaaattacaatatttacccgggcgtggtggcacgtgcctgtaatcccagctgctcaggaggctgaggcaggaggtggaggtttcagtgagctgagatcgcttcattgcactgcagcctgggcgacggagtgagactctgtcttaaaaaaaaataaaaactactgtcatctacagcctttggtactcttgtttctcataactgaacactctcaatatgctcagttgattggacccgggatgg

SEQ ID NO: 133880 - DNA, 455 bp, Homo sapiens
gaagagctagcatcttaaaataagtcactgttaggactggtgatgacacggatgttcgtctgcatacaagcacaggcacactgcaaccctggcccttgaaggacaattctgttttattaaaggcttgagtttataaccacaaaggtattctttttgttcaggtagtcagcattcactcaataaacacttgtttatcctatctttatcccaggtattgttgtaggctctgagacctagtagaaaaactgaccaagtcctttgaagtattagttattgagtggccaataagagaagacaaaaaagaattaaaaatccgtagatgtggttcatccactcccagattagaataaagatccattgcacagtttcttctatatagttttatggatgtaggatagataatattatcctctgaggctcattgatgagtaaatacaaataaaagtggattgttt

SEQ ID NO: 133881 - DNA, 349 bp, Homo sapiens
caacgcttctttcattccaatgttagaaaagagtgagactaggctaggctgggcgcggtggctcacgcctgtaatcccggcactttgggaggccaaggcgggcagatcataaggtcaggagttcaagaccatcctggctaaaacggtgaaaacccatctctactaaaaatacaaaaaattagccaggcgcctgtagtcccaggtactcgggaggctgaagcaggagaatggcgtgaacccgggaggcggagcttgcagtgagccaagatcgcgccactgcactccagcctgggcgaaagagcgagactccgtctcaaaaaaaaaaaaaaaaaaaaagaaagaaagaaac

SEQ ID NO: 133882 - DNA, 292 bp, Homo sapiens
acctccccctgtgtaccccaggtgctgggcagttaccagtgatttgcagctttgaaacccccagaaggtctgtggagacttagaggacaggaggtctttggtcccagacttcccacaccagctccaaggcagcaggtaatcttctctgactgtgatgacctctcccacaactcttcctgtcccctgcccaccccagagtctttatcctaaaaatccatctcaacagacatggtctccaaagttcaactgccaaaggctcagacctgagacaggagactgggagagttgcggg

SEQ ID NO: 133883 - DNA, 728 bp, Homo sapiens
agattgagaccagtctggtcaacatggcaaaaccctgtatctactaaaaatacaaaaaattagctgggtgtggtgatgcatgcctataatcccagccactctggaggctgaggcaggagaatcgcttgaagccaggaggcagagattgcagtgagccaagatcactccactgcattccagcctggatgacagaatgagactctgtctcaaaaacaaacaaaaaagaatgcacactacagatatacttgcaaaagtattccataaaatatgttcattacagtatcatttttcattaaaaatatatatatatatatttttaaactaaaattatctttaataagggaactaaggaagcattgcctgaggcagaccatgcaaatggcaggtagggatcttggacagtatagacttgacacagttatatttctcagctaacaaaataatccctcatcctttactggtaccataaggcttttgtattttctttataactaacttaccaaaaaatatttattagagtcctactatattctaaagatagtctattatatcttttcaatagagctggaccttgagagattggtgtaatttcaccaagtagaaaagacaggtagggcattacagaaggccaaacaaacatggggccatgaaagtttatggtgtgctggatgtacaggatagagcacacatgtattacacggggggcggaaaggggtgcagaaacagtg

SEQ ID NO: 133884 - DNA, 306 bp, Homo sapiens
gccaccagcatgaagtccacagcagccttccttcacagggatgtcagggcaaggagtatgggggtgggtctcgcaagggggttcccacgtcctggcctccacgtcgctccccatggagatccttccaaagcacagatctgactatggcatctctgctccaacacccctcattagttcaccgctggcttcagaataaagtccgcattccttgcttggcattcaaggtctgcttcccaagcaagacgtccagccctttcaggacagggcctgtgttttccccagtccctggcacatcaatgttggatg

SEQ ID NO: 133885 - DNA, 404 bp, Homo sapiens
aagatgtgcatatcccatgactttgcaattctgctcctaggaatgtgccccacagaactgcatactagaatgttcacagcagcactattagcaacatcatagccaaaaaactggaaactatgcaaatgtccatcaaaatggttaaattacatattcacacaatagaatgccatatagcaatgagcatgatctatatttccacctaaaacatggctgaatctcataaacataactgagcaaaaagaagccagacataaaggatacatactatatgattccatatatacatgtagaaaggataaaaagggcaaaactaggccatgcctgaaatcccagtgatttgggaagctgaagaggaaggattgcttgaaggtaggagttcgagaccagcctaggaaacatag

SEQ ID NO: 133886 - DNA, 563 bp, Homo sapiens
aggcccctgctgagcactgagggctctcctgctgcctaggcgaaccagaaactcattctcactaatgggacagagaaggaacattcgtggagcatgcgggtcatagaattaaaatagataagtatatacgtggggaaaaggcaagacttaacttagagaacagtcctctctaaggcctggctataggcacggagggatcaggggtacccgtgtagcatttcaaatgctgtcacatcagcagctgcttataccaccatcaggaaacacgcttcccacacaaacctcaccaccgtccacccaggctcctgcagactggccagggcaccagatgctaccagttcactggaaagtacactgaccttggagtccatagccctgggttggagtctcccctctgccatcgactatctgtctgattctaggtcagtcattgaaactctatgctactctcagttttctcatccatgaaatgggcttccatgcctgcccatcttgagacaggttgtcatgtgtccatgagttaataaatatatagaattccagagtccaccctgtatccccag

SEQ ID NO: 133887 - DNA, 395 bp, Homo sapiens
acaggaaaagtggctggggacactgtgccagacagatctctcccattaaatgtagggaaaaaaaaaaaggaactgattctgatgaaaagccccctctaattgcaaaatgtcactgtgttataagtgagatctagtattatgacgattctaaatttaagagaatatttgtatacagttttaagatatgcaacccatccaagaagggtggtgcatgccagaaatccatctatttgggaggctgaggcagggggatcccttgagcccaggagtttgagaccaacctgggcaacacaagaaggctccatctaaaaaaattttctttgaataagacatacaaccaaaattcaaatttctattactattattttttcttttgtaagaattcacttgaaaag

SEQ ID NO: 133888 - DNA, 1322 bp, Homo sapiens
gtttcttgctgtttattgcaacccgcctacatcgttggtgtgtgcagctgaactcaggctgtttaggaagcccacgggcagggctctgtggggcccattcctggtcccacgtctctggcaagggctcctcttgagctgaggcttctgagctcctgcaggcgggagtagggaggcaggtcccactgtcagccaagctgcagggtttttaggaagaaagtgggggctgtgcaccgtgggctcacacctataatcccagcactttgaggctggccggaaggatcgctgtggcccaggagtttgaaaactcatgcctataatcccagcactttgggaggccggcaaggaggatcactttagctcaggagtgtgagagcagccttggtcctatctctataaaaaatttaaaaactggccaggcatggtggcacatgcctatagtcctggttgcttgggaggctgaggtgggaggattgcttgagcccaggaggtcgaggctgcagtaaactgtgatggtgccgctgcagtccagcctgggccacagagcaagaccgtgtatcaaaaggaaagggctgctgtggaagggcctccagtcccctggcctgggctgcaggggccgctgctccagccctgccttctacatgtgccgagatgtgagcagtcacccctggagatcctcaccccttctctgtagaacgaggagttgggctgccagggattggggtctgggcgcgttgctggtgtgtgtgtgtgtgtgtgtgtgtgtgtgtgtgtgtgtgtttcctgggaggaggcccccacagtcttcgtcatgttctccagggcccagtgggaaggagttggaagttggatggagagaaatgtggagtagggcaggaacctccttcctaggaaggagcctgcgggggaccctgcaaggggtcccaggttccccaggaggcctcgggtgtgctgtcaaaggggccgctggggctgggagtctgtccatgtcttcagcctgggtctcgtgagttcagggagtttgaacctgggtggagaatgagcccctgtgcgtcttccctaacctccagctgacacgagcttccgcagaccccgcggtggcgggtgtgggcgctccccgtgccatctgttggggacacctcacacatcacttgcgctcagcccgtgtcgcggctgcaggagccaccagaccttgtaaatactcggatgcccacatctgctcgtctgtgtctccctgtggctgtgcatcagacctcacgcgtttaaaacgtccttctgagaaggggccacaggcaggtgccacccattgccacggcaccatggca

SEQ ID NO: 133889 - DNA, 381 bp, Homo sapiens
cccggattcaagtgatcctccacttcagtccccagagtaactgggactacaggtgtgcaccaccatgcctgactaatttttgtattttttttatagggatgagggtttcaccatgttgctcaggctggcctcaaactcctaggctcaagtaatcttcctgccttggcctcccaaagtgctggaattataggtgtgaatcactgcgcctggcggtcatcaggatttttaaaaaccccacaggttattctaagggcagcccaggttgagaaacactggcccaaagaagtgtcagggaacaattaggagccaggtgtgaatggagggagtctctgggtgcagagggaagggatagtgcagtgggagataagcctgggaagtagg

SEQ ID NO: 133890 - DNA, 663 bp, Homo sapiens
atcataatcactgcaaatcttctattatacaatgtatgtatctcaacactgtcatgaaattggctagttaagtttactcctttgctcttattataccagaaaaaaaactatgatagacatttttggggtgagaaatctttacacatgtccattgacatttccttaagggaattttcttgaaatggaagtgcttcatcagatttattcagaattttaaaaacatttaatacacactgccaactagctcttaggaagaaaacaatgcagttttgaaaggtacacattaaccagttagttacattaccttgacctgaaatttcttttggtttgttgtttccatttccataataaccccactgagttctcttgtatcttttttagtattctataatcgatgtttgctcatgaggatgtctgccccaagctggccagactattagcctgaatgctcagcacagcactagacgctaaagagatgagagaaggatgaatagttaaatggaaacatatgcctttcactagataaatacttctttagagcactgtagtggaggcagtatcaatttaatttctgacacattagacactttgaccactaattaaaacctaagcatgaaaaattacttgctgcttcttatggaaaataacccacaacatcctttg

SEQ ID NO: 133891 - DNA, 505 bp, Homo sapiens
cacaccttcgtcaacactggatattacaaacctaagcaaaaaggtttcatggtttttaatccacacttatctgattattaataagattaagcatttttacatatatatgtgaattacctatgaatagcctttgcccatattcctgctggattgtttttcctattgatttctaagagttcatgcctgttatagatattgcaactatttgctttactcctttgtcatctgcccttttttttgagactgagtcttgctctgttgcccaagctggagtgcaatggcacgatctcggctcatgcaacctccacctcccgagttcaagtgattctcttgcctcagtaacttggattacaggcacctgccaccatgcccagctaatttttgtattttcagtaaagatgggctttcaccatgttggccaggctggtctcgaactcctgacctcaagtgatccacctgcctcggcctcccaaagtgctgggattacaggcgtgagccaccgcgc

SEQ ID NO: 133892 - DNA, 667 bp, Homo sapiens
tttccacagggaggtatttttaatttgtatctgcagttggtggacagaaatagccaaatataaggccctgagctctttataaagcacagaaggggagagaggtgctcacatttattgagcacttgccaggagcaacatatgttctttcttctccagaggcaggtattcttaccctcacactacagaaacagaggtcctgggatgccgagtgagacccccagcttacacgtggctggctgccttccagtgcaactaccttgcactgcctccccagagtgaacctccttggcctcctgaacgcttctgagattgaaacttagcaaatctgcagcagtgttctccaggtttagatgttgcagaatctcattggcatttaacgtggctgggtgtttgagtgtatttttatgtcttgcctgaggcctgaataaaagttacaagcagcactgaagaccaaaccaagaatgaaaatgtgggcagccaaccttgtaaccttagctaatctttaattatgccttaattgaggttctatgaagtagatataggaagactaataataatatgttgagtttatgcagcattttaatttccccactccttcacgtgtgttgtaataattattgctgccgtttcctgagccccagctgggtgccagttaccctgtgaagcc

SEQ ID NO: 133893 - DNA, 699 bp, Homo sapiens
ggagctactataggagcaattattttgtttactaaaactgaataccttgctatctctttgatacatgtttacaaagcctgggtaaaaatggtataaattacttttgaaccacctctacattctgagggtttcagcaggacaatgaagaggtgttctatgtatagaatttgcaatatcaaaaataagaaaatactcgtaagtgaggaaatgtgttgggttttttttttaagtgtagtaggacaatatttcacaaatcattctacaaagtgattgtcctgctatttctgcagtttcaaaataggtggtttttagagccattcacataaatttccattaatgaagtcaaaattatttggggaaaaacaggtaaggtaaagagttcactttcatattatttgaattaaacctcttttattttcttacaggctcagtctttaagtaataaagtagcagctttcaagtaaatgaagtgtctaaaataaatattgattcaactcttatttgaaaaatctatttgttcttgttttagatgattagaatagtattttaggcatttgttggtaccttttccatttggttgaacttttaacttagctttatgtaataactcatactttaaaaataataaatgcatcaaattctatcctaaacatatgaagacaatttaggattcagaatcctgtagtggatctctgtgaa

SEQ ID NO: 133894 - DNA, 683 bp, Homo sapiens
tgccaccatgcccagctagttagtgagtgagtgagagtgtgtgtgtgtgtgtgtgtgtgtgtgtgtgtgtgtgtgtgtgtgtgtgtgtgtgctgaccagcattccttcctggtaagagaccaccaaccacggaatggttctggctgatttacagaggctgtgcacaagatgcctctgtgtcctccatttcaccttttgacctatagaggctaattttaatgcatttaaatgttaagtctccatcccaaaatgaatgtgggacatatgtaacatgtatgtttgcttactgtatatgcaaatacctcctcccattatgaatattcatagctcctcccataacctgttaaatatgtacactgagccaacccttttggaataagtttctattccacccctttctcccttgaagtgcctgctttcagtttctaccagaggctacacttcccagcctgcaggatggccagcctgcaggccacaactctgaataagaaaagctctcctctctaagtttatgaaccttgtgattcttcagttgacatttttgacagtgtggttgctctctggataagggcaggaaggtggtgctgtcaagcagagcagctttgtagagggtgtcggggcacagcgtaggtgtcggggcacagcgtaggtgcccattcagagcccgaggactcatccaccag

SEQ ID NO: 133895 - DNA, 785 bp, Homo sapiens
gaggctgaggtgggcagatcacttgaggtcaggagttcgagaccagcctgaccaaaatggtgaaaccccatctgtactaaatacaaaaattagatgtggtggtgggcgcctgtaatctcagttactcgggaggctgaggttgcagtaagccgagatcatgccactgcactccaacccgggcgacagagtgagacctgtctcaaaaaataaaaataaggaaacttaacttttggtacctaactcatagcctccagaaacccattcatgtactgtagattagtcaaccatcttgtagggaattgtttatagagggcacaatcacattttaagagtaaataaataacatcctgctaaatcttttgaggaaatgagcaattccatatagatttgtgagaattatttagaaaaaagattttaggttgaataattggcttatttaataaagatttacccttttattctattcttaaaacttgtttttggccttagggtattcttgtgacttacggaaaatttgatagtaattatcaaattattgttctaaactctgaagctcatttttggtataacctagataacaattgcatatttgtatggacaggtatttactgatttcttttacaaataaaacattgtgcttgcttgtaaggaataatcaaggaaattaacatgtggtcatttccttgaaaagaatggataattctatagcagccatggtcacaaataatacaaggtgaagaattagtcaactaaggaatgggaataggataacagggatagactat

SEQ ID NO: 133896 - DNA, 211 bp, Homo sapiens
tatgagtggagggagtgagagctgaagggtatgtagggggtcaagtcaagagcgaccttacatgccaagctcagggactaggattcacatcctgaaggtgatgccaaccccaggatggtgatgcttaagtccaagaaagagaagggggtggggggaatggagagtaggggacagatgcctgaacagcatagagaggaggtcccatcaggca

SEQ ID NO: 133897 - DNA, 504 bp, Homo sapiens
tattacaaaccaagcagtgaataagaaagaggcaaaagaaatatgtcttggctgtttctccttctcattggtcatgatgaagttcttgtaatagcactgaagctgagatgccttgaccacacattttttttaacagctttatcaaggtgtacttgatgtacaaaaaaaacctactgttcatgtttaatgtatactatttaacatactgggatatatgcatccacttgtgatatcactactccaatcaaggtaataaatatatccatcccctcccaaagttgcctttgccttttttatccctttgtgtgtgtgagtgtggtgataagaccacttcacatgaaatctagtctcttaaaattttaggtatataatactgcattgtaaactctaggcacaatgttgtacagaagatctctagaactatttttaatcattccttctttctccttccaacacattcagcatgttcccctttagtacagctctagtcttacacactatatt

SEQ ID NO: 133898 - DNA, 358 bp, Homo sapiens
agtgtgaagtcacaggaagaggtggtgtgatgccacaggaagggactgtgtgaagccacaggaaggggcagtaggaagtcacaggaaggggctgtgtgaagccacaggaagggggagtgttaaaccacaggaaggcacagtgtgaagtcacaggaaggggctgtgtgaagtcacaggtagggacagggggtagtcacaggaaggtgctgtgtgaagccacaggcagggtcagtgagaagtcacgggaagaaggagtgtgaagtcatgggaaggggctgtctgaagtcacaggaagaggcagtgggatgtcaaaggaagggatggtgtgaagtcagaggaagaagctgtgtgaagtcac

SEQ ID NO: 133899 - DNA, 745 bp, Homo sapiens
gttgcccaggctggagtgcagtggtgcagtcatggctcaccgcaaccttgaattcctgggctcaagctgtcctcccagctgagcctcctgagtagctgggagtacagagtccagtttccatctgggagccaatgcccagcttccgtgccaggacaaaagtcacatttcacaagtgtcccgaagctgaggaaaattcacatccctaaagatcacaagaattcactgcaagtaaatacatccctgcagttcagcaagacatcaaggatgacagctggctatggatctaccaagctctgcaatgacacttgtcaagtatggaaaagctcaaggcatcctgacattacacaacttttgagaggctgggaaaccaagggaaatatttcttcctcagggagagagatactgcggctgaagagccaaggccaggccctcccataaatgactccctggaatgtcagcccccgtttctgaaatccagccactggccctctcaggagtgatttggtttcactctactttaactcctggacatagcacagaaagcagaaaccccttgccatcaggtgtcaggcctgccaaggtcacctcttccggctccagggatgctgaggagattgcactgtaactccaaacttcaggatcgggagctaagccaagttccacagagtttgttcactgccttgtacttcctccaaggacgagtgttttgcaagggatctgataacttcccagttcaaggaacctg

SEQ ID NO: 133900 - DNA, 869 bp, Homo sapiens
agtgcccccgaagagacagtgcattaattgtcaccccttaggagcattgtgtgaattagtgtgatttagcacatgcccagagggatgaaactctagctccatagggtaggtcctgattactcctggagcaggcagccagctcagctcatggggagctctgagaagtctctcaatgcctcgcatgcagcccctgctcaggagtcatgtgtcacttcacagtcttgctttccagtgggtcaaagcatgatgtttatgagaaacaaatacacaaaattctgacttgtgtgaatacagaacacgtgcaataaaacgactgcaatctatttttaaaatgtggtctgagaagtcaggtttaatatgactatgtaatatataaacaatatattttccacagaaaggaaaatataaataataaaatatgtctatttcttttttttggtggaaaattactcccacaatttggtcccaagggggtcttaatttgtcatcaggtctgtggctaaatgtcttataaaggaatgcttctttctttcgagaagtgtacaggaacagtctgcactgactgcttttacctgtaaatgttttgagaattcagaagtcactttccttccacaataggtgctaggcattttatttaaataaagcaaaaacatttctgtcataaagaaggtgttaataacctcaaagctatgcgaaatatactagtacaatctaatactcatggtgaaaaatacagtaattaagagcaattcaagtttttttgttttggtttaacttcagaattaaaataaactcagaattaaaaaaataaaaaatggttttattacatgtcagagtattgagatacaaaatatataccagatactgca

SEQ ID NO: 133901 - DNA, 452 bp, Homo sapiens
agtacccaactgagacacagaataacttctaacagaaacacatcgagtgttcttagcaacagccagtgtgaagaattcactgcaggtctcctgcagccgtggagctgagattttaatacagcaaatggataggatcaggtgcctgggataagagatgggttgggctctgaggttaaggtcaagaacagaaattctggggtgatgtgtgaagagcagatgagtttagaattttaggattaagacccacaagctgggagtgaggatacttactcctttcctccattttttatttactaggagatgacgcctgggagtcagttgatctctccgagcttcagacccatctcttaggtcctttccaaatctatcatagtatgatcatgacaaccaggagtaagactggggttggaaaagggaagaaacggtgaggggtaaagagaaaagggaaagaa

SEQ ID NO: 133902 - DNA, 340 bp, Homo sapiens
ttgcaaagctcatcctttgtaagacccaactcagtcactccctgtaagattgaatcaacccttctgttttgaaagatatcgattatcacattgtggagtaattatgtatttacaaaccgtaatcttgctgtgagcccctttgactgcagacattgtgcttttgtattcccttcctctagccactatgtttgacaacaccataggtactaagtaactgtgcagtgaatgaaagacctgagtagatttagagatgaagacagagcttgaaggccctggagagatcttaatgttggaaggctggggagtaggcgggccgacctagaaatctgacctatatttc

SEQ ID NO: 133903 - DNA, 697 bp, Homo sapiens
gaagatatttgtggttttgagtttagtaattgaaagctgtagaatttatatgcccagacattttgaggaccaacagtatcacattgtaaaattattttggtacactatgatatagtattttatatgataaaatgtttcaacgttgacaaagtgggtttcatcatgttggagctttttgcattttcaaaaagtgtaaaaattacttattttagtttttttccaagtaagcttagggtttttgaaattttgcatttcttaatctgtagatgtttccatttttcctaattgaaatttttaaatttctaaaatttagttgtttcgtcccttttccaacaatttttccaaaagcttttagaatttcataataattttgttttatcttgtttttgcattttgtttagttgctattttgttatcttttgcaaggaaggaggaggatttgcttcagttgtaagtgtatacattttcctcttccccttgggcccaaatgttttctccttttgtcctgtaaagtgtctgctgtgaggtttacccctgctaggtaaaaaaggcatttttttaaatctccataactttttgaaggcataaaaactgccattttgtagccctgctaaagaattttgacatctaattggtctaagtgaactaaatgtctacattggttattataatttgataacctgtaaaaaaaaatttt

SEQ ID NO: 133904 - DNA, 285 bp, Homo sapiens
cttacattatccatctgttgtctatttttttcatgagagctcttaacatattaatgataagttccatgtctgataattctgacacgtgtcatgtctctatctggttccaatgattgctttatctcttcagaccatgacttttcttgccttttgacgttctttgacattttttttgaattttttgttgcaagccagatctggtgtgttatgtaataggaacaggtaaataagtctttagcttgcagacttatcttaatctgactaactattagactgtgtttaaag

SEQ ID NO: 133905 - DNA, 121 bp, Homo sapiens
aaggctgaaaatacaatacttctagaagtggtaacagagtctcttaaaatccaaactgatagttcagaggattagtattaacaccactggcatactgtttttaagccattgaattattttg

SEQ ID NO: 133906 - DNA, 400 bp, Homo sapiens
ccattcctgtaggttttataatgcttctgatgtttgtgtccatgattccaaacatctggctaattgactgcatttataccttttacacatatgtcttggttttatgtatatatttgttgtgttaatgggaagcatactgatataaaatgcaactggaaaaagtagtacagaaaaaggaaatattctctgtcaagtgccattctgttgaaactgatgtttaagtagatgaacatctttttcactgagaagttgtaaccaaatcagattcagctgcatgttaatatatcaaacaggaaaaattaaagtactgtgtagcagctgtcttgaaatatgcaggttgaaaaaatttaaagtgatatgcattggatatatgatacaacatttatgaaattgagatgga

SEQ ID NO: 133907 - DNA, 3240 bp, Homo sapiens
ggcgagcagaagcccgctcgcccgctgccgagtggcagtcacgactgtgaggtcgccggcgaggtggccgcgggcgcggcggggcggggcagggcgcactctcctccacgcccgcggaagtgccggggaggtgggcagggcggggagggagagggagcgaggctggaggagggcacgtcggcgcctcggcgaggatgggagtccccaggacccggagctgagcagcctggcgcgcggcgggcagggcgcgcaggacagaagcctcgctgttcctccgggagcccaacaccgttcccgcgcggccacgatgatccctccgagcagcccccgcgaggacggcgtggacgggctgcccaaggaggcggtgggcgccgagcaaccgccctctcctgcatccaccagcagccaggaatccaagctccagaaactaaaacgatcactttctttcaagaccaagagtttacggagcaaaagtgctgacaacttcttccagcgaaccaacagcgaagacatgaaactgcaagcacacatggtggctgagatcagccccagctccagcccactccctgctccaggaagcctgacgtccacacccgccagggctggtctgcatccaggtggcaaggctcatgcctttcaggaatacatcttcaagaagcccactttctgtgatgtctgcaaccacatgatagtgggaacaaatgctaagcatggactgcgctgcaaagcctgtaagatgagcatccaccacaagtgcacagatggcctggcaccccagcggtgcatgggcaagctgccaaaggggtttcggcgttactacagctcccccttgctcattcatgaacagtttggctgcattaaagaagttatgcccattgcctgtggcaataaggtggaccctgtctacgagaccctccgcttcggcacctccctggcccagaggacaaagaagggcagctccggcagtggctctgactcacctcacagaacctctacttcagatcttgtggaggttcctgaggaagccaatgggccaggaggcgggtatgacctaaggaaacgcagcaacagcgtgtttacatatccagaaaatggcactgatgatttcagagatccagcgaagaacataaaccaccagggatctctttccaaagacccattacagatgaacacctatgttgccttgtacaaatttgtaccacaggagaatgaagatttggaaatgaggccaggagacataattactcttttagaggattccaatgaagactggtggaaagggaaaattcaagacagaattggcttctttccagccaactttgttcagagactacaacaaaatgagaagatttttagatgtgttagaaccttcattgggtgtaaggaacaggggcagataacactgaaagagaatcagatctgcgtgagttctgaagaagaacaagatggttttatcagagtcctcagtggaaaaaagaaaggcctcatcccccttgatgtactagaaaacatctgattgctggctcctcctccgtttgcagtaggcaagctctgctgcgatgcctctgcctcatctcacactgcgtcaacccaaaggagctgccgcactgacccagccccccaggaaacagtgagacaagaatcaagtatctgagactgtggagtaatagccacaaaacagagggcccactgcacagcatatccaggctgccacaggtggggacgaggctgagagagtcagcaggcagagccagatgccatgcttggcagcagcagtaggactataaaccacagctgtcccccaggatcccactcctttcctgtctgtgtggtgtaagttaacacactggagtgtgctccagtttgcagggtagcccagtgcaaggttcagatccatgtagctaagtattatcctgcttccagacctatgtcaccagtaccaatcagtcagtgtcatcacatttcaggccccaagcaatctctgtgcaaagcatcagaaagacctgcttcccagcccccagcattccagtgctctccaggcttcctctctttgtgattgtgctgtccagagtgtccagcttgttctttctttctcttcagtcctctgagtacatctggtggtgtgcattagatgtgagggctatgttgacatggcatcacctccaaagacctgacctgcctaaagactgatgacaggccatccttcctgctgttctaggtactggcctgggtgacagagcaggacatgagacatagatacagtggggaggagaagtggggaaaggtggagcagagagttcttacttattgaagattatacagccctttcggttatgaagtccctgcttgaaggcaatggacctggggaagagactatcacaaaaagtctccattttcattttacatcctctctattggaggcagcacttttccctcatgctgtcctataggactccactttgaaggttgtgcctacgttgcagggaactaggaacatggaggggaaccaacaacagcatcttagaagaaatgtagccaaattggagtccattcttctttagggcagtatatgaaatcctagcagatgtaaaatggaaaagaatcctaatgcttcttccttcagaaagtagaggaactaggggcccaattagcatcatctaggggaatctctattactctgtacttatactaatgtttacaagaatgcaatatactgtgatgccttcctactcaagcctcctagcattcaaacttccatcctattagtcattaacatggttaaacttcaattcacaatcaccttggaatcaatgtcagtttgatttattttgttacagagcaataaaatcattagaacaatggtttttaaaagacttaagtggatgcatcctatgcatgtaagcattatttcccaaaccaaagcatcattcatctccatttatttcttttgttcccgctcagtgtgaagttgggaactgagaggggatggctgctggtttcacagaagtttggatgccttactcttatcttaaagccagcatccagaatttcctccctctctgatgccacatgcaaaaccaggtgtacgatgtcaagatggattctttgagagccagggtagatcatatgactgcctttctgtaaaattggatgcctagtacaaatgctctttgcctctaattcagtattccatttaataaaaacaatacagtggctggaaaggagcatcagaaaaaaatg

SEQ ID NO: 133908 - DNA, 3207 bp, Homo sapiens
ggcgagcagaagcccgctcgcccgctgccgagtggcagtcacgactgtgaggtcgccggcgaggtggccgcgggcgcggcggggcggggcagggcgcactctcctccacgcccgcggaagtgccggggaggtgggcagggcggggagggagagggagcgaggctggaggagggcacgtcggcgcctcggcgaggatgggagtccccaggacccggagctgagcagcctggcgcgcggcgggcagggcgcgcaggacagaagcctcgctgttcctccgggagcccaacaccgttcccgcgcggccacgatgatccctccgagcagcccccgcgaggacggcgtggacgggctgcccaaggaggcggtgggcgccgagcaaccgccctctcctgcatccaccagcagccaggaatccaagaccaagagtttacggagcaaaagtgctgacaacttcttccagcgaaccaacagcgaagacatgaaactgcaagcacacatggtggctgagatcagccccagctccagcccactccctgctccaggaagcctgacgtccacacccgccagggctggtctgcatccaggtggcaaggctcatgcctttcaggaatacatcttcaagaagcccactttctgtgatgtctgcaaccacatgatagtgggaacaaatgctaagcatggactgcgctgcaaagcctgtaagatgagcatccaccacaagtgcacagatggcctggcaccccagcggtgcatgggcaagctgccaaaggggtttcggcgttactacagctcccccttgctcattcatgaacagtttggctgcattaaagaagttatgcccattgcctgtggcaataaggtggaccctgtctacgagaccctccgcttcggcacctccctggcccagaggacaaagaagggcagctccggcagtggctctgactcacctcacagaacctctacttcagatcttgtggaggttcctgaggaagccaatgggccaggaggcgggtatgacctaaggaaacgcagcaacagcgtgtttacatatccagaaaatggcactgatgatttcagagatccagcgaagaacataaaccaccagggatctctttccaaagacccattacagatgaacacctatgttgccttgtacaaatttgtaccacaggagaatgaagatttggaaatgaggccaggagacataattactcttttagaggattccaatgaagactggtggaaagggaaaattcaagacagaattggcttctttccagccaactttgttcagagactacaacaaaatgagaagatttttagatgtgttagaaccttcattgggtgtaaggaacaggggcagataacactgaaagagaatcagatctgcgtgagttctgaagaagaacaagatggttttatcagagtcctcagtggaaaaaagaaaggcctcatcccccttgatgtactagaaaacatctgattgctggctcctcctccgtttgcagtaggcaagctctgctgcgatgcctctgcctcatctcacactgcgtcaacccaaaggagctgccgcactgacccagccccccaggaaacagtgagacaagaatcaagtatctgagactgtggagtaatagccacaaaacagagggcccactgcacagcatatccaggctgccacaggtggggacgaggctgagagagtcagcaggcagagccagatgccatgcttggcagcagcagtaggactataaaccacagctgtcccccaggatcccactcctttcctgtctgtgtggtgtaagttaacacactggagtgtgctccagtttgcagggtagcccagtgcaaggttcagatccatgtagctaagtattatcctgcttccagacctatgtcaccagtaccaatcagtcagtgtcatcacatttcaggccccaagcaatctctgtgcaaagcatcagaaagacctgcttcccagcccccagcattccagtgctctccaggcttcctctctttgtgattgtgctgtccagagtgtccagcttgttctttctttctcttcagtcctctgagtacatctggtggtgtgcattagatgtgagggctatgttgacatggcatcacctccaaagacctgacctgcctaaagactgatgacaggccatccttcctgctgttctaggtactggcctgggtgacagagcaggacatgagacatagatacagtggggaggagaagtggggaaaggtggagcagagagttcttacttattgaagattatacagccctttcggttatgaagtccctgcttgaaggcaatggacctggggaagagactatcacaaaaagtctccattttcattttacatcctctctattggaggcagcacttttccctcatgctgtcctataggactccactttgaaggttgtgcctacgttgcagggaactaggaacatggaggggaaccaacaacagcatcttagaagaaatgtagccaaattggagtccattcttctttagggcagtatatgaaatcctagcagatgtaaaatggaaaagaatcctaatgcttcttccttcagaaagtagaggaactaggggcccaattagcatcatctaggggaatctctattactctgtacttatactaatgtttacaagaatgcaatatactgtgatgccttcctactcaagcctcctagcattcaaacttccatcctattagtcattaacatggttaaacttcaattcacaatcaccttggaatcaatgtcagtttgatttattttgttacagagcaataaaatcattagaacaatggtttttaaaagacttaagtggatgcatcctatgcatgtaagcattatttcccaaaccaaagcatcattcatctccatttatttcttttgttcccgctcagtgtgaagttgggaactgagaggggatggctgctggtttcacagaagtttggatgccttactcttatcttaaagccagcatccagaatttcctccctctctgatgccacatgcaaaaccaggtgtacgatgtcaagatggattctttgagagccagggtagatcatatgactgcctttctgtaaaattggatgcctagtacaaatgctctttgcctctaattcagtattccatttaataaaaacaatacagtggctggaaaggagcatcagaaaaaaatg

SEQ ID NO: 133909 - DNA, 3024 bp, Homo sapiens
ggcgagcagaagcccgctcgcccgctgccgagtggcagtcacgactgtgaggtcgccggcgaggtggccgcgggcgcggcggggcggggcagggcgcactctcctccacgcccgcggaagtgccggggaggtgggcagggcggggagggagagggagcgaggctggaggagggcacgtcggcgcctcggcgaggatgggagtccccaggacccggagctgagcagcctggcgcgcggcgggcagggcgcgcaggacagaagcctcgctgttcctccgggagcccaacaccgttcccgcgcggccacgatgatccctccgagcagcccccgcgaggacggcgtggacgggctgcccaaggaggcggtgggcgccgagcaaccgccctctcctgcatccaccagcagccaggaatccaagaccaagagtttacggagcaaaagtgctgacaacttcttccagcgaaccaacagcgaagacatgaaactgcaagcacacatggtggctgagatcagccccagctccagcccactccctgctccaggaagcctgacgtccacacccgccagggctggtctgcatccaggtggcaaggctcatgcctttcaggaatacatcttcaagaagcccactttctgtgatgtctgcaaccacatgatagtggcctgtggcaataaggtggaccctgtctacgagaccctccgcttcggcacctccctggcccagaggacaaagaagggcagctccggcagtggctctgactcacctcacagaacctctacttcagatcttgtggaggttcctgaggaagccaatgggccaggaggcgggtatgacctaaggaaacgcagcaacagcgtgtttacatatccagaaaatggcactgatgatttcagagatccagcgaagaacataaaccaccagggatctctttccaaagacccattacagatgaacacctatgttgccttgtacaaatttgtaccacaggagaatgaagatttggaaatgaggccaggagacataattactcttttagaggattccaatgaagactggtggaaagggaaaattcaagacagaattggcttctttccagccaactttgttcagagactacaacaaaatgagaagatttttagatgtgttagaaccttcattgggtgtaaggaacaggggcagataacactgaaagagaatcagatctgcgtgagttctgaagaagaacaagatggttttatcagagtcctcagtggaaaaaagaaaggcctcatcccccttgatgtactagaaaacatctgattgctggctcctcctccgtttgcagtaggcaagctctgctgcgatgcctctgcctcatctcacactgcgtcaacccaaaggagctgccgcactgacccagccccccaggaaacagtgagacaagaatcaagtatctgagactgtggagtaatagccacaaaacagagggcccactgcacagcatatccaggctgccacaggtggggacgaggctgagagagtcagcaggcagagccagatgccatgcttggcagcagcagtaggactataaaccacagctgtcccccaggatcccactcctttcctgtctgtgtggtgtaagttaacacactggagtgtgctccagtttgcagggtagcccagtgcaaggttcagatccatgtagctaagtattatcctgcttccagacctatgtcaccagtaccaatcagtcagtgtcatcacatttcaggccccaagcaatctctgtgcaaagcatcagaaagacctgcttcccagcccccagcattccagtgctctccaggcttcctctctttgtgattgtgctgtccagagtgtccagcttgttctttctttctcttcagtcctctgagtacatctggtggtgtgcattagatgtgagggctatgttgacatggcatcacctccaaagacctgacctgcctaaagactgatgacaggccatccttcctgctgttctaggtactggcctgggtgacagagcaggacatgagacatagatacagtggggaggagaagtggggaaaggtggagcagagagttcttacttattgaagattatacagccctttcggttatgaagtccctgcttgaaggcaatggacctggggaagagactatcacaaaaagtctccattttcattttacatcctctctattggaggcagcacttttccctcatgctgtcctataggactccactttgaaggttgtgcctacgttgcagggaactaggaacatggaggggaaccaacaacagcatcttagaagaaatgtagccaaattggagtccattcttctttagggcagtatatgaaatcctagcagatgtaaaatggaaaagaatcctaatgcttcttccttcagaaagtagaggaactaggggcccaattagcatcatctaggggaatctctattactctgtacttatactaatgtttacaagaatgcaatatactgtgatgccttcctactcaagcctcctagcattcaaacttccatcctattagtcattaacatggttaaacttcaattcacaatcaccttggaatcaatgtcagtttgatttattttgttacagagcaataaaatcattagaacaatggtttttaaaagacttaagtggatgcatcctatgcatgtaagcattatttcccaaaccaaagcatcattcatctccatttatttcttttgttcccgctcagtgtgaagttgggaactgagaggggatggctgctggtttcacagaagtttggatgccttactcttatcttaaagccagcatccagaatttcctccctctctgatgccacatgcaaaaccaggtgtacgatgtcaagatggattctttgagagccagggtagatcatatgactgcctttctgtaaaattggatgcctagtacaaatgctctttgcctctaattcagtattccatttaataaaaacaatacagtggctggaaaggagcatcagaaaaaaatg

SEQ ID NO: 133910 - DNA, 1137 bp, Homo sapiens
ggcgagcagaagcccgctcgcccgctgccgagtggcagtcacgactgtgaggtcgccggcgaggtggccgcgggcgcggcggggcggggcagggcgcactctcctccacgcccgcggaagtgccggggaggtgggcagggcggggagggagagggagcgaggctggaggagggcacgtcggcgcctcggcgaggatgggagtccccaggacccggagctgagcagcctggcgcgcggcgggcagggcgcgcaggacagaagcctcgctgttcctccgggagcccaacaccgttcccgcgcggccacgatgatccctccgagcagcccccgcgaggacggcgtggacgggctgcccaaggaggcggtgggcgccgagcaaccgccctctcctgcatccaccagcagccaggaatccaagctccagaaactaaaacgatcactttctttcaagaccaagagtttacggagcaaaagtgctgacaacttcttccagcgaaccaacagcgaagacatgaaactgcaagcacacatggtggctgagatcagccccagctccagcccactccctgctccaggaagcctgacgtccacacccgccagggctggtctgcatccaggtggcaaggctcatgcctttcaggaatacatcttcaagaagcccactttctgtgatgtctgcaaccacatgatagtggcttctctcttgaagccagcaagaccacgagcccaccgggaggaaggaacaactccagacgcgtcgccttaagagctgtaacactcaccacgaacgtctgcagcttcactcctgagccagcgagaccacgaacccaccagaaggaagaaactccgaacacatccgaacatcagaaggaacaaactccggacacgccaccattaagaactgtaacactcaccgcgagggtccgaggcttcattcttgaagtcagtgagaccaagaacccaccaattccagacacacatatatgctaatcttagaaagacatggatactatctcccctctccactccatccttaaacatctcatgactattaagaatgagaaagggaccaagtggcaagagaacatcttcatatgcatacaactttccagaaaataaaaatttgccaagttgtca

SEQ ID NO: 133911 - DNA, 833 bp, Homo sapiens
tttcccaccctaaaactgctctcccttttccagtttgttgctcctgcaacctcagtcagcagggattcaagctgcaggttctaacttcgttcttgctgacagtaaagtattttgttttttttcttccttggcattcagatctgcgtgagttctgaagaagaacaagatggttttatcagagtcctcagtggaaaaaagaaaggcctcatcccccttgatgtactagaaaacatctgattgctggctcctcctccgtttgcagtaggcaagctctgctgcgatgcctctgcctcatctcacactgcgtcaacccaaaggagctgccgcactgacccagccccccaggaaacagtgagacaagaatcaagtatctgagactgtggagtaatagccacaaaacagagggcccactgcacagcatatccaggctgccacaggtggggacgaggctgagagagtcagcaggcagagccagatgccatgcttggcagcagcagtaggactataaaccacagctgtcccccaggatcccactcctttcctgtctgtgtggtgtaagttaacacactggagtgtgctccagtttgcagggtagcccagtgcaaggttcagatccatgtagctaagtattatcctgcttccagacctatgtcaccagtaccaatcagtcagtgtcatcacatttcaggccccaagcaatctctgtgcaaagcatcagaaagacctgcttcccagcccccagcattccagtgctctccaggcttcctctctttgtgattgtgctgtccagagtgtccagcttgttctttctttctcttcagtcctctgagtac

SEQ ID NO: 133912 - DNA, 564 bp, Homo sapiens
gacagaaaatctttaataatggttagataacacttacgatccatacactgaaattacattgcaatgacttctccatttcctgttttctttctttcctctctcaatttatttcacctttcttttctcatttttcttttattttctctttcagggatctctttccaaagacccattacagatgaacacctatgttgccttgtacaaatttgtaccacaggagaatgaagatttggaaatgaggtaaaaaccttctgtaaagaaaaaaaagagtaaaattttaaagtcagtatttctccatgtgaaaaagtaagtccatctgtgcccctcctaatgctttatagctgtgattctcaaactttagcatgtatctaatgacctgcaaggctggttaacacacaggccctgtccccagagtttttgattcatcagatctgaggcagggcctcagaagttgcattcctaaggagttcccaggtggcactgacaatgctgtccaaggaacacactttgggaagcaccactttagtacatgctcaacagaactgctaatgggagttttcatga

SEQ ID NO: 133913 - DNA, 1446 bp, Homo sapiens
ggcgagcagaagcccgctcgcccgctgccgagtggcagtcacgactgtgaggtcgccggcgaggtggccgcgggcgcggcggggcggggcagggcgcactctcctccacgcccgcggaagtgccggggaggtgggcagggcggggagggagagggagcgaggctggaggagggcacgtcggcgcctcggcgaggatgggagtccccaggacccggagctgagcagcctggcgcgcggcgggcagggcgcgcaggacagaagcctcgctgttcctccgggagcccaacaccgttcccgcgcggccacgatgatccctccgagcagcccccgcgaggacggcgtggacgggctgcccaaggaggcggtgggcgccgagcaaccgccctctcctgcatccaccagcagccaggaatccaagctccagaaactaaaacgatcactttctttcaagaccaagagtttacggagcaaaagtgctgacaacttcttccagcgaaccaacagcgaagacatgaaactgcaagcacacatggtggctgagatcagccccagctccagcccactccctgctccaggaagcctgacgtccacacccgccagggctggtctgcatccaggtggcaaggctcatgcctttcaggaatacatcttcaagaagcccactttctgtgatgtctgcaaccacatgatagtggcctgtggcaataaggtggaccctgtctacgagaccctccgcttcggcacctccctggcccagaggacaaagaagggcagctccggcagtggctctgactcacctcacagaacctctacttcagatcttgtggaggttcctgaggaagccaatgggccaggaggcgggtatgacctaaggaaacgcagcaacagcgtgtttacatatccagaaaatggcactgatgatttcagagatccagcgaagaacataaaccaccagggatctctttccaaagacccattacagatgaacacctatgttgccttgtacaaatttgtaccacaggagaatgaagatttggaaatgaggtaaaaaccttctgtaaagaaaaaaaagagtaaaattttaaagtcagtatttctccatgtgaaaaagtaagtccatctgtgcccctcctaatgctttatagctgtgattctcaaactttagcatgtatctaatgacctgcaaggctggttaacacacaggccctgtccccagagtttttgattcatcagatctgaggcagggcctcagaagttgcattcctaaggagttcccaggtggcactgacaatgctgtccaaggaacacactttgggaagcaccactttagtacatgctcaacagaactgctaatgggagttttcatgaaggttgaacgttaaatgcacttggcatctggtggggcctaatagggaatcaaaaaatatatttaatcaaatatcagat

SEQ ID NO: 133914 - DNA, 1629 bp, Homo sapiens
ggcgagcagaagcccgctcgcccgctgccgagtggcagtcacgactgtgaggtcgccggcgaggtggccgcgggcgcggcggggcggggcagggcgcactctcctccacgcccgcggaagtgccggggaggtgggcagggcggggagggagagggagcgaggctggaggagggcacgtcggcgcctcggcgaggatgggagtccccaggacccggagctgagcagcctggcgcgcggcgggcagggcgcgcaggacagaagcctcgctgttcctccgggagcccaacaccgttcccgcgcggccacgatgatccctccgagcagcccccgcgaggacggcgtggacgggctgcccaaggaggcggtgggcgccgagcaaccgccctctcctgcatccaccagcagccaggaatccaagctccagaaactaaaacgatcactttctttcaagaccaagagtttacggagcaaaagtgctgacaacttcttccagcgaaccaacagcgaagacatgaaactgcaagcacacatggtggctgagatcagccccagctccagcccactccctgctccaggaagcctgacgtccacacccgccagggctggtctgcatccaggtggcaaggctcatgcctttcaggaatacatcttcaagaagcccactttctgtgatgtctgcaaccacatgatagtgggaacaaatgctaagcatggactgcgctgcaaagcctgtaagatgagcatccaccacaagtgcacagatggcctggcaccccagcggtgcatgggcaagctgccaaaggggtttcggcgttactacagctcccccttgctcattcatgaacagtttggctgcattaaagaagttatgcccattgcctgtggcaataaggtggaccctgtctacgagaccctccgcttcggcacctccctggcccagaggacaaagaagggcagctccggcagtggctctgactcacctcacagaacctctacttcagatcttgtggaggttcctgaggaagccaatgggccaggaggcgggtatgacctaaggaaacgcagcaacagcgtgtttacatatccagaaaatggcactgatgatttcagagatccagcgaagaacataaaccaccagggatctctttccaaagacccattacagatgaacacctatgttgccttgtacaaatttgtaccacaggagaatgaagatttggaaatgaggtaaaaaccttctgtaaagaaaaaaaagagtaaaattttaaagtcagtatttctccatgtgaaaaagtaagtccatctgtgcccctcctaatgctttatagctgtgattctcaaactttagcatgtatctaatgacctgcaaggctggttaacacacaggccctgtccccagagtttttgattcatcagatctgaggcagggcctcagaagttgcattcctaaggagttcccaggtggcactgacaatgctgtccaaggaacacactttgggaagcaccactttagtacatgctcaacagaactgctaatgggagttttcatgaaggttgaacgttaaatgcacttggcatctggtggggcctaatagggaatcaaaaaatatatttaatcaaatatcagat

SEQ ID NO: 133915 - DNA, 653 bp, Homo sapiens
aagaaatgccctttaagcacaggactacaacatatagaaacttagattagtgactgaatacgatagattcagggcatcttgaagtgcatgatttggctgaagtatagagttcataaaggctattgatggaagataaaaagttgataagaaacatgggacagatgacagaagcctgaaatgccaagtatgaactgcagactagttatgaaatgcatgcttttgttgtgaggaagaaaaaacaggagggaggtataggatgatctattaccggaaggtgaaaatactgattaacaaatattgatcactgctatgtaggactacccaatattcattccaccccagctaatttttctaagccaatcatggtaatctcatcacatctcggcagtggttagttaggggataggtaagcctaagctaatgtgggccagttagaaaagagaagtttatttaaagtgtctggaaaagaagtttccttgttcttgagagcaacaaaaagctagcctcttagatatggtcagtccattcaaaattatgcccccttctagtctaaacaacttcctatgtgggctaatacaactcctatagttagtcaatttatattggggtttctgaataatccagagttggaggtagggtgtgaatggggctac

SEQ ID NO: 133916 - DNA, 270 bp, Homo sapiens
ccctcttccccctccttgtggggcaccccacaatgaccactgctgtgacgcctccactggggcgtggggctctgggtcctgcccgcactcagccctgaggtgtcgctcccgtccactgcggccctgctgggctgtgcaccttgtgcctggtaggtgtgatgggtggctctggccacgtggtcccatggtccaggacccggttgcacatgaaccttctgccaccctgctcagaagccccaggagccacgtggagattctctcactgggctt

SEQ ID NO: 133917 - DNA, 102 bp, Homo sapiens
aagctccagcatgagttgtgtctgatggtctttgaattagaatgtggagagggtagacaaaattctggatatcccttccagagtttctcttgaggacatcca

SEQ ID NO: 133918 - DNA, 648 bp, Homo sapiens
tgatcttgagcacctgggctcaagcaatccacccacctcagcctcccagagtgctgggactacaggcatgagccaccacgcccagcccaattctatgagttttgacaaatgcatgtagttgtcatacatataacctcaggcaagatatagaatattcccatcccccttgtgctatctgtagtcagtctactcctcccactgccaaccctggcaattctaccatccctggagttttgccttttccagaatgtcatataagtggaatcatctgtatgtagaattttgtatctttttctttcatgttacacggtggtcttgagattcagccatgctgttgttgtgtgtatcacagtttgttccttttcaatgctgagttggattgcgttgtatggttgtgacacagtttgtttatccattcctaagttgagggacatttggattgtttacagtttggggaatttttaataaagctgctataaacagttaaatacaggtcttcatgtagacgtatgtttttatttctctctggtaaatatctaggagtaggatttctaggtcatttggtgggtgtgtgtataactttgtaagaagctgctgaactatcttgaaatggctggtccattttgcactcccaccagcaacgtatga

SEQ ID NO: 133919 - DNA, 331 bp, Homo sapiens
ctgtgctctcccaggaggagctggagtgtgtatttctgggaaaagtgatagcctcagggacttctgggatgatgcttataaccaattgtgggagggtccccagggcgtggaagcaaagttcgacctggcacagcagcttcccttcatcccaggtggttgctcaaaatagaccagctgagactctaagccagcttctcctcctggtgacaggaaggggtgagcctcctggaaatggtgggtggagtttctccaactttcaggttcccaagaatgacctggagcacttgaataaaaacttccacatccgaggccctgctcctgatgcatgaca

SEQ ID NO: 133920 - DNA, 652 bp, Homo sapiens
tacctccttctttattatgtacccatcaggcacatttgttccaagtctaactccttctttctctgcagtattgttgaaatttaaatattactttttgccttgttaggaacttcatggaaatgatcttttaagaaaataatgtactttgtgaatacgttttatatatgaattatagtattttaggaagacaggaacttttttttttccctaagagatgtttcaaccaagaaaatcaatttttttccaactgcttcttcattttctcatatttcatgctggttttctttacaagatttttttttaatgctcatgaaactatgaccttgtataagtttcccaggagacatgattctcagcattttgttggacaaacatttgttttttgtaactacatgaacaagccaaattgcacgtagtccaaaaaataattctggcctttttaactacactctttttctttttaatgccatattcaaggaatcccagtacagtggcaattaaaacattcgaattttgccatttaaccatgagaaggatttacagccttggcacatatagtaagataagttaacactctgaggaaggtttcacagtatattctcattttaattgtcagttgagtggacatgaagaaggcatttctgttttacaa

SEQ ID NO: 133921 - DNA, 736 bp, Homo sapiens
ggcacgatcttggctcactgcaaacaccacctcctgggtcaagcaattctcctgcctcagcctcccaagtagctgggattataggtgcacgccaccacacccagccaatttttgtatttttagtagagacagagtttcaccatcttggtcaccatcactcctgaccttgtgatctacctgccttgggctcccaaagtgctgggattacaggcatgaaaaaaatatgtagcgactttaagataaaattgctactaaaaacaaagaacattttaaaatgataagaggaccaatttactagaaagatataatgattataaacatacatgcacctaacaatagagccccaaaatatataaagcgaaacctgacagaatgtatacgagaaagaccacaataatagagacttacataccccacttccaataatagatagaaggactagtcagaagaccagcaagaaatggaagatttgggtaacactataaactaactccacctaatagacatgacagaacactccatctagcaatacattattctcaagggcacatggaacattccaggatagactatatgttagaccataaaataagtctcagtaaattaaaaaagactgaaaatatacaagttatgttctgcaaccaatgggaggaaattagaaaccaaccacagaaaaaaatttaagaaattcacaaatatgtaaacatttttaaaaatcctaaagaatcaacaggtc

SEQ ID NO: 133922 - DNA, 244 bp, Homo sapiens
gaatcatactgcagcatcacttaacagttgtgtgactttgggtgccttatttaaccttgatgaacttctgcttatctctgtaaactgcgcataatagtatggactttagtgttattgtaaggattccatgagattaagtaaatgaaccttggcatggctttgagcttttactgtggttctttaatagcagatttcagggtggaatgtactcaggagcatcagacaccagggatagtggtggatg

SEQ ID NO: 133923 - DNA, 228 bp, Homo sapiens
caaatcaatatgatgaactatgcaaaattgaggaaatacctgaaggcaaatctccagttatgttctactaaaataactgactacaagatattgtaaatataggtaacatctttgacttttcataattaaatatctctagtttcagatttctcaggaaaaaaatgggctataaaaattacaagaaattctagtcataaagctaggttacaaatacatggaggttcatta

SEQ ID NO: 133924 - DNA, 406 bp, Homo sapiens
tcctgtgggtggatcctatctccaggtataaactcacatctaccaggccaggaaggataaaaaagctaaatgtttccagccatgaaatgaaaccattcattctgacctcaagagaaccttctgagtgtttttgtggggggcggtgtgaaacaggttcatagtctgcatcacggctagagaggagaaaaggtattccttagaaagtgggtcagagatcagagagatcccatggggagcatttggtattgggctgctttttcctttctgatgttgttcgttctttaattcttcatttactgagtgtcttctatcttaacttcggctgctataacaaaacaccgcagatgaggtggcttaaacagacatgtatttctcattgttctggaggatggaatgctgcgagggc

SEQ ID NO: 133925 - DNA, 756 bp, Homo sapiens
tatcagcattctacaaggtgagcaggggaaggaaactgagggttcaacttctccattggtgaactccattggagttcaacaactccaaccctccaagtgagggtccagttctcactcagtgcctttgtttttggccctttgggtttcctatgctgggctgggtgtccctgagactggaacctctctgtttcaatctccccagacagtaaggctcatgtctccgataggtgggggagagttgctcaccttctaagagagaagcaggagagatcttcatgctctgactgctttttataggttttcaaccagtcctcttactttcagctgtacctgaacacttcctgtgcagaggtactaggtgcctcagttcctgaggggaccagtggctctgctgtgaggactggttccctcttgtcggcttctcctcctgcctgcagtaagggctcacctttctctactcagccaagtcagttattactcatccattttccttcttccaaaagtttgctgaactgtcttgttcagggtcatctctttcctgctcctctttgtcctcgtaggtttatgtctttttagatccctttatggttatgtttattgggtttcagaagacagtgaagaaaaatgcatgttttcaatcacccatgtttaactctgagtccactctaacatttttggttttaatttgttttgtctagcccctagtagtatcaatatgggagctggtttggtttccctaggaagtataattttgta

SEQ ID NO: 133926 - DNA, 331 bp, Homo sapiens
ggagttcaagaccagcctgggtaacatggcaaaatttggtctctaaaaatatacatacacacacacacacacgcgcgcgtgcatttgtatatttgtttactttatttaatttaatttaatttatttatttatttgcaacggagtctcaaaaaaaaaaacaaaacccccaaaaaacaaaacaggaaaatcttttagccagaaggtcaacagggctgagtgtgtggctcacacttgtaatgggatttggaatttaacactccctttggccaacaggttgtaatcagctcttttggtccatcaccagcaaaaaaaccactttctttttaggcac

SEQ ID NO: 133927 - DNA, 770 bp, Homo sapiens
cagattggatcctggtacttcttcactgccttgtgaagaaataaacgtatttcttcactgccttgttaatttttaagtgcttttaaacatattttgcccagatttttttgagtagcttcagcagaagggttggtttgaattatcttagttctttattatcagaattggaagttcttaaacttttgaggagaccattttcggaaagatttttgaagactcaattacacacacacacacacacacacacacacacacacacacacgtctgaatttgcctccttttctgccatgggtacacccctccctactggcccacccaggattgctcccatggctttggcttcaaagctattaggttgggatcactggtctcataggcagccatcacggctctggttcattgaatgccctatacgtgattttagcctgtgaaacttcttttactaaaaaaaaaaaaaaaaaaaaaaaaaaaattttgtgggggcgtcagcgacccacgaaaaaaagtcttgtcaagaacaacaatcctggtggggcgcgcgcgcaggcccattgtgatgaccatgcagcaaagcggtcacacaagaggtgtccaacagaaaaactccgggggacataacatgcggtgctggatctccccaccagtaaaaaaaagcgccggggggccaccgccggcgcgtcaggcaaaacagcacgaggcagagctgtgcgggacaaaggcggggactacacacgagggagctcccgaggagccagcatattacattagg

SEQ ID NO: 133928 - DNA, 527 bp, Homo sapiens
tgggcaacagagtgagactccatctcaaaagaaaaaaaaagagtatgtttatgtgtggttgaaacacatatacctttttggtttgtttgcacaccaagtttctagaacaacacataggctgttgacactggatagttttaagggagcacggcactggttagaggtttagaattttttgttctacactcctatacaatttgagtatttcccattgaacaagtattactttattagtaacatttaataattaaactatcaaagaaagatcaataaataaaatatgttctatattaactaataaaggagaaaatggctaggggatgcagtcactgccttatatttttctgtgagtccctgttgtttactaaagtcatagctcttctgtaaggcaaccaaaatataaaggcccagatctgaaataatttgttccctctttttttagacaaaacgaatacactaagttcagaaagtatacatttatattcataaatgtaggatatatctttggcaaatcacccatggatgct

SEQ ID NO: 133929 - DNA, 402 bp, Homo sapiens
gcagggtgctcagggaggacatgtgcaggaggtgacgtctgaaaagagagcacgcaggaatccagtctgccaatgagggaagctgacacagggtctcagtgctcgggacgggggaatgctggtacccctggttccacggctgcatgctggagatgagtgcaggagcacagggtgtgagggggagtgagacacctggtctggctgtttctgcaggccagcgccctgcacaaacagtaccttctgcaattctccgaggccttcccctagaatctcactggtgtcggttgatcaatgtgtgtgtgcctgtgtgtgtggaagagaagggagcagtcgagggagatgaaggacttcttgcttttagggtggatggagttcagacaattaactgtaaactaaaagagg

SEQ ID NO: 133930 - DNA, 399 bp, Homo sapiens
accccttctgtccctcaggtaacgtcagcagggaccccagaggtacctgataaaccaagcagactaacataacgctgaaaggctctgacgattaaactgtcagtgggaccacaggccacaaatcaggccaggccctgctccctaagcagaatcagggcaattacctgctaaaattaaatatttaaataagacccagaattccctaataggtaaaatgggatacaatagaaaattcctttcataccaagtaccaagaaatgtgcagcatgaatgagaaagacaatgaatgccaacgtcaagatgaaccaactgctggagttatctggcaaggatctgaaaacagccatcataaaaatgcttcaagaggcaaatctgttgaagaaatgaaaaaatagaaag

SEQ ID NO: 133931 - DNA, 430 bp, Homo sapiens
ccgtttaataaattcacacttaaaaaaactagcagtcacttgaaatgcctttgtaaatatgaatcatacatgcttttaatttgtatgcaaagaccttgaacccaaattgtctcctacactcattttaacatgaaattaatgatataaattatgtaaattttgaatccatgaggttttctcatttattacttggaacatgaattaatatatgaatacattaacatgtaaatcttaaatacataaatctgaacctaagcaaatataccataaatatggtttcactacaggtgatacttgcaagtaaaaaaaattgactagaggcgggggatgaacaagatctagaataatttggctccctttaggaaatgtgggaaaagtgaatatgttctttgctctttccagatagtctgaaatgcatacatgtctgtca

SEQ ID NO: 133932 - DNA, 647 bp, Homo sapiens
  misc_feature (415)..(415): n is a, c, g, or t
  misc_feature (463)..(463): n is a, c, g, or t
  misc_feature (552)..(552): n is a, c, g, or t
  misc_feature (570)..(570): n is a, c, g, or t
catcatggcagtctcctgtattctcagctacctgggaggctgagggaggagaattgcttgaacccaggaggcggaggttgcagtgagtcaagatcgtgccactgcactccagcctgggcaacagagcaagactccatctcaaaaagaaaaaaaataaataattcaataagtgaatgaacaggaattggggtctcaaagggatttagcctagtaagggaagtcacaaatgagctgagatacgaagatagtgtttgccagtgtggggaagagtgaagaaccacccaggcagtgggcagagggaaaaaaatgttcagggccgggtgcggtggctcacttctgtaatcccagcactttgggaggccgaggagggtggatcacctaaggttgggagttcaagaccagcctgggcaacatnggtgaaacccccgtgtctactaaaaatacaaaaaattacgcaggtgtnggtggtacatgcctgtaatcccagctactctggaggcagaggcacgagaactgcctgaacccagaaggcagaggttgcagtgagccgangattgcgccaccgcactnccagcctggggcggtagtgggggggtatggggagaaagagtgagactctgcctcaaaaaaaaaaaaaaaaaaaaaaa

SEQ ID NO: 133933 - DNA, 219 bp, Homo sapiens
gagtgcagcagatgttgagtgaaacttttcatatttccgcggaataaacagctaaggcctaagcaggaatgctgacatgtggggacagatgctccccacatccacattactgagaggcagcagcagaaccattcctacctcactgaaacatacctccacgcccccaaaccgcaaagggagaggatacgtgaggacaaagatcgacagttgaaatgagga

SEQ ID NO: 133934 - DNA, 459 bp, Homo sapiens
tctttcagtcttttcaaaatatatatttgaaattattttaacataattgaaactaaattttatagctttatatcttttttaaggattatgtaataaacattttccaagttatcaaataatttagattaacttttattttgtatagtatctccatgtcacatagatagcctaaattgtattttttcatttggatattataccatccattatggaaggacttttaaggttttgacaatgtagccattcttgtaatataaaaaagaacactaaccttttcacattttaaacttttcagaatcaaattatgattaaagctgctattataaacatccatgtgcaggattttatgtggacataaattttcaactcatttgggtaaacctttaatatattgttaatttgatactctttaaatacttaaataaactcagcaaagtttggaaaataattctccaagcc

SEQ ID NO: 133935 - DNA, 253 bp, Homo sapiens
tgatcctccagatttgggaaccttccatcctccccctagcccagttggtagtaggggttctcccctgaaccccaatccctcctcctaaggtggaagggcaaaaatgtggacttcgaaatcaacatatctgggagtgactctacagtgtacctttttactgtcattaaaactttgacaacttacttcaattttctttagataggaggaataataataccaatctcagagattttggtgaggatgaaatgaggta

SEQ ID NO: 133936 - DNA, 348 bp, Homo sapiens
caacagactaggaagtatttctgctaattcatgctgaagtgtgattggctgataggtgtggtctcaacctccctcctctgccagtcactagtgtaccactgtggccatcttttccagcccctcctctgccccttgagtatgtctaggtcctagaaacagtggtcagggctcttcaagtcctctcggttgcccttgcccactggcacacgtgggggttgctgtcttcagcagagccagccactccgtcttgacagccagggcagagatgtggctgggcacacagcaagaatgtgaccactgatgctgggatgtcagagtctgtgcatcaacccagggttctgagtctgg

SEQ ID NO: 133937 - DNA, 302 bp, Homo sapiens
tgctaggattacaggggtaagccacggtggccagcctcttgacttttaaaataaatcacagttggtacttatggatttatttttctgattattggattactgtctctctatgccactagatgctaagttagttccaagagagcagagacctttctgctttggttggcaatttatcctcaccacagtagcctgcaatcagtaggtgcacaataagtaattgtttaaagaaggatataaaaataatattgccactggctatcctagccagggacgaggaagacacttcttcacatgggagacta

SEQ ID NO: 133938 - DNA, 771 bp, Homo sapiens
tacaaaaacaaaaacatttttcataaacatttatagaatctgagatggactaccttttttattctatagttgccttttccccttgtttccctcctttcttccctctttccctctctcttataccccccttctttttactcattttcttttcggggtgacttttttcattgcatagtgcttacatattccatggtgtaatgttattttatagatgtgagtaagtactagtaggattgtaatcttctgaattgttactttcaattgtttaggcccacaccaaaaatatatttctcaaatgaactcatgagtttattactgtttaaatttaatatacttcataataacctaaagattagttatgggagttctaccaagggggcagtctggtagcaagcaatgaggtgggggtgactaggagtttcaaagttttgtttaaaaacttggaaggcacatcatttttacttaagacttctttgtttttgttttttgttttttccttaagtggggctattgaagattcaagaggtgctagaatcccctcaagccctctcttggtcccattattgaatctacatgactagccactcactcccttaatttgtcttagttgcttggaagtggaatttttgatagcagcctaaccccaaaatggtctagtagctggcccactttcatcagtttaccctttagttgtttttttttaaccaaagctgcaaaaagaaatagaaaaccagtccactcccatgacttgcaggatcatctctttgaaaa

SEQ ID NO: 133939 - DNA, 531 bp, Homo sapiens
gattaagttaatcttattttacatgtgtagaaactgaagcctattaaagtcactggttggtgttcacatgaacgaatcagtagaaccaataatataaactaaatttctacttttggtcatgatggaagaactacatttaccttcccatcttaaacaactagcaaaccagaaaaagtatataaaaaccacagccagacattgatcaataggtagtatagaactgtgacaactgaaagaaggaacacaaacaaaatgattcttaagatcactcttactgcttggaggcagtttccaggccacagcacatggagggggagtccaagcagagtcttgtggtctaccccagtgaaggacaaagagattagggtggggtcgtgggggaggtgcaaagcagctcaaatgtatggggcagagactgcctgaggagacagagctgcacacaaaaggcattctggagatctgccgaggagccttcttgagtcttttactgatgacttatctgcatatatgtgggaagaaactattgggaaa

SEQ ID NO: 133940 - DNA, 491 bp, Homo sapiens
tattccagggggatttgccgggctggtaatttgtttggtgctgataattgcatcttacatttttccagctttacttaaaactgtgtgccgggtttgccggcatttaattactgctctgcggcagccacaaggttatttattaaagagttattttatcttgatacagtggatcctgcccctcatcccctccttaatgttgtgttattttcatcagagaaatttctctgagtgaatgcagattgcggggctgcctccccctgcgattaggctgtcactctactgaatgctgatgcctctgggcgccgcaccgccctattatagggggttgtcagcgcaaataattagacttaaaagttacagctgaaatataatccagaaatggcagggccctgttttggaaattgtctataaaatgtcagcactaaggatgcacagggaacggtaatatactggcattgttggagcctaagattagaccctgagtgcatttt

SEQ ID NO: 133941 - DNA, 723 bp, Homo sapiens
ggcctctctggtgtcagtaggaaatcctgatttttagctacggttggtgtgcactaagtcatcttcagaagttggtaggattctgtgagtccagaggacagagcttatagaggcattagtattgtaggactaattgtggatcctgggtgccctgttaaagtaacccttgtcatcatttatgctaaagatgatacccttctggcagtttgccacagtacaattcagatgcatctgcttttaacccttttccgttatcattggaagtctgacagtgcgctgcataaacaccttgagtaccacagcattccgtaatatcaatttctagaagaagcctctttctaatagtagtgtggccggtgcttattaatcatctagctactgagttactgtattggattaaaatatataaagagagagcacaccaaatctatgcagattcctttatcctagtatgtcagtttccttttctatctctcatttttaccttatttactgtaacaaagattgttgattttaaagacttatgggtaccgtgctctctttttagttaggtaggttaaatgagtattcataaaagcaaatgttatttttctacattatgcagatattgaaattgtgtattatgagcaccagtttggttaagtactttttgtggaaccagttagagctaatatctaaaaaaggaagaaaatgatttgtggaaccagttagagttaatatcta

SEQ ID NO: 133942 - DNA, 372 bp, Homo sapiens
ggctcactggaacctctgactccctggttcaagcaattctcctgcctcagcctcccgagtagctgggattacaggcatgcgccaccatgcccagatatacctttttttttttttttttggatttttagtagagactggatttcaccatatcagccaggatggttgccaggatggtctcagtctcctgacctcgtgatctgtctgccttggcttcccaaagtgcagttgcaggatctcggcttcctgcaacctccgcctccaggttcctgcaccctctgtctccggtgggctgagctgaggtgggacagactgacgcggagaggaagggaagccacctggcctgaagatcctgtctctaagatcaggttctga

SEQ ID NO: 133943 - DNA, 700 bp, Homo sapiens
tagttagtgcctgagttagcaccagaaccaaagtatcccaggtcccagtctagttctagttttacttgttatgggtaatagctaaaacagaacattctggaatgtgggaataatgaaacagtattttgtttttgtttcgtttgtttgttttgagacagaatctcgctctgtcacccaggatggagtgcagtggcgccatctcggctcactgcaagctctgcctcctgggttcatgccattctcctgcctcagcctcccgagtacctcagctccctcagcctctgggactacaggcgcccgccacaatgcccggctaattttttctattttttagtagagacggggcttcaccgtgttagccaggatgatctcgatctcctgacctcatgatccgcctgcctcagtctcccaaagtgctgggattacaggcgtgagccaccgcggccagccgaaacattattttaatgcttgtcagtaatgagttaaaataggaaaattgcaccatgattcccatctccacaatacctattcatatatgttccatttgtaccaacaacaatgatttttaaaatatatgcctttttgtcctttctttgcctcagttaacacaacacaatgtattgtcttatggtattctattttctcatatatttgttattcaagttttcaagaaacaatgtaaaaaatttagttactaatc

SEQ ID NO: 133944 - DNA, 307 bp, Homo sapiens
cactgtagcaaatgtcttggaaatcagctagtctgtgtctttggtaggccttaaattactagtatgttgaaaaatctttgtggtgatgataaatgaactaacgtttattaagtgcttcctgtgttccaggcactgtgccatgcacgtcacatacacgttcttatctaatcctcatgatgatcccagtagacaggtactatatgaagagctttcttcagggtggaagatcctgaaggcacagagggtgcatgaaggcagttgctgaagtcctaccagcccatggtagggctgagacttgcagccagaa

SEQ ID NO: 133945 - DNA, 506 bp, Homo sapiens
atcttgggctaggcccagcctgttgatctgattttaagttggttacctctgtgaataccctgattccaaatatgatcacagattgaggtactggggataaggagttcaatatatcttttttggggagaagatgggacacagttcaacccataccaccaccaacatgataacaagtgaaggctatttattcagcacttgctataccaagagaatccaccatcatcacttgtgtttggcagagactcacaacaggcagaggagtgggaaagcgctatagtggaaaaaagagaaggttctaggtatgccttaactggaagctgtggcatggggaagctgtgggcaggctaactagaagaggggcatcatatgtgattggttgggagtacatgtatggctttccctcattggtccttagttgaaagcaagaacaaaaattaaggaattgtgagttattatatttagtaagtgctggccatttggagccaatcggtacaggggtattattg

SEQ ID NO: 133946 - DNA, 444 bp, Homo sapiens
atcccccccgatagccggacagaagcagaaagggattagtggcatcatttctgcttctgtcagcaaaaaaagaccgattaccaagaaatattcatgtcccagagttatcactgaaaagtctctttgagaaatacgttttcattggactttatgagaagatggaacaagtgcccaagttagtccagtggctcatctccattggtgcaagtgttgagactataggaccgtatccccttcatgccctcatgcgactctgtatccaagccagagaaaaccatcttttccggtggttaatggatcacaagcccgagtggaaaggccgcattaaccagaaggatggggatggctgcactgtcctgcacgtcgtcgctgcccactccccaggatacctcgttaagcgtgagtagtggcattacccagagggtgcgctgtggctggctggtg

SEQ ID NO: 133947 - DNA, 697 bp, Homo sapiens
accatgaggcaggcagacattagagattactctcttgacattgtcctctactttcttaggacccttgccttacattgtacttggaatggcaaaacacttgtggtgtaatttgggagttcaatatggttagtttgggagagcagaagctctcttgagttaataatgtattgcagagcaggcatggggacgtctaggaccttggctgttccctccccaaagctatagaacatcacagaaccagggaactgtggggctgggagagacctctgaggaagagctcctttttcaaccatccattcacttgctcactcaccaacatcttgagcacatgctatttgaaagtcattatactacatgttgctcttgctatggagactaaaaacaggtatgacttctgctctcaggaaactcacaacccagaaagccgggaaatagcatgtcacacagctggtgggactgttgggagagaaagcagtaaggatgaaaatgttttcagttgaaatgcctaattctctctagacttccaggaaggggcctgacaattttggcacaaggactaccttctttccagtgcgtggctcatgtccctgggtctggcaagtccagaattagtagtagagaactcttgtccaaagcactaatttggaggctgagatttattgttgtcacagcacctggcttacaaaaataagctttg

SEQ ID NO: 133948 - DNA, 280 bp, Homo sapiens
cactgttaccataagtggggaataacttatgggctgtatattaataatatatcaatatataattaataccaatgttatgatacattaatatataattaatatatcaattatatattacataagctttattagataagaaatttaaaattagagccttttgcggtggtacccacctgtaatcccaactactcaggagtggagaatcacttgagcccagttcaaatccagcttgggcaacatggtgagaacttgtctcaaaaaaataacggaataactaagt

SEQ ID NO: 133949 - DNA, 833 bp, Homo sapiens
gtccttagtgatccttgaagagtagctgcaactggaagacacagaatggagagggtggatcatgcaaatgaaaagatgggctccaacattcagcggaaggaatttatggttggttcccccgtttttttgttggcggtggtggtttattttcattccccatgcccggtccttctgatggcactcactgatttggctctagggcacaagtctatgttgcatgcagtcctggtgtaacaatcaattgaggcatttcctgggcgaggagctgggacacgggccaagccaatcagactctggttcccccaggacgctgagtcatagtggagccatgccaagacggaaacagctgacctgctgtgctgctgccatggctccctgaggagtgtccctcagttcctaagaggggactgtctgcacgctggctcttatgggttgattttgcactttttctttgattctgagagctacccacatcctctccaattcttgctccagtcaaccagacacagtttctattgcttgcggtggaagacatgcccatgcagaaggcgtcaaggctcttgggaagatggggagtggcatgtgttctcatggtgttcacagctgcacatgggaaacacctcattgccttcgcacaacaaacccaagagggagggggttccttccccaattctgcaaatggaaaaactgaggctcagaggggaaattgatctctcagtgtcacagccaatgaatgacagagggaaagttgtggtccagggctgagtccgggttccacagtgtgtagatgaatttcttcaaccccttcatcatgtgacaagagccacaaggtc

SEQ ID NO: 133950 - DNA, 245 bp, Homo sapiens
agacaataggggaagagatttttatgttttgttcactgctgttttcacagtatgttcaatggctcttggcacagaatagacaatattcgttgactgaatgctattggacattatctgtttattgaattagtgataaatattttaccctacgttgatataaatggacatattctacaggtaacaaccctttatttctaaagcatgatctcaatgtattataaattactgaagtagattagttcttt

SEQ ID NO: 133951 - DNA, 377 bp, Homo sapiens
gctaatatattttcttagtgttaaagaaaagaatgttaaggagttactcagaaagtaacttgaacttttggtgtgggctgttttgatgattgttgggaagattttctttttttcttcattcctggggccatggtggctgatcatccaagcttggattaaactctgttccttgtacttttccttctcattttaggttttggagtcagtatacttatattaccaagaaaataaggttcctccaacttgtaagaaatattttctagtttcagagaattatgaattggtaaagattgaaaaagatggtatggatgtgtttgaattattcacttttatggtgtatagtcttcactttccatgttgtgttttgttggactcaa

SEQ ID NO: 133952 - DNA, 456 bp, Homo sapiens
tatggtggcttacacctgtaatccctaatttttacttctgagaaatgcaggattctatctgaactgggctattttttttttctgaagtctcttatattctcttttttatttgaattgacttaatctccaaccaaattataaaaaaggtgaacatgtataaccccaaatctcaatcccagatctgtcttaagtctacatgttatcccagcactttgggaggctgaggtgggtggatcacctgaggtcaggagttcgagaccagcctggccaacatggtgaaaccacgtctctactaaaaatacaaaaattagccgggcttggtggcatgtgcctgtaatcccagctacttggaaggctgaggcaggagaatctcttgaactcgggaggcggaggcttcagtgagccgatatcaggccattgcactccagcctgggtgacagagtgagactccttctc

SEQ ID NO: 133953 - DNA, 393 bp, Homo sapiens
  misc_feature (353)..(353): n is a, c, g, or t
  misc_feature (366)..(366): n is a, c, g, or t
aggatagaaatgtcacccaaaagcaggatggtgcagacaggtctcagaggacaggtaagcaaataggcaggatgtccagcatttgagagaaagtgcatgagctcagtctgaaagcagattccatatacagagtccaggttaggagccctgggatttagggaagaaagaaggagtggactgatggacaaagtccaaagacacaggccagactgcagagtggggaagaaggagctatggtggacatcattgaataattcatgggctttttctaattctccttagtccttctagaacacaggtcaacagatgtttacgactccagtccccatgatctaagtcaaggtcccagtggngatccatactgtngatggcttgctgaccgatagggaattt

SEQ ID NO: 133954 - DNA, 717 bp, Homo sapiens
caactccttcaggtcctttttaaattctctaccactactctcaaatttgttagctataaaaacaaattgtgaatcagtaaaatgttagataatgtgaatcattcctaaatttgaacttttttttaggcttggtaagttccccactgtctcctattacagggcttcttaacttggtatatgactaggcttgggagagggatatgaagccttaaattctactgcagactttcaaatgtaattatttttatgggaaatgcccacaggtatttttattgtcagattctcaaagtagtctgtaattcctaaagggttaagaaccactgtctgattgctgctaaacaagcaactttctttctttctttctttcttttttttttttgagatggagtttcgcgcttgttgcccaggctggagttcagtggcacaatctcagctcactgcaacctccgtctcctgggttcaagcgattctcctgcctcagcatctcaagtagctgggattacaggcgtgtgagccaccgcgcccagccaaatcttttttttttttaaacctctgtgaaatttgtatagtttaggcagtgagtacgctagattttcattgaaaggggtgacctttgggctagagttttaaaattcaggtagtgactaatccaagtcttgatttatgggcaggacttggacctgcagagaaagtggcatttcttttcagatgggaata

SEQ ID NO: 133955 - DNA, 720 bp, Homo sapiens
atccagagactggtgcagtcataaaattgtcatctgtcaattgtgagataaacgtggaaagtgagtaaatatttggaacttttatagcaatttgacatttccataacattctgttttacaaaattatcagtccataaatgattgagaattgaaaacaaagtttgttctttcccagaaataatttgagacaagactcacacttttcaagacatgagacaagtgacaatttaaataagaaattcttcacttgcacctctctgattagaatagcagaatattcatactatagcaagatttggcaaatgagggaatcaaaattttctaatgcctgtaacagcataagataatttataccagatatgttaaatgtgcagaagccttccaacactattcagtctttgttaaacttcagtaagttcatcctagagagtaactctgttaatgtaacaaatgtaggaaaacccttatccatggcaaataccatactgtcatcaccatttcacctccatactacctgtaggatggtgagcaaaatgcttatctcttctggacatgatgtttcaaatgctgatggtaactaataatgctgttacagagattagatggatttagtatgcatcatatccttggaagagtatctggtatgtagcctatgcttaatacatattagctattgttcatattgtctttattattagtattactactggtgaattctta

SEQ ID NO: 133956 - DNA, 389 bp, Homo sapiens
ccgccgcaggaggacacctctccaccaatgaggacacagaggactgggtaaagcggcagcttgtgcaaggtcacctagctagcaagtggtcaagccaggactcaacccagggcctctgacacacgctaggctagcactttctccaggcagaactgtgctctgcttttcggtctgggcttgtgactgctgcttagtaagcaataggatgacccctggtgttcacttaaaatgacagcagggccgggctcacgcctataatcccagtacttcggaaggctgaggtgggccgatcatttgagaccagcctggccaacatggtgaaaccctgtctctactaaagatacaaaaattagcctggcatgatggcgcacgcctataatcccagctac

SEQ ID NO: 133957 - DNA, 320 bp, Homo sapiens
cgagagggagggtcgtggctcggcccctgctcagacaaaggctgggaggcgggagacatgcacttccccttccttttcagccaggcgcgcgctgataccaggcccacgtcagctatttttggagccttttacacgacagctggaggagcgtcctttttaattttccccttttgtttggccgcccccacccccaccccttcgccttcatcgctgcacttgaggctccatcctggggcctctccttgacttgacctgccttggcaggcacatgccctccctgcctggctcactcgccgcagagacctggcagcccgcgcaaa

SEQ ID NO: 133958 - DNA, 258 bp, Homo sapiens
agctattctcctgccttggacctcccaaagtgctgggattacagacatgagccaccataccccacctgagaattttaaaaaataatcagaacattactgacatgtgggacaatttcaaggagcctaatgtacatgtaattggaatccctgaaaaagagaaaaggaggaggaggaagtaaccaaattacttaaaaccaatgataaagagaaaaaagcagccagataaaaaagacatattatatacagaggaacaaagat

SEQ ID NO: 133959 - DNA, 297 bp, Homo sapiens
gtagaatttgccaatttctgtagtgtaaatacttctaccatggccaagtttaagctgctcacatgatgtccctcaacgtggagcggggacatgtgcacatttggcttatgagcttgcgtatcttggttcccacgtacctttcaccctgagggcactgggtgacattgccaggtgtctgccaccagggcctgtctggatgtactgatccctcagtactctgatactttgtagtaattaaggtagtactgagcactatgtaaatattatactcctggcttatattttatgtgcatctga

SEQ ID NO: 133960 - DNA, 803 bp, Homo sapiens
  misc_feature (69)..(69): n is a, c, g, or t
  misc_feature (85)..(85): n is a, c, g, or t
gtgatcttcatctagtacagcagtgagcatcatgctttcctctttccgtgtttttacgattgtctgacntgaagaacccggcgancttggaagcttagataaaggcagtaattctatagaaagttaaaatgaatgtttgaatagcaaaactatttggtagttttgaaagtaaataaaatgttttgctgtcagatagtgtttatgtggagctgaagacttggatgcccctttcaagagcacagcaccattgcaaggggctgctgcaaggacctctgatcgctttgagggcccttgtgcttagggttgcctccgtcacacacacctgaccctgcactgggtgctggatgttggagataggaagtaattgggagaaggaggggagcaattaactaaatacagctgaaataaaaggctgctctaagtatcatgggtatctaagagggtaattggagagttggatttttttttcctgtggactaatcagtaaccattattttgatgcatgaaaagaactacagataactaccaaatagcagttagctttcaaaccggcgctcccaggaggaagtgtggcaactattcagaagttcactgtcttttgcaaaggctgagtactgaagtgacacacttcatttactagagtatttgcagtaggaaggtgacctaatgagaacaaatggtaaacttcaggagctttctcatcttctgactacagggtggtgctacagattacttgcctgtacttgatgcacaagagatgtgttgtgacttgttagtagaattaatcagaaaaacacaaaagt

SEQ ID NO: 133961 - DNA, 825 bp, Homo sapiens
gcatatatttgttttttagtgtggtcttaggtatttattgcaaaagattgaggacaagtagtataaccatattttattagtgaggtgttatctcattttaatttacatgaattttttaagttatttatttacttttatttctttatcatatcttttcctctatattcaagaaggtacaggtatttggggcataatactgagattctcttcaagtcaaaggatattaactgagtgcttgtcatgtgaagatcctaaaacaggtgctaagggggataaaagtataaaataagatctagtatctgttttcaagggatttagagtctataaggaagaacagataacagatatgaaaaaactctggcttcagtttttctcatttgtaaaaatgatcagatgtctcatttagttaaatgacagtggaaaataagtctagagtgatattcctgttattagctcagataagtgggtgcaaggcaaatgagctcttgaattggaagcttatacaaagcccacactataaactagttccgccttcacaatagaaaccttgatggaagtaaaacagtcaagttaataggtaatgaaaatgtgtgtgtgagataccatgcttaggagttatgaacctcttgatcagaaatttaattatcaggcatattcgtgtattttaaaatgccaggtaaacagcaatattaagagctaattaaaagaatgttagtatttgctgaaactgcataattggagaaagttaagtttaatttgagacattggtagagaaagttaaactttgcttgtttaggccagtgcaggagcatgtttaccaacaat

SEQ ID NO: 133962 - DNA, 390 bp, Homo sapiens
agagcatcatttagcctttctctctttttctgtccacagagttcaacagagtgcagtgggagaaagcatacagttagaagtcatgagacacaaatgcttctatcctcatctctgcctaatgctagctgtgtgaccttggacacattactgccctctcccaactcagacttccttacttcaaaaaaaggagtaataggaatcataattcctacccacctcaatggattgaaaggagctgatgaattaatgtatgccaaggtgcataaataattgtgaatgctttataagtatgggacaccaccgccaccaccatcatcatcatcatcatcgtcgtcatcatgatctttatttcctcttggccatggtgtagagcattccagtaagaagtcg

SEQ ID NO: 133963 - DNA, 467 bp, Homo sapiens
gaatccatgttttcaaatgctctgttttctctcaaagtccctgtacgcctcatgattagttgaatccaattatagaccaggtctggtttgaaatatcattaacataataattattatgggctgtcctctcatttaatcctcacaacaagcataagaggagataccatttttatcctctttttactgataagaacacaaggtccagagagttaagatgactttctgcttacgtggcagagctcacatttgaacccagggctgtgtgactcccaaacctgtgctccttattagcctccagtccccatactaccctgtgatgggtgtagggatcattcttcccttgctacagttaaggaaactgaggccaaacagaagagatgttttcctcagggtcacatagcaagttcatggcacagctgggtgaacccaggctctgtgtctcctggccaaccgtcactcccccactc

SEQ ID NO: 133964 - DNA, 330 bp, Homo sapiens
aatcatcgagctcggcccctattttagaagtttcaatagcagctttgtgatcttctgatgggggagatagagaatagtgtgatgagtgctatgaaacagagggatgctggagcatcagagaggaaacaaggggcagggctggggaaatgttcctccccgaagggatgaggtctgggtggagtattagaactaaaaggagttgtacagacaaagaaggggaaaagcgagagttattttaagctggagtgtgtgtacagtgtggtggctcagtgtgtgcgaagaatgggtgtctggaagcattgtgctattgaaacttctgcaggtaactgc

SEQ ID NO: 133965 - DNA, 533 bp, Homo sapiens
ctgtctgcacctggtggtctgttctgtctgtccctccagagtgccagctgccccacaggctccctccaggctgagttcatggtcctgccctctagtggccagagccagcttcacagggtaagaaccagctaagctccaggggctttccaggaaaagtgtcccttgcaaagggtgtggccttttcaccactcccaatagcaccctagaaatggcttgaactttcccctccccagagctccgcagagaacacagccagcagaggacacattccctgtcatccagaaatgggtttgattctcagctgagggacagcagaactggtagactgtcaggccacacagctgcctgcacagcaaccccatgcttggtgggggaaaggaaggatggtgggggctggcaggccacgggccgggcaggacagcgaggctcactggaggtggtgcactgtggaggggcaatgtcaggggacagctttctcttgttgggccacaagactccacaaggacagcacagtgactgattcccagcactac

SEQ ID NO: 133966 - DNA, 361 bp, Homo sapiens
cgatctagcaggatctccagtccgttcgactgagcccttcattttcagtaggtagtttttaaattgtcagagcagcaaaataagtattatttgtagatcaaatcattcctcttccaccctcagctttcttaaaatacatcagtggcttcccattgcccttaggataaaaggctgaaagaactacagggctccaagtggccaggcctctgtctgctttgtcagcctcatcagacctgtccctcttatcccctgcttttcttcttctcattttgtgcccaattaaattgtgcattggtatcaaaactgtaacacatctttccttccccagctctgtagaacctcagctcagtcgaacggactg

SEQ ID NO: 133967 - DNA, 302 bp, Homo sapiens
gcccgtttaactcccccatttccccagagctgttgtgggtccaaaaatgagcaccagtgctcagtagtcccaggcaggttcccagctttctccccttcagcccagcttctgtgtgctccctccatctgccctcagcaccttccctctgaagatgtgttagaagctcaccagtcatctcaggccctccgtgggagctgtatcatctggctgcatctggccggccatcccgcccttccaatccacatgaacttcttatttctgtctttgtccttattactcagaactcgggccttggccttgac

SEQ ID NO: 133968 - DNA, 138 bp, Homo sapiens
aaccccctcttcagggatgatctggcagaacctagaatccacatgaatgtccctgtggctgtgggggggcagtgggcatggagagtgaggatggagaaggactatttctgaggaccagtaggcaggatttggtagcag

SEQ ID NO: 133969 - DNA, 307 bp, Homo sapiens
cgaaatgaggtcctcaagtgctggggcaacctgtgaatttgcgtgctgcttatttatcactgtgcctgacatggagtgagtactcactaaggtgggctccttttcctcccagcaggctggtgggatcctgctgtccctcttctcccagtggttgaaagggtatcccctgtggtctttacaaatgagttaggaagtcctcaggctatgtcggactcatgggtcatgagtcagaatccaatcattttaaagccatagcttgtgtttgctcaaactttcccttgacagggcgaacacaggggtgcacatc

SEQ ID NO: 133970 - DNA, 232 bp, Homo sapiens
tgatgatgtgtataattattaccagaccaattgaactgtgtgtttcgactgatcataacaatcccaggtacagctgatctttctagtgtgctgttagtggagattggtctcagatgccttgtgttaacagtggtgggaatactaataatgatgatgacatgtgttacagatgcccactcatttaattctcacgaaagcccatatccacatcacctaccatcctttggcctgt

SEQ ID NO: 133971 - DNA, 187 bp, Homo sapiens
actctgggctcccatgtgatcctgagtagtacgggcatttagcgatcttttcctgatttgggagcactgtagtagtgccttctgggccttctccaccacccaagtggtaagctccttgcaagcaaagcttcgtctgacacattttagtgtcctgactccaagccctctcctgtcttcccccacagaa

SEQ ID NO: 133972 - DNA, 870 bp, Homo sapiens
atatacaaatgtcaaacaacatgaagataaagaaaagatcaattgtttggcaagttggtgctcatgtcatctttgtgagagatttcagcagagtggtgtgaacagaagtcagattgagggggtggaagaaatgattaagagatgaagaaatgaagtcatcaaaggttcaacagtctctctgtggtgtgtgtgtgtgtgtgtatgtgtgtgtgtttgtgtttagtagcaaaaaggaaagagggttggtagctgcaggggtaatcagagtagaatatttttatgagccagaggtcttctcttcatgtatggtgagaaaaggaaaggaaccagaaagaatagtaactattcaagatggcgaggagtaaggtgatgattgatgatggatcatgtgttgtgggatcagggtctctttagagttaatataaatcaaatttcagggccatgaagtaagacagtacattcatattttattgtagttaattaattctcttaaaaagggaatataaagggaaggtaatagttgcatatttatagattgtagtctaatatgagctgatttataaaatgttggcattatgtttttgaggtggtaggataaagaaaagaaagtgaaaactttaagtgtagggttgagtttatcaggaatgtgtttgatatagacttgtgagtggtaatctggaatatatctagtatctaaagatactaaagaaaaacaaagggccagtaggccttataggagaaaatggattcatagctcttaagggataaaagtgaaaaaatgacagatcaatatggctgttgttactagaaccattcctttgtttggaaaaagtgttagttactcttaaataatttaatgccaaaacaaaa

SEQ ID NO: 133973 - DNA, 541 bp, Homo sapiens
gagagaatttggtctcagggaaccagaagagacaccacatagaaaaggttttgaaagatatttgctgttgacgaaagtgaagaacagagcctttccaaggggcaggataaatggtgtgtacaaaggcctggtgaccttggcaacacagagttccaggaactagacatggcttagtattgctgaagcagagagttggaaggggcagtactgcacagtggttaagagggtcgttctgaagcccatttacctgggttaacatcttgactgtatgagattggttatgttaactttggacttcacttgctccgtctataaaatagggataagtatttatcttataggattgttgtaaagattaaaatgcattcatatgtgtaaaatgcttaatgaaatgactggcatgtaaaaattctcaataaattttagctgttaatattactgctgtcattacaaatgaagatgagtagtgggtggtgaagctgcggaggagagctgaggcgcttggcatatgagggagtttggttttgatcctgtgctggga
